United States Patent Application Publication US 2015/0240253 A1 - sequence listing, part 19

SEQ ID NO: 86899 - DNA, 832 bp, Zea Mays
gtgaccctcgcgctcggattcgcgtcggcgctgcgcgccaagtaacgcacggataacgacccatggtgaaaagatctcaccgtagatgaagtcggagcactgtggccgctcttttgcctcatccacttgcgccatgatgtggccacacggccaccgccggtgtgaccgccgtttaccgaaatctgccacgctactgaccctattacctcgtcgcaaggtgtcgtgtgaattggttagtcatcgtctcaggtctctaccccagtaaatgccacgttatgcgactccggtgactcacccctctctccggccgccagccttctccttcaaaatttggagccaccgccctcgaacactataaattgagtgtgccgctagctccgttaggttgtcacgaagccagagcacttgcccttgcctccgattagcctccatagcgccataattcctttcttcccccaattcggttcttcgcgccgtcgtgagccaccgcaccgtggaccgtcatctccaggtccgttctcgccctcctcaccctagttttagcacttaggcatgcttggcatgcttgtcgacccgatcaattgagctagaccgcatccaatcaccgggaacacctcggtttgtccttagcgttcgtcgtcgtcgtgggcagacaagctccagcctggatttgtgcaattaacggagggctttgggtcgccgggggtaggaactggtgtcaaccaaattagggcgtcagtctctgcgcattccggccagtacaggttcgccggaggacgcgctcactgtcgttcacgtcgtggacttgactctgtgaagaaatagaaatagg

SEQ ID NO: 86900 - DNA, 387 bp, Zea Mays
cagggatcaggtctatgtagaactccacttctctctctagcggcattcctggcaactcttctaggaatacatccatgaattcttctatcactgacatgctttctgctgtaagattaaacaccattggatcattggcgggtggctgagcctaacaagagactgactttccttggtggtccgtgagaaggactgtcttgtttgcgcaacttatgatgcctttgtgcttggttagccaatccattactaagatcacatcaattccttgggatggcaagacggttaagtctgctaagaacactaccccacttaaaagaattctgacttgggagcatttgagctggcatagaaggtctgaccctggggtttgggtgaccaagggaatttcta

SEQ ID NO: 86901 - DNA, 410 bp, Zea Mays
gtggatattatccttagagttagcatatttgcatgcttagccgctaaccaaaggggaaaacccaaatatacaccaaaccctgttaacttcaatttttcccactttcatgccttctatcaatagtttccttatatccacaaatcgttttgacaaatttctgtatggacggccgccttccttgaatatctggtgcttctttcactatcgggaggcttgtgttccatgaagtatgcaagcatcctcttatagaagccaccttggctttggttacaccctttattgtttataaaagaaacaaataaagttaattttaaaaagtgatatgttgccaactaacacaaatatgacacaggtacctgtagctgcatctgtgctaatatttagccagacaaagaatatgattacatctt

SEQ ID NO: 86902 - DNA, 573 bp, Zea Mays
cgggtatagtaattaggggtacctggattacgtccctaaacgtgctaaccccaaggttcccgtcaggcacattcctcgagggaaataaggtataaaccacgattcacctgacgcccctcttggcggtcactcagaactccgcctcgcccgagcctgcccccgaacaaggtacgagcttagggaaatcctcgtgccgtccgaggtcccctctccacaggaccacttttcctcctcgcctaaacctgactcgggcaaggaagacaaaccccgagccaggcctcagccaaaggccgcagaggatatgaacattcaatgcgcatacctaccccacgcagcgtcacaggcaaacaggaacgataggaccacgatcccatcggctttcagcaactacgatgacgcatgcctgagtacagcgtctactgtccccccacgccgcgtgccaactcctaataggacacgcatacgacaaagcgtgggatggacctcgaaggaaactacgcctagcttgatgtcgtcctcagactcgaaataaactccacctcgcccaagcctggcctcggctaccaactcccc

SEQ ID NO: 86903 - DNA, 438 bp, Zea Mays
cgtggtgaggtgaatgagaaattagaagtttgcccagtttgaaaggcatcaagacataagataaggcgtgttgacactcttgatgatgagagcaaacctcataggcaaagaataccaactaaaatcatgtggtacttccctataattccacgattgaagcatttattccataacaaagagcacaccaaaatgatgaagtggcataaggaagagcgtaaggtggatgctatgtagagacatccagctgatgatacgcaatggcgtaaagttgatggaacgttccgagagtatcactagacatcttttgaagcttttgttttcttggtttattattggggtcaatgttgagagcatgctcaataatacttttgtccaccccacataagtcgttggctgaccaagcgaagacatctttattgtggaataagaacttcaaat

SEQ ID NO: 86904 - DNA, 297 bp, Zea Mays
aacagcggcggcttatatagcttggacagaagcatatgatgtagcgatagtgtgttaccaactcgccaatagaggagatttcccagccgctacaacagcgagagggtgcaataccgaatggtccaagcaagcaggaggtggcaactcgtcgtgtgtgtcggcccaacagacgcgtatatgggcccgagtgggtgtagacctgctgtgtatgcagcggccagcgtgtgtgatgtacttaacctggtctggttactggctgggggtttttatggatgaacagaaactctaagaaagaac

SEQ ID NO: 86905 - DNA, 557 bp, Zea Mays
gtttattacccttaaccttgagggttcttatgcaaagttgactcgagtaaagggttacggaatgatcttggccatccgataagaaccgagggccaggattagatcctatctaaagcgaatcagtatgatgttatagccgttcgatcaaagatcaatgacatggatttaaaactccctagatccagccagactcgcatgatccaatatcaacgtcccgatttgcccactgaactattgcctcccattctattcccaaccatcactccgagatccaatggctcggacccgtcgtccccacccattagctccaagcgaaggcgtcgctgccctgctcccggagaccatgtcggagtaccgcgtgcgggcggtcctagtgcccgacaccacgtgctacaaggtgaaaatcgttcctaagaacatggagagtttaataaggcaggttgttactagtgctgtggcgcagacgttgctgtccatggtgagcggcaacacagtggcaaggcgtaactctgacgagaaattggagcgcggtggcactagccctgaggtaggcaagg

SEQ ID NO: 86906 - DNA, 542 bp, Zea Mays
taaatatgcaagcattaagttgctctattgaagttgctcttgtttggctaagtttggtttaggctataggaacactatatgcattgcattcatatatacattccttgaagtacttgcatatgtcaatgttgagttggtgtcaggaaagctttgtccgaggtatataggactgcctactatcttagccgagttagcagctgggcttagcacatgcaattgtcggaatctatgatcagagtacaccatgtattccatgtctttatgttgaggaagtatttgaggaatctagaccatcaaattgagctagagccaattcccgtgtagcaagaccagactctagagtgtcgtctgccgcatatcttagaatcctaggagcttgaggagctgatgcggcagaagtacccgaacttttcgttacgtgtgagttttgttgattcattaatctttcttgtgtcgttccgatagaagcgtcggaattcgaggtcgaattctttttaaggggggtagagtgtgatacccaattttcaaaaaaaagagaagtt

SEQ ID NO: 86907 - DNA, 831 bp, Zea Mays
gcaagattcgccagacacagggaacaacagccctagactgcgggttctaatctcaaattccagaggggctctttaagaaatgtacacggtgaagaggtatccaccaatctgggccgctagatgaagcacggacagtcgtgattaaatcgacccagaaggtatttccgattaaatccgcaccgcatatctaccatcccacggctatcctcctgtccaacactccggtgagcaattgcaagcccccctaagccacaatccgatcctaacctcagcgctccagataaccacgataatgagaattccagggagaggagccataccggttgaatagtcgagaagatgctcggccacgttcgtgcggatccatcgcacccgccacactccgatgagaaggggccaccgcatcggtcgattgctcacgcctggctcacactggtgaccgtcctccagtcccgacaagggtgttaaacgattgcggcgagatgaatggcaatgagctactctcccctctcaatttgtcttggcggcggcggttgatatcactagcggcgctagtggtcaaataggagtaaggcacggcgatgttcaagggattaggtcacacgaccatgcgcggagttcagctggctttagatgcgcgcccaggcagcgtcttatacgccggaccatgccaactaacggcccgggatttacgaagctccacgaccgggcctcaggtattagttgagcacgtagcgggatgacaacgtgggccccgccagtcatcgagagaggcatcgcaggcatagtagcgccactgaatggaaggacgctggcgagcgggcccccggc

SEQ ID NO: 86908 - DNA, 449 bp, Zea Mays
ccactagttaaatgtttataacttttatcttttaaacaaaacaacttaacgtatatgttcataacttatgaacataaatattaagcatggattttgtagtgttggtgtgtgcttgtaaggcttcttgctttttttttaatataatggtgtatttgtctttgtggatagatccaaaagaagagtgtttgagagagcgggagtgtaggcaagtgacgtgttgaatctaggcacgatcgagaactagcacacatgcagtttagagaggttcaaatcatagtgtgtaatattctacgtctttttgctacacattgattgatgaatagaaataaaacattataagttcataactcaatcgagcatcatgacctcctagcttcgacttatctcttggttctagtggaagttataacctattggtcctaatctacctttatgcctacccttgaata

SEQ ID NO: 86909 - DNA, 481 bp, Zea Mays
atcgaatgcacacttccttccccctccacacactacgcgatgatggacttgcagcggaggagttcggcgttggcgagggttgcaggcgagtgacagccgagagggaagtcccccgagcttataggcatgctggggaggagaatcaggggatgcccggtcgtgcgatgtgtgggtcagttacgatggttgaagggtatagagttgaaccctttggtccacaaggcagtgaggaagagcacagggcgacatgtgggggatgaccggccacgcaggtcccacatgtcagcgtctcatccatgctgggccgcccgtagggtgaagttgtgttgggccagagtggagctttgggcccaggtcggcgtggatgcccctgttttctttttattttattattcctaattcttttctaatcccactttaatgtatttcaaaccctactattcaaattcaaattctttggtgagtttcacatagagattaa

SEQ ID NO: 86910 - DNA, 409 bp, Zea Mays
aaaaatcgactacaggtgcgccggaccgacataataaacacactagaccaagtgcgcaaggcctttatgagcatagccaaatgtgcgaaggcgcacattctcatcatacaagctattacatatgtacagcgagggcatcacaccttacatcggttcaaccatcggaatgattctcatctccctatagttaaataacattatcctcagctcctcaccctcaaaaagacttcgtagctccccctcacctacactcgcagcggccggcaaggacaacaattcctgcttgccagccctgcccacacgaagccaaccgccgtccgcctcactcactctacgcttcgcaaccacccttcgccgtctacgcccagcactcggaccaggcacaacttcagcacccgcagcacgcggc

SEQ ID NO: 86911 - DNA, 573 bp, Zea Mays
cggaaagcccaacacgtgaaagcagctgggtctcttctgctagactagaagtagaaccccgtgtgggcaggaacagcgggggtgggcttaccctcctgcgtcttacgagcaatcctgtctcttgattttttcccataaaactgtcaggttgaaacggctatattttttccctttgctctaacagtttttttctcaatattctctcctttttcttgtccaccaccagtatttccctgatctcttctcgagtatactttttttatccaccaatgttttcccgatctctctctctttttattcaccgatattttttccatcttgcctcatcatccaacctcaagaaaccgccacgagagatcgaatggtgacacacgatctcaatcattcatcgcccacaaaagcccttcatcacatctcttcaatccaaaggtcttgtttggttcatggttcatttttagagtctcactctataatcttattattaggctcatggattttgtattggatttttttgcgctggaatctcgctatctctataatgggatatgtattggattttgcgcagtaaccaac

SEQ ID NO: 86912 - DNA, 368 bp, Zea Mays
gacattttgagggcctctgtcatgcttgttagcttggacgacatactcgtctcccttttactacctcttcttctcggactgagcaggattttgaccgggttcattgtgatatatggacctcccctgtactcagtctctctggatataaatactatttggttattttgcatgatttttcctattttctatggacttttcctcttcggttgaagtctgacacttttaccaccctcactcacttcttcgcctgggtctccacccagttctgtcacctggtccgtgcactacagtgtgacaacgaccgcgagttcaacaaccacgcctcccggtcattcttcctcaccagtggcgtttagttgtgtatctcg

SEQ ID NO: 86913 - DNA, 311 bp, Zea Mays
catgatctcagatccttatactggtggaccagaatgaagagggaaattgccaagtacatatccgagtgtgacacctgccagagaatcaaggccagtcatttgaaggcagcgggccctttgcaaccccttcccataccatcttggaaatgggaggacatttgcatggactttatcgtgggattgcccaatacctcccggcaccatgattccatttgggtcattgtggacagattgaccaagaccgctcatttcttaccagtgcataccacccataagacagagaaatatgcagaaatctatgttgatcaaat

SEQ ID NO: 86914 - DNA, 582 bp, Zea Mays
aaaatctattttctatttattttcctggatttcctaatctcctggactaggcgtcaaatactgtgaagcgcaggggtctcgagctaaaaattcttaagactctgcctaacccaggactagaccacgagttgttttcagtgtaatgtgggggctcttctgcaaaacatagttagcgaaggggtatcgtataatcgtgaccgtccgatcagaccgagacggccacgatcagaacatggaccttactgctttggtgcggacagagatcgttggatacgatttctatggtccggataacatcacagcgcgatccgatccgcaccctctgtcagccgatcgatgacacggattttaaatagttgagatctacacgcgtgcgcccgatcacggtctaacggcgtggattaactcggcgaagcagtacgctgagatctaatctggatcacacgcctagaatccaacggttcacactccgtcgtctacctctaagtctttctaccgtgacagtggcaaattcccccatgacggagcacaccggtgatcacccacaggcgcaccaacgccccgaaattgaaattaactaac

SEQ ID NO: 86915 - DNA, 742 bp, Zea Mays
ggcagggtcatactcattgggatcagctctgacaggatcacacccattgggatcaacactgacagggtcacacccattgggattagcatcagtagggacacacccatcgggttcagccctagtaaagagttccactagtacttcttcagcagcaagggcagaagggctgacatcatgatccaagcatgacactcgtcaaagtcgtctctttttctttttcttcccctcggcaggagcaactggatgactgacttggcgaaagcgttttgggcgagtaccgtcaggccttcgagtatccacggttttctcaggctctgggataattgcaacagccattgtttcagcaggaaccgagtcagaagaatccacaaccaacatgtctagcatagcgcttatctctgcatcacccggactcataggcatctcaaagtgaacttgcctctcatcgttgggaagatctccaagtgaagcaaccagaacctcaacttcttcaagagagggtcgaactctaagacccataccactgtcactagcaggaggatttgacacaaaatcgaaaaaggacttggaaggcggcagattccaagcagaatatgcaacaggagcaccaatgtttgataccttacctctaaggatcatttccagtcgactcaccaaatccacagcaggaatcctcttgttagtaacccgggttgaatcggtgacaccactatacaaataagcttggtatgctctatccttc

SEQ ID NO: 86916 - DNA, 510 bp, Zea Mays
taatgctctcatagagcttacagaccataatttatgctctaatgaaaataaatgtgcatgcaagcactcaaatggaatcaaggaaggcatcggtgtcagcctccactagagctgtggaggtattctcttcggtggcaatcatcttcacaacacttgcaagatcaagaggcatgccaaatgattcaagtgtggggtcttcttccacggcttcattgttggttgccatagtgaagtgggcctcaggtttttgtttgtgcatgttctttgccttgtatgcttctatgacatgctttggtgattggcatattttagactaatgtccccacacgccacatttgtagcatgtttggtcttgaagtccgtatggcttatgttgtggcttctctttgcttgttttctttctgtgagcattgatgggattgattgtggtttctttctttcccttgccagcaccatgcttgcctctatttctctgataggctttcttatcttgtacgaggcgacattaac

SEQ ID NO: 86917 - DNA, 705 bp, Zea Mays
ttatttatgacaataccaaatagaatatatccactagttcaaatctgacatctattacctatgatgctcaactttgtacagcaatggcatatttcagtatagaatttagaaacatacatgttcaccctttagatgagcaagttcccctttcatctcctccggaacagctctaagccaggcagctttacctgttgatgctgcttcaatttcagctatttttgatctttctccattaataccacctgcaaaagtataattatatgcaaataatgaagataatataattgattactctaattcacaattttttcggcatactgagatcaatcttgttcagctactcatgagtcactattttcctgagtaaagcacaacagaaaatggaataatgattaaaagcattcacctaatagactagcacaactaaatactacctggaaattatggttttatgataatactatgatgctaaacgctggagttacctatagagattgtatcgtttcaatagagactatatgattttagatgcctttgccctttctgtagaaacttcagctagctgcgcctgcaaagctttctatttacagaggacaaaaagaaataaagatagatcaccttaatgctccccaaatttcactcctagattttctcttaccttctgatgcttagcagtgaattatgaaattattgccatccccctat

SEQ ID NO: 86918 - DNA, 656 bp, Zea Mays
atcagcggtggcattgaccagggcagcgatagcctcggccaaagtcggtggtactggtggcggattgggagtatcttccctaccacgggaagttcccgcaccatcatgtgcgcgagtccgtgatggcatctgaggcaaagaaacatttggaaaaatataacatgccaacatacaccatcatatttacattaccaaattgtaatgattatacagactccagtgtacaactcgactttattacttattttacataagtataacacttagactatattattctagtcttcttcataatttgttgcttcatttcctgctgtaggagaccgttcgtcagcaaggttcatggaaggagggggccaaaaagatccagctccccaccaggtccttcatttgctgtacccaagggtccggctcccattgcagcaacgtctaaaggcacgtccgggtgcagtcgagcatacagtacatgtacttcttcatgtaaagtattacagtacacttgcaggctttcgagggacgcactaagctctgccacacgagctagagctagagcttcgcagtcccaagcgaaagaacgtgagttgacggcccaatcaatggtcgtatcccattctgagatctcatactgcaagcggttgccttcagctgacaattca

SEQ ID NO: 86919 - DNA, 279 bp, Zea Mays
gtgcatagtcagaggcattctaagattcaagagaacttgattgatctcgtttggtaagatgatgtagtgagactgcatggtcttgatgtgtctccctttggtttcttcttgaggaggctattctagagaatgcactaaatgaacttttggaaatacatgtcattgatgttgaagtgtctcggatgagtgagcccctaacgggcccctgtgtgttggccgctcttccttgtgatccacatgtagggggcaaggggaacactggttatgaaaatttagatc

SEQ ID NO: 86920 - DNA, 349 bp, Zea Mays
atttccactgaggaatctataatggctgcaacaaacctgcgggcctcttatgctctgccttgatcctctgacaactatcacatatgaccacatattttgctatctcccttttcatactataccacaagaatcttttcttcaggtcttggtacatcttctcactgccacggtgtatggaataagctatctcgtgagcttctttaagaatcagttcccgaattgatttgatgtcaggaacacacaacctatctttaaaccatacaacgccttctacgtcctcacggaaatctttgcctttcccatctaaggtcagccgtcgaatttcattaatcttctcatcatctttctg

SEQ ID NO: 86921 - DNA, 607 bp, Zea Mays
atttcttcacagcgtcaagtccacgacgtgaacgacggtgagcgcgccctcctgcgagcttataccggccgggatgcacaacgactgacgccctaactcggttgacacctattcctacccctggcgaccctaagccctccgttaattgcacaaatccggcctagaattcgtctgctcacgacgacggtgagaactggagataaaccgaggtgttcttggtgattcagtgaggtctagctccatcaaatgggtctacgagcaacaggaggcttgagggaggctagaacatcaagcagagaagcttgaactaacctagagagagctggccacgacgaagcgttcacggtgcgtggaaacccgattttggggaaatgcgaaattggaaggctctggtggacgatcagacgcgagagctggtgcacagggtgcgtaataacctagcggacctggttgatcactcaatttatagaagccaacatcagtggcgtccaatttggagaaggcgtgctggcggccggagaaagaagaaggcctctgacgtgagctaccgtggcagtcactggctgaggagctacggcggtcactggtgagctattacggctggtaa

SEQ ID NO: 86922 - DNA, 700 bp, Zea Mays
atgggagaacgcttcaccagatcttggggttactgttgtgtctataatcaaggtttagtgatgctcaaaatagtttcaacgaatagtgtccaatgaagagacgcaaaaattacatacaaggattcgggtgtacctggcagtggcagtagtagattatgggagatcgcttcaccagattatggtagatcgcttcagtagatcctggcagtagtagatcatcgcgaatcttccagtcgggccccatgaagccagcgacggcgacgcccgaggttggggtgggcgggtggtctgcatatgaaattgttacatcaacctgagcaccaaatctacaacgcaaaatctaggatagtttcttaactctgtggtgctaaaaaaattccatggtactaagaagctgacaaccgcaacatactgaaaacaattccaatgtaatgatggtgagttaaaaaccctcctggcatcctaaaacctatagaaaataggtcacacaaactggagcatcagtttaggaactaagggaataaatatgtgagagattttcaaaatatgaaggcaggaagaggcaagaacaacatagctgtaggaagaggtatgtttgttgtgttccataaaatgaagttgatgctataattatatgtggctagctgaaggcaatatgttaccaaggtacatgtaatcattcattaaatctcatctcacg

SEQ ID NO: 86923 - DNA, 403 bp, Zea Mays
tttttattgtgtgcagccagtcatcagcgtcgagcgggttgctggatccagcgaatgtgggaggcttgagccttagaaaacctcccatcctgtcctgaggccttccaccattagggcgctggttttgaaggcttctggtgaggacctcaatgagtcaggtttggttggccagaacttgggctaaatctaatggcagctccgaaggtgcggggaggtgggtttcactcccttctccaccgacttctccttcggcacctaggggagaccttgctccaatccctgaggtggtagacgtgattttatccgaggccatctgccagaggggagaaagaattactactatgcatatgccatattttttctcaaacatgttattttattcagcacccaagttcattacaag

SEQ ID NO: 86924 - DNA, 307 bp, Zea Mays
tcaagatgaaggaaattcgtgaagtgagtgtggtcgtcagatcaatggattaggagttcgaccgttacacatgtagcttaggggatgtaaatggagtacgctacctatgatgatttggtgattaagcctcaaaaccatctatcaacgattttacagttttggccttaaattctgatggcgcgatttctgagggaattagaggttgaacatggagccatcacaaaggttgtgtctagatgaaggaaatccgtgaagtgagtgtggtcgttagatcaatggattaggagttcgaccgttacacctgtag

SEQ ID NO: 86925 - DNA, 795 bp, Zea Mays
tcgaaattcgcggccaccgcccgctagcactataaattgacccctccccgaactccgtagggtagtaagctgtccagccaccacgaatcagccgcagtcgttcactggaatccgtgaatttcgaattctccccaaatccactctccgccaccgcaagaaactgctcaccgcggccagccctttctaggtccgttcatccctcactctcccttgtttgagcactcttgtcaccctgtgatgcttaccgagcctccaatttgaactaagagaccaccactcgacgggaacacgaccaaacgatcatggtcttcgcggttctcgtgggcaggctagaataggtcaccaattgtgcgattaacttgggggtattactcggggtagcttggatttggtgtccgccgcttgggcgcgccggtcatcgcctcaatcggccggtacagtggctcgccggagctcctccgtgcgctgccgtcgtcgaggacgtgtcgggtaaagaaatagaaaaccgaggactatgctgtaaactgtcagagactcgagaaaacagtaacggagcccacttcgagttatccaaaacgacgagggcctctgtgcaagtctgccagcacgtgcgcgggcgcgcgcacttctgctggtagtgggccgacctgggttgaaatcagcccagtactattcatctgtttcctttttctttttactccagagccaaaacaattttagaaaatggtagaaaaatgataaaattgtgaaaccaattttcctaagcttgttattttccctagaatttaataaaaa

SEQ ID NO: 86926 - DNA, 321 bp, Zea Mays
gacgccttcaagtcatcgatctatttctggagcaacaatgggttccactgcatcagagacaaagcttgttcgagaatagtggcaccacaggatttcagctgggtagatattccatcaacaaaagcctgtgatcatagacagatgagcagaaaaagataattcactaatatgaacaacgtagagcaagaggccgactcacctgaagattggagaggaacagtggtagacccagggcaggaggagctgagtcatggctcgacgagggaaggtcagcaggaatgatctgaagagcactatccaaggtgacctcagccccaccag

SEQ ID NO: 86927 - DNA, 376 bp, Zea Mays
gttggaggggtagggcggcggcgttgacgacaacgaagagggggagagcacatacgtgtgtgcagctactgcatccgtgagcacgaggttggaggacgaggttggcggcgtcgacgacgacgatgaaaagggggattgtgtgcgctacggcggaggcaaagcccgtggcgaggtggatcacgaggggaagaaggtgcaacaagcggaaaaaattgccaagtggagtggatgaagaggtggacgggtgatggtggttgctaacgcaggtaggtggagaatcgtggagcgaggcggtcaagaggagcgatgcaggagagagaggagcggtttgaagaagtcgcgagcagacgaaggggatgacacacgaagaaattca

SEQ ID NO: 86928 - DNA, 494 bp, Zea Mays
gtgggtgaaaaagactagatcttcgataccgaggccacaaatcatatgtcagggtctcgattagtgtttgcgaagctagacaaggaggtgcaaggaactatttgatttagggataacttagtagtggagatcaaaggctgaggtatggtgacattcaagtgaaagaatagggaactaagggaattcatgggcatgtactacattccgtgtttgaaggccaacaacattagtgttgggaatagatgaggctgattacgaagtctgtatcaagggcgatgtaatgaacatcagtgaggtagctggatgactgctcggtgctcgcgagggtgacacgaggaagtaatcgcctctatattctgaaggtgaacttgaagacacccatttgtctctcggcgcgcaacaatctgatggcccaaaatggcatgcttagttagggcatgtgaaccaaccagtgctatgaatcatgcatggcagggatctggtgcatggcctac

SEQ ID NO: 86929 - DNA, 386 bp, Zea Mays
gagatccgcgcgggcgtcggtaacagataacgtcctcacgcctctggcccgtccttcgcccatacatatactcaatcgtgactcccccacctccgccaatctatccgtatgctcctcgaccttgaaccgtgaaaaagagcacaaagccgtcgtacgaacaaagaagggtcgtcatgggcaacaccaatgtgcaccaccgttcggggtccggtccgtgcaagggagcttcaaagtgctgtacagaagaagggcgatagaaactacgggcgctaggtcatgagatcaacgcgaatttgtcgccggagctcgagcaccgccgcggaaccacacttcgccgtggccggggctgtccgtgcggcaatcaacagtgacattcctcccgtctg

SEQ ID NO: 86930 - DNA, 673 bp, Zea Mays
tccactcgactgcttctcctcgctccacgcacccgcgagttctcctcgtgaacaccaaactcctgttgtcatgctgcccccagatccttgttggtcccacctgcagttgctttcgtcgaggttttggggctgcgcgtggtagcctcctggtccctcgctttgtcgagtccgtcggggcactgtctccacagcgaaggcacgtcgtggcggcagtaccgctgcatgggcgtcagcgcgggatggccataaggagtaccgagtgttccttttttacctcctctctcattttcctcctctccgcctgacgtttcgtggtgtccgtctacggtttacctttcttcgtcttcctcggtcctacagatccgattttctcactcatgtcgtgtgtcgtccgcaggagatcaaatttggtttactcacgccgggtgccgtccacaggagattgtctaggtttgttctcatgccattcgtgaactagatcgtgtggaggcattcatgggtgcatgtttgtttaccattcagtttgcaggtatggcctctttagagaactctagaatcttcatatttttattttgattagtgcccttcttttcaatattcatggtgtctttttcgtatgtaacatgatacaaattacattcatgtcgtttcttttatttttcaattatttttt

SEQ ID NO: 86931 - DNA, 393 bp, Zea Mays
tggtggcggtggagctgcacccgggccacacggtggaatttggcgttttgaggatctcctcggctcgcgtgcaagacatgcagcagttggggtattttgggagtggagttggacgagttccgggggcagaagagattccggagccggagggtgagatagttgtgttcgaggcatttttaactgctggccttcggttacctgcgcatcgttttgtggcggaggtgttgcagaggtatgaagtgcagattcatcagttgacacctaacgtcgttgtggctttggcaaagtatgtgtgggcagtgacttcgtatggtggtcagccctccgtagaggtcttcgccaagaattattgtttacactggcagaagaggaaagttggaaacaagattgcac

SEQ ID NO: 86932 - DNA, 705 bp, Zea Mays
ggttgataaccagaggagaactggtgctgcgattgcggggttctagtcgtgtagattggaagccggatcgtctgtatgacatctccaccaaatcgatagttaccttcacctgacggaagatcgggcacccccgttcctatcaagtggtattcaaagactcaggtattaccgtcaggcttaccctagtttagtttaggtttttcatcctataactccagataattaccgtacaaaaaaattccgctgtcctaggacccttgtttagcctttgcaattttgttttcagtttggctttgttcagttcgtgtccgtggtcgagtcgtgttgctggtttagggtgtatcttcgtcgtagatcaactgccctcgctagccgctatcacatccacaattacccagatcacaagtcgatccacccattaatcgacttgccctcgctagccgccgccgtgccagccctacatagattgtagatacgccgctatcccatccaccattacccagatcacaagtcgatccaccccattaatcgctatgattgcagatagggaatttttgccctaaccgccgccttctagtcgtgcctccaaaaacataacttgaggtaccttccttaaaccgggcacaacttttcgctcaggtgtccaaaaaatctgaaatttttacaggagcttgttgacaccattctgaggccagccaaactcac

SEQ ID NO: 86933 - DNA, 707 bp, Zea Mays
taatacttaaaagtcattgtctggcttaatctattaaaccagagctcacgttggactgcggttgcaaattccgaaaagttcagggccagaccataattatttggactgaatagtaataacttcagaacgcgtggagacagcgggtatatttactaaaacattagggactcttctgcaaacatgccacgacgaaagggtatgggcggtttctggccgaccaacaagatttggccaccacaattaaatcgtcatctgaaaggaatcggtatatgattccgaccgtaggactgaagacatgtggctcaaattagatcaccccacaagccaaaccggtaagtcaccacaatcattgtatgatttcaattctacgaggtcacgatctaatccagagcgttggttatggatccaacgccatccaactagagtgcctaagccccagcccctatctgattgctaccgttgatcaccggatcaatggtggatggagtctcgtcttccatacggctggcaacggcggcggcactgcccagcacggcagcgccatggccgatgaaagtgagatttccgattccctgcccaagctttgatgcaaacggagctactctctacggcagtgatggcgaatctagggaaaggattctcaccgggatcctcggcatcgaatccactgcccacaaaaagagaaacaatcttgtggtggtgatgcc

SEQ ID NO: 86934 - DNA, 353 bp, Zea Mays
cgggaatgcacaccaaacaacaagttcagtttggcttttatgcgttttatataatattgatgcattacactagatgggcattcatctccacctaatgccgagatgttctaaaagcgtactaataaaatccccaaccacaatcatccagttgtggccaatgtatgctactgtggtgatttatttgggaaattttacgcacattacaaagaggggtttcatgcagtagctttggacttaaattaatgtagtggcatgaatactgtatctttttccttcaacgtaaaggattagtctcaacttacagcaagacacacaacgacatgttgctttgtggttacaattatgcaaactta

SEQ ID NO: 86935 - DNA, 675 bp, Zea Mays
aaaagccaagcaaaacccatccatttttctctcattcacacgggcatcatagattagttagttcggcagaaacccaacaatcattgagcagagcaagcaaagcagcacggcaacgagcaccacatgatcatgattgatgattgtagctccggaacgtcctctgtttgttcaatatgccagtattttattttcagagaatatccccattaccagcgatttattcggtggttaagcttgatcagtttattcaaatgggcctatgtaattatgcggagtctacaatgacgagaagaaacaacgaagaattaaacaagcaagcacggaactgttcaccgcctcatgttaacacattaagagtgacatgtaatgttcaaactcttctaaaaaaacagaggaaaggtaaaactaataaaagacgatagactatgtactcatgagccatatccgatggcagatcaaactgctgacgctgtagaaagtcagtatcatactgactcttctgtgaagtgagaagtactcacaacgcattactcctatggcatgtacatcagcccaaaacgattacacatgtattcaaacactcttttatttcagaacaaacaaaaaaaaacaatgttcttttcctctacacgaaggaatatctaattagcaaagacgtacttgcgcccttttttc

SEQ ID NO: 86936 - DNA, 566 bp, Zea Mays
gacagcatgtgtagagaagtccaaacctgctggccagagaggggagatggagagtccaaaagtctgactaggtggagtgctagactgtgtatggttggcagttggcacgacgactgactgtctgaagaggtggaggcggtgtcgtctgaataagagctacagagaacctggtgtgctcaaagagatgctagaaatacatctgattctctatcatttgacggtggtggaacagtgaaatgtcattcatagaatcatttgagttgtctgcagctcgaaaacgaacgagctcacgctctcggatggcctcatcctcctctgtctctctctctccagcaagtgcatcctcttggatctaatggcctctgtgacccagaattcgacctgctggacgtgggtcgacctcctactggggccgataaactccaaaggctaagcgtgaactcctcaaagttgccactatggtgattggatcagctgagcaaaaatcctccggcatagctgagcaaaggttttagctcccccttagtcatccaccaaatactagttggtattattctgcacttttc

SEQ ID NO: 86937 - DNA, 680 bp, Zea Mays
ttaggggattagggttagggttttgggatttgaggataccgggatataattacaaagtgggttctatttttctttttctcgtcctctacttgttgttctaatggggtaggaacatgaatctgagtcttaggaggggttttgcttggattcatcctaaaattgaaggtaacgaagcatctagggttagagtcaatgcccaaaatctagttctatcaccactgtgagacttctaggaccctagcttgcaattctagccactagaaactatagaacatagggttataccttcagagttttaggaagacactataacagtcggattccagtgggctaggactgatgcacacgataacggtgcactttcttttactaaccgtgtaaagactagatcgaatctcatgtgagtgtatggcatacgtttgttcgcatatcggtccttgctatttatgtatgtggtgttgacgtggacacgagttctctatatgactcaatccactcacaagtcatatgagatcaatccgatagttatgtatttcacgcaatgattttttctagaaaattcttcaaatcaaacaagattaacacaaatgatttcttctccattttgtaattatttgtttgatagaggtgcttcatgattacttatagattacgtaaacctttattacggtgtagaaagc

SEQ ID NO: 86938 - DNA, 410 bp, Zea Mays
caatagagcaccagcacatttccaaaaatttcccgagactacgacgacaaggcgtcgatcctaccacgcacataaaagcatcacaagcatatttacggaacctatcggttaacttgatcgacacactacacatgttcttcgcccttcaaaatttatcgcacaaccgaaatcatcccacttgctactgacaccaacaatgcttattgatctatcattcacaacacgaacatagttacacgccgcatactagtttctaacataatcctcacataactcgtaattcaactactcagtaacaataaatcacgcatgacaactaccacatcgaccggttaatttatttggacaccgcctgcctagcgtaccactagtatcccgcattttgactcgacttataaacatagagaaag

SEQ ID NO: 86939 - DNA, 1414 bp, Zea Mays
ggtaacatatctctaatgattgaacgcaatctaactcacctaacctcctagtcattttagcccgcgaaacacatactccatacaaattcagcccataggagtaataattaaaagaatattgaaagtaaaggaactagcataggttgtggttgtagtgttcatcttctgcaagtcaaacaagtgactatcttgtttcctttcctcacatagtgagtggagcaaacgcttggcataacacatccatccatctttgatggtccaatactgagctcacaagagggccacccatcgcctgtcacgagatagatgcaagaactggttagatcaacgtcgcgccgtaggtcgtttggtatggatattgcttccctgttgggcatgttgggtcacgattcttttgggttgggttggatttttttttggccttgagtctaggttttttttggttaggtcgggttttaggttaaaaaatataaccgaggtttgagtcacaggcacatttcatttttagggcatgtataaccgagaaaggtaatggatctctaatgattgaatgcaatctaactcacctaacctcctaaggttaagtgaggcaattggttattagccagtggaacgtagtatgaataaaataataggataagaacaatgcaattggttattagtcggtggaacctaaggttcatatagtccttgtaatatttttgttttttacgttcatcaatcgatgagtagcaaggtaatgtatagtattacatgtactatggctcaaattcctctaattattcgtatgttggctcccactcatgtctaagtacgtttggcacgatcacatacctatgccatgctatctcataattccctctcattttctgatactctttgtacccgggtcgaattgatgacgattagctttacccataacgaagttcgttgttcctgtctccttaagcacctctacgccacggggttccattatcgtgcctttgacaccgtgcatcttgccatctagacgaatctaacagctatgacgatagatctcgctttctatggacatgcatacacggggggaatcactatggttaacacggagaaggatcaaactcgcgtctatggggagtgtgaggtgggtggaggaggtaaagaggaacgagtcgatggtgatacggagtagacctgttcaatcatcgggtcgggtagagtcgggttttggtcaggtcaaggtcgagtcgtaggtcgtttggtatggatattgcttccctgttgggcgtgctgggtcggggttcttttgggttgggttgcatttttttggccttgagtctagcttttttttttgttaggtcgggttttaggtcaaaaattgtagcatgtgttcaatccgtgaattgttgtgggtcaaaactacgatccatattta

SEQ ID NO: 86940 - DNA, 309 bp, Zea Mays
aacggcgcacgaattaacagagtcgaaacacacaactaccttctgaacatagccttcgatatatcgaagcatgttgtttgtgtacagatagtgagtgagatctggcacaaaaccaaagcgatcacaaacattaatcagtggacgggcattaggtaattttgcttccatcaaaaagttcattatcttctcagcatcatagaagtttgactctctggttacacgttcaacttctttgatttgtccagtccttgctgctgcttctatgtacttgaaatggatatctgggtcctcgctgttgcatgtaaagaa

SEQ ID NO: 86941 - DNA, 1370 bp, Zea Mays
ggaaatttctaagtttactattgttatatttggtatactatacaagaacggttgccatgtaaccgaggcttatataaacatgcaagcgagcctagctattaagccttcagatcataatctaacaatcatatgttatatttaacacttaaactcgtatcaccagcttacacagctctataatagaaaatccttcaaactatggttgcatttacggttggtgttcatgatctaaactctcgcttgtacggacaagtgtaaaacagtgggccagcttccgctaaaaagaagggccgctcgctagtcactactgacactcaagactgaactcttaacgattcaaaagctcccaagatgcaacccgccgatggattggaggcaggcttttccggacggcattattgcacacgatgtggtaacgcatgtcctctctccttcctgcatgctgaaacagctagagaactctgaggtctgagctgatggatgcgacggtgagggagcccatcgaacatcatcatgccgcgcgctgaagaacgacttcactttcctgcggcgtggcatgtgcagtgggggtcggccggaacgcctgctagctagggatcagatggacagacaggtcatggagcacttgtgcatgcactgactgggaatggagatggtttgcttgcccgcaataatctgcgaaaggcccaaagtcacatgccatccatcgagctccagctccagcgctggatcagaacaagatcctgtgacctcgaccgacctgaacagtgcagtatgctggggcaggggggcattagaaacttgaaactgaaagacgggcccggccgttctctgaatctccggcccaaaaggcctataacccgcaatatataaaagcacataatagcatggtaacactatcaatttcaagactagatcatctcatccgtgtatcctacagaagatatccaatgagcagtcgaggctataacctacaatggctttaagatcttctttccttccaaaaggttgaatctagcagcttacctaccaccatccgttctattgccccacatcatccaaccgtgcatgccctctctcccgatatccggctcgcccctacccacgcatggcgtaaccaccctagctagccacccattccgcgtccgctgctcctttaacagaaaatatttatctttactattatataatataggagtttggtcggtttcttcgtgtgtcactgcgctcccgcgcgagcatcccaggcctccccgcgcgtgtttgcgtctacatcaaaattcaagacatgcaacaaaaatattaagtaagagtagggatcgaaccaacgccctctaccacaacaacacttgtataattgtattaaaata

SEQ ID NO: 86942 - DNA, 402 bp, Zea Mays
gtggcttgcctttatcctctgacaagtgtcacattccgatacatactgggctatctccctcttcattctggtccaccaatacaaaagcttcagatcatggtacattttggtgctttcgggatgcatagagaatttggagagatgagcctcgtccaagattttcctcttgaggtccctgcttttaggaatcaccaatctgcttttgaaccataatacacccttttcatcttggcgtaaacatttatatttttcaaccttctgatggagattcttcttgataatctgtactcccttgtcactgagctgggccatgatgatctggtcttgcaaagctggctcgacagaaatgtgagacagagcttgcattgcaacttccgactcaaggcatctgctaccacattg

SEQ ID NO: 86943 - DNA, 680 bp, Zea Mays
ggtctatttatcaagataccactattagtgcaatggctagttctgagtaggaagtttgaaaaatattggaagaaatcatccactacacttgttacctaatttctagatcctagatacaagaaaaaacttataattctacatgataaaattccatgacatctctaaagtttatgttgatgaacttgatgatgtcatcaagaaacggtacacagcactatgatgttgttgcaccttcatctttgaggcctaaaagtggatcaaatgatgctaggatatagataaatttgacctattagtgggcagtggagatgatgaactagacaacttatatgagtctagtgggcatgatgttgatgatatgaatgagttggagaagtatatggcatatccacctttgaggctcagtggtcagtttaatatattggcatggtggaagaataaggccgatgagtatcctatcctttcaacaataactcatgatttgctagttgtacaaatgtcaattatcgcttctgaatctgctttaagagctggtggacgtgttgttgatcctttccgtagatgccttgatcctgaaatgtttgaagctttgatatgcatgaaagattgggttgctacatgaataagagtttaaaaaagtatctcaattttttagttattgttcaatatgttaccaaaat

SEQ ID NO: 86944 - DNA, 810 bp, Zea Mays
gtcacttaccttttaaaagtcggtaacagagtgctaaataaaggtatatgtaggaaataggagatcaatgaaaagttgatcccatgattattaggttatgcatgcaatgattaaactaccctaaataaaattttcccctcttatggagatatggcgcgaaccaagaccactctgcgcaaatcaaccggaccacatggtgtaccccggcatcagctggcctctaggcatgaaggaagcagcagtggaagcaacgaccctataggggatttgaaggccatagtggagcaactcaggtctgaactatgccacgggtgtagggagcgtgcgcgcgatagccgccgcattgctgaactatcaacagaagttactcgcctgcagtaggaaattacggaacgcgatacagccattgactgggccataaactcgcactctttcgccttagattgtgaagccaaagctctagctcgagtagcagaacttagcgcatccctggaaaacctgcaagtgtattgcaacaccctgcatgaagaggtgcacgtattgtatgaccgactgcatccgagagtgccaccagaagttgcagcaatgggagcaggaccatctggaatagcaaatagaggacctgatggggagttggaccattttggggcccctccttccatgaaccttgcagatgaacggtctcctgaagcaggcagtggagcagctaaggccgaagaggattagagtagtataatttaagtaatgtccttatgtaataagtaaggaagtcaagttgtatactgagtatgtataattattacagttcca

SEQ ID NO: 86945 - DNA, 289 bp, Zea Mays
gcgagatcccgctggcggcgcctaccaacggcgccgcgactggcgaccagagggccgcgatcagcgtcggcgtgacggcttctatgaccgtgatcgctatgaggatcacaatcaccggcccaagctgaagtttccatcgttcaacggcgaatccgatcccctttcgtggctcaacaagtgtgaaacatactttcgtgggatgcgcacactcgacgacgatagagtgtgggtcgcgtccctacacttggaaggcgcgacattagactggtacttcggcttcgagctcgac

SEQ ID NO: 86946 - DNA, 371 bp, Zea Mays
catcaactctctgtagcaaagttgcagagttacaaaccagctacaattcgactatagggagcaaacttagttgagcactggatcatgctcagaattgagcttggagttgatgtcagtcctctgttagtctgaaaattcagacaataacagcctgacagccagattttgagcacgattatctctagatttttcttaacaactgagctcacactcttaagcaaagttgttctcctttgtttggtctacaattttgatgtggtgacctagggcaaaaactctatagtttgaaagttacaaggctccaaagttgagccaaaactctgaaatttcagacttagggtaaattctcaattagggtcctttttgcaaat

SEQ ID NO: 86947 - DNA, 1083 bp, Zea Mays
gcttatttgcaaaaagcaccactaaaaccatataggcctaagtctgaaattcagtgagcttgaagcatctttggagccttatatctctcaattcataaggaattttcctagggtcaatacatcaaatttgtagagctcctaaaggagtataactttgtttaagacatcaggcataagtgttgtacaaaagttggagttaaatggactcaaagtctggctgttagtcgactcagaatatgaaatcttactaacagtgacttgggatgagctttgggagctcttttgaagatgatccagtgagtgtttgagcatggctactatagcaagtttgtagctggattatagggctagaactttgttatagagagacttacatgttaccacacaaaaaacggagattaatgacctgcaaatggccctgtcagacagactgaatggtgttctgattgtacagtgactaaataagatcacaggttcagcccccctcaccgctggtgacctcgcacccagattcacgttggcgtcgcgattcacgcccggtcgaacatggataacgctccccggtgaaaaaacgggcactgaggatgagcttaaggcactgttccgccccagccaccgtgttcgcttgactcacgaccgattcagataagctcaccggagttaaccccctgccgctcggatgccatgtgcctagacgtagtacttcgtcacggtgactcgctctagcatgtccggtcatcaccggtggtcaggccacggtgaaagccaccaatcgtttgcgccagtgctctcccctctctcgatccggccgccagcgcgccattccaaattcacgagccaccgcccttgggccctataaattgagcgtgccatcagctccgcttggtagtcaagcattcagcgcacccactcgtgtctcggattgtccaccagagagctctaatttgagatttcccccaaatcggtcaagaacactgtactgtgtgtgctcaccgtggctagctctctacaggtccgttcatgtcttccttgctctcgtttcaacatccctgtatgctatagatgcttagcggcccgaccaat

SEQ ID NO: 86948 - DNA, 363 bp, Zea Mays
ctcacctcgcaacgacagcggacgaccagactagtcaacggcgaggcatgagaacggcaagattgctgttgcgccggggccacgcagaggactatagagtacatggccacagaaggtcttgcagaccaatgagacactgccacatggccacgtttggagggtaagcaattccaaacatgctacgtgctgtactggtcacatgaaagaaaaacaaacgtggggcctaccttggttccatcttcctcaacacctcgcatgagcggttgtttttctctctctcctctgttcacgacgcttggagagatggccggctgggcaagaatacacgcacgcgtgggggctgggggctccagtgctccacgc

SEQ ID NO: 86949 - DNA, 327 bp, Zea Mays
tggcggagagcatggacgtcgccgtggacacggagcagaggatcgagacaaggtgacgatggtagccaacaagcgggcgcgcgtatatacgagtcgagtcggcgaattggggccgcgaacggagatcgtgaggtgggggttcggggagggatcagactttggatagcacggccaatgtttagctaggatactttccacctgcttattttcgatcaattgccctccaaatatgccaacaaaaaaacctagtcacgcgctaaaataagatggccgaataaaatgtcccgaatgacgatgcaacaagcatcgcctattcattgtgtgatc

SEQ ID NO: 86950 - DNA, 391 bp, Zea Mays
gcagattcaagggcagcttccatactaggccttttttgtcaaaaatacacccattgtggtgctttgacaaggtcacaccccaagtatgattaatgatttcaagccttcctgcgccacaccatggacctggttacagatctcatgccaccagtccatgaaagctacatcgcctggctgaggggccatgttttggatattcacttgagatagcaatttaaaccataattccctagcaaagacacacccattcaataaatgatttaaagtttcttgagcctgatcacgatcacacaaggggcatctttcaggatggtccaagcccctatttgcagcttgtcagctgtccaaactgacgtggccgcgcggggcgcaggcagggtcaacgtggccg

SEQ ID NO: 86951 - DNA, 746 bp, Zea Mays
cgtggactcactccgaatggtgagccacgggggctcgaaggtggatctgagacagggggttatactggtttaggtcggagccctagtcagtgtagtgctgatcgtggtattgctcagagtgtgttacagtttggtgcttgtgtgttgttgtgttttgaagatgggggttttcttacccttttatagcctaaggttagactttacaatgagaacttgtattatgtcggggttgagttcgacctcctgctttcgtgcggcgtagccctacggtgtcgtctgctaagtcgtccatcgccgtacccctggtatggcgtcgtgtcttctccgttcgtcatacgggtttctgtagctattctgatactaacgtagtggtgcttggtgggtcccactgagtcggctcatggtgagttttagggacgccttcagtacaacttcatattccgtcatccccaatgtgtcaccttccatcatgcgtaggcatacgcatggtacggcatattgccctgtcccttctggcatatgggtcactgtagagatcccgatgccgaggtccccacaactagggttgactggtcccaccagtcagcgaggatactctccagaacgcgatttggcgtcgtgcttgacagaggcccttcaatactgctcccacggttcggtcatggcttgatgatgatctgtctcgttgtgccgtcgtggcttgatagtactaggtcggctctttccttctgtagatgtgctctcgg

SEQ ID NO: 86952 - DNA, 582 bp, Zea Mays
gggcaatgtctctttggatgctgaagatgctccacacttacatctagactatcctattgacatcaaagggtggacgtatcccaggatgagattctctatggctgaatattcgtctaagagaactgttgatcaattttctctttcaaatgacacaaacatttagtattttcatactcagctatggttcgatgtcttctggggcactcttatggacatcaaattccataagcatcaagtaattgactaggaatatatgcagggttaaacagtcatagaaggattacttgccaagtttcaggcatgtggattatatgagtttatgggacaacgaactgacttcaatgaactgactatcaagcaatttcttactactgctgaaattaatattcaagatcagttgattgtctggatgattgggtttaagcgttatgtggctacctttgttgaatttgccactgctaacagtctggactatgacatgatctctcagggggtagatctttacactaaggaccaatttgaagattatgctcaatattatgaacctgccaggctgggtatacctaggcatttcagtgagac

SEQ ID NO: 86953 - DNA, 455 bp, Zea Mays
ctggtctgtttggagctattagaaagaaaaggtccttgccactttacttgcaatttttccgctatgtctggattggctacccttcgaaggacaagatggtctggtgctatgttctggagttttacttttctatttcgccacctcagggtttctaactgatgtttccttttgtgctcgaccacctccagcatcagttcctctacgacatcctttgagactttctcattgtccgaattttgtgccgaagctataatccttgtcgagcccaacttggattctttaggggtaactgcttcatctccaaagaggagcttaaatggtgtgaagtttgtcaatcttgatacagaggtgttgtggtttcacaccactttagtaagctcttcggtccattttcccttcggcaatccaaccaaggattttatgaaccccaacaggattactccatttgtcctttc

SEQ ID NO: 86954 - DNA, 412 bp, Zea Mays
cggtaatttgcttctaaaaatgggatcagccgccgctggcccggacggtccgcgctcacgtgcggacggtccggacatgtgcagatcggcaaatttatcgcccatgtgcgtgggaggctgtcgttgcctagggtacatgtccatcggcatcccataaaggggttgtgactggtcgtgacaacctgtagccgatgaattatgtgtgtattctctcaattcaacctcgtgcgaaggaagatttgccatagtagacttatcaagcacacgcactagccttttatgatcattttgtatatcccctacgatacgttgtaactattcccgttgttcgtctatgtaagctctaagagattggagttcgttggtgttacttacattgggggtaatcgtagtaggtaggagcgaagccgga

SEQ ID NO: 86955 - DNA, 589 bp, Zea Mays
gcggtgcgtaaccgcaattgggaggtgaagccgcggaaccgaaggcaattcctcaccgttgatcgatttccgccgcgggcaactttgccccatgaccgggtacttctatggcgtcaaggccggtatgtcacccatccatgagctcaccatagtcttcgcattgtgtcgatgctataaaatttgggaatggttcctgtgggcgtgggcgcgcactcaccgcgaaatcgccaccgcggtggaggcctgtgctactctgcgcccaacatagggaggaagacgaggtgattgccattgatccagaggtgtgcagccacgattagacctcgggtacccctttgagttttagatctgaatcgtcgatgaagtaacgagcgatgcataatagatctgggcttcattaaatcgtaggcgtaggatctagatcctgtggacatcgtcgcgtaccaattcaatgtaatgtggatctaatctaggtcgtagaaagcagatcagacggctcagattggaggataccccttcggcctgtatgttttgcaaaagagtccctgttctttatttaaatcaacccaccgtccatgtacgactgttc

SEQ ID NO: 86956 - DNA, 526 bp, Zea Mays
gaaaaaagccctgctccaatgctctggggatgtcttcatcatatcttgtgctccttctggtgaagcttgtgcaagccatgcccttttgaggttgaaaagaactctgcaaggtgccttggcacaagcccaccacttcttttgcagcttcttgtctgtataaatcttcctccagttggcataaatgtgtctggcacacattctgtgctctgcgttaggaagcaattcgtctacagccttcaatagaccctgcaaaagcacttagatgattaagaatttctgtgtaccatctaatttttagacatacagttttatgatttagaatgcaccttttgttgatcagatatgacaacccaaccatcacctccaatgttgatgttcagatctttttgaagtaatcctagaaaccagtaccatgaatcatatgtttcagttgcaacagctgcccatgcaattggatacatctggttgtttgcatctctcccaatggcacaaagcagctgaccagtgtttgaacccttgaaccagc

SEQ ID NO: 86957 - DNA, 334 bp, Zea Mays
agaagactgagaagtataaatgtttccgccaagatggaaagggtgtcttatggtttgaaagcagattggtggttcctaaaaatgaggatctcaagaagagaatcttggatgaggcccatctttccaaattctccatgcatccgaagagcaccaaaatgtaccacgatctgaagcccttgtattggtggaccagaatgaagagggagatagtctgatatgtatctgaatgtgacacctgtcagaggataaaggcaagccacttgaaatcagctggagccttgcagcccctgcccataccttcgtggaaatgggatgacatcagcatggatttcat

SEQ ID NO: 86958 - DNA, 406 bp, Zea Mays
aacagcttgtacatccaaacaggaattgaaattggatgttttcctttgtttccagctatccaaacgcttgtacatccaaacaatggtatttacgactatattatgtatgagccctgaaaattggctcctagctactacgtactacaacgtatctgttcagtttttagcatgattcaaatgcatgagctacgtatacaccacccactgctggtctgcatatgtcaccatatcataagctagacagctacgtatacaccacccattcactatcaagagcattcctctcaacgttccctgtaagaaagcagcaggatgatgagactagccacctgctgctggttgccactgccctcctcctgctcctggcagtatcctcaggtacttctagcccaggccgatctttcag

SEQ ID NO: 86959 - DNA, 650 bp, Zea Mays
ttacaataatgagagatcatctcatcacatcataaaagtgtttatggcattcgagccatgcatgcatcaaatagttattacagaccgattgttcattacaaaaataaaggggtactacataaagggtactgcataataaactttctccccctttttggcaacaagaaccaaaaagagagagaagcgccaatccaatgatcaccagtagggaggaggatgatgaggagtgaagaggtggtgcgccaggtcagaggcaaagtgttcctctccagactgggccggaggaggagcactgccagacgggtcctggggcggagggtaagaggacgattggctcggatccccgtgatacggaggcgggacaaactgctcctgatcatcaaaataagtttcttcttcttcgacgtcatcagctgtcgtaaaaggcaccccatatgcctgctggtaccactcattgacatctggaggaggagggtggagaggtacatcaggagagcggggggcgaacggagtacccaaagcggaagcttgacgacgaaggttgtcgtcggtctcccgctgacgtcgagccacctcatggacatctgcagcaatgtttcgacacatggagaagaatgccgcaaacccgtgggccaagcgggcacccatcc

SEQ ID NO: 86960 - DNA, 430 bp, Zea Mays
ctttttgattacttttgaactagaaaatctctagataaatcttacacaaaatcaggggctaaaaataaaacatgttcaccttctacctctcttcactgctcaataggagcttgagtaggagctggcgatctagggagcatgggcacggccgcgacagcagaggaggtcatcggacatggaaaggtcgatggaggcgtggcgtcgggcttcaggactccagcggtgagcataggacgtcaacggtggcttctcgcgagccgggaggagagcgtgaggggcgagctcggtggccagggaacggacccaaggaggcgagggcaaagggttttatagagagggaggaatagagagtgagctgagtgagagaggaggacgatggctggcttcaaatccatcaatggcgtcggccaaggtggagggagagtgggga

SEQ ID NO: 86961 - DNA, 541 bp, Zea Mays
gcatgtccaaatgtatgttgaaattgaagagtttgcctctaactcaaactgaactactcaaggcaatcaattttctgaaaggggacaaagaagctagagagatattcatttgctgtgaagagcagtctcttgcagaagcttacatcattgggtctatttctgactaatgcaaggtaatcagtttactgctactagttgtttgcaacatgttctagataatctgtccacatagcctgtgcaatctgatttcttttgaaattccctgcacgccttcgttcattgcatgacatcacatcttcaatgcagttttcatctccttctggaatatccactatgtcggcaggattaacttgcatgttatcttcattaagccattgttcagaaccatcattgaatttaatgaaattgtgtagtacacaaccagccagtacaatatctctttgagtctctatagagtaataagaagcacatttgagaatagggaaacacattttgagcacaccaataatgcgttcaacatggttccgtagttgggcatgtc

SEQ ID NO: 86962 - DNA, 1246 bp, Zea Mays
gaacttttgctccatcactcgcacccactcatctacttccagaggttcttcagccttaacaaagagtggtgggcgagtttcagagaactctaaatatgtggtgtctcatggtccttgaggttgatctctgcctccatgttgctgaaattgatttctcgccaattcacgtaggaaacgcgtgttgtcagcggtagcattgactaaggcagcgatagcctcagccagtgtaggaggtacaggtggcgggtttggagtttcctccccgccgcgggaagttcccgccccgtcacgagcatgagttcttgatggcatctgaggaagaaaaacatcatgaattattacatatcaaacgtacaccatctttattacattgtgctgaactgtaataattatacatactcattagtacaactcgacttccttatttattttacataaggacactacttaaactatactactctaattatcttcgtctttagccgctccactgccagcttcgggagaacgttcatctgcaaggttcatggaaggaggggctccaaaaaggtccaactccccatcaggttctccattagctgcttcagatggtccagcttccattgctgcaacttctagtgacacatttggatgcagtcggtcatataacaagtgcacctcttcatgcatggtgttacaatacgcttgcagattttccagggatgcgcttagttccgctacccaggctagagccttggcctcacaatcccaggcgaaagagcgtgaatttacggcccagtcaatagtcgtatctcgttccgcaatttcctcctgtaagcgataaacttctgccactagctcagcaatgcggcggctatctcgcgcacgctccctactcccatggcgtagttctgacataagtcgctccaccctggcctccagatcccctattggattgttgcttccactgctactccctgcatgtctaggagccagttggtgtcggggcacaccttgaggtccggttgcctttcgttgtgtggtcttggtacgcaccatatctccataagagggaaaaatttatttagtatagtttaaacatgatgcatgcatggcctaaaaaatatggaaccaacttctcgttgatcccctacctcctacgtataatattatttggcactcgattacccaacttaaaaggtaagttactaccagagagtagcaagataagaatgaaagaaggtttcaaggtaagtatttaaaaatc

SEQ ID NO: 86963 - DNA, 664 bp, Zea Mays
tatccacaatgtatttcatgtatctcagctccgaaaatgcttataagtacaagaaagtcacatcgcagaggagttagttcagattcagaaggatctgcagtaccgagaaaagccagtggagattctcgattcaaccatccgaaaaaacccgaaacttagaagtaaggctctgtaaagtccagtggagcagagaaggagaagaggaggctacctaggagagtgaggactcattgaggagggcatacccttaccttttctcaaacccagcctgaatctcgagggcaagattcttttaagtggggtaggtctgtaacatcccagttttcatccccagaatagaaaccctagactcctaacccccccttaaattcctcctaagaccgcatctcaagaagcattttattcatcatatgcatacaccatgattgctagtagcacttcacatagagtatttcattttggcacccaagaaatttagatgaatatttgtttggagaaggaaaaggggatttaggaaaaggaaatagaaaagaaatagaaaaagaaaaaaaggaaaatcccttctcccccctctcggatgggccggatccagcacaagctttttcccctctctcccgcgtgcccgcgctcacggcgtccgcccgcgccgtctcccctcctcatg

SEQ ID NO: 86964 - DNA, 454 bp, Zea Mays
caaagatgatacatgtgattctgcaagtagattcctaaacagcttattgtaaataccttgtgcttcaaggtcaaacttctcatgttcatcaaaacccaatgacttcatgaccttttttgcgccagactgatcataggccctggtgagcaaggctgagccctgcaacccgtctacttctacgaagggagcattcattggaggggccttgtcttctttcgtgaatcataggggatggcaacagcgcatcaaccgatttacaagcaccttggagtttatacaatgcagattcctctggggagactgagcgtggcgcgggcgaggagctttcggagcaaggacgcctcttggagtaggtgtgagggaaggctttcaccaaccccaggtcatccatcagcacaagaggttcaaccgactttcgactactatttgataatgcaattactgggttacagtt

SEQ ID NO: 86965 - DNA, 296 bp, Zea Mays
accccatgactatggttatgagtcctctaaggttgagcttcgggatgacaaggccattgtgcaatatgcaactcggctccccatgccagctggccgaagccgaattcagagtggtggctgctgaaatttgcactagggacttggtgcaggaatacctggcgaataaaacttttccaacctctagcggctgggggatgctgaagaagaaggaagggggaaagaaatatgaacttgttcaactccccttctgcttcaaatttgagaagcaattcaagaaattgtgttttgaatggtta

SEQ ID NO: 86966 - DNA, 569 bp, Zea Mays
aaaagcaatgaaagtagtacaccatgcgagtctgtctaaagctaggaatgataaagccctagagatgatggacgaattattagggttattgatgcgtgtggagcctgatataggtactggtgagagttgtggcacaagttctggcgacgacatccaggtacgcacatcgtgttattatgaattttgcataattacatgtcgataatgatccatgtatgtaatgatgatgtaggtcgaagcgtatgaaacagaagacatagttatagacaatttacacaaattagatgatgggaacgaggtatggaacataattttataatgtattatttatgctgctctataaaaattgtgtcttcactggagtttgcgttatttcacaggaaattttaatggagtctaatacaaatgaatgcaatgctaaggatgataattgtaatatgctgatattaacattggaacataacactgatatgcgtctggttgatagtagtgctacggatgtggaagctagaaaggtaataacattgctacaatatatgatgaaatacgtgaatataaaaactgactta

SEQ ID NO: 86967 - DNA, 513 bp, Zea Mays
ctagattgctactccggatatcatcagatcagtctggcaaaggaagacaaggagaagactgcattcatcacgccgtttagagccttctgctatacctacatgttgtttggcctcaaaaacgcagtagcaacttaccagagggctatccaaacatgcttagccgatcactagggcaagcgagtagaggcttatgttgatgatgtagtcatcaagacagaaaactcagacaacttcattgaggatctacaacaggtcttcaacaacttgaggcactactgatagaaactgaacccagaaaagtgcgtgtttggggtaccggctggaaatctactcgggtttatcatcagccatcgaggaatagaagcaaatccaaagaagattgaagtcattatgagaatggagccactgcgatcacagaagaaagtatagaggctcactgatgtatggcagcggtgagcagattcatatcgaggctgggtgagaaaggaatgtcgttcttgtaacaccctaaat

SEQ ID NO: 86968 - DNA, 636 bp, Zea Mays
atatgttgtcatggtcattgcccccatttggggctcacaactcgagccaagttggcctgctcttggacgaggcgacatgtgttgaggatcacgcgtgtgtcgtggaccataaccaaatgttcatgcaccatagtgtgtgacatataggattgtcgggatgctttttcgcagtctcagtcctagggatgggcattgacagtctccatccactagatacccccgtttgaggaggtagcctgcttcgaggtgtcatggaagtgctgagtggcgacgtgctcgatcagcccagctcgagggaggtgacattggtctaggggtcctcgagctctaggatcacctacatcatcactaccatagtagtgacatttttgttgacatgcgaaaagtactatggcacgtagcttccccctatcccaacatcgatgtaggagggacgacagccaccatctatattgttggtatggcactagtggtgatgatcaacctctagatggtggtcaacgagtcaagctacatctatcatgttaacccccttggtgtcttcctcatgtcaccttaggtggtgatcgacatggccccacacgtacaccacctctttatcgggagagtgccacacccctttggggtgcaccccca

SEQ ID NO: 86969 - DNA, 356 bp, Zea Mays
ttttgacccaagaatcctatagtaagtttgtagactgatgtttagtgaacaaattttattaagggaagttgctctgttcttaacaaaaatccagagataaagagggtagaaggtgatcggttcagaagagcgttgaagatcgaaccctgacaaatatctaaagaataccaaaagatccatgacactgttgatttggatgaacttggatggatcggtgaggattggatcgcctgggtgtagctcgatacgtggcatcgttccgcgggccgagccacgtgtggccggagttggtcaccggcgaccaccgtgactcgatcaacttttgccgcggtgtcacccgtgcctcgatctacctc

SEQ ID NO: 86970 - DNA, 483 bp, Zea Mays
cagccgtatataggaggagtacgtacaagttgctttctctctcacattttcagacaacgcaaaagtacatgaggagggtagtaatgttgcaaatatcctacagaagaatacaatggaccaccactcaggaggaggcaggacgatattttgtacccactgctgtactcgtcactcaggagttggagtggggagaggtgctggggcgcagagcggccgcatcggcgtgtcggtgtggctgagcagtggagtggagtgggtgtgccgcaaatggacttactatataaaagttcgattattttgttgtatatctaagtctaggtataaaaggttacagagattgaggtgacactatggccccccaagtattaaatgtacaacttgtatcataggagagttattatataactagatttgtagttagctactatatgtgacatgatgacattataaaatcccaccgtaagttaagacattataaattcc

SEQ ID NO: 86971 - DNA, 600 bp, Zea Mays
tagcgcctgctcagtcaccatccctttagtaggcgccgtctcgggcgaaggttgttgcacctcaactccagccgcctctgctttagtggtctccgtcgtgccgcccttcgcccccgtcgccttcatggcccgggtcttcacagatcctcttaggtcctcaatgcagatgacttctttgtgtttcatggacttcaacattcgatctttctccatgagctcagacaaaacactccaatgttataaccatagggaaaaataacaagagatctagctagtctattcaattcgttatcctcgctagtgtcatcaggaacatatttacccctggtgactatggccacccttgcgtttcctgccacaaggaacatgagcgttgtggcttcacccatagtcttcgctagatcctcggcaaacttagtcatttcaacatccaaacccaccaaatcttcaggcacggtctccgcctcgttcggtgacctcgaccccatcgccctttttctcacttcaccctaagtaggcaatgccttccgcttcaaaccaaccatgtcttcaccgcctttgataaccaccgtctccttcatagtagtacttgagtcttcc

SEQ ID NO: 86972 - DNA, 1378 bp, Zea Mays
gcagggaattgagaagaagaggatgagtcagttgttgtttgtctgtgacctccgactgaaggacgtctgccctttatagacgggtcgccataatccgttgattcgatctgctaaattctaggaaccggcccctggaatatctctacatgcaaccgtccggagatctcgcacgttgtccattactcctagttgatgtgacagtctaggtgtgatatttgataaccaaaataaacaaaagacaaaaattaaagtgtcgtttaggatggcagggcagagaagcggcggtgcagggaattgagaagaagaggatgagtcagttgctgtttgcctgtgacctccgactgaaggacgtctgccctttatagacgggtcgccataatccgttgattcgatctgctaaattctaggaaccggcccctggaatatctctacatgcaaccgtccggagatctcgcacgttgtccattactcctagttgatgtgacagtctaggtgtgatatttgataaccaaaataaacaaaagacaaaaattaaagtgtcgtttaggatggcagggcagagaagcggcggtgcagggaattgagaagaagaggatgagtcagttgttgtttgcctgtgacctccgactgaaggacgtctgccctttatagatgggtcgccataatccgttgattcgatctgctaaattctaggaaccggcccccggaatatctctacatgcaaccgtccggagatctcgcacgttgtccattactcctagttgatgtgacagtctaggtgtgatatttgataaccaaaataaacaaaagacaaaaattaaagtgtcgtttaggatggcagggcagagaagcggcggtgcagggaattgagaataagaggatgagtcagttgttgttcgcctgtgacctccgactgaaggacgtctgccctttatagacgggtcgccataatcccttgattcgatctactaaattctaggaactggcccctggaatatctctacatgcaactgttcggagatctcgcacgttgtccattactcctagttgatgtgacaatctaggtgtaatatttgataaccaaataaataaaaggcaaaaattaaagtgccatttaggatggcagggcagagaagcggcggtgcagggaattgagaagaagaggatgagtcggttgctgttcgcctgtgacctacgactgaaggacgtctgcactttatagacgggccgccgcaaccccttgattcgatctgctaaattctaggaatcgtcccctagaatatctctacgtgcaagcgtccggagatctcacatttaacgtgtgtgcccattactcctagttaacgtggcagtctaggtgtgatatttgataaccaaa

SEQ ID NO: 86973 - DNA, 466 bp, Zea Mays
gggttctcctgctggggtactaagtggatattgggaatccttgatcgctggcaagctctcccatgaacacttggtatcttagacatcttagagagtgactggtgaatgttgggagaccttggccactgttataccctctcgtgaatgcttagggccctaaatgaaccatggagcccacaatgaataccgggaggccctagccgctgccaggctctcccgtgaacacttagggaccgaggatagactaaacacccatagggaatgtcgagatcccctaaccatcgctaagtgctccgttgaacacctgcctatatccattctccataaaaatcttaggaaatgtaatatttgaaccttgcactaccattatgtagcacgaccaatgaccctcgttgagcaacaacatcaacacattgtgtgccctgctcttcccacaatcattcatccttaaatgagaaatcaccat

SEQ ID NO: 86974 - DNA, 921 bp, Zea Mays
ggcttttggcccagccgctctcatgccactgacagatgggaccaacccatcatccgctccgtcgaacacgtgctcactctctttgatctgtggggcctccttgtcatccctaaacaaaaagccacgtttgttgttccatggcagacatctcatcctcggtctcgcccatgcacaacccaaactctgcgcttgagctcatcacccgacaacgggcatgaagagcattcacttctgcctttcctccccctatttccttcctggatgcccagaccattaaagtgagaacacccacttgcattcaaatggcaaatagccatgtcgctcacaccagagctctctccctccaatcaatggcacacaattgtgaagggagaccctaagctcttagctaccagagcctccgaccataaccaccactaccattgtcaagcatgacccaaacagagcacctctgccattgtcttcgatgttgtaagtttcatcagtaacgaagatgcccataacacacctcatcaccaactatattgtcctctatgacctaggctactataactcgagctctgtcgtgtcacctcgacattgtctgttgcctctagacacatgtactaactttctgctcagcaccaggaggtgtactagtatgtactaaggttctcttgcctatttccctgtccaaacatgatcatagttgacttgaattgctcgtcaaaactgagcactctagactcgcccctcttctgaattcggtgctcaatttgttcaccatggtcaaccatgatctgggggcctaccttgcctaaggtcctcaaaataccttaacttaggcatgaacaaatgtgttttgggtatgtaatgaagggcggatgaagctggccttcgtctaatacacataaggtgcaaacttccaatttctccttctcc

SEQ ID NO: 86975 - DNA, 626 bp, Zea Mays
ggtggcgtgagggaagtggctaatgtggctagcagtagcgcaaaggacgctagaggaaaggtggtggtgggtggagggcctgacatcaccaataccagattgataggattgcggatcctacagttgatgttgtgtagggaataagggtgggacgtaggggaccaacgacgatcacgacgctggggcaccgtggctgggctctgctaaaggagaacaagagaacataatgtgctacaacacccgcactacagtacctgcgttgttgttggattagggctgcaagctagaggaggaagaagggcggtggaggctagggctccattgttggctcaatgatgttgctaggggagatgtcggagtgattcgttgaaccggccatatggggccgatttgtggcatgtcagacctaattatggatctgatctgataaatctaatatctattctctatagcagagtcgctaaaaagtatgttggcgccgatctggcgccaatcactatgagatatagcggcgacaatgctctctacgtcggggcgaacgttccgcggcctagtgctggatggtccgtgaccctgcagcagcagcgggtcttccctacgttgagccagacggtctacgaccctgc

SEQ ID NO: 86976 - DNA, 423 bp, Zea Mays
gagggtgcaagtaaggcagcaacatggctcttttggatgcccgatgaccccacactatgggataccttgtaccaattgtagcagtgatatatcttgccaaccatcaatgttactaccatcgaatcctccttgatatccaattcagtgacccataattattactcatgacctagttgcttaaggcatgccatcaaacaattttctaggtacaagagatagctaaaagactgcatgatacaatcccatattactcataccgagctcttcacgaatagaccgtctcttgattttttgtacacttaaccttatagagacccttcatttaattgggttgtgcatgcccttatgcctttttgttttctatatcctaccagtagaaaagagctctaagcctgtggtagtatttaatttctacagacgatt

SEQ ID NO: 86977 - DNA, 365 bp, Zea Mays
cggctgacctgtcccgcgctcacttggtccaccacgacctaatcaccatacgccctccaatcatccctcacgcccacaactgcttgcaaccctaatctaatcatgtgtcatccctttccctcccctcccggatcaccaatcgccatcatcccctcgcccaatccaaacccaccgccatcatccccggatcaccatcatcccagaccgccagccaccatcatccgttcaggaggagggataggtggttccatctcccacgacccacgcgtcgagtccacaccaggccagccaacgagctgcggcagcgacaattctttcctctgctcgcccacgtctgcgtctacttggattcgataggatcggca

SEQ ID NO: 86978 - DNA, 821 bp, Zea Mays
gtacaactctgaaactggattgacagtgaactaggaccaagtttgagagctattttgagtatgatttagtgagaattgaagtatggtggttatagcaagattaaatctggattataggaccacaactttgttaaaggtggattagcaagttatcacatgaaaattggagatctgggcactgcaaaacgctctatcaggtgctctgaatgtcattttgatggtacaatacacagaaagatctcaggttcagccccccctcgccgtcgatgacctctacgcaaggattcgcgctgatcgcgatgattcatgcaggactcaggcaggatagtgccgggagggtgaaaagatcagaaggggagtggatttggtcgcggagtgaagcttatcaaccacgcctggagccgtgcaacatggccagaccgccggtgtcgccgtggtactccggcgacctcatttacgccacgtcgtagctcgttaccacatggtagtaaccgtggcatgcctagactcaccactttagaaccgttgcactggcgagcgccacgactgacccactagtgacctcccctctctccgaccgccagcacgccatcccaaaattaggagccaccgctcttggatactataaattgagcacaccgctagctctgataggtaatcacgaagctagaacacccgctcctgcctccgattagccaccatagctctctaattactcttttcccccaaatcggttttccgcacgccgtgaaccaccgcgtcgtggccagccttctgcaggttagctcaagcctccttgattgatgttctagcctccctca

SEQ ID NO: 86979 - DNA, 411 bp, Zea Mays
caacgacattgtgcaacaagatattgttatgatgtagcaggtagtcgagggtaagcccatacttgagggttactctctggttatcctataagtaccctcacccgtacgaggtgaagggacaactgataagacttatgagaaccattatcccacatttgtcatgtcgtaacactcttgtcatctaacttgttcaggtccacccatgttaggactcaacattggtgcccaccgtgtctacttcgaacgacaaacctactatacctccgaagaagatcacctaaccatagcccgctcctaagtctgcaagggtgaaggttgtctccaccaatcacaatgaaaccacaaatcacccactcattgaggggagcatccatttggacaactcagagatccatcgttagcctccaacca

SEQ ID NO: 86980 - DNA, 1446 bp, Zea Mays
cccgccagaagcttcttcaccaaaccaacggtggcgtactctgaagtctgaacacgcgcgacaggcgcttgggcgatgaatgtcgcgcgcccgtgatgcacagaaatcgctaccgcgacttccttcggtgcgaaaataggacagcggcatcaccggataacaaacctttcctctttccccgtgatccgatccggtatccttcatccccgtaccaatcgggatttcagttcctgacagcgggcggaacatggtcgccattatcgggtccccgtgaaccgcgccatggctaatgcggagagagataagctggagagggtccaccttgtgctcatcggattgcagagagattgagagagagaacgtcgtggttcgtgcggctggcgcatggacccgccttgactgcggcaccttctccgcgaattcgttgcaacagcgcgcgcaatcgtgggggtctgttgggattcaccctcctcgcatccggatcgtgagttcgttcatcaaccaaccccctgcccctatataaccatcaggccatgattccttgcctcccagctccgtctccatcatcttctaggcagagcgagccaagaagggataaaggagttctgtcccgttgtgtgtaaagggggtcaccggcgtggaaccagggccctgctgccccatagccttcgggacgcaacctgggatgatctccggtgcttgtggcgtctgttcgcggtattggaggaatctccagagttttggtaattgcttgatagtgagctcctccgctgtttcgtcatggtgtgccatgggtggggtcctccgcgctgcacccttcggtaaggacctcccttctgtgcattagcgttgactctagctttgcgtggatttatcgatggggcagggtagggcgtgtgcttgtggtcttggcaccgtgggcgagtttccggcgattgcctgtgccgtggttgcgtctgccggttcggcgcgcgattggtccctggtctgggcggcgcaaggaagaagaacatgcccttgccgtcggatcgagatggatggtcgagattgaaacagccataccctttcgcttcaagaaaccgtgttcgtggatgacgaaatcgacggtgtagattaggtctggatttaccccttcgcgcgatctgatctggaccttcagaatctgatcgggcggctcacgagtagccatacccctttgggcaagatattttgctaaagagtccctagtgttttgtggaatcaacccgccgtccgctatagatctaagaacattacatatgggccctgttttttaacagtttaaaccctatctgtccagcgatttgtgcccaaggtcctcaggtcgccagtaaactagaagttaattcgaaaatagttttcagtagacaaataaatccaaacaaatttgtataatccataactttctcattttaagtctgtttcaac

SEQ ID NO: 86981 - DNA, 761 bp, Zea Mays
cattctgctagtttgttacttttatcttgttgtgcttcgataggacacgtcttagccagcaattgtaacttgtgatttggacacttattgaactttgctaatttgcactcgatttttggcctcccaagctccacatactttcttctgatcaatacagctgtgaccttgcaatcgcggtgtcactacctcttggtaagtatcacgaaccagcctccgattgtaccatcctttgcttgtatttcgtcagacacttgtaagagcttggtaagatacattagagtgtgttcctgtgttccacctgagaggagcgtgtagtgagattattagggataaccgtcaccgtttgtttcctgtttttgtgtttcgatggcaggcgacgacgaggaagcaaggatccctacagatttcgatgaatgtgttagccgccaagatcttgaggcaaacaacaagctcctgaaggagcaaatggaggagacggtccacaagtcagtgcatgatgccttcattgacatgaaccttggcaagacttacgagaggctagatcgacgattgtccgagatcatcgacagacttgctgtgttggagacgcaacaacaagcaccgccgccaccaccacctcctcgtccacgtcttcccgatgatgctgtgtttgatgaagaaggtaattatgatgaagcagccaccagagatttgtgcctacgtcgccgtcttcatcaaaacacagaaggtatgccacaccaacaccgccagcaaggtaataa

SEQ ID NO: 86982 - DNA, 738 bp, Zea Mays
gacggatgctacaactgtggccatcccgaccacttcgttgccagcttccccaagaagggcaaatcggagtctggcccgcacgaccatcactctggtcggcgcaagggcaagcactcctccggcaagtacaagtccaagggaggattcaacaaggaggcgctcaagaagaagtaccttcagaaggcaaagataaaggagcgtgccttcctcgcctccctcagcgacctcgaccacaactccgatgatgttgtatcttcctcgagcgatgaggatactgagaggcgggtcgaggacaagctgaatgggctgtgcttcatcgccgacaccgcaagaggcttctgcaccatggcacttggtgaggacgcggtcgacactagcatcgacaaagacatcggcaacgacactacttctaaggtactaccttccatcgatgatctcgtcgctgagatagaagagctaaacgctgctttggctagttaggataagttgcttaggtaggctgctcgtgagatgatagagtttagatccaagtatgagagcacacttagagaacgtgagtcttctagggctttagttgtggtgtccgacgagactgaatgtgatgagtgcactctacaaatgttgaacatcaccactttgcagacgaagtactccatcttgctagatgagcacgacgagttgagatctaggtctatcctgttgggtgtgtgtaccatttgtcctggcttgcagtctgag

SEQ ID NO: 86983 - DNA, 858 bp, Zea Mays
attcacccccctctaggtgctctcaaaaacaactaagcataatgttctactggttatacggcttcacccagtgtctgttacccttacatttttttccatccgtgtgtgggttcgaaccccactttctgcaccgcttttgcacattttacgatgacttaaccaaatggaccgatggtctaacgggccggcccgacacggtcagcgtttgggcatctatatgtggaggtttggtttaagacgtggaggttggttgcgcggaggggatgaatgtatttgaaatagatgtgatgatttatttgtaaaaaaaaagatgacgcagaacgatcattgaaactggtggtttaatagatatagagatatatatgtcataacaactatgcatatcatcctggttgcggagacaaaactgaccggcttgtaccttactgtcctaaacctcaattaaaatgaaacgatcgagctcaacctgccaactgacagacacccggccgtataggtttggcttgttgcccataccgcatggatcagctgtgctagccaagcggtcatctacattcagggttaggcaggtcggtcggtcgtcagataaccggacctttgtctggtccgaccgtcccaccaggtattcaggagaaaaagatgatgtctatgactcatgtggcagctatcttagatttattattattcaatagtgtgtcaaatcttatctcgaaatgctgaagaactcaacatgggatccgatcatgttctactggtggcaaggcattatatactggttgtcatgatttgtgatctgaccgtctgagtaggacaccccgaccaatattttctgactatttaaactatgaatgaatgccg

SEQ ID NO: 86984 - DNA, 919 bp, Zea Mays
gcgtggtcggggagcatcagggacacacaagaacactgaaacgaaagggcagaggacatgagcgaacctgagacgagctagccacggcgaggcctctttcacggtggcggaaagcaggtttgggggcaatctagaatttgcgagctctggtgaacaattgggggcacgacttggtgcttgactaccctacggacccgtcggtgtgctcaatttatagtgtgcttgagtggtggtgcttaatttggacgaattgcgctggagaccgagaggggaatgagtcatggcggcgatctactgtggtaatcgcagggcgactgaactacagtggtcattggatggtcactacggctcataccgacgcaataaacttcctaaggcgtggcgtcctcacggtgaatggcaaacacgccggtgattgccgcacggccacgtcgccggtgtgtactgatgaaccatcaagcacacagtacattctagcccatccgcaactagatctttcaccccgtgatcgttatcctcgtttaattcagcgtgaatcacgacaatagcacaaatccgcgcgcgtggtcgctggcggcgaggtctctgagctggcgatccaatccggttactgtaccatcgcgaagcatcatcagttggcctgatagagcatgcttgggatcgattttgctctataatttatgtgatgactcaaccaatactctgcatcaaagtcgaagcccgataaaccagctccaactttgttacattgtgcacccacaaaaagtcacagaatcttacttaaaattgagccccaagttcatccattctcagtgtcagtttgaattcagaccaagggcagtctgacagcccgactttgggctcattttactccaaatttttcatgtgaccaaggcttaatccctatagcaaagttatt

SEQ ID NO: 86985 - DNA, 333 bp, Zea Mays
gttattgtaccatgggcttcttcattcagggttctaaccgagcaaaacaaagcgcttaattttttatattttggtgtagcaacttgattaaccgtctgtagtaaacttgttgccctataatccatctttgatttcgctatagaatccacaatcaaataatcactggatcatactctaatctgatcccaaagttcatctcacttcactttcactcagaattcagctcctgggttgtttgacagccagacttcaggtccatttatctccaatttttgtatgtcaccaatgcttaatcacttaagcaaagttgtactcctaccatagctctacaac

SEQ ID NO: 86986 - DNA, 362 bp, Zea Mays
aggccgatcctgatccaaatatcttcatttgtggataaaaatccaagggggtttgatctaaaaggctgtgttctgattgtcatgtgtgtgagcgcgctggtgttcgtctttgtcaggtcgtacaataataattagtcgataacgatgcaatttaggaaaatacaacaaattcaccttaaaagaccttatctttgcccagaaatttggctgacagggggcgagttcgacttctcaatctattttgactccttgaaaagccacaagtcaatcaaaattttggcttccatccaaaatccataactgaaagccgcttttgtctagaacagatttcccagcatttttgttttcacctacttttggcc

SEQ ID NO: 86987 - DNA, 284 bp, Zea Mays
atagcatacatgtgtttctatgttttttatcatggtattttaaacttaattgtctttattgcttattttgctgctcaagttgtaaaatatcatccccggacctcacaagtccttgtgcaaatgatgcatatgttttgggggaggatacactacaacctgaccctttgagactaatatgtttgcttaagtgattttggtgtacgctcaaaggtagattgaaagggaaatggtgaacttggtcaacggaacaggcttccactgcataacggtatcaatgtacattg

SEQ ID NO: 86988 - DNA, 395 bp, Zea Mays
accggtagggaattccccattgacacctctattgtgaacagagttcttggctcacctatggcatgcagtgacggagagcgaactagaaaggcacttgcggagaccctggagtcatgactttcagcacctaaggtcgaagagccaagtttgagtagcaaggatatggtgggccttccattgagcgtgaaaggcccacttgtcattgttccacattatgctgttgtacagtatattctaggaatgtgataggtaacaaagggtatgtatgtactttagggtcatgccccttgattaccctataaatactctcgtctagaacggagagaggacacgcttgacaagacatattgagagccattgtttctagtttgtctcattattttgccctaactact

SEQ ID NO: 86989 - DNA, 507 bp, Zea Mays
ctggtgtccgtctccgctgagccgaaaatgacatacacgggcctcgccgctggcccatgggctgtgtttctttcagttccagcaagtggatccgtggtccgacacgggcggtggaggctccgatggagtccaaggaagtgcaggcagagagaacatgagaacacgtattctcgggcggaaacagcgggctacctacctgtgcatgtgcgtggtcgaggaatcgccttgggtgcgaaaaataggaatcgccttggatgaaacacacacaggcttcccaaaaccatttttggaagagaaatgctgatttcattactccaacggaaccccttcctcctcgcattttttggcaacccgcaaacacgtactagagtcccacagatatacgtgagaacaaatctgcgcgcacatcctttcccgcgatgcacgccttttttttgttgactgaggaaagcggagcaacggtggagggaggaggtttctgtggcggcggaggtggtgtcagcggtg

SEQ ID NO: 86990 - DNA, 665 bp, Zea Mays
gaacgaccaagcatctcagggccctcgtgtcctcgaagcactctgagtttaggggcactctcacatttatgggaactactttgtaagaacagtttgagatctagacatctaaaccaacatgtctctttgattagagtagaactcctaacatccttaaatgtggtttaaggatcaatagagtagaactcctaacatggaggatatatgagatcatgatgattagtagtttttttgagcttgtaatgatcttttgcacttttgtgttcatcaactgacaagtgataagagaactcatggtattatgttgtggcctgaacctctctaaattgtccgtgtgctggtttttggtggtgtggtgtctaggttcaacctatcacttacctgctacacctccgatccactctctctaatgagtttatattttatttttgtgtacttgtttacatactccggtgtctaaggataattagcgggaatgtaggtttccaagagcaccgagaaagaaacagcggagtttgaaaggcgggcgggcagtgggcagggagtacgagagatttgtctttggggacagaggccactgggctgggtataccccgtatgcatgtgcatagccataggggggcaaaggcaaggaatgatggcctggaaatgggcatcagtttgag

SEQ ID NO: 86991 - DNA, 282 bp, Zea Mays
taggttgcagtcggtgagcctagccagctcaacgacgcgtttggcgtaggtggtctggcgaagcgtgatcccggagttgccctggtgcacctcaatcctcaggtagaaggagagatgcccctggtcactcatttggaagatggcattcatctattccttgaacgttgccacctccgcatccttggtgccggtgatcactaggttgtcgatgtagacacccaccaacagagcattccctcaattgccccgcctgtaagcaacaggactcttactcttatcgag

SEQ ID NO: 86992 - DNA, 1503 bp, Zea Mays
agatccccacaacagcgacatttgctatgccatttctgttgcttgcgctattttttcaaatttttaactcttgcttatgagttctcgcttgattttggagcttcatcttaaagtcaagtgcttgttccatgtctgaagagaaaaagatgtctggagagaagaagatatccgaggaggagaagctgtatgaggagaagaaagttgtgaatccttttcttgctgggttttatgaatctatggcaaagacaaatacagaaaagatcatgaaggaaataatggcaggtttatctgaggattccgacgatagcgatgactatgatgtggaaagtggggatgaagattctgaggaccggccctagcgaccaagccataccatctttggaaagtcgactattatgcaaagtcatgttgacgccatgaggggaagatactttcgtgacatgtctattgtgagagttggaggagacagcactgcccctgctcctgaagaaaatgaggtggttgtttacaaaagctttttgaaggcggatctttggttcccattaagcagatttttagttgaagtgctaaagatattttagatctttcttcatcaacttactcccgaagctataattagaatgggcttgtttgtttgggctgtaagaagccaagggctggaaccgagcgcgaagtgtttttgcagtatgcatgaactgttgtacgagacgaaggccaccgacaaagagaagtatcacaacaacttcggttgttacggattcattgctcgttctaatgcaagctacccagttccaacataccagaaaagatggcctagggcctggatggaggaatggttttatgtcaagaattatctgattgagagaggacattaaggagattatccaacgtcccatctggtcttgcttcggccttcgaaggccgagggtaacaattgaaaatgatgccgaagcgtgtcagaaggctttcagcaatgtctatgcttttattggcacaagagatatacttcaagagcacataacctacagagtgtggccacttgttgatagttgggagataccgaaggagactgttgctgggtccagcaaaggtggattagttcaattgaaatatgccttcagattcagagaaaggttcgatgagccggatgacgactggttgaaatgcattgaggctactagcgacgagttgcttggggcatataccagagctgaagatgatgctttatcctcagccttcgggggtcggggcaagaaaagattgaatagggtttttgatgcaattggcttcatataccctgattactgctaccccttgcgaaggcaaggaaaaaagagaaaaagtgccgcttcggccaccactgttgtgccgaagggcaagaaaataaaggttttgacccaccggccacgatatattgaaacagacgtagtgcctgaatttggtgaagggacctcctccgctgccgaagcgaaacaagctgctcccgtcgctcggagcactgag

SEQ ID NO: 86993 - DNA, 1034 bp, Zea Mays
gattattacagaaacaagaagctcaccaagagattcttgtggtatgtcaatccttagagacggtggcaatggagatctttgcaaaacatggttggaggtctaatgccaaattaaaagacgcttgattcgaggacaagttcttttcaacaatgtttgtttttaatgatgcatgttttgttaattttcaaactgtaatgttgtatgtaggaaactacaaaagtctagaatattttttgtttccattataaaaaaatgttgactccataaatcaaacacaccattagtgttccttatatggtactcttattactcgtatggtgtattgattcctcgccaaagcacattttgaattttgccttctcgtacttctaatggctcatgtggagctttaggtttgataaaagatgtagcataccaaccttgtatgtatcgtgaaactaaagcttggatctagggagacaagtgatatactcctatatcaagatgtgtggtgtttggcactgacgacgtactacgggacgtaccacacaatgcttttgaagtgacggcgatgtcgatcacagatcgatggttcgtacggaacacaacgaattatataggttcggtctgccgtgaagcgtaatactatacgtaatatgggtttctggtggttgtattgctctgagttcgaggattataagtgattgctaagggtagaagatgcaggtccctctatgatctagtggggtctaacctttttcgtaggagttctccctcggccttatataaccgactgaggagatatccttgtacagatcagagtgttcatgtgagtctatcccactaccagctacgattgcaccgaagcctttgataacgtgttggcccttcctgcagaactcacacacgtctgcatacacaatggcattcaatcgacctttttgctctggcacatggccgtcagaaccagcttcaaatacctcatgtcgaggcccacgatgcgtcccccgagcggcctaatgggggccttttaggcggcccatgaagcgagtctg

SEQ ID NO: 86994 - DNA, 709 bp, Zea Mays
gtagtttgtatgtagggctacaagtttactacaaacagattagcaagttgtcacacaaaaatttaagaaaaatgtctctgtagatcctcggtcagaacaattgacgaagcctctgatggtacagtggcaaaagatttgcggattcagtgaatctcaccgccggtgaccctacgccgcgattgacgtcgatcgtcacgattcgtgtgccgtgacttgcggataaccgtgggcaatgaaagatctcaactcaggaaaggagtagagacttatcactagactattcactgtgacacttgccgcgcattggacagaggtgtcctcgccggagtttgccgtcaatcatagccgcgccacgtgcttagaagaactaccacgtcgcagtagatattcgtatgaggtctgttcgtcgctggaggcattaccccggggaacgccacgatagttcacgccggtgactcacctctcccctcgaccgccggtctccccctttcaaaattcggcaccaccgcttagcgcccttataaattgacagcacggtctgctccgctatgttatcaccaagccagagcatccatccctgccctcgattagccactacaaccgttgaatttgggttttcccccaaattggttgattgcgccgccgtgaatcaccccatcgcggctagctgctcccaggtccgcactcaccctccgtgttcgtattttag

SEQ ID NO: 86995 - DNA, 348 bp, Zea Mays
gttaagctagggtcatggcccatcgggcagcctaacctgtaccaacttcctcaatcttgaggatgacctctgcatcggaggggtgttctctggcgtaaacgcccaaaggcatactaaaggctcctagctcaaggtcttcctctctggtcgagggcctttggtgacgatcatcaaaggctgaccaaaggctcttggtttagagtcatcggcctggtcctataatatcccaaaaaaatgttgaccaaaagttgatcttcggtgcgtggatgagggaaagggttgtgggccgttggatgcaaagtcaggagacatccgaggtgtcgtttctttctcccacaaaaccctagt

SEQ ID NO: 86996 - DNA, 358 bp, Zea Mays
cttcaactagctcttcttcttgaatttcaagttcacctggttcaacttctacttctgcatgatgggcttgtccccggttgacagataggggctgactctttcctgccgaagcctgtccttgcttgatcggagccggtgtagtgtaggcagctctgttgggacagtaattggcatagtgtcccggttgtccacacttgaagcatgccctattggtggttgtgttaggagcaacaggtcctgctgggatgcttgctttcggaggagcagttggtgcctgttgagtttgttgtccggtacttccactagctggtgtacttggagtggtagcatagcgaggacgggaactacttccagcttg

SEQ ID NO: 86997 - DNA, 350 bp, Zea Mays
accggggaaactgaggattttttgcgctcaaactaccccgattacctacctaaggagatcggtacgtaactaagacacaaaacccccctaccctttgaatccaagtataagaaagatggtcataacagaaactgagtaggatgtaaaactaaatcaagaagggttccttttgaagttgcaaagtggaactcacacaaactagatagccctagggatagagaagagaccttacacaaggtttttggaaagatttgcacgtttggctactcagcaagtgtttgaactagggcagaagaaaacgcacacgtgttcgacctgttttagcacgctagagcatgcctcagcgctcg

SEQ ID NO: 86998 - DNA, 500 bp, Zea Mays
ctaaatttggccacatgattagaaagcgtttagggagaaacaacatgaggttctaaataggcagccttttcatatcagataaacgactatcattcctaaatatgtggaatgcttttctcagcttgttgatcaactgaatgcttatagtcatacatttgatccactttactacagtatgcagtttattgatggtcttcacgatgatgttaagtttgttgttatggttcaacgtccgcgaaatttggatgctgccttaatttgttttggctcagttgcaggaagaaattggggacaagaagcatgattataggccacttgatgtttcttcatctactaagtcatttcctaacatccctttgtcgttgctgctggcatctcgtgcgtctgctgtttccaagccggaggatccaccgtctttggggatgaggagaggattatttataaccacggatctaactattccgccagagagcaaaagaaatactacatgggttcatttt

SEQ ID NO: 86999 - DNA, 430 bp, Zea Mays
acaatgtcaagaattcattttatctgggaaaaaccacctgattgctaagactaagcaaatggtgataactgcttggtaagagagaaaaagaccaatatccgtctgagaccagtctttaacaacagatagtactactctcatacgaaggagtcatcaggactagggagaatacaacaggtctccataagatttttatatttctatcacaaattaccatcactaatagtattgtggtcgagaagtgtggtcttccaacgtaagaaccaaggacaaattaatgcctaatgtagcttcaagctctgtggtgatgtgggatttcatgactatttttctactcttttttacttctggtagattagagtaagattatgattaggatgccaaggggtggaatccaatgtagttctgctacaaaacaccacttatatgt

SEQ ID NO: 87000 - DNA, 399 bp, Zea Mays
gtcttggtcgagaccctcatactggttcaatcagtgcaccagatgagtggtgggctaagcaaaatgaagtaagtagacttaattttttgttttcgtagattaacaatactaatggacatctgaaagtaggaaataacatgttactgcaggcaatgtcagggtgtattatgttcaaaacagccccccttgagaatgaggacgagcttaaggttatgtttggacccattgtctgcaccaatgaaacaacccttgttcctggagttgaggattcaaattcttcatctgatgaccacgtccaagccaatttaggtgggggttaaaacagcacacctgacccctgctcaaatgcgacagggaagcgtaaggtgctgcatgattctcctaaatctaagaagaaaa

SEQ ID NO: 87001 - DNA, 348 bp, Zea Mays
acctttgcaaaactctcttttaatttcttagcacaatccaaggatttctcataatatctctcctttgattcacgaagttcatccacattcttttgtaatcttgaacttgcccattcacttatctctttctttgcctttgcaagttcaaagttttcaatggctttggcaagttttttctgaagatcttcgacttcggctatatgagctttggactgtgcagtaaggttggcttcgctagcctttactctgtctaccaaggagagcagaattttatccttttctagggcttcattcctcagtctgataacctctaactgaaggttcccaagtgcaattgcacaacttttg

SEQ ID NO: 87002 - DNA, 610 bp, Zea Mays
ccaataatagatctatcaacccaattttacctcatgcattaggtctaggagtagtttagcgttagttacaatttccccaccttaatcttcacctctctttggctctacgtcatctagatgcgctttgactgttctactaatcttgaagcaaccatattatctatcctcctcgatggagttgctcctaggaggtaggatataggttctacatgaagtcctctgctcttagcggtctgccatctacacacgggtggtccacgcacccgcagagaagagaggagttatttgcccaatcgtgaacggttcagtgacctaccgcagaccgttcggtaccccgtagagctgacccaaggtcctgcacatcgcatgaaggccttagggttcgttagtatttggtacaaaaatgtgccaacatactttttggtgacttcattgggtacgaggagaccagatctattatatcggccacaatggtcggttccaaaggtcgctttgatgtctcctaggataacatccttaggccgactcttgagagtttgtcgaccgagaatttgaaaaccttatgaagcaatgggatgaacattcattgtgacaacgtgcctagtgctca

SEQ ID NO: 87003 - DNA, 662 bp, Zea Mays
atccaatggagaccgtaatgtctttgcaagcgtaaaacattgcattgttcgttgattcatacgcagatgactattctaaaaataaaacatgatttttctaagttttgcatcaaatagtaactatgacccacatagaaacaataatacgatgttacactgaggatccggccaatagggttccgatgctacttgtcagggtaggaggagacaactcgggattgacatggggtagaagcagatgacgaaacgatggccgctccttcgtttacaagagtattctcttcttatcgttagcgggcgttatagcgtttacttgtatatccccactagggatggcaattctacccacgagcacggtatccgcaggttttatagctgatgggcacggatacacgtataaaatctcgttcacggataaggatatgggtaaaaattctcgcacaagggtattgttcggacataaccattcgcttgctggtaagacccgctacccatttaatttggcatcccaaccatatccctaccctaaaacgctaatccctcccctcgccccgtgagttcgtgacccattgactccgtcgctcgccaccctctaacgcattgcgcacgtccgcactccgcaccagcgtcgccactgcaagtcctctactcctttgtcagca

SEQ ID NO: 87004 - DNA, 369 bp, Zea Mays
tgataatattaaagaaatagagaccgcgaaaacaaagatagtagaagttacaagccctccagcaggaatgacagtgctgaaggcgcaaaaagacctcacggcgactccgaagagaaaaaggatggtcaatgtactagatgtgttagagacgataaagtcttcaagctctactccgaagaaaattgccgaagttccaaaagcgcaaattgagacgatagcctctgaagccgaagctacaaagcagcaggctgacactgaagctgggccttcggagcccgccaagaggaaatctttagaaatcagaggaaaagaaacagaagcggcggaacaaattttggctgaagaaactggcactgccacccccgaagc

SEQ ID NO: 87005 - DNA, 471 bp, Zea Mays
gaggaggaagacgttgtggccgcccctgctgcgtagattgatctattgataaggaacgagaggaaatcttgaaggagatcgagtgagcttcgattcaggcagggttgttgtagatcgtgtcaattcctttctgtttacacgcgggagaggtaggtattcacgccaatcattgtgttcatcgtgaaggcaaagttggattctatgtttaacgaccacagaggtcagctcgctaacggtgacatgtttttggtcgttggctgggttggacagagcttgcattgtgccgccgagactcctcacaaccacatattagaggtggtcgtcattttctagtcgttgatatgcttttctcttgtagtgaatgggcattcttgaaagtcatctagggtggcggtgaataagcaaaatctgaaatttataactttaaacacaaacttcaaccccgattaggcgttagaacgagaataagaa

SEQ ID NO: 87006 - DNA, 1618 bp, Zea Mays
cagcttcttgctgaagcttcaaagccttactcagcaataaactctaccaagaaacaaaagctagctgcaaaatctaaaagtttaaaaatttaaaaggtcaaaggggcggacataagagtttataccttaaaatttgagtagaataagctcccagtaatgtgttgtcttctatagttactgaggtctcgctcaagcttcagaaatcgaatagtctttgataaagtattaacaatctttgctccggcctggtcaggaatacaccccaaaatctcttcgtctacaccgccaaatagcacagatctgggcttatatccgccatcaagggcgaattatttcaattcagaaatatcatcatcagacagttcttggccgcctaggtgccatatgtccaactctctgtcctccgaagccttatcggtggatacttcggctatatctttcttgggagccacatcagatataagcctgtccatctctgacagtgtggtcccgaggttctcagcttcaggtgttgcttcattagcttcaacttcggtagtatcttcggcattggtaggcacaacaattttttccaccgaagccgagggcggggtcttttggatggcttgcattacgtccatcatccgccatttcttctgaccccctaacatttccctgggtagccaaagcagtttcctttcctcccgagctttgttcaaatcccttctcctttgactgcaataggctagtcagatctgaccccagggggacttagcattgcaaacgggaagggttcagtcattaccttcaatatttcttcaacatcgatagatgaagacggagaagggcccgcagtctttcctggtacatcttgtaccttcatctctgcagcagctatcctggcaggcttccgttttttgggagccgaatccttcgactccgctagaactttctgcttcttaacaaccctttgatcttctttgactgaccggatggcctgtcgtttcagaatgctcacaaccctctttctcttcgctccctcgaccccttcgtcaagcctgtcgtaatccggatattcaaagttaagagcattcatcacccaattcaaccttcatttttcacgggtgccgaaggcagctgtcatcaacagatcctctttcttcgtgtagttcccaataatttcattgcacattgtttctattagctccaaccattcaatgcagggtttgctgaatcttttttgaaatttaaaccaataagaaagtcgttcagacttttcccttcttccatcttcttcggcatcccccacccaccagaagttggaaacattctgtttactagatattcttgcaccaagtccctagtgctaatatgttctgccatgactctaaattccacttctgccagttggaaggggaccctatctgcttgttgcacaagggtcgagtcatgctgaagctcaattttaggggactcatcaccatactcataagcttttccctcttcttctcgtcggccttcacataaaactgttcattcatccacccggtcggccacttagtgcggtaaccaatcacatgagccttagtgtcttttcagtatgcaaagttgtagcacccgaagttcttgtgcagaccat

SEQ ID NO: 87007 - DNA, 1019 bp, Zea Mays
atattaattacttgatttatttaagtctagggttgtgggcactattcttgagaatctaagggtcttatgtgttaaaaccaggacccgtatgcactaatctttacactacgcaggacgacgggttgattaaaaggaaccaggggcttcttttgtaaaattagcgcgctgaaggggtatcggcgatagtgagccgctagatcgatatcggaccgcctagattagatcgtccattaagtgaaccggtatgcacccccgaccgcctgatcacaatttgatggctgggatttgaatgtgccacacacaatatcgcccaccggatcatagatcaacgcctatcattacccccggccgaagggttacgctggatcacatcaccactattcgtagggagatcaacgatcaggcccattctctcccctaggccatggtggattggttgccggaacagagctcccgcggcgacgccattgccgcccacaccaaatccacgcccaagggcacaaaactacgatcctgaccgcgctacgcgtagagggaaggcaagcaaactcgtacgattgatcttaccaggaatccgaggcgtgatttcttttgcccacgatgggacgcggctctgtggcagcacagtggttccggggaggaattcctagtaccttggtcctcgaccgtgcacgtagctacacctgacacgattcacgaacactagagatccccctggccaccctacggactccgagcagtactcgttggctaggtcgacgctggtggtggtgattctctgcccacagcgacgatggtggcttctaggcttaggatggttgtagtcggggttcggttcatctttatactctggcgtggggatctacgaccgattggtttggggggagtccgcaacgacccacggtcttcccagaggtcggtgacgtagaagcagagaagatctcggcggcacgtaggaggaagatggcgctgatgggctaggcccggttgctagtgactcagacgggagtgcgtgagcg

SEQ ID NO: 87008 - DNA, 337 bp, Zea Mays
gaaatgttggaacagggtgtcttgcatcagagcgatatgcgaaggagtagcaaccaaaattgttgtgatattgttccttcccaactgccttggtctggtaagataattcgtggatattgcagaagcaatcagcatttgggtccagcccttggctcctcatcgcctagatgaaaactccaactttaatcaaagcttcgggagtacgctgatgaagggatatctcaaatctctttagcacttcgactaacattttgtgcaaaggaaagcgaagcccagccttcattaaactttggaatcccatcacttcgtctacctcaggaagaggaacaatgttctc

SEQ ID NO: 87009 - DNA, 787 bp, Zea Mays
tgctgcggttgctgaacaggaggatcattgacaatccattggtcccagtcaccttgaatgttgtctgcaggctgagcttgagcgttgtcatctggtggaaaattaagatcccaacccaccgccggcacaggttgacccagaccaaaaaactcaaaaggaagctgctgcccatccgccggggccgctggcaccgggtcctcatcttgaggctgacctcccaacagagtttgctgaatgatctcacactgcaccgtccacgaatccccaagaaagccatcagcgtcagaaaaaacaatgaactgcgggacttcctccagagacgtgacccgcaccctgagcaaagtcctataaatattgcgtctgtcttcttcccacagaatcaatctgccaaaggagccaatagccacctgcaagtgctctgaagaacggtagtccatagggaatcccaacaacataagccagcattcccgattaaaataaagagctctatggttccaagcgtcattgtgccgctgaacagtgaaggaagcatcaagatactgttgcggaccgagcagaataaggttgtccctttcaagaatgctactgaactggaccagaacctgccccaggtgcgaccgctgaatatcacgcaccccaagccgacggtgttccacgaggtattctctaaccacatccctcaccgtcgggaaagtaatctcatggtcaggtaaaggttgaatgttgataatagcccagtcctcatgcaatggcgggagacgccgagaaactgaccttgccataattt

SEQ ID NO: 87010 - DNA, 477 bp, Zea Mays
ctgcgacactgcatcgacgattggagtgacttcagtcgacgtttcatcgccaactttcagtctctctccgacaaaccggcggagccatgggacctcagatccatcagacgccagggcgatgaaacacttcggtcgtaccttaagaggtttcagaccatgagaaaccgcatccccgaggtcactgaggcagcagtgatcgagaacttctaccggggatctaatgacacggccttcgtctgagccatacagcagaaagcgccgaccacctctgagcaactgtttcgagaagcggacctctacatcaccactgacgaatgggcctaggacctcatcggaggggcaaaacctgcgccaccagcacctcggcgcgacgcgaaccagtagcctgacaagcgttgggagaagaggcctcgtgaagaggtccatgctgccggaccacccgtctctcgtgctcgaggggcacctcgtggaggcgag

SEQ ID NO: 87011 - DNA, 1132 bp, Zea Mays
ccgacctccaagcccgcggggacatcgcgaaacgaaatgggtggcgctagcgtcgatgtcgatggggcggcggaggcgtcctcgcctctcctcttgccccgctccgctccacgccccgcggtgtcggcggaggtgacaaggcaggtggggctcgcggcgccgctggtggcgtgcagcctgctgcagtactgcctgcaagtggtctccgtcatgttcgccgggcacctaggggagctctccctctccggcgcctccgttgccgcgtccttcgccaacgtcaccggattcagcgtcctggtacgtgcagttcagtgataactggtaacctcgcttcgctcagccgtttgtgcacctcgatattgtactagtgctcttgagagcagagggggaatgcggatcggaacaagtacgctctaggagctggttgtttaagaaatttatatccaaaaatcagtacgaattttttgaatgccttcgcgttactccaattaagaggaggtgtatgagttttgacttattgcccagtgtccagttatgctatactgcgttgtgctaccaagtaaattaatttggaactcgtgctcctttttccgtgtcaagctgggcatgggaagcgcgttggatacgttctgtggacaatcatacggagcaagacaatatgacatgctggggacacacacgcaaagggcgataattgttcttatgttcacgggtcttcctctggcctttgttttggccttcactggtcaaatccttatcgctcttggtcaaaaccctgagatatcattcgaagctggattgtacgctcagtggttgattcctggcctgttcgcgtatggtttgcttcagtgccttaccaggttcctgcaggcccaaaacattgtccacatattggtagcttgctctggacttaccttgctacttcatgttatgctatgctggttgctggttcaaagtttcggccttggccacaaaggcgctgctctggcaacctcagtatcttactggttcaatgtggcactgctagctgtgtatgtgaaattctctgaagctggcagaagaagttggcatggatggtcaggggaggcactaaaattgaaggatgccaaagtgtatctaaagctagcaatcc

SEQ ID NO: 87012 - DNA, 417 bp, Zea Mays
ctcgagattcgggctctccccagaagcgtcagaagacagctggtgggactaaggagcccgaacctcgggtctaggacgggcagaggggcgtgagccctccatcaccaccatcttcatatcagataccaccaccgccgccgcctgtgtcagaccgaccgccgtcaccgcaagggcagcgacaacaacatcagcagggaccgcaacaatagcagcaacagcaacgtgtgccccgcttccaaggccactggaaggttcacggtcccaagtaagcttaggccctcccaatgttcgctcgatcgtagcttttatgtcgataggtcttgatccgccctttgcctgtcagggcctcctcttcctcggcatccgtagacgttccctccccgccgcccgccatgcccgccggggggtctggttccc

SEQ ID NO: 87013 - DNA, 748 bp, Zea Mays
ataactttgatgtaatccgatcgttagcttatcacatagaaatcgaagaaaaacgctcctgaactttctctgtaagaacaagcagaatgtaagaacagtgacctgaagaagatcactgattcagtgaacctatcgccgccggtgaacttgcgccgcgatccccgctagccatcgcgattcgtgcactctggtgtgcggataacggctggcggtgaaagatctcaacgcggggaagagttggagccttatcaccgggctgttcaccgcgccacttgccgcgcgatcggccgaagtgttctcgccggagttcatcgcccttttatagccgtgccacgtgcctacgcttgttaccgtgttgcaagacatcggagtggatagcccgtttattgccagggtctttacctcgttgagcgccacagtagctgtgctccggtgaccgcaagttcatcccatctcaaattcgcgaaaccttcgagtggtctctataaattaagtgtttagtgtgctccgctagtttgttatgaacccagagcaccgctcctcacctcctattagccaccttagctcctgaatttagcttctcccccaattcggtcgccatcgccgccgaggagagctcttccgtggacagcttcgcctgatgtagttctagcccaattaccgtctgttctagcttccttagggtatagtgatgctccccgtatttagaatttgaacgctaccgtgcctagtcgttgggaacagctcg

SEQ ID NO: 87014 - DNA, 678 bp, Zea Mays
gtttatttcagcgcactaataatgaaataatgctaagatatattttgatcttcttataattcatttaatgtgttccaaatacttttaaagtagagactaaactttagtccatgaactaaatgaaccaaacagaccctaagattcctaagattatttctactcgctagctcaagtcatctgagtacgtaagttcttctcgtacttaaatctaatcattcaccacatagaaaacgtaagaaatttcgatcaggcaacccaaaacctaataaactgaacctctatatcgtgcgtctacgtactaccgtgtcactctatcagcacgcttgcggcggccccagacctatatcgtattagctaagagagtaatagtacccacatttcacaaatttgtctaataattcgagatatcatattagttattatcagcttgcactggccaaacatagaaggcatatacacatttcacatacacagtttccacccagcatgccacatgatctaaattactaaatagtaactgcaggacaaaataagtgatctaacgggtcaaaatcaactaaatctgcccaaaccattagaagcagaacgaaatacttttcacgtactaggacagtaactagttacgtcctcatttacatatactacacatatgggtggtaatggatcacaatccaaatg

SEQ ID NO: 87015 - DNA, 639 bp, Zea Mays
cgaggggagtaaaagatcttggcgccaggataagctcggacccggccactggatggttcaccgtacccccttgctctacggccggccgtgatgatcctcgccggcgttagccgcttgctgcccgtgcgccacatagtttgtggtgttatcacgtcgcagtagaccaccgtaggtagtctatccattgcctgtgacagtgccccggtgaatgccacgatagataacttcggtgactcctcccctttctcactgcccgcccttcctcgcccaaattcatcgtattctcgatcgcactctataacttgatgccctagtgagctccgctaggttgttacgaagccagagcaccagccctcgcctccgattagccaccgtagcgccccaattcctttcttcccccaattcggttctccgcgccgccgtgagccaccgcgccgtggaccgccgtctccaggtccgttctcgcccttcttccccttgttttagcactcaggcatgcttggcatgcttgtccactcgatcaattgagctagaccacacctaatcaccgggaacacctcggtttgtccttaacgttcgccgtcgtcgtgggcagacaagctccagcccggatttgtgcaattaacggagggcttaggg

SEQ ID NO: 87016 - DNA, 356 bp, Zea Mays
attcgtcaggcttcggggcttggaagtcatgaggacttgctgctgctgctggcacaggactgagtggaggcctgcaggccacaggagctggaggaatcttgcgcagaaagatcgtttgagatcggagctgacgagctgctatagagcatgcgcacagcaccggttggacctcaggattttccatggagggatagagagcatgcgcacagcattaggttctggttaggtggtcatcagtagcaatttcaggcccatgactgatttgcgaatttatgtagtttatttgctgtaggaaattatgtttatgcggatcaaaggatgcctttccaaatgttgtttggcatggctgcaaacag

SEQ ID NO: 87017 - DNA, 612 bp, Zea Mays
tttgcattcggtttgccttccaaaacttggtgtgacaatatctgcttggttgttgttctctacgagggctttgtgtatctcccaaccagaaatgctgcagttgatcaccaacatgcccgtgtacgaggcatttcaaagattgacatcgcttgcgtcaaacctcaaggggacgtgtgagcatttggtttggacgacaggtccaatgactgcaacgtgatttacacttcgataatagtccctttttgcctcttgttttcaaattatgtgctagagcctccactgatcatgttgattattacgtgaatcggaggctgcgtagccatcctcattcttgcatgggggtcgtagcaattgtctttgtaggggaattgttgaggtggtgaggggagttgaggcctttcttggtgaatggggagaggttggtagttttgttcatattgttggtaggtgggttaattttctagttagaggtgtgggtaaaaaggttagaagatgtcggttattgtcttagctgcctggtcagggtgggtcctcgctagcctctttgcctccgttctctccttagcctctttggtagtatgacaatcattggttgagtgcacgacatcctcg

SEQ ID NO: 87018 - DNA, 423 bp, Zea Mays
gcacgatgaagaatgaattcttttgagttgcatttggttgcactagcagtgggagtactggtcttatttagattgctgtcttgttgtactcagcatccttaagcaccagtctgctggcaattcgtttaactcatctgtattcattccttagttttgctgtggaaatctccaactctgcgttcgtctgaaatattggcagcaccatttgtgcgcacctggatactaggcaaagttatctggatccttcacaggcatgggctagggagggcatgagtttgtcccatgctcccatggttggaataaataaatactggtaccacctacaaacggatggggataacattttcttagtttaaagttcaacagattttcctttgttacctgatgtaagtgcatttgttcattgattggaaacagaaaaat

SEQ ID NO: 87019 - DNA, 379 bp, Zea Mays
tgtgacaccaagatgactaagccctatgacaacatatgaccaccgcaccggttttggctcagccctataatgctaagccattcgaagtgtattgtgatgcttcaggcactaaacttggttgtgttctgatgcaagacaaccaagttattgtgtacgcctcacgagctttccgactgcatgggcaatactacccaacacatgacttggaacttgtagccatagtgcatgccctgaagatttggaggcattaccttctaggagctcattgtaacatctatatcgaccataagagcctcagatatatcttcactcaagccaatctgaatatgaggcaacgaagatggttggaactgataaaggattatgatttggaagtgca

SEQ ID NO: 87020 - DNA, 274 bp, Zea Mays
tagggcttcgcccttaaagatgaaaaattggaaggaacttcatcagagaacaatgatttggacctacgacacttgggtggccaggaactctcggaagatgatatctctgaactaaaagaattttctattgttggcggctacaagcctagatccatgctgtttggtggtgttgactaagaaattctagggtgcatccctgatcgtgtgggagcaaagatagtccacactttatcaaagagcatcaaattcccgaagctcgaacgagacctgagca

SEQ ID NO: 87021 - DNA, 276 bp, Zea Mays
tggatggataacgccggggaaagggtaactcatacgtggcaccatctcctgagctcggccggagttattcaccggcggtcaccgtgactcagtgagctctcgccgcgctgtcgcacatgctttgattcgcctcactgtgcctcttccttacatggttgccatgcgttaatagcccacctcgtagccgtggatcgatcaccggaccgccgtgcctatatataggacagggagccaccacgaggtgctcgatgttcttcaagcaagcttgagtacaac

SEQ ID NO: 87022 - DNA, 494 bp, Zea Mays
gggcgatctagctctctctatagacaatgcaagtgacaacttgggctattctggttggctagcttagatatcacctgaatgtgtaagatctacccataattgtatctaatcattcaacatagaaagggtgtaggatattatgcttaagtagcatgagcctccctacatcgtatatgtgcatacaaccatattggcgctcaggttcagcagtcctaggccaatatcccctctctttgtctctgattttctctggtatccttgatattgtggtgtttcatcccgttgatatttggtgtaccgtataggggtatggtgtgctttgctatgctgcatcgatatgactccactagtgcacgtagtcgatgaagtagtggcctctaaccccggctccaacaatacaaaccgtgcatcgtgttatgagcgatgtagtagtcttgcttggtctagtcctcagctaccttacatgatgctagtgctagatcaggttgatcctt

SEQ ID NO: 87023 - DNA, 276 bp, Zea Mays
caatcgtccccgtggggtttcattgaagtcgggatcaaagtcacgatgatgttctccacagagaatttttagtggctcacattcactcctatttgatcgcctcaccggtcattcagtacaatttcatttataccagaactaaaactcatatcttaatctaaattgatccttgaattttatagtgtgaaatttagaactcgttacatttgtagttcaaattccttgacatttcgagggagtattatgtcatgcgtacctaatctttatttatacgaa

SEQ ID NO: 87024 - DNA, 775 bp, Zea Mays
ggtcgcccctgacgtccctttgcgggcttcatcggcatggttggggcgggaggttcagcagcagcaccctcccaccgaggcagggcactggagctcgcctcgtcatcatttgggcagggaggatgtccactgatggggattcccccgctcaaccagaggccgtagaggtcatatcctctgtgtctgtcgacggggtgatgctctcccctggactggcgcgagcaagatgagcatgtttcttctccctctttctcttatgacgatgcttcttgtgtgatgccgccaccacttcctccgcctcccgctttcacttcttctccgccttaatagcagtttcttcaggaagagggggcacaaaaatcgtgacgttcccaagcccctgcaaaggcgcataataacgaaaaccctaacaaaaccaaaagagggagaggagaaggctcaccaggtaattcaaccttgcctggttgaagggcagagaccactcacgtccataaaatctgacatcacatttgttgtgatagtaaggatgtgggccaccacctcctccttcatcaggttcatgcacggagtggcgatcgtagttgcccgcgccagtgaactaccacgccgtcctctggcaagccgcaagtgttgaaggcgacgctacatgaaagtgcggactagcctctcgtgaggccttgcccgtgctacttggagatagcagccaacaaatagtttatcttcggcctaaattgcttctccgcaccataagtcgagtggggccgagccaccgtga

SEQ ID NO: 87025 - DNA, 774 bp, Zea Mays
gtcttcccatagtggtggttgtggtggtgggttatggttctgccttgcaggtggtgttggtagctctgggaatggtcggccatggctgattgagttcttgaactccctacagttacataggtaatggcacatctccttgtgatacaagtcatcgaggatctcgtctagtgatctcatgttgttgttgttgttgccacgagggggaccatgctaccatgtgggtggtagtcccatggcattgatttctttcctcggcttcttgtcccagtgtcggtcttaccgcaggacatcttctttattcatggacatgtatttttcgctggtcgatgaggtcgtgggctcgtttgtagcggtgatgtatctgtcgatgtcacgtacgagtttctcagaggtcgctagatcccattggaggatggcatgtacgaaagcctcatcatgagatccccggtagaagtcctcattcattgctacctcagtgatgttggggatgcggttcctcatcgattgaaaacactttagggacgagcaaaaagaatcatcctccttgcactttttggatttgaggtaccatggttgcgtcagcttgtcagagagtgactgaaagtgggcaatgagcctgacacaaaagtcggccccgtcgttgatgtagtgatgacaaaggtgaggaagccactagggcacatcttgcaccagcacgattaggcggtaggatgtcatcacatccttcattgcctctgtagctcgggtagccgtgaaataaacggccagctagtc

SEQ ID NO: 87026 - DNA, 290 bp, Zea Mays
acaaggctgagaattcaaggcctagtccattcttcagttgtgaaaaatgaatcttgatattctaggtatgagttcaacccgtacgagacttatactgaaaggctggtatataaaataattatacggcacagtgattctttgttctccttttccttgctttagaattggtggggggttgttggaatttgggcccatttgagtggcccattctattgaaatttcaaagcaaattggttgttggtcttagtcccatattgctagttcaaggtggtacggactaacttatatag

SEQ ID NO: 87027 - DNA, 605 bp, Zea Mays
gcattcgaggtcaaaggatgttgtggcttgaggtcctagggttggacatattgtgggatgtaaggtgagtagtacgaggatgtactaaacacttcttttggctgggatgggtgagcagctacaacaacaagttcttttttacttctggattattatctggcaggtccttgttgtgtgacatttatctttgccacaaaacacacaatacaactttattagttgtgtgttgaacctacctccgaagctctggcctcctcttccccctctcggagctggtgggtgaaagttgctttgggaggattgttgttgggtgcttgattgttggtgttgacttgattgcccttgagactgagcgactttttcctcattttgagctgggttatgtattcttcgaacatgccttgggtggaatattccttcgaagcccttctacataccttttcacttcctcccttctctagcaaaaatcattatatgccccttatgtactcatccattttatgcagcagcttctctagagagtgagggggtttcctagcaaagtactaagctactgggcccagaataagccccttgatcattgcctttatgacaatgtcatctgt

SEQ ID NO: 87028 - DNA, 785 bp, Zea Mays
accatcatccgctggctctgataacagatcctctggaaccatatcttcaagagtctgatcaaagttcgccagggacaattcttgtagaccaatgagggcagacagagcaggagaaggaactccactactttccccactggtgacatactgctgactgttctttcgagtcaaagggacctcatcttcttcctccccgtcgttttcatcagcaacacaaacaaacacccccattgggatcagcagcagatggagcaaccccattgggatcagcagtagatggagcacacccattggggtcaacgtcaataaactcaggcacaggcacttcctcagcagcaggaaccgaaggaccaacgtcccaatccaaactagatactcgccgaagacgtctctttttctttttctgctcatcagcaggagaatcaagttgattggctcggcaagggcgtctcggacgaacactgacaggtctctgaatatccaaggttgtaccagcttctgggagaggcgccaccaccaatgtcccaacaggagcagcatcagaagagtcctcagccagcatatcaagcatagcacttatctctacatcactaggatccaaaggcacctcaaagtggacctgtcgttcatcatcaggaatttccccgagcgaggcaaccaaagcgctaacttctttggcagagggtcgcactctaaggcccaaaccgccatcagcgacaggtggattcgacacaaaaagagtgaaggccttggaagggggcaggttccaagccttggaaggtgga

SEQ ID NO: 87029 - DNA, 433 bp, Zea Mays
cagcagataggacataagaaagaggtgaaggtgaggataaggctcactgtgaagggcagcaccgagtagggtattgattagggctggacattcgggttatatggattattcggttcggtctattcaggtttcaaaaaatttgggttccaaataatgagaaccgaacccgaacctaaatttacaggaaccgaacccgaatagaccaaaaaattcgggttcggtcagttcggttcttcaaaaacccgaacaaacaaacagccccattactccatgttattatagcaaacaaactggtacaaaatctaaaaactgcacacacgtccatacaatgttcatgacaaattaacttagaaatacctgaaacaagtacccaataagcaatgaagcaaacaacaaaatttgtgacaagtctgcaaattggaacaaacaaact

SEQ ID NO: 87030 - DNA, 575 bp, Zea Mays
gaagccctgggcttccattagtaccaggaagctccagccagatataaccacgtcccgtaccagcgtgtgtctcatcaggcatgggttcttactcggacagatattagcgtaaaacatgaaccaaaacagcgtaaatgattacgaatttttgcgtaaatcgtagatctgtttcgaaacggcgaatccgacccgaaaattacggcgtaaaaatctcgcgcgtcccatcgtgatcgggttctgactcggacagaatttaccgtaaaaacatgaaccaaaacagcataaatgattacgaattttagcgtaaatcgtagatctgtatcgaaacagcgaatgcggctcgaaaattacggtgtaaaaatcccgcgcgtcccttcgtgatcgggttctgactcggacatattttagcttaaaacatgaaccaaagcagcgtaaatgattacgaattttagcgtaaatcatatatctatttcgtaacggcgaatggggcccagaaattacggcgtgaaaatctcgcgcgtcatacacgggttctgacttgggtagatttcagcgtaaaacatgaaccaaaatag

SEQ ID NO: 87031 - DNA, 974 bp, Zea Mays
tgatgctagttcgagccaaagtgctggaaaaggtggtttagtgtatctgaaatatacctatcgttacatggatcggtttggtgaaccagatggcgagtggcttgaagctattgaatcaacttgagatgaaatgttaggggcctatacgaaggctgaagacgaagccatgaatattgcttttggtgcccggggaaagagaaggttgaacatggtgtttgatgttattggttttatttatcctaacttctagtttcctgcacggaagaagggtcaaaagagtaagagtgctctaaagacctcttctagcaccccaaaatagaaaagagtgaagattctgactaatcgaccaaaatcatattacactgaaagggtagtagaactacctgtattctcgactgccgagtcaagtgagacgaaggctattgagtcaggtgaaacaaaggttatgtcccagaaggaaacatattttaatttttacttcgacttttaactatttatcaatatgcttattttattttgaatttccaattcatagaacaaaaggaatcaaaagaagggaataactgaaactccaatttgggatgagatatccgtggtcgatatggagccgatgatgtcaggcggtgtgtaggaggagctgaagctaatgtctaccataatagggacccctcgcaagggaaaaggatggctaatgtgctgaaggctgttttgaggcctgcaaagatggcctcgcccgtaacgccgaagattagtgaagatgtgataactaagctgaaattgactatcgatatagagacgtctcttgatatagacaaagccagctcttcgaaggctgatttaatagaagatgctgctagataaaaagaacaagataaagtcaaaacttccaaggttgaaggtttgcagagaaacaacccacgaatatattactcgccatgcttcgggtgaaaaattaactaaagagtagattgctg

SEQ ID NO: 87032 - DNA, 1037 bp, Zea Mays
gaaaaagaaaaggaaaatactcaacagtattgggctcaaactggcccaagcggcccaaccccgcgcagaagcgcgctcacgcacgcgcccacgctggccattttgcacagcggtcctcagggttctggataacaggaaacaagttcctttattgttctgatgtgttgctgacaaattacagaaaggccctccatcttctattcctttacacgacacgacctcgacggcgttcacgcgcagccgagctccgacgagctcgtagaccggccgattggggcaatggctagggttcccgagcagcagacatgaaatcggggctaccttgatcattttccctaacttaattgcgcttatgatcaactacggagctctggccacggtggtcgtgagtatcacggctatactgtcgtgttcccggcgaccagaggacctctagcttaattaaatgggttgtcgagcatcatagagctatgaaaaggcttaaacgagagagagaagaagatgagctgaccggagtacggctggccgcggtgaggttgagtttcgggtggcggagaatggatttgggggaaatcttaaattcgagctctcggaggcacggttgctaacgattgctggtgactgggtgggtgatgatgttacgcagctaggggagggctcaatttataggcggcttcgtcggtggcgcacaatttggtcgagcaacgcggcggccggaggtgaagaggattactggcgcgcgtgaatcgctgtctcatgccgtggcaagctctccggcgttgattagacaacagtgggggtttacggcaatgcagtggaaaggttgagccacgcggcgcacggccgggaagcggcggtcgccggtgagcttatctgttccagtcgtagagtagagggggaagcacgggaaggtcaccggagtggagcccagctcacggcggtgaagatctttactgggcgatgcttacctgctggccacggcgcacgaatcacgacgagcggcaatcgacggcgacgggccaccggcgacgggcagg

SEQ ID NO: 87033 - DNA, 902 bp, Zea Mays
cacacgcctctcttccattctttattctccttcctagatacttgtgtgtggggcccaccagcagtccctcacgtacccagccaagtctgcttcccaatcgtttctagctctgaggaaaaatgaccggccaccaggatgcgacctcgccgccgatcggtttttcggctccctgcgcccgcctcctcatcttccctaaagtggagctcgccaacctccgtccacgacacgtcctctccccttccttccccagtgcgctcacgtcgcagaccgtttcccctcctccgcgacagtttcttctatctccattaatggctacaattgctcctccccataattcctctctcggcgtacgtttcttcttccctgggatataaatcaaagcaccgcgcctgtgacgattcccttctagatttcccctgtctcttctcctcccgtccttgcctataaatggagccacaatgcagttgctcctcctcccccagctgctctcttcctgctttgctctgacgcccatcttcgtgctactcgcccggagcagcgccaccgctcaccactgagccttcctctccagcagctccctcctctatttggcttcctgctcacgacgtcaagactccgttgctatcatcacatgctcctcggcgccatcgctcatcgagccgcgccatgctgcatcgtcgctggtacctcctactacgtcgacttctctgctggtgccctcctcattgccgctataaatccatccccatcgccgaacaaggtataggaagacgaacattttactagctacccccttcatatgtatgtttaattgcgtggagacgtatgcgataggttccctattttaaatacgcatttaaaacccacataaagtaaatgttgatttattagcttcataaatt

SEQ ID NO: 87034 - DNA, 494 bp, Zea Mays
aaggtaaaagtgcaccaaaatcaaatgatacacctaggatgaggaataggtcttcggggcgtacgcaatgtaaggctggaataaaattaaaaaaatatatgatgatgaaaaaaaaatggttgtagctgcaaaaattgaactggtaaacttggagcataaccatgagttcataactgacgaagcagagaaacaacatttacgttgcaacaaaagtagggatgctgagttcataaattttgttgatgcaatgcatgatagccgagtgccgcaacattgcatagttgattttatatcagaaatgcatgatgggccggagaacgtaccggtaactgctcaagatctgaaaaacatgtaagcaatatttttatgtttcatgtgtatatattaagtgccataaatattactatagtaaatgtgtgtgtaatcattttttgtgcaaacaaatgtaggagggcagcaaggagaagagaaaactgcgcaaatgatgtagccaa

SEQ ID NO: 87035 - DNA, 548 bp, Zea Mays
gcggcaccttaactcagccgcctgtggagaccgtttcatgttgaacaattgtgtcttttcaactatccctgtagccttaactcagtcgcgtgtggagaccatttcatgttgaacagttgtgtcttttcaactgtccctatccctgtagaattgaaacggcaatcgtcgaacacgaagcggcgacttttgactcctctttgctcctcaaagttcgagtaaacgtcgattcagttctcgatttgaatatttttaaatggtcatcggccacatttccattcattgcaactcagaaaaaacaggcacattttcacatttccattcatcgcctagctttacccatgtcgacatcaccgtgtgattcctctgcttcttttgtctcccattcttctagctgtgaaccaaccccagagtgggatcctatagcggcatatgaaaaacaggcacctttgcactgggatgcagatggatgggactttgcagttgcatcggaatccaagggcgacctcaccgacggggacgacctccagttcctcgttgacggggagctg

SEQ ID NO: 87036 - DNA, 496 bp, Zea Mays
aaccacacagcctgacatagaagattgcaacacctttttctccacattttactcggtagcaagcccaactcttcacatgaaactgttccaccttcagatgatcttccatcttgatatagaacttttagcccaaaacctcatgaatttgtcacaaaaatgctctaaactgggcatcatgcactgaaatttcagttttcagtgactgaacataattcagttaccaacccgacagttgatcttagaaccaatttttctccaggttatgtataggatcaagtccctcacccttaaagacatttgttcatttatagatgacctccatttttgttataaagatctcagctccaaattgcctagaaaaagcaccgcacagctccaaagtagagccaaatactgaaattcagatatggtacgctgctacacaatctgaaaactcagaattcagccaacccaacattgaaccgcactttctcctagttgcatacgattttagggg

SEQ ID NO: 87037 - DNA, 451 bp, Zea Mays
gggggatagtgtttcccgctaatctcatagtaatgggtactcagggaatagatgtcatcctagggatgaattggctagacaagtatcagacagttatcagttgtgataagaggacaatcaagttgatgtccccactaggagaggaagtggtgaccgagttggtcccgcctgagctaaagaaaggaagttgttatcagatggctgttgatagcagtgaagcagatccacttgggattatcaagattgtgtccgagttcccagatgtgtttccaaaggacttaccaggcatgccactagaacgaaaggttgagtttgccatagagcttcttcctggaatcgcccccatctttaagagagcttacagagtatctggaccagagttggttgagcttaagaagcagatcgatgagctatcaaagaaggttacatccggccaagcacctcgccttag

SEQ ID NO: 87038 - DNA, 562 bp, Zea Mays
ggaagaggagaaagttcagctgcaccaagatataagttttttgtcagatacgaggctaaagtacttacgaagctaaaatatgacaaacgtacatatacgcctttcgcactctgtggattcctcagcttttcttgtttcctctgaagcaagatgagtttcttcttcgttttgcctagtagctttgtctactatctctcggtcgtcgttcatccacacttcagaataaaatttagcaccaaggggcatagcttcggttgaaggttctttgatgtcatctgctgaaactgagaattctggctgaattacagccttcacatgttcatagccagctttttccagcagcgacacagcccccgagctcctacacaggcaccaaaatcccccctgccagttagcacttcgtcaaatgcttcgattcacccttaatccatctgatcacaccctcgggatctccacggataaaatttcgctcagccgagaatgcgccaacactagaaaaaacgttctttagcttatcataacattgcatagcgacggtgtatcattcttccttcgcttgacg

SEQ ID NO: 87039 - DNA, 379 bp, Zea Mays
gtatttcagtatcactggtggacacggattacagatgagatgtgggcggtagagagtgaattctcatgtcaatctagtggaggcgtggttgttgtgagaggactaatgaggtatgaggtggccatgaactaagatgtgttgagctgagagatgagatgtgttcgtaggggtaccccctcagccttatatagatgaccatagggttatcccattacaagtcgtgatcggtctttaaataaatcatccttttaaagcagcacgccttctagcttatccgaaattcagttgcccttcatcggagtcatctttgagtatctagaacttctggtacgctcaacctccccgcccgaggtagtgacgcatgactcgatcatctggt

SEQ ID NO: 87040 - DNA, 1189 bp, Zea Mays
ctctaggtcaccacatcagaattgtaggcctatcaaaggagaagaactttgcttaagggtgtaagcatagttgttgagaagaaattggagataattaagcccaaagttggactgtcaggctgatggaactctgaaattcagaatttcagtgtaacaaagctaactttggacttggattcaaccttgatccagtgctcaactaagtttaatccctatagtcgagttgtagctggtttatatcactacaatattgctgcagatcattggttatgttgccatttgaaattgggagaaaatggagctccaagatgatccgttaggccaacaaactgaagaaacgctatggtacagtacacccccaaactgaaacagatcacggttcacccccctacccatcaccagtgatccgtcgccgatggttgattgctcgccgcgattcgtgcaccgtggtcagcagataagcacgggcaagtaaaaatctgggcataggatcatctcgagctcggttgcggctaagcttgccataccccccagctcgtcggtcgctcggataactctcactgccgtcgagctgtcgccgttgcgcaccacatgccttagcgctggctctcgtcacggtgaatcatgcggtgcatgtccggtgatcaccggagcacctgccacggtgaaaggccacctgtgtcaagcgccagagcccttttcccctccggtcgccagtgcgattcagtcaaattgatcaccaccgcttgagcagcctataaattggagcctcagcatgttccgctagggaattgtgtatccagtaaacccactctcagctccgatcatctcccacagcttcccaatttgggatttcccccaaaacggttgaagaacaccgcaaaaccaagctcaccgtgggaagctctcctcaggtctgatcctgttgtctttagtcttgttctagcatcctcatctgtcttgatactcactaacccacccaattgaattagactgtcaccgttcgccgtgaacgcattgttctttgaatcattcgcacggtcaccgtggccaagggcaattgggtagttattcatgcaattaacttaggggaaacattagttggggcgtgaattcggtttcggccaacgttgggcgccagtcgttgccccatccggccggtctacgtgctcgccggagctcggttgcg

SEQ ID NO: 87041 - DNA, 449 bp, Zea Mays
ctttgtgttggtgtgtttcatcatgctcgcgctatcatagctaaatataatagcaggggttgcagaaagattaaaatatatggagttaacacaatagcatacatctattactctgtatgttacaagactattacacacatatcaatccaatcgttaactttttcaagtggtaaaactatgtcacccacacatatcacagcaacggacaatgccacgatacaccacatcatccttagatgacctttgagggccttcatgtacaccaggataccaacacccgtaaggcctccaacgtcctcaaaagtccaaagaacccatgtgtcccaataaccacaggccttagaggaccctcgacttgcccaatagtaacaatgagaccatagacgtcccaagggacaagacccctaagatgtcccaaaaaccatggtggccgagacgcaccaacagat

SEQ ID NO: 87042 - DNA, 893 bp, Zea Mays
aacatcctctgtgtccatagagatgctgcccctagctgaggattgggcctcggagtctgtagttggattataatctgcatcatctgcgcgatggcgctttgacttgaaacgacctgcaagcttcttcttaagaccacctagaccactgcaatatatatgaggaatatccactggttaatagttgatgacaccacaacatagagaaagaaagtgtaactttctatcagggaccagactatccgtgccaggggtccggactatctgtgccatcctggcggacggtccgtgaccgtccagaggcgatttctagaaccctagccgtcccattcagccaatcatcaattcgatagaaaataaccatccaaatccgttcaaatttttgcacaatattcacaatgagtaacacgagcaattccaccaatcaaaattgtaattccactgtccaattctagatcagagagaaaaccctaagaatccccaaatttgaataaatcagactaagtccatgaggttttgaaataccaagatgaagacatgattgatgaactccaagcaatctcccggacatttcgtgcgcaatttcagttcaccgtccgctcacaatcgacaagagtcacttttggcgtgtagagtgtgtgagagaaagaaacttgtgttgaaagtgacaactctaactgcctctacccgacttatctgcctctcgcggacgctgtgcgaggggtctgcggacggtccgcgccctgtcaattcaaacagtctactctgctgactcggactgtctagaacatgatacattagatggttcgcggtcattacccggacattccgcggtctgatactcaaatctccaaactttgttcacattttgattttgaatttcaaatttgatttgt

SEQ ID NO: 87043 - DNA, 420 bp, Zea Mays
attcttattgttgcaaccatcatgattttactcatcggatatctaccgctatcccgtttgataatcttatcgcttcctttccctactttgttgttgttgtgctgtcactattgtagggttggtcagttattggtgtccttttctcaaagaactactctggtgaaaattacttcataacatcttatccaagccgactcctaaccttactagatagacatgtataagttagtgttctagttgtggcacgaatgacgaagtatatgtgtaggcattatgatctagtagggttagtgtagcattgttggtagatatgagtattaaggcatcactattggtgctagttatgatttatataagaacattagctttttggcaaatgaaattgtgttgatttatcatgctcatgctagccttaaaatg

SEQ ID NO: 87044 - DNA, 271 bp, Zea Mays
gccgaacgcaccctcagccaaattagctgagccgaagactgataatattgaggagacaaaagtcgaagggacaaaaacattagaagttttaagcccttcggcagaagtgacaatgccgaaggcacaaaaaggtcttgcggtgacccctaagagaaaaaggatggccagtgtgctagatgtgctggagacggtaaaggcttcaagttctattccttcagggaaaattgccgaggcttcgaaaatacaaatcgaagctgaagcaagaccggcc

SEQ ID NO: 87045 - DNA, 960 bp, Zea Mays
tcggagctcaccaaccacctcgccccggccttatctccctcaacccggtataaaaccctggcgtgtccgctctcgtttgaccacgcccacgcgagaaccgacaagccgtggctctagattgcggcgtgtggtgtgggagagaagcggaaggccactgccgtcgtcaatccacatcgtcgtcgccgctctgctccggtgacttggtccagggcgtacggacgtgtgcgcgtatccttttggaggcgggattggtgcctgcgaagctatagggcggcgataattgttcaccggagcatttgggacgccgcagattcgtctgtcgccgtggcctgtgctctacactgcgagtgcgccagtaagaatcccctccttgttctcacttggttctcctacttgtgtacgcgtctcggattgggttatggggcaccagggggtgagctttgggtactccggcgggcgctccgccgtggtgtttggtcgccgctgcgacgggccaggttgaagacgacgaccatgggccgttgatatgggggtgggcggtccggatcgaatctgtggctcggtttggctagggatgtgctcgaccgatgatctacataccagcggttcagatcaaatggggatatcgattaagagaaataagttggggagcgtccgatcggaatcggacgatcggtgcttgcactagattcattaaaccgtgagcgtagatctgggatctgagggcctgaaacggataccgatttgttttgaataggcttctaatcttagccgccaggcgtggatccaacggtccaaaccccaccgtacccattcgcgataacgttttacaaaacagaccttatgattttagaaaataggacccgccgtcccgtattgctgttcactgtgtctgggacattttaccccgtggcccctgcacttttcagattttggcgcccagtccagaggagatcagaa

SEQ ID NO: 87046 - DNA, 1365 bp, Zea Mays
agtattttgagataaatgtgcccaaagttgggctgtcagtctgtctaaaacctaaattatggtattcagtggcataggatgaactttgggggccattttgaagatgatcctgtggatgtttgagcatggttactacagtcggtttatagctggatcatagggctacaggtttgctacaaacggattagtaagttcttatgcgaaaattcaagattttggcgtcacaaatctgtctgttagactgactgaaggagatcgtgatggtacagtaaccaaaaacaatccgcagattcagtgacctggccgccgatgacccttcaccgggattagtgctgctcgccgcgattcatgcgtctgggctatggattaagttcgccggtgaaaagatctcgtcgcggatgggttcaagctattgtggccacgctgtccctcagttccctgtgccggcaacgtggtcttacggtcgtcaccggaatccgcaatattcaccacggttgcgccacgcctccagcctttaaccgcaccgccgtgactcacattagccatccgatcatcgtcgatgagtctgccacggtattctccacgaatcaactgcgtcagtagcctccggccgccagcgcgtcttcacgaaattgaacaccactgccttgcgctcctataaattgatggcctggtctgttgcgccatactatcacgaagccagagcacccattaccgccttcaattagccaccatagccggagaatttccttcttcccccaattttgtttccgccgtcgttgtagaaccttcaccgtggtcagtgaatcccaggtcagttcatgctccctactgtcttgtttcaacatccgtggatcctcctgatgctccccgacccggccaattggactaggaccccatagatcaacaggaacgcgcttggttgcctgtagtgcccgctgtcaccgtggatagtgtgtgttagaacgccattagtaaaattggttgaggggaaacactcattaggacttgaattcagtctctgccaaagtagaacgccggtcatcaagttaatcggctagtacaacttcaccggaactcggccccgcgctgccctctgtcgtggacttcagactgtgaagagatagaagtgcaaggaccctttcgcatatgtcagtgactcagttaaatagtgcgcatgattcttctatagatattcaaaccccggagggctccagtgtaaaaccgccccgcgggcgcgagcgcgtgtggatttctcccctgttgtaggctggttgggctgaattcagcccaacactattcattgcttttccttttctttttctacctagattaaagaaattatagaaaattacagaaaaatgc

SEQ ID NO: 87047 - DNA, 549 bp, Zea Mays
cacacgtagacgccgcacgacacacgaaacaacactgcggcacgcgaaacaacgcgcacgacggtgcgcgacacgcgaaatactactaaactgtgtcgtatttattctacacatattaaatgcaacacttaagttggcataacgacaattagaggtatttatcgcatgcatcgatagaattaacacttagttctgattgatttactactcggttagccatcgtttaattacgtaaattaattaacgtgagcgattctaggcgaaacaatttattgtcgtgcgacacggcgcataactcagtaaacaaggtgcgcggaacggggcacgcgatacgcaatactcgctaaaccacaacgagtttataataaacaagtagtaaataaaaaacgtttaagtttgtattaatttaacatttatttataaaagcgcgagatgaactataaactagttttaattagaaggtcataagtatcgaataaaccactaattaaataattaaaacatgtgacgtgataaaatacgttgctaatatgaaatcggtgttgctac

SEQ ID NO: 87048 - DNA, 489 bp, Zea Mays
ctaagacgcgatgaagtatggatcagtgtttatttaatcatttatgatgagatgttagtgtctgatgtgaccagacagatcgtagttgatgtatagggtgtgtttattgatttcatcgtttgaaatataagcttcatacttctaacaactattagcatagcatattttttaaaccttgattcgatgagttactatgaaaagctacaaatctcctgaccttaactggagcgtagacactgaattttgatggcgatgatgcatgtctatattgtgagaatcttggcaccatttatttgttgtttatatgactttttgcaaacaccaatcacttcaatttaccttattttaatttcctattatcttctaaacactgtcatcttctcaataagcctctatgcttcatgattgtggcagtgcctaatagttttcttatttaatgttttgttcttcatatttgcatgattatatgagccatcctgataagatctt

SEQ ID NO: 87049 - DNA, 471 bp, Zea Mays
gttcagctacagtaaaagtaacaagttgttaatccgaagcaagaaaaaatatcaaagctatgaaacaattaaaatagctatgcgtctcgcacgctaagcagcctcttcggctcgtttagcttcttctcgagcttcatgggattatttttcgttctttttatagcttcatcggttatctctcgacctcccttcatccaaacgttggaatagaatttcccacccatcagagtagcctcagccgaaggatccttcgtgtagtctacagagaagacggtctccgtctgagttgcagctttaacatgttcacaaccagtcttttctaaaattgctgcaacccctctggcaccagcgaaggcgcataaatcaccacgatcgctaagtatctcgtcaaaggcttcagcttcttcgccgatccattcaatgattccttcaggattgcctctaataaatttttgctcagatgagtatgca

SEQ ID NO: 87050 - DNA, 711 bp, Zea Mays
gttccaagaatgctccaagtcctcgccggatggcgttgcgagcctgtacgcgctgggggacgccttcgtcttgacgatgaaagggccctcccacttgggctccagcttgccccgggactctgtccgagctgtccggacgagtacgaggtctccttcgctgaattccctcgggatgactgtgtggtcgcgccatgcttttgtttgggcttggtatttgtttagagactgtagggcgaagacgcggtctccgtcgatgaggtccttcgaagtgggctcgtccacgtcggggacagctgacgggactgtccgtggtgacccatgttttatttcttgcggggtcatggcctccgatccatatagaaggcggaaaggggtgaacccagtcgccctgcactcagtcgtgtttaatgcccagaccgcttcaggtaacaaatcggcccacttaccctttttatcgtcgaggagcatcttcttgacagctgtgaaaaatttgccattggcgcattccacaactccgttggattgcgggtggtatactaaggcgaaggcaagcttggtgccaatggagaagcagaaatccttgaagtcttggctgtcaaattgcttgccattgtcaactgtgagttcggacgggactccgaagcggcaaacaaagttttgccagaataatttctgggcagtcttcgatgttattgtggatacagccctcgc

SEQ ID NO: 87051 - DNA, 382 bp, Zea Mays
aagacatcaaggaaattatccagcgccccctctggtctcgcttcggccttcgaaggccgaaggtcactattgaaagtgacgtcgaagcatgccagaaggcctttagcaatgtttgcgccgtcattggcacaagagatataattcaagagcacctagcctacagagtgtggccacttgtggagagctgggatatgctgaaggagactactgctgaatccagtgaaggtggcctggttctattgaaatataccttcagattcagagagaagtttgatgaaccaaacgatgactggttgaaatgcattgaagctaccagcgacgagctgcttgggacatattcgaaggtcgaagatgatgccttatccgcagcctttgggggccg

SEQ ID NO: 87052 - DNA, 1054 bp, Zea Mays
ccctcctcctttttcttcataactctcggtcctcgacggcgaacggcgccaggccaagctccggcgagcctgtactggccaagacatgtaatggccggtgctctaacttggttgatacctaattcaacatctaacaatcgtttccccatgatcaattgcacggttcgagctcccaacctctctgctcacggtgaccacacaatccggggacaattcaaagtgttcccggtgatctaatgggttctagcttaattgttcgggtcgagaagcatcaagggcacataagggtactgaaacaagagagcagaggacctgaacggacctgtagcacgatggccacggcgaggtgctcacgcggcggtatgtagaccgatttggggataatgggcaattaggcagctctggtggacaattagaggcaagtgctggtgcgttggacgcgtaattacctagcggagttccctgaggcttcaatttatagcacgcaaaggtggtggtgctcaattcggaggagaagtgccggtgaccgaggagaggggtgagtcactacggcgatcaaccgtggcgatcgcagggcaaagagctatggcggtcactaggcagtcactacagctcacgatgacgcgataaatgtcctaaggcatggcgtccccatggtgaatggcgaacatgccggtgatggccgctcggccatgtcaccggtgcgaacagatgaataatcgagcgcatagtacttccaagctcatccgcggcaagatcttttacccggggatcgttatccacgtttatccaagcgtgaatcgcagcgttggcacgaatccgcgtgcaagatcaccggcggcgaggtgcactgcacctgtgattatatccagtgcactgtaccatcagtttctcattcagtcatcctgacataccactttgcagagcctagatctcaaattttcatgtgagtacttactatccatctttaacaaagttgtagctcaaccaaccagctacaaatcgactatagtaactatcctcaatcgagcactagatcctattccaatttgac

SEQ ID NO: 87053 - DNA, 720 bp, Zea Mays
taaatgccgacttccctctctgtctgcgaggaaaacagagaaaacccaggaggaaataaccagccgtcactcaccatccccagttcgttgccgattcgatcttgggaaggcgcttagggcagcatcactggcgtcatcgcatcaggtagggacaccccaatctactccgcgttgatttacgcatcgtttagaacttgtcgaatctgggtatggggccttggggcgtcgggattggccaacatcggccatggccaccaccacgtggggggaaaagcagatccgccgcagctggcttccagggttgaagacaagggcgctcattcgttggatcaaaacgggtggtcgagattagatcttaggtgatgaatgaccgtgatcgctggatctacttgaacggtcggatttgaaccgagcgatctcccatcgaacggtttgatgaggaccgtaggatcggatcggatggctcaaagtaacgaaagcttcataataaaatctgaacccttgaatttcaatccaacggtggaaatcgcatgccgcatcataagcgtctagatctaatcctagccacaggtcttagatctaaaggctcataacacccgataccccttcgctgcacgcgttttgcatctaggcctctcggtattcaggaaaccaacccgcagtcccctcggctgagcctctgtgtctcggtttcttttgcgcttgggcccctgagcttac

SEQ ID NO: 87054 - DNA, 497 bp, Zea Mays
agaaagaccatgcaggggaatttcaaccagatctaggttactaattgcctcattgaacttcaacattagattaatatcacccccagctaaatttctatcttccggcctaagaattagattaaaatctccaacaattagccaaagcttatccgtgggcatattgatattagaaaactagttgaggaaatcaattttcccctgcggagtacatggcgcataaatgttcgtgataatccaggaaccattcgataacttagagttaaattccaccgattgggcatattgattctgaaaaataacattgcccactaattttgtacttttccagacaataatggagccacccgaattccccactgaaggaacaaaagcatatgaatcaaagtcattggggcagaaattttttaggtaagctacatcaaagaattcatttttggtttcctgtaggcagataacatcgcagcgagactcccgaattgtacaacgaataccattcc

SEQ ID NO: 87055 - DNA, 563 bp, Zea Mays
cgatcgggaacggtcgggaaaatgctcaaaccattaccgttactgtattttttgccgaaatcggaaacgggaacgggaatgttggacggacaaacgaaaccgatattacgagatatcgggaacggaatattttcaatcgggaacaagtcgattatgatcgggaatcggtaacacaaaaaattgcataccaagtgcccaacagaccaacatgtcacaactattacttatagactaacaatatcagttattcagtttaggaattagaactaccagtaccgaacagcagagagtagtacacccaagtgcccaacagcagagccatcggcagcaacaatcggccagcagcaatcgcttcctctactccgctcaggcgctcagccaccagccggtccgccgtccagccgcaatcgacaatgccgcacgcagaggagagagaagccaagggcggcacggcacatccgcacacatgcaccacgtccgtgagtccgtgacggcaagctagccagctagggttatatttgaggctttgggccaagcacactgcacacatttgggccacacac

SEQ ID NO: 87056 - DNA, 538 bp, Zea Mays
atcgaatcccatcttgcagaagtgttatttgatactggagcaacacattcatttattactgcatcatggatagaggcgcataatctcccaataaccaccatgacaacaccaattcaaattgactcagccggtggaaaagtctgaaccgatagtgtatgcttgaatgtaagtgtggaaataaggggatagagtttcccgctaacttgttgatagtgatgggtactcacggaatagatgttatcctagggataaattggttagataagtaccaagcagttatcagctgtgataaaaggatggcgaagttggtgtccccattaggagaagaattggtgactaagctagtctcaccggagccaaggaaaggaggttgccaccagatggctattgatagcaaagaggccgatccactcgatgctatctatgttgtgtcagaatttccggatgtgttccctaaagatttaccaggtatgccacgtgagcgtaaagttgagtttgccatagagcttattcccagcaccgcccctatttctaaaac

SEQ ID NO: 87057 - DNA, 414 bp, Zea Mays
ggggtactgtccggccaagaccgttcgatcagagagcaaccaccaagattagattctctaataactgaactagtatctaattccacctatgggattagagatccacggtccccaagcatccacatcatagaccaatccccaaaccgttgggcgcacgatcaatgatccagattacttctacgaaacaactacacatcccctcgccccagccgttcatccctagatcaacggtcacaatactatgaaccaggatctaatcttgatccgttcgtcatcacagatcaacgacccggatcaaaccccgaaccagtactctacatttaatctcaatcgtctcctctcgtatcaacagcccacgtttaactccctatccaggtgacctcgacggcggcgctgcccttgattcgcgacggc

SEQ ID NO: 87058 - DNA, 745 bp, Zea Mays
cgtattagtcacatagtcataagtatatgaaatgtgaataaatacatacacagggtgttatggcacagaaaacgcgagatatggcgatcgagaggtcaaacgatgcgaaaacgacgtttgaacgagaaatagtgacataggaggtttgaatttcgaattgaggcatgaaataacgtggaattgagccgatacttcacgaataggtttatatgggtaaatatgagtgaagtgtgcgcttggtttgatttgaggtgaagaaaatggaatttgggcacttggctcgaaatcgatcgctagaaacggggaattgtgtgaaattgaagccttgtatatcgaattggcgtgaaatttggcgaatatgttactggaggtattgtgaaggtgcctgaaaagtttgggttcaatcggagcaattttggctggtttgggcatttcgcagagcacgtggcgtgcaatgttctagggttttggagaaatggtcaatttaggctgtgaaaccctccctaaggagctaggaacctgcagggtagctcaagggatacacagatgcacttggattcttaagaattgaaaggaatttgagtttgcatccaaggggtggaaaagtgggtgcagcacagagggatagagtgaaaaagggagaaaacagaagggaggaggatctcactcagatggaggaggtcgagcaagggcaccagagattgccggagtacggccggaggctggtcaccggtgagcagagggc

SEQ ID NO: 87059 - DNA, 1773 bp, Zea Mays
gagcactactcccggagcttgctgagcctcctaggcatcgacgtgattaactcgtacccttccttgatactgggtcttgttctgctggctgatggaggagggcgccttgcgggcagatgcggaggtattcttggggccattcaccgagttagagtaggcgggtcctgatggcttcagctagggacagttgttcttgaaatgactgggatctccgcagtgccaacatgcattcgccgggggttggttgcttgcaactaagggggcatggaaagagctctgactctgctgactgaaccgagatggggtgggtctagctggtctactgaagctgggtcccttgggtggaaatccaaaggatcgagttttctggtgccgatcttgctgctgagcccggaggacttgaaattttctcttgagatggcctttttttcctcctttgccctttccacttgcatggccttgttggagaggtgagagaaactgaggaagtcttggctagccaggatggttttgagttctggactgagtcccttcaggaagcgggccatcttcttgacttcggtattgacgtcatctggcgcgtagcgggctaactccgtgaacttgtgcacatattcactgacagatcttctgtcttgagtcagttcccggaactcgtcttccttgagctgaatgagcccttggggcacatggtgctcccggaaagccgtttcaaattccgcccaggtagcatctctgatggtgacgttgaaggtatcccaccaggctaaggccatcccggaaagttgatgggcagctagttgaacacgctgattttctggacatccgatggcttccagctttcttttaatcgtgcgcatccaatcgtctgcatcgagggggttgctagatccgacaaacgtgggaggcttgagcctcaggaaatcccccattctgtcttgcggtcttccaccattcggacgctgattttccagacttcgagtgaggacctcgatgagtcgggtttgattggctagaatttgggctagatctaagggtagttctggaggtgcggggaggtgggtttcactttcctctctatcggcttccctttcagctctcaggggaacactgctccaatcccggaggcggtaggcgtggttttatccaaagccatctgccaggggaatagagttactattatgcacatgccaattgttttcaaacaagttattttattcattacaccagtacattacaagcatatggctgcgacaagttgtactacacgcgagcattccctgaggtactaccgaattctttttctagagtgtccccaaattccttgagaagatcatcaaggctggcgagggacatgtcctcgacatcggacagattctctatcctggcgggagctggtgctgggggagctttcttcttcctctccgtctggcatccttggctcgtggttttcttccgaattttctttgtgggggcgagcttcttatcatagtccatctttaaggttcgataggcttcacgagtgttggcctccttgccttcctctatgtcgagacactattggagggaagccttctccttcttaagctctttgacttgctgctctaagctttccacccgggagtttaggtgggtgcagtgggaggagagatcatcgcagtgggtatcaagagtgtggaggtatccggccatgtagacaatggtggggtcatcctcggtgggttctctccctgacagggcttgaagtcttttcttccaggagggggtattttt

SEQ ID NO: 87060 - DNA, 555 bp, Zea Mays
caactttggagctttgcatctttcaaattatagggtttttgccctaggtcaccacatcaaaattgtagcccaattataggagaacaactttgtttaaggattcaagccatggtcttatgagaaatttggagataatcatgctcaaactttggttgtcaggctgcattcattctgaaattcagcttttcagtgtaacagggccaactttgagtatgaattcaaccttgatccagtgctcaaataagtttaaaccctatagtcgagttgtagctggtatgtagcactacaactttgatgcagagacttggacctgttgtcacatgaaattggaagaaagctcccttgcaaatcgctctgtcagtcgctctgaatggggtgttcaccatggtacagtagcctggattggatcaggctgccagcgcggaactcccaccgccgacgacacctccgccgtgattcgtgccattgccggcccgacttgtgcacgggatgggcagataagggcacacggtaaaagatcttcgccgacggtgagctggcgatcaccccggtgac

SEQ ID NO: 87061 - DNA, 370 bp, Zea Mays
atgaaatttaaggctagtatgaattgtgataataggagattgaaattgatagcactttcaggtgatagaatttgatttttagttaatgccccttcaccaagtctgtgttttgccttagaagcatacaatgttaatgaggtgggagatattcgactagtgtctgaattttcgaatgtgctcctgaaggaggtaccgagaatgcctcttgaaaggcatatcgattttttgattgagttactactaggaacaacatcgaccatgaaaagagcttatagtgcttatgtagctaagatggaggaagccaaaaattatattgatgagttgcttgagaaacaattcattcaaccaagcacgtcaccatgggtagccc

SEQ ID NO: 87062 - DNA, 754 bp, Zea Mays
gtttactgcaactgctatcacttgatacaggatccagtgacttgcattggaaagggtatctctagggatgaaaacggacggaaaaatccctctcccgtttccgtatccacattttatcatcggaaattggatcggatccggaatagtcggggacgaaaacgggagtgggataaacggaattgcgaaaatgaacggaaacggaaatactaatggaaactcataatttaatacaaatagaaatgttattgatgtttgactagtgattgatttgcaaaataataacataaaacaaatagatatagagaggcatattgttgtttggttgctaaatgtgtacatttagttacatctgatgttgtttaagactttagatcacttgtcatttgaaaagagtcggtggttacaatggccaattgtgctataatttgtcacctaaatacacgaggatttagtttatatactaatgcatattaggttcgtcccatattcgttaaatacggaataaatacgggttcaatccggaaaaaactggatcccgcaaaaacggacggaataagctctcttccgtttccgtcccgtttccatattttccgtaaatacggaaacggtcgggtcaaatgtagaaaacggtacgggtcgggacgggatttttttcgtccgttttcaaccctaggtatctcatcgacaaacaatttcatcatccatgaagcaacttgtttactgcaactgccatcacttgcagggctagaaatca

SEQ ID NO: 87063 - DNA, 682 bp, Zea Mays
cgatggactagttcattcctcaaaccaacgtacacctcattagtgttcgcttaaaccttgaaattaaaggaacttgtctttaagaaagaaagaaagaaagaaaaaagtcagctaaggtaagacggccggcaatccagctgcgatcggtagttagcagtgtctgatggatatgcttgagacctggctttgttgcagatctcatctctctgtataaagctatgctttctcctccaggctcctgcagccacatgtcacgactcatgcacagaccaagcgagctaccgatgatacttgaagcatgctagctagagagcagagatgctaggcttgtgggtgacacacgtaccctgtcacgtactgctcagggatccggtcagaataggcgatttacgtacagttggacgtcaacacatgttcaccggccgtacgtaattatgacgtcaggatccagtcacaataggcgatttacgtacagttggaggcgatttacgtactggtcaggatccagtcacatgaccgggatgctcagtttctcgtccgctgctggcgcggcctgcggtccttgtgcgcctcccgtgccgcagtgggcaaatcacattcagggggttgttaggagtatttttacattattttatattgttgactagtatattgtaaagatcttcagatatcactaattcat

SEQ ID NO: 87064 - DNA, 325 bp, Zea Mays
gaaatgcattgaagctaccagcgacgagctgcttgggacatattccaaggccgaagatgatgccttgtccgcagccttcgggggtcggggaaagaaaagattgaacaaggtttttgatgcaattggcttcatatatcctgattactactaccccttgaagaaaggaaaaaagtggaaaactgccgcttcggccaccaccgctgtgccgaagggcaagaaaatgaaggttctgacgcaccggcctcgatatattgaaacggccatagtgcctgaatttgatgaggggacctcctccactgccgaagcagaacaagccgctcccgcc

SEQ ID NO: 87065 - DNA, 383 bp, Zea Mays
ctacgagcaaaaagatgccctgccgtttggcgtcctgcgggatatggccgcccagttggccgggaacaaaccaagcttttgaggcttaatgcatacaaaaataacagtacatgaatatggaaggcatacaaaaatagctagtacatgaatctggatccagtggatttgaagtcttggtgatataagaaccctaaaaataacaggaagaaccaggatgtacacaaccacaagagatggtactcaaccctaaaaatagtactcaagattcttagatctagacgaagaaatcgtgacaggggaagagggcaagagatggtactcaagattatcagatctagatgaagagctcaacaacggagggagagagcaagagatggtactca

SEQ ID NO: 87066 - DNA, 738 bp, Zea Mays
tcggtccacccctcactttgcgcgttgagttgaagtgcgttttgatttttacctgattggcgcggtgtaattgtcatgggctcatggcggcgcagtaaaatatggggtcatcattacgccgcttagcgtgggcgacccgatgggacatggaatggctcgttcgccgtatcacacgtagttggcgtgattgggtggttaacctcccagcccgttactagagcccttcccaccacgtgctctcttggcgctccttccgaggaggttggcttcctgcaaaaaaacatagtctttcgcccggttttcaaggcgacgttaacggagcgacgaatctttgtgagtggtttgtgtgggcccaccttacaagcactgcctgggtttccttctcctgcacataaaacaacgcggaatgatgcctaggttcggtgatgcttagcgtcatctcgtgcccaagcgttttcttctgccttcctttgaagccttcttgtcttccttcttcgccctcgccgcctgatgttcccatggactcctttcccgcatgctcccttactcataaccgactcaaagatccaaagaggaaagggttcctctccccaaggcagtttttgggtggcgacttgaggaaggaggcggcactccagcgccacgggatgacgaggtggttgttcttgcctctttttatgagtatggatttgtgtttcccccgcatccattcgttcgggggattttgttctactatgg

SEQ ID NO: 87067 - DNA, 479 bp, Zea Mays
tacggtttaccctctcatttccacggatttagtattcaagtcctagggtagagcctcaagccactgcatgtgtcgttcgtggacatcgtagggacgtttcccatgtaagttgtcaaatcatggagccgcagctccctgtgagccatggcaatgttgacggaatagcgcaagggttttgcgactcgcgctaatgctcccttagtggtaatgatgaagtcaacagtaccgaagtgtgcgcttgcacccgaaacccagctgatggcgtgactagccatgaaaagccatctctggatgtgtggtgggtagataaagtgcaatgacacaaaataactcgtacctaacgtgccaactgtcaatgattcgtaaccactaacttgtgattctagtgcttgcgtgtcttggtgtgaatggtgtgtaaagtggatacaaagatttatactagttcaagccaaatgtccctacgtctagttgagtaactt

SEQ ID NO: 87068 - DNA, 357 bp, Zea Mays
caacaaccttgtaatgttcgagtggtctgcttcccacatgatcaaccttccaaaagccccagttgcattttgaatgtgttcatgtgtccagtaatcaaaaggaaaacccagcagcatgagccagcattacctattaaagttgagcgcatgaaaattccacgcctcattatgcctaatcacattaaaggtaaagcctaaagcttgttgtggaccaatcacaatcagattgtacctatcatagacatagcagaatctgactagggcctgtccaaggtatgtatgctgaatttcattgatacacaactgtctaatgtccacgaaaaattcacgaacaacatcggtaattgctttgaaatt

SEQ ID NO: 87069 - DNA, 482 bp, Zea Mays
gaaatgaaatgacagggtgatatctgatatgcaggtgttgatttccccattttttcaatccaatattgcatatttcattagcctgcacaacagaaagaaacatgttttcacgaaatcaattttgagggaatgtgtgtgtagtgattgttattgcagtgcagggtagcattgcttttttagactagcgcttcagttggtttatattatatttaactgtatcatgcttgttgattactttcgatgatgacagctcctgaaaggttgccatgcacttcaaagtatctaaaaagtaagtgcctccctgacatgatgttgaatggttagataattcaaggtgaaatcggatctacaggtgttgatttcccccatttttcactccaatattgcatattccattagcctgcgcaatagattgaaacatgttttcaagaaatcctttttatgagtgcaggtgcagtacaatgtggcattcgacaattcat

SEQ ID NO: 87070 - DNA, 382 bp, Zea Mays
atcccaatcgagattacctcctggggaccaggtcaccaaatctttcttaaatatactggcatccagcctcgacaagtcgagcctacatcccaggggggccaactaccagggaagaagttggcaatgacgcacacagcaaagggaaagtagcatgcagataagtgctaatactgctcgataaatagtactcaaaaagtaccttacaaaaacaaagtaattacatccaccttcaagcggagtcctagctccatctctactctacaggtatggactactctgcaccagcagggtcgcgttgaaagctagctccgagcggcttgccagcggcggcgaccacctcagcatgtgcgccatggtgaagaagccctcgcccccgccctcc

SEQ ID NO: 87071 - DNA, 307 bp, Zea Mays
tataatggactcagtgaagaagtggttacaggagcagcattcggttgaggaaaattgcagtgacattgaagtggtctgaagtggaagaagtcccttatttttgtttggagagatgccctttccagcttgcttggcgctttttagtctgttgctttatgtttcagatgctagttcctggtcatctgtgtgccggcagcatgtgcttctttctatgctgttccaggctgtggatctcgtatgtgcttagctgcaggttgactggtgttgtggttctctgatatgtggttgtaaactggtatccctagtg

SEQ ID NO: 87072 - DNA, 423 bp, Zea Mays
cgcggatagggctggaatgtactgtgtgcttaatggttcatcagtgcacaccgacgacgtggccgagcggcaatcaccgacgtgttcgccgttcaccgggtggacgccacgccttaggaggtttatcacgtcagtatgagccgaagtgaccatccaatgaccgtcgtagttcaatcgctctgcggttgccacggtagatcaccgccgtgacttattcccctctcggccgccagcgcaattcgtccaaattaagcaacaccgctcacagactttataaattgagcacgccatgagctctgtagggtagtcaagcaccaagccaccaagccgtgccctcaattgatcaccagagctcgccaatttcccatttcccccaaacctgctttccgccaccgtgaaagaggcctcgccgtggccatctca

SEQ ID NO: 87073 - DNA, 305 bp, Zea Mays
tggtcgtcaaaaacagaggaatgcaagggttaacttgcaaaatttcccaagactcagaaaacagccgcataggacggcgggttggtttcaaatttccatagggtctcttttgaaaaatagccctgacgaagggatatcggcagaactgaaccgtcagatcagaaatcgagggctacgattagatctgtattaatccgaacgggtatgccacgcggaccgtccgatcacaatccgagcgcccaaaaaccacgtaaccgaaagggtatcagccatttcaatcacagccgtccacggctggatcaacg

SEQ ID NO: 87074 - DNA, 1023 bp, Zea Mays
gaggcgatacggggaggattcccatgtcgcattcgtcgtcacaagccggtccatcgaagaacatgtcccatgcacgtgtaggaagggcacccatgttggtgccaactctctctacgataagatcagccaatgcttgccccttaactaccttagcggcatgtaccagatgtcaaattctgatagtgcaaacatccacttccctagacggccttttaatataggggaagacaacatatgtttgatgacatctgactttcaaaacatgattgtctctaacgtcagcatgatgtggcgaagtttggtgcaggtgaagaataggtagagacacaacttcttgatgtcggaggtttctgcaaatagcatcctcctgctgatgtagaaaacaaccttctcctcgtcattatgtacttgcactaataccgaggcaatggaggtgtctcctattgataggtacaggtagaatggttcgtccagccgtggtgggaccaaaactagcgtcttcaacaggtactcattaattccttcgaattacttttgttggtctggtccccaacggaactcgctatcacttttgatcttgactaaacccatgaatggctcaatccacccagatatgatggaaataaaccttctgacgagattaatcttggtgattagttgttggagctccttcttcgtggtttgtggtgtcattgttctgacggcctcttgacttcttgtgccaatatctatccctctctcaagcactaagaatccgaggaattgaccagctgttaccccgaaggtacacttcttcgggttcatctttagcccaaacctcctagtttgttccaggacttggcacaagtcttctatgtgcccctgtgtggatgtagatctgatcacgacatcatcgatgtaaatctccatcagcttccctatcaggtcatggaagatgtagtcatggcgcgttggtacatggatctagcatttttaacccgaaggtcatgaccaaatactcaaacaatcatatcgagccaggca

SEQ ID NO: 87075 - DNA, 438 bp, Zea Mays
ctccccatccaccttgtggaaggagcgagggcctagctcgaaaatctaccagtcaacaccatccacgattgggtcgacctccgaaaggccttcgtcgggaactttcaagtctcctacaagcgccatgggagctcctgggacctcaagaggtgcacccagcgaagtgggaaaagcctccgagattacatccaaaggttttgccagaaaatgaacaaacttcctaatgccaccgacaccgacgtggtgagtgccttcccctacgttacaaccaatgaggcactcgtccatgaacttgggcgggggagaccaagaacgattaccaacctcctcgacatagtgaccaatttgccaacagggaggacgcagtaggtgcaattttttgcaatgccagcgaaccaagcggctagaagagggagcgttaggagcaccccaacaggc

SEQ ID NO: 87076 - DNA, 520 bp, Zea Mays
aatggtcgtcaccggcgatcgtcgatccatatagtaactattttggtgcgtgtctagatcgatcgtactagtacgtagtgtatagtgagcagtggagtagatgatgaacgaccttccaggctgcagctagcacaccggcaccggcacatgcgtgatttggaaccttgtggcctggcccgacacggccgtgtgcgaagacgacgaaacgacaacgacccatcgtctctgtgaccgatcgatccatgtactgcgctgtcgtcagtgcactgcgtacatttgaataggcttcttcactgcagaagtgcagagtacggttagacattgcggcagcttactcctactagcaagttgaggatggcgagatcaagtactctcattgttaatcagtggatctgtgaagaatgcccaattgccgtggcccatggacagataaaaggtggccctgccggtttgttgcaggttcctgtctgatctgagacgatggtggtagctttgcgggtggcgtgtggttcgttagttg

SEQ ID NO: 87077 - DNA, 530 bp, Zea Mays
acatgaataaaaaattcatcaaaaatacccaataaatagcctagagagcatatttagaattgaaatgcaatactacacatgtgtattcaacctcaagccatgtttgagagatttatcacattcatttcacttcttaatgtgcaaaatctcgtttcatctaatggctttgtaaatatatcggccaattgatcatccgtgtcaattgaatatatagtgatttctccctttccaacataatctctcaagaagtgatgtcgtatatcaatatgcttcgttcttgagtgttggaccggatttatagccaattttaccgcactctcattatcacacatgagagacacattcttaaaaatgatcccataatccaatagagtttgtttcatccataataattgagcacaacaattaccgaccgatatatattccgcctcagcggtagagagagcaacataattttgctttttagaagaccatgaaacaagagacctcccaagaaattgacaacaaccggaggtgctcttcctatcaac

SEQ ID NO: 87078 - DNA, 510 bp, Zea Mays
catgggcggcgaccaccccgtaagcgcacgaaggtaggaggtggggttgagtttgcttgactgccgtgggtggggaggtactggccttggctgaaaggagcatgaagaattgtgaggagaggatggccttttaagcttggggtagagacgagctcgatgcccaactccaaagcagcgccaacatcttgttcgattggtgcacaccgccactctatggtcttgggcaaaacaattaagacacctcccatctgcatgcctgatgaatttccttcttctctcctccctgtcggccgattggagctggcatgaatactaatttgatgtcctttgcctacgccactagtagggagggcggactacctcccagccatgagttaaatcctcccgagcctgggtagcagtagcaaaacgcgcatcggagagatctggttgctgctgaatttgattcgctggagaagatctcgctgacagcttggttggtgagattgaatgcccttcacttgcctttcc

SEQ ID NO: 87079 - DNA, 436 bp, Zea Mays
aggagttcatgtggcctgacgcaccagaccaatctggtggtgtgtcagaccatgtatgtagagagctctgcagaagcgctcctgtggcatggcgcatcggaccagtccaatggtgcgttagaccactttaccagagaggtctacagaagaaaccagaagcacttcggcatgtcagaccagtttggtgtgcactataccagtcgggtccaatggaaactttagtgttcaatggtcgactccaatgactagctggtgtggcaggacacatagcgaggtctggtgtcacggacaaggcaagcgcaatgcagatcctgttgattgaggtgaccgttggaggtccggtggtccagttcactcgaagaaagcaggtttttagcaattttctcaacgacacttgtgcaacaccaaccaccactggagctaagcatcattccca

SEQ ID NO: 87080 - DNA, 494 bp, Zea Mays
aatatcatatccattcttgtttgccaaataacagatctttaatagatgttccattacttcaatttatgtaaatgggccagacacaagaaacaaggagtagaaacacaaattgtgctgcaaacagaatatgcatatagtagtgttttaatataaaggaaacatcaaatcagcaaattttcgctcttgagtgtacagaagcagactactacagttactctgcattctttgtcaaccagcatttaccaattgggcatatcataacacgacagtagttttttccttgccagaactacaaccgaaaaacgaccgttcgcaatgtcatatccaactcctaagaatccagcataattgccttaactgtgcccagtgtatgacaaccttaaagcactttgaattttgaaatccagccagatttcagaacagatctacacgagcctagatccactaatggctgcatagtttccccgacagaagacatcaaatcatataggtcg

SEQ ID NO: 87081 - DNA, 524 bp, Zea Mays
ctcgctgcaggtggccttgcgccctgattcgcgccggtcgccgtgattcgtgctaggtgcgcagtggatatcaatggggaagtaaaaagatctcggggggagtggatttggtcgcggggtgaagcttatcaactgcgcctatagccgtgcgacgtggtcggaccgccggtgtcgccatggtactccggcgacctcaattatgccacgctgtagctctttatcgcgtattagtaaccgtggcacgcctaggcttgccattttagaaccgttgcaccggtgggcgccacgactgagccacgagtgactcatctctctctcctgctgccagccttctccttcaaaattcggagccaccgccctcgggcactataaattgatggtgccgctagctccacaaggtcatcacgaagccagagcacccgcccttgcctctgattagccaccatagcctcccaatttctctcttcccccaaatcgggtttctgcgccactgtgaacgtcgcgtcatggccagctctctacag

SEQ ID NO: 87082 - DNA, 1188 bp, Zea Mays
ctatagtaagattgtagctggatcatcatgcaacaattttgttactggtgggttagcaagtcatcacatgaaaaatcgaggttcaggccctacaaaatggtctatcaggctgactgaatgagttgcacgatggtacagtgcactgatcagatcgccagctcagtgccctcgccgccgacgagccgcgtgcggattcgtgctatcgccacggtgattcacgctcggatcaattggatagcgccggggtaagaaatatcgcccggggatgaactccagccgctattttactacggccaccgtacccgagcgtgtcgcggccgccttggataggttcgccggagatagactctttgtagccttgcgccacgtgccttggcatgataacctcaccaccgtgactcatgttagtcgtccgatggtcgccggagagcttgccacggtaataggccacgaatcaccgcgccagtaaccttcttcttctccggccgccgcgcgtctcaatccaaattcaccggccaccgctcaagcctgctataaattgccgacctgcctgctccactatgtaattgtgcaaccagtgaagcaaactgtgccttgaatcatccacaagagctcactaatttctcatttctcccaaacctgctctccgccgccgtggtatagccctcgccgtggccagcgcatctcaggtccgttcatgccctctaagtcctcgtttctgtgttcttggatgcttctgatactctctgactcacccaattgagctagagtccctaggatcgctgggaacactattgaatgtccgcgatgcccgctgtcaccgtggacagagcaggttagatcgccgttcgtgaaattagttgaggggaaacaatgattagggattgaattcggtctctgccaaagtagaatgccagtcctcaagtattctagccggtacaagctcatcggagctcggccctgcgccgttcgcggtcgtggacttcgatccgtaaaggaatagaagtgtagggatgtttttgtaacatgtcagtgagacataggaatagtgtcgtgacccttttccagttatttaaatcgagaagggcatttttgcaaaactagcagccgggcgcgcgtgggcgcgcttctgcctattgatgggccgacttgggccggttgcggtccagagtgttctttatttttcat

SEQ ID NO: 87083 - DNA, 595 bp, Zea Mays
ctttggactagcatcctcgacgatagaatcccctctgcccacgacgacagcgaacatcaagggcagaccgaggtgttcccgacgttccagcgcagtctagttcaattaatcgagcctacgaacaacatgagaccctaaggatgctagaacacaaattagagaagcgcgaatcaacatgtggatggctggccacgacgagatgccaacggcggcgaatttgaccgatttgggagaagtactgaatttgcgggctatggcggctaatcggaggcagaagttagtgttctggcttcgtaataagctaacggagcaggccgcacactcaatttatagcgttcgcaagcggtgtctcggaatttgggaaaggtaagctggcggccggagaggagatgagtcaccggagtttactaacttggcatttactgggtaaaagcgtacggtcgtcactggctatccttcccaacccgcgacgatgtggtaagacggtttaaggcgtgtcgtgaccaaaggaaacgatggcacgacgacggaggtcgcgtggccacgtcgcctgtaacgccccgaatttgagagttgaattttttcttctccagca

SEQ ID NO: 87084 - DNA, 488 bp, Zea Mays
aattgacccacactttcaaactattttcgagttctgttacaaaacatggagaaaaatgagcaagaaaaacaggtgaaaaggttattttcgagctatgttataaggcgggtcttgagtagcctagcacgatagcacgatacaacatgatagcctggtatgacctgtttgaaactagtaagactgtgtttagacttagacttcaacccatagatggacacgacacgacacgacctgctatttatccgtgtcgtgccttagcctcattaaatcggcacacccgccacgtatatcccttgaactcgtcgccctctggttagtggtgacaatagactctaaattttacactatctatactactatgaagaatgtaagggggtaggctgccaccccgttctgccctccccgtccgttattgtcgcagcaaaaaaaattgctaccaggctcaggtatcgaaccctggatgccttgagcaaaatacctaagcttcc

SEQ ID NO: 87085 - DNA, 528 bp, Zea Mays
tatcggtgtttaaggggaccgtggccgatctgacgtctatggaggtaaagtttgatgatgaagacctagctcttcttctcctgtcttccttccctgcatcgtttagcaattttcgagataccatcctatacagtcgtgataccctaaccgtggctgaagtgtatgaatctttgaatgcgaaagaaaagatgagacagatggttaactcggaagatgctaccgacttgagtggagaagcttcgtagtcatgactcgctcgaggatgtcacgacttgcccaagccagtcacgacccgcccgagaccaactccggcgggaaacgcagttccgattcgcatgaggccaacctcggcgggatacacggttccaattcgcctgaggccaacctcggcgggagacgcggttccgattcactcgagcgcaatcatgaatcgtccgaccgcatctccgactcgcccgagggtgtctcgggtgaatgtctagtgaggcccacactagcccaagtttggccacacttagccaaacttct

SEQ ID NO: 87086 - DNA, 854 bp, Zea Mays
gtttcctaggcatctttggaaaattcactgcatgccccctatagcggcccggttctacgattgttggcaatgcggacaaaagatcaagccccttatttaatcaggctagttggtgcacacgcaattgcacgagctgactgctctctgttactactgtattatactctttgcgcatatgatttgtcgtcagtcccctgcccgtccgtccgcacggcgcttaaatcttcacccgcaggccaacgcttctgccccccaaaccttctcctcgtcgatagttgagtagagcgctgcgcagctcgatcttggttggttgttgggaagggtcgccgccccatgcctccaactcctcgatctcccccggatgtgcttcgcttcagctagctaagtcccttcttcctttgagattttgctacgaacaaccacctcgatctgctctcgtgctcatccgccaagctccgtggtgccatactgccatgtcgctcacggaggtcagcctccacttctgctacctccactccctctccatcgtgctcctatacttcctctacgtgatctcctgatcgcctcggccgcctcccgccaagctccgatcgaacaaggctttggtttgattcgatcagagccgaagcactagtattaattactcgatgcttgctcctcttcgttcttccatgatcttgtcgtcccgttcttctcccggccctctcctgctttgctgctaagtctcatacgtgcctctcctagcgcgtactcccacacccgatcgatcattcgactaggagcagtgcgcggcagtgttcgaggaagcaggtaagtgtttcccttctcaggtagtgggatggttccactggctg

SEQ ID NO: 87087 - DNA, 791 bp, Zea Mays
cggctgtcgtatgtgtcccattcaattcgattcgcggtgtggcattatcccttcaagttctgatggcgagtttgagtttgcacttgcaattagtggttttagatcttcgtttgttccaatcaacgaactaaatcacttcgtttctgcattcgggtggttgtaatcatggaggtctttttagattacttcagttcagttactgcatgcttattagtatggacgcgacaatagtttcatgttctacaagtacacgtttgttttcaatttctggaaatcacttggttggttcaattagattttttgcttgcaatggattttgggttccatttctttggcgaatgaaacactgctgtcaattttcgaatgactgtgcggggttggaggtagaggtgaggtcattggtatgtgctcatttctgctctataatttctctccctatcactctaggactctgtttctgtttctactttgatcatggccaccaactgtcatgattgaatggttcactttgtatgtgttttgaaacgagtgtaacatttggctcctgtttccattgtttcttaccggtcatacggttcttgttttcgaaattatagttctgagatatatgacacgagaagtcactctatcacatttatctggccactgaggatagtgttaagtgataagtcaaaccctaaactcagaggtaaaccttaccatggaacacgtcatttgttttttcagtttctaattactattggaatgctcttcagtgtttttttaaaaaaataccaattgctgtgctaacc

SEQ ID NO: 87088 - DNA, 440 bp, Zea Mays
ggctttttagcttggtgtaaattgtaaagatatgtacacttgttgtaatagaggaatgaaccccataccacccctgccttgtaccaaaaataaggaaataaaagtatgtcgcgtttccttttccattacttgccctagacttttaatcttgggacgagattctttaatggggggaaggatgtaacacccctggtgttactgccacaaaaatttgagcatgacatcataagcattggcatatcatgtgtttgtcacacctagaatgcattcactaggcaaaaatttcaaacaaagttgtattgatgtgacatttcatgggtgaaacagtgcttaaccctaaactgggcttaagggagtaaacaaagcctaataagagaaaacttcaaaacttagttgaaatgatcataaaatatcaccatggatggacctaagtagcatcc

SEQ ID NO: 87089 - DNA, 958 bp, Zea Mays
cagagccacaggactggccgtagaccgcaaccttgacctaaaaaactttcctcaaaagaaaagacctcttaacctcttaaagaaccttctcttctttccccgatattaacaacccttcttctcttgctaccagatggaaggctcctttgtcattaggatatcctactgctcggaggtggaaggattgcctcaccttcgaagctgcgcgcttcgcatgggattctgcaagaagccagagtatgtctagaaagaataccgtgagaacgggattgagaaatgctccatggcagtctacctaggagaaatccgaaactacccaaatcaccctccctttcagatcaccgctactggccaccgcttcgtagatacctgccagaatgctgcccaaaaagccctccgccagctatgccaaaactatagcagggaggtctctgagacaccccttcactactttccacctagcaacaaaaatactcctgcttggaggaaaagactccaggccttgtcagggagggatcctaatgaagatgaccctaccatagtctacatggccacatatctccacaccctcgacaaccactttaatgaccttttctcccactgcacccacctgaactcccgggtggagagcctagagcagcaaatcaaggaattgaaggaagaaaaggcggctcttcaagatagtctcgagatggcagaaggcgaagaagccaacactcgtgaggcataccggactctgaagatggactatgctaggaggctgaagaagctcgcccctgcaaagaagatccggaagcgtttcaagagccagggatgccagactgacccaagggaagaagccccgctagcactaccctctttaggaatagggaacttttccgacgtcgaggaagtgtccctggctagccttgatgatcttatcagggagtttggggacaccttagaaaacgctcatgcg

SEQ ID NO: 87090 - DNA, 700 bp, Zea Mays
tccttgatgcagtgagtagggaccctcggccataggattgagtgacaattcagtgagtaaggattgggccttagtgtcctagttgtagccctgaaccaccttggacagccattgtggagaagcagctgatacatggaatacttcaagaccatcttgtgggcattgagacagtgcgtctgcggcaccgttttccatccctttcttgtacacaatcatgtactaaagtccgaggagcttggtgaatacacgttgctaccaaggggtatggagccgctattcggataggtgagacagactgcgttggtcggagaaaataatgaactccaagtgttgaagatacggtctccactggttcactgccaaaataactgcaaggtattccttttcataagttgagaggccttgagtcttggtgcttaatgccttactgacgaacgcaagtgggcatccctcttgtgtaagtactgcacctatgctcgtgcccgaagcgtcgctctcgatagcaaactgcttgtcaaaatctgggagagcgagtactggtgtcgtggacaaagttgtcttcaatgcctgaaaggactgctcatgttctccagtccacacaaacggagtgttcttcttgagaaggttggtaagtgttttggcaataattccaaaatgccacacaaacttgtggtaatagcccgctagtcccagaaagccg

SEQ ID NO: 87091 - DNA, 608 bp, Zea Mays
ggctagcaaaagctgcagtgcatctcatgcatggatgtggcgcacgaatggcatggcgggtttttttaacatatcggcgccacaccgcacggccatagattgactattatttctaaagctctgatttaaagcgggccggagatcgatcgatcgagaggagcgatgctgcagggagtggggaggaggtacggtacgtgcctcgtttctttaggaaaaaaatatataatggaccatgcgtgtattcctcctcctcctcctcctcgtcgtcgtctcgatctcctcccgacgtccgtgcgtggtggttgatttattggagccccattttgggctgtcgttagtgggaaagattagttcacaagtgatcccgagactttatggaccgccccctccggcggccgtaatataaaaccccgcgggcgagcacgctgcagatccaccagcccgatctcctgtcgtacgtgcaattctacgtgctctcagctttagctgaaattaaggcaccactgcacagcatgcgatctggaaacaaacggggggctacagtatcaggttctcaaccggtactcaccatccagtactttgcaggcccgaccgaaaacccggtgttt

SEQ ID NO: 87092 - DNA, 357 bp, Zea Mays
atctactgcttggcgggtttgctagctgcggaatagtatgagacctgacgacgcgagcatggagagtggagaccggggtttaccgtctccatcggtcctcctcgatagctccgtcgtcgtctccgttcgtccgtctccatggatccacccacagtccgagacaggcacgtcagttcactagtttactatttatttttggacggagagattacatgcttacgaccgagatagatcgagatggtgacagtaattacgatcccgacgacaggttaaaagtgcagcacatacgacacggcgcggccgacgactgcgtcagtcccaactgccaaccaacggtgccgtgacggttcatccgag

SEQ ID NO: 87093 - DNA, 776 bp, Zea Mays
cccgaggcaaccatggtcgcatcttgcgtgcgcccgcgaaggtggcacgcagcagcgttgccgttggcttggtgaggagacgggtgctgctggtgccgggtggtgggaggcgacgacaaccttctctctcagctctccctaaacgggcgacgatggtgcatgtctaggttcaacgctttagttttttttaacagaagaaagcacaggaggctcgtatatatcctcgacaccaagagctccaacaaaatctattgcaaccgtcaggagacaatcacggcggaggagtcggtctatggtttgtttcggtgccagcatttggatctgttgtgaggttgcggataactttggcaatggggcccaccagtcaatgaccaactcgtatgaccggtttcaagtatagacggttgatgcccatacgcaatgacgtagagaaaaattagttgatgtcccatccagtcgtggccattagaataaagaaaaggaaaaaagaatttgtacgtatggcaatgtgtgaaccggctatacaatttgggtttagggcgagtgagtcagattcttgcctttttcttttctattttagttccttcctaacttatgttttaaatattctaattcaattcaagtttgggttcctaaaattttatattcatctattttaatagaaaagattttctaatgcataatcttttattaatagattgtttaactaattctacatagtttactacggcaatcattcatatttggacctttcatttaaccacttgtttcaaaac

SEQ ID NO: 87094 - DNA, 625 bp, Zea Mays
tggtatttggaatagtatttctaattgtatagattatgggaggaatattccaagttaacaaatagattaggttttcttttctgggtttcaatttaaattcttgttttaaaagttttaggatttatacatctgacaattttttagtattcccagtaaatattaggagaagataactagaaaaaaaatgagggacacatattaggagacatttttttagattcatcaatgactcccaaaatgggtgttacaagcactgatgcacgacaagagttatcgaggagtaatatctttttacatttttatggtcccttccggaagaaacatggcaagaggtcccctccttgttctataaaaggaggtgtcagccttaccgttaggacaggagaaacaagagagacacagtagaatagaaactcacacacaccacatagagacttgaaaactcttcctttctcgtccgcttgtaatccctactacgagcaatcaggtgtcgatagtgcgatccaccaaagaccagagtaggaacatttagctcgaactagtataactcttgcatccatcgagcacatcatttaggcctaaaacgtgcataaacaaatttactcaccggtgcttacgccaaaca

SEQ ID NO: 87095 - DNA, 498 bp, Zea Mays
ttagccgtgaggaaggttagctgctaggaaaataagccccttagcccctgccatctcccacaacggcacaaccttcgctcttctccaacctactctagaacagcagcaacactcggattgccgccctcgaagacacactgattacagtgcttccataaggtccatgcaccaagcaaaacaagggagttaatccccatcttcatttgtccaactgccatttcacttattgtcctccaccagttcaggaaactatcattttctagttgaggggacagagtatgcagtccaaattgtctcaacaaaaggaaccagcactcccttgagaaaacacaagagaccagaagatggtctattgtttcactttcttgttcacaaagagggcagctatcagggtgatccaatcctctttttgcaagacgatcagctgtccaacaccttttttgagcaactaaccacagaaaaacccgacatttaggaggcgcccaggttttccatatc

SEQ ID NO: 87096 - DNA, 454 bp, Zea Mays
attggaagcccggtgtttttaatagttacaagaagccttagttgtcccttggtccgcacgagccacacctggcccacacccaaaaaccagacacggtcaaacctatggtccaacggccaacccctcgcgtgggacgcacaacataaattgcggttctattttttgctcaaatagcgtaaatagtttacaaaaataacgtaaatatttcatagagatagtataaaaatctgcccagtcactggaccacgtccacacgcgcaagcgcctgcatgcagatcctagttttatggtagattgtaagagttttcattgcatatgcacaaattttggatcataatttcgtttccactacacgcgtaaaaattggatggctccatcaatataggaccgccgcaacagtcatacagttaggctcgttagaacaattttatgatatatactgatactaatcata

SEQ ID NO: 87097 - DNA, 464 bp, Zea Mays
tccaccacgaatcccacgggaggccactccttcgactgtggtgcacgtcaggaggattcatccatcgcctcaggaagacttccgcctcacccgagctcggctccaatctcgatatgcacagcaaaggaaaccctaatgtcatcaaatacagaagcgctagcgcatcccgtaagcggcttttctccataactaagtcctgttacaaccactacggtatgggcaaccccttccctggggggctcgggcgtgtagacgtaccctcaacctcggccttggctctcagcgagaaaccggtggattcaagtcaacaataaagtacaaggccataccgatcataggacacgaaggacacttctctcagtgccacgacagtccctagctgcaaaagcattcacccctatgtgtataaatagggcaatctatgactcttccagggataagggcaaacacttcgtagttttctc

SEQ ID NO: 87098 - DNA, 417 bp, Zea Mays
ggtgatttgggtacttttttatatttggtccaagtggttttggtgccagcacaaaggtgaacatctttgatctttggtctagggtggttttggggacttagagaaatttttgatggctctagtgtgcttcccacttgatgtactaatttgaggtttttgttgggcctttttgcaatatttttcttactagatttttgtagctttactaatacacttcatctttagtcaaggttcctttttatgttttgatcatttgcccactctttcacctttaatcccatggttagggtttaagggcttaagaaggagttagagttttggaatcttgtttgtgggtgaacattatatgaaggatagggttttctctcttatcatggtaaatgcttatcttgaccatgcttctacaactttgagttc

SEQ ID NO: 87099 - DNA, 875 bp, Zea Mays
caggtgtagtccccctcgccgccggtgacccgcacgctcgaatttgcgtcggtcaccgtgattcgtgcttggcacgcagtggatatccacggggaggtaaaaagatctcgcggggagcggatttggtcgcagaggaagcttatcaccgcgcctgtagccgtgtgatgtggccggaccgccggtgttgtcgtggaagctccggtgaccacggttatgccacgccatggctcgttactgtgcggtagtaaccatggcacactcaggattacaatctttgagccgttgcaccggtgaacgccacgattaagccaccagttctctcccctctctccggccgccagcgcgcgattccaaattcacgagccaccgccctcaggccctataaattgagcatgccatcagcttcgctaggtagtcaagcatccagcgcacccacccgtgtctcggattgtcgaccagagcgctctaatttgggatttcccccaaattggtcaagaacaacgtactgtgtgagctcatcgtggccagcgctccacaggtccaatcatgccctcctcgctcttgttttagcatccctgcgtgctcatgatgctgctcgacgcagccaattgggctagaatacatagaatcaccgggaacgcctcggtctgtccattgatcgtgctgtcactgtgggcagagaaattaggggctagaaccttgaaattggttgaggggtaatggttattaggggtcaaattaggtgtcaaccgcttcagagcaccgatagttaagttatccggccagtacgggctcgctggagccactgctccgccgtccccagtcggggacttcaattcgcgaagaattagaaagtgaagggcatatgcgataag

SEQ ID NO: 87100 - DNA, 287 bp, Zea Mays
tgcaggagtgcggggtagtccaacaatgaaatccatgcctatttcttcccatttccactcgggtatcttaagcgggtgcagtagtccagctggtctttgattttcggccttgactctttgacacacatcacacttagccagatgtggatcaacatctcttttcagcccataccaccagtacttctgcttcaaatctagatacatcttagtgctgccagggtggatagagtaatcagaatcatgggcttccttcaatatagtctcacgaaggctatctatctcaggaa

SEQ ID NO: 87101 - DNA, 345 bp, Zea Mays
atcctaagatgaggaaggggcttaagcgttttgcctatcctgctaagcggacatgaaacacatgaacacgcgagagttttagagtggttcgggtcgtcagagcgtaataccctactccactgtgtgttggattgctgtggaagcttgagagtctgaatctaagtgagcctaaagactgagcttgtgttgtaacgtcgcatgcctccccttttatagctgaaggggggtatgcacaaaggtactgggccttgacatgtgggcctagggacataatggatatagcacttggagctacaaatgtttgccgctggagcaatcttctcacgccctgacatccgagatctg

SEQ ID NO: 87102 - DNA, 515 bp, Zea Mays
ccggagtaactgccacggtgaaagccgcttattccacgcacagagctcgtgtctcctccggccgccagcactgctcggccgaattcatcaccgccgctcgctaagcctataaattgagcacgctgcgggctccgtagggcagtgaactatccagccaccatgaattagcctcgattgttcgtcggagctcacgaattttgaagttcccccaattcgtgtttccgccaccgtgaaactagcctcactgcggtcagcgtgaaccaggtcagcctacgtcttctgctccctcgtttgaatattctcaccaccccgtaatgcttgccaaaccaccaatttggactgagagctcaccaatcaccgggaacacgaacgaatatccatggtcatctctgtcctcgcgggcagagctagacagagctctaatcctaaaatttcttgggggaaaaccattattaagacttgaatttggtgtccgccgctcgggggcgccagtacttgccccaatcggccggcct

SEQ ID NO: 87103 - DNA, 654 bp, Zea Mays
aaggtatcaaatgctggtgctcctgttgcttactatgcttggaatctgccacctcctaggtcattttttaattttgtgtccaaccctcctgctagtgatagtggtctgggtcttagagtgcgaccttctcctgaggtcattgaagctctggttgctcctcttcgtgatcttcccaatgatgagaggcaagttcacttttcagtgctggcaagtccggatgatgcagaaatagatgatgtactcaacatgttggctggagaatcttctgactcggcccatgctgaaccaatggttgttacggttatacaagatcttaacaaaacagtggacacccgaaagcttgagggtattcgcccaaaacgtcctcgccaagttagccgcccaactgcgcctgttgaggagaagaagaaaaagagacggcttcggcggctgtcatgcttggaccaggatgctggcccttctgctcctgtttgtgaagaagtaccagcagaggtctttactgaagttgatcccaatggtggtgtacctgttgaagctgaccccaatgggtgtaaccgtgcagaagcagatcccaatgggtgtaaccgtgcagaagctgaccccaatgggtgtaaccgtgcagaagctgatcccaatgggtgtgaccgtgcagaa

SEQ ID NO: 87104 - DNA, 282 bp, Zea Mays
ccactggcccacattgttcaagaatggggaacagaccaatgtatcggggtgcaagctttccttttacaccgaatcgagtcacacccttcataggtgatactttcaggtacagataatcttggacttgaaagtataagggttggcatcgtttgtctgcataactcttttatcgagcttgtgcttctttcaatatatgtataatttgttgaactttttcttccatctctttcaccaaataaggcctgaagaaccacctttctcctggttcagaccaatttaatg

SEQ ID NO: 87105 - DNA, 446 bp, Zea Mays
gaagagcataggaaacttgtcctagacgagagtgggaaaaggtatcaaggttttggtgaggagcataactggactcacatatgtggcttgtgggagcttccttatgctaagtcattaattttgatgcacaacatcgatgtcatgcatcaagagagtaacttttgtcaagccctcataaatacatgcatggatttccctaataaaacgaaagacaatgacaaggcacgcatggacttagcagtgatatgtgatcgtccaacccaagtgcttagagaaaacgaaggcaaactaaaagttgactattgtctgaaacctaagcaacgaaaagaggtgatgaagtggatgaaagatattaaattccccgatggttatgctgctggttttagaagatctgtgaacttgaagacaatgaagatgaatggactgaagagccatgacttccacat

SEQ ID NO: 87106 - DNA, 999 bp, Zea Mays
ccgcgcagggacaaactccggtgagcatgtatcggctgatccatgtgatgactagcattctactttggcagagatcaaatccaagacctaacgagggtttcccctcaaacaatttcatcaacgggacattgaatcgatcggtccatggaaacggcacggacactcgaatgggtatcacgttcccggtgattaagagggactcagtgtaattgggttggttgaggagcatcagggaagcacactaatgctgaaacaaggcagcagagaccatgaacaaagctggaagtggctggccacggtgaggtgcgttttacggtggcggaaaccgtgattggggaaagtgagcaattctcggtccctagtggataatccggggcaaggattggtgcaatagatgtgtgattaccctatggagccacaagtgcactcaatttatagtgatcgtgagcggtggccagtgaatttgggttggagatcagctcacggcgacttggatattttaccgtgctctgcgtatcgtggcgcgcgtggagaaaacggtgccggaggggtaactggctatcctccacgatccctacgacgtggagaatgctttgcggcgtggcacgattgagtgaaacggcgagctccggtgaggataaactcggtcggccgcgcggcaagtggacaggatggccgaaccagctagcaatcacaatccatcccgcggccgatctttttacccgtcctcggtgttatccattcctccccgagcacgaatcgagacggcgatgacacgaatcgcggcagagaggtcgtcgacggtgaacggctgatctgatcttattcagatactgtaccatggccattcctcattcagacagtctgtcagccaaagtttagggcgaattttctcttaattttatgtagtaacatgatcgacactctttagtaaagttatagctctaggatccagctataatcttggtatagcaaccctaggcaaattcttgctcgatc

SEQ ID NO: 87107 - DNA, 499 bp, Zea Mays
atagaatggaggtgtccccccagcctgaatagacaaagggactatgcatgtaccatgggttcatcgtcgtaccattccacatttggatatgaaaatatatcgacgatgagtaggcgggtggagagcatcctagtatcacaggatgaataggcgaggcttgttgcgtcacccttcgagctgttttattcagtcgttttgttcggtgtttctttgctggcctattgcgtagaacgaccttcttgctagcatacttggagagtaattgattaaaagtagggccgactttgactagccgaccgtgtgcgttacatgtgttttgcccttgcatccccttttttgctttgtgtggagactggtgtctctgtccatggtgggctgttcggcttggttggccaaatcatctgcatgagcatcgtaccatccgcgcgtaggtgccggatagtccgtgatgctcaaggcagggacctttgctcgactgttcgattgagcctgccccctg

SEQ ID NO: 87108 - DNA, 752 bp, Zea Mays
atcatcttcattactcccgttaaaaaccaaggctccctttggatatttcaactttcgcgcatagtgcctggcttccagaatttcttctttggacagcttctttcccgaagcgtgtcgaatgatgtagtcaatattttcgattaaagcttcgggagaaggagtctcgatcttttcaggagcaatttgctttgccgctttttcttcagacgtggtaggttttgtctcgatgagcactgaaggcccagtttcgacttcagcttgagcttgcgtagcttcggcttctgcttgcccggtttcggttccggcctatgatttggctttagtttgagcaattttctttataggagtagggcttaacgcctttgtagtctccagcacagcatccagtacgttggccatccttctcctcttgggagttgcggcaaaagccttttgcatcttcggcagatttgccttcgtcggagggctcagaatttttggcttcaacctttggctcttcggccttatcaaccttatcttcgactgccttgactgtatgcgtcttcggcattacggtcggctcttcggcgctctatgtaatcgaagcagtctgtgttgcttcggctgctgaagtggaccctgcgccaaattcaggcaccacagccggttcaatgaaacgcgaccggtgggtcagaaccttcacctttttgctcttcggcacaggctcagctggggtgaccgaagcagcaatcttcctctttttctcttgtcct

SEQ ID NO: 87109 - DNA, 352 bp, Zea Mays
ccaagtcaccgctcacaatgaggagattaaaccatcaggggctatcactgtagtatcagatttcccagatgtgtttcccgaagagttaccgggtatgccacctgaaagaaaggttgaatttgtcatagagcttattccaggcaccgcccctatttccaagagagcctatcgagtgtccggactagagttggtggaactcaagaagcagattgatgagttgtcggagaaaggctacatcagactgagtacctcgccttgggcagccccagtgttatttgtggagaaaaaggatggaacaaagaggatgtgcatcgactacagatccttgaatgaggtcactatcaagtacaag

SEQ ID NO: 87110 - DNA, 698 bp, Zea Mays
aaagtcctctgagggaagacttggctcgcttttccacttgttgccggagtggtgcgacgaacttccacccttcttgttcttgcccatggttggttggaagagaagagaaaagtgggaaaataagcaacaaatggctagaagatgtgtgaagacaccagtgaggcaggcagtctatttatagaggccagaagcaaccgctcatctcctaccacggtcaccgaacagtcgcaagtattcaataagcaattcaaatcgtctggaagcaagtcaggcagcagacgtcgttttgcgtaacacgacaccatttggactgaggtcaactgcttggacgatatgattacaccccacggtcacgtcaagttactactcaaggacagtttgctaaacgctcggcgtaccaagccgtccctcggttacacccattggggaggggatgtccaagaatttttaatagattttcccaagcagtcacatacatacagtatacgcaatgaatgtatcaagactgaagaaagatatcgatggagatcagaggaaagccaaatatagctactgaagtacaagtctaatcaacagaagcattgaagcacaaagcgaaatgaagaccagccaagagccatctaccagacgtccaatctgtcgccgatcaaataaatttcaaacctaacaggacatgggcagatcacgctgctggtttc

SEQ ID NO: 87111 - DNA, 382 bp, Zea Mays
gctagcttggcccccatgtaattagtcctcacagggatgaagtgagccacttttgttagtctgtccacaatcacccaaatagagtcatacctagtagaagtgcagggtagaccaataatgaagtccataccaatttcttcccacttccactcaggtaccttcagcgggtgaagtaatctagctggaatttgatgttcagcttttaccctctggctaacatcacatactgccacatgtgaagcaacatcctttttcagaccataccaccaatacttttgtttcagatcttgatacatcttggtactgccaggatgaatggagtaggctaagtcatgtgcttccttcgatatggtttcatgaagactatcaatctcagggacac

SEQ ID NO: 87112 - DNA, 743 bp, Zea Mays
cgttccccatcctcctgcagattccaatcccttcctccagatacatacagcatagggcgagagtggctgagtgagtgagggacacagtttcgttccaggaaagcctgctgcacacatgtgacgccttgaggctgtaagttgctctacccatatctgccgaaggatgcgcgtgtttgcattgcagtgttcttgcttcctcctcctcctccggtggctgctggctgcggcacgcatggccgtcggctgtctcgcgattcccggtagttctctttctctgcgcgccggccggaggcactcaccgccgtcgaattattctcgtcacgctgtgcgacacgccaccaaggtccaggaatacggatcctattcgaccactagctaagctaggagctagctagaaccacgaacccagcttccaaattcctttggattggatggaagtggaacctacgcgtcctcggcactacttaagctagcaaagcataccatagccctgctctcctgctagctccaaccgccgtcctgattcaatcgtctgtttcaggccctcacatgttgaattgctgatgctaaaatgtgctgcatatatatacgatgaaaactatcgtcgatgcttttgatcaagctcgtctatctactgctgcgactgataagttggttcgctgtgcccgtttgtttccctgctcgtttgttcagtcccgatacctggtctggtgatcgctggatgatggacgccaagaagatta

SEQ ID NO: 87113 - DNA, 493 bp, Zea Mays
ttgtttcgtccttcttctccacaaatagcactagggctgcccaaggcgaggtactcggtatgatgtagcctttctctgacaactcatcaatctgcttcttgagttccaccaattctagtccggacactctataggctcttggaaataggggcggtgcctggtataagctctatggcgaattcaaccttcctttcaggtgtcatacctggtaactccttgggaaacacatctgagaattctgatactacattgatagcctctgatggtttaatctcctcaatatgggcggtgacttggtgacaacttcctttccttggtccagacaagaccaactctactaacacttcttctcctgatagggacactaacttcactgttctcttgtcacagctaagactggcttggtacttggttagccaattcatccctaggatgacatctatagttgtatcctggttacccgtaactattcgatcagcggggaactctaccc

SEQ ID NO: 87114 - DNA, 353 bp, Zea Mays
tatatcattcactcttaaatgtttactataatttgcatctactaaaattgcatgtttataaatcatagaattttatatgtgaccaaagtagttgagtgaaaaatctttaggtattcaccataaaaattgctagtgggtcagacttgaattgaaattgccataactatgcatagattatattaggagatttaggttacacgcctttacttggatgaattgctccttcaggttgagacaaataatgtaaaatgcacgatcctgaaatcagcacgttctgcagtgacaattatgaaatagtaaggtgccattcaataggaaatatatgatataaactgaaactgcatatccgtaaa

SEQ ID NO: 87115 - DNA, 745 bp, Zea Mays
gggtgaccttcaagaatctggggatcttcagctctcctgggttgaactgggttggatgaagcgggctcttggatccacagggctctatgttggttatggatgaccaagtaggcctccatcaacttctggacatgctcatccttggtttgcttcagggcttcaacaacaatgacttcacgactttccaaggcagttgcacgagcttgagctggggtgagatccacatggagcttacggttgcgcttctctacatcttctgctcgggcaatcatctgacggtggcgccgagccaagaaatcatactgcacatctagggtgagcaggtatgcggtgaggtacacgactgtggggtcgtcctcaagcagctgctgaccttccaatgcatgcatcctggccatccaaacgggacagtctctctgaaagggcggaaagaatctgagcggggtgtcggccacttcttcataaatttgacatagggccctcaatgccttgcaagcgacgacttgccaggtgtatttgaatctgtgccccgcagcagtgacactccattccacatggtgcatactggatccaatgtatacagtcacgacacacttctctgtgccatgcatgacaaattcacgaccatcatactctggctggctcctgattccgaggcgaactgtgcatgctctcaacatcttggggaaaccatcttcattctggcaaaagctggtttggcagcggacctccatctgacttctta

SEQ ID NO: 87116 - DNA, 337 bp, Zea Mays
ctggtgtgctcaggatgctcatcgaccaagccaattgaattaaaccaccttagatcgccgggaacgcttcgattcatccgcagttcgtgccattaccgtggacagagagattgtgagctagaactctgcaattgagtgagggattagtgtcaccgagggtagaattaggtgttgagcaatggagaggcatagtcgttgcgttttctggccggtcttggctcgccggagacactgctccaccgccgtggtcggggatctcaagtagcgaagaaacagaaaagggagggacctcgttgcaaatgtcagtgacacataggaataatgcgcaggattcctt

SEQ ID NO: 87117 - DNA, 864 bp, Zea Mays
atttacttggtttttttctatttctctggcccagcgcatcattaccagaaaggatagggtcactcgcgcaaattataccaagactcataactcataatactatactgcagacttcgggttgattcactaaaagcccgagggctcaattataatttgcgcaagccaaggggttacaaagtaaccctagccatccgatcaagagtggatgacccagattagatccatgattcattgaatcggtacgtaacgcggttcatcggatcagagatcgatggataggattttatgatacacgaaccacggtcgacgctcggattcgaaatcaacggtctctatgtcgcgatcccgaagaggtacgcctatctaatcgtggccgcccacgtgacaatctacggcccgatctactcaccccatcttctaatcatgatcgtccattccggatccaatggcccaaggataatcttccacctttcaccctcaaacgcgacgacagaactggactcacggcggcgcttctccgccgagcgcggtcaccgctactttgtgccccaaaacctaatccgaagggcactatacatagaggagagttggcaaagggcagggaggcggtcttacctcggatttgtgacgatagcagcttcgtccacgtggttgcacggtcggcggatatttcccagcgatagcgagcaattctccacgcgacacaggcacttgacttcaaccgcggccatgcacggcctcacggacgatggcgaccctcccccagccaagcaccgaggacggaaaaccggcaccagcggagatcaccgacggcggaccaattcgctccctcggccaacaccctctctcaccactatagcgctt

SEQ ID NO: 87118 - DNA, 528 bp, Zea Mays
catggggtatcattggttcatgactagacacatcatgtgtaattttcataggaaattcactctaaaaaattgtagcatttatggactctataattttaccaaccaacatgtccggtactccagagtttataataaaaacctatatccaacgctgtgaaaaacatacccaaggaaaacacaatcaacaatttttggtcctaatttgcgcttcttgttaattgacacattctctttagccaaataaccccatgtgtgcaaatatgagttatttaatcttttcttttctcattccttgaattgtgtgatttatttgttctttatgggaactttattgaggacatgacaagcagtcaagatcgcctcaccaccaccattccttagatagttctgaagtctctaacatggcattaaccaaatcaattagagtatggttctttatttcagcaaccccattggattatggtgagtatgacgatgtcctctcatgaataataccatgttccacacaaaaatcaggaaaatcacttg

SEQ ID NO: 87119 - DNA, 819 bp, Zea Mays
tttcttcccctcggcaggtgcagttggatgaccggcctggtggaggcatttcaggcgagtaccatcaggcttttgagtattcacggttttttcaggctctgggatagttgtagcagctattgtttcagcagggaccgagtcagaagaatcctcagccaacatgtccatcatagcacttatctctgcatcacccagactcataggcatctcaaagtgaacttgcctctcatcattgggaagatcaccaagtgaagcaaccagaacctcaacttcttcgagagagggtcgcactctaagacccaaaccactgtcactagcaggaggattggacacaaaatcgaaaaaggacttggaaggtggcagattccaagcagaatacgcaacaggagcactaatatttgatactttgcctctaaggatcatttccagtcggctcaccaagtccacagcaggaatcctcttgttggtaacccgagctgagtcggtgataccactatacaaataagccgggtatgctctgtccttcagtggctgaatattcttaaaaacaaagtcggcaaccatagcttcagcagtcagacctctctccttcaataaacaaatttcagcaagcagaaccttggcttctgttatctctaagtctatgggggactcaatccaacttggagcacgaacatccggctgtctccctgaccgaggggggagggatttgccatggttttccacaatgaaccactctaagcgccatcgtttaatgccatccttaagtgggatgtcaaggtattccattttcctcccacgacgcatctccagactcgc

SEQ ID NO: 87120 - DNA, 848 bp, Zea Mays
gcatcggacgacggatgaagcttaggctgaatcggtatattatttctaatcgcaatcgttgcctaggatatcaacgatctaaccgtcgtctccctgattctacgcgtagacacgacagtgccgcccatcctgcggtggcgcttccaccaccgcggcgagccttgccttatttgctgcccctcatccctaactaaatggtggtacttgatcccgaggccacgacgatttgcgtcaagccctaactactactctcgatagttgcgaacaccgtgtccatggattcccgcgttccacgacggtgctgtgaagtccggcgaggaattcccccttcaccggagcacctaccctctaatccaccgctgctacgtgttgaggacataaagacgagaggaacgatggtgaattaccaatgaattgatcggagataaaccttggctgtgagagcaagtggcacggcggcagtggctaactctggcgagcaatccgaaggcacacgattccgttctagggttgaggtcacgagcgtcttcgatgagcacccacagcccaatcactgagatcaatggcgtcttcacccacggatttgatggctgcgctatgcaccttcctctctccggccgcccacatggtctcgcactcccacggtaatggtcgtcagggatgtggttacgacaccaggagcacgctagtaccctatatagctggagaaggagtcctccactactcccggtccggtcgcaccacgcgcacgagaggatcgcggaggatcccaacctcacgcgcttcgtccgccatggtcgtgttctggtacgcagctgctgtgtggggcccacacactagaggaagag

SEQ ID NO: 87121 - DNA, 606 bp, Zea Mays
gaccgcgacttctcccctcccatccacactgcgttgtggcttgccttctctctcccacttgtgccgaccgtttcttccaccgtgctccatctccattaatggtcgtgactatttcttcgagcaggttacttcgagcaggtaacgttgttcttcaatccgcgttaatggagtattgaatctggccgcaaatcactctcctccctcgcctataaagctcgcgccgttcttctcctcttccccacgttctggatgccgccagctccgctcctgtctcctacgttcgcgttgcgcacacccttctgcacgcctcctcgcctgtttgttgtcggctctcatttagtggatgcaccacaacccccataaaccgcctccgtgcctctcttgctcactgttgtcgcgtcgtagaaccccacggaagccctgcttgccgatgtgctcgattctccaccgagctctagtgccagcacctcgccggcactggagcttggcaccccgccgcctgacccacaacaccgacgcactgctcgtgccaacatctgtgcacccgccctccatgctgatcttgccactccatgcattcttcgtcgccaaacttcctgcgtcgct

SEQ ID NO: 87122 - DNA, 669 bp, Zea Mays
ggcttttgttttttgataggtttcgtttgatcttcggtcagaccgtgggagcctttttgtgcggtttgcgagggcagcccttgagcctttgcacgaagcaataggttgatcaagagatgcctcgacttgtggttcatacgccccttcatcacctctctacgatgaggaagaggggcaatgcgccatgccaccctcgatgggcaacaagcatgatgtttccattgagctcttaacaggtgatccaagtggaggtccgagatcctttcgattggagtcggcttgaggtctgaagacacaccctaaaggtacctgcgggtgattcgcctggtcctagacccgtttgatggggtccgagggctcgatgcctccctacgatgggataccatcacaaatcgctcccgggggttctcagatatgtcttaagatacctcgagtcgcaacccgggggttctcggatatcatccttgactctatgctatggggcggttttggagcctagctgaggggccaaccttggaacccctgttcagtattgggcttggagccctaaagtcctgaggcgtttcgtccaaaccctactaaaagtcgagccttcgaacctctgaacaatatatttccatgcccttttcctcctgaatcgacatgccgaggtagaagacgactttttcc

SEQ ID NO: 87123 - DNA, 590 bp, Zea Mays
atttgtatgtctgtacctcaagatcgcatgatctataggatttctaaaaaagtctaatgataatctgtttgggactatgaaacacagtgagtagatagtagtttttattttgcttttctcttcaggaaataattagtgatcatttgttattggctgttgaacaaatatcttacacaactcatggttggagccaattttacacaaatggctttccctatcctgtactccaattcttgaaacattttgtaaactattattttcattgtgcacagagcctatttgaattcctctagccttcagaaaaatgcaagtgtaatgctcaaaagaatagttgtactaaacaacattctgatactgtttaattgcctatcatttaatcattgcagtagtcaagtcgtcgtttactgtctttggcctgatttactttggtatatggtcgaaatttttaaactttgctggtcacattctaggacaagcgcagattcatcaatcgaacctaaatactgaaagcagtcctaggacaagtagcactaacatttgtatttctaaataggtttactatgaaaatatatgatgtgattaatctaacg

SEQ ID NO: 87124 - DNA, 298 bp, Zea Mays
gacgtcgttcgtagggtcatgtgtagccatactcctggcatggcatactgtctcatttgttcatcatacgggtccctatagcgagtcttctgctaacatcttcgtagtagtgtgtggggtcccacgggtcagtcatatggtgtagtcatgcgtcgtgtagtctcacctgttgtcatgagctcgcatcattcaccagcgtgcgtaggcatatacctggtatggtgtatctaccatgtgttgtctggcatatgggttactatagaagcttcgatggtaaggtcctccatgaccagggtcg

SEQ ID NO: 87125 - DNA, 578 bp, Zea Mays
gcgccacgtcaggcgaccgagaggttcggccagcgggcccttggtcccgcgggtcccacgatgacgtggcgggagcctggtcagtggttgggatatttcccgcgaggggtgaggccgatatttttctagagatacaggtggtaggcccggagctaaaggaccaaatctacggccggaacagcgacacgtggtggatcggagaaggccggacaggggatcgtgtggtcgagcccggggtggggaccctcgcatcgttggatcgtgcggttgtggtgcagagcagcaaaaaggcccacaggggttgtggcgggaatgtttatttggtggtgtctggtgcacgtacactggtggttggcgttccgtcgcgggcggcgataatatcttgcgcctgtgcttggaaacaaccagctcgtggttggtgttggtttgcctgctttagcacgtcgtaaataaaattggttctaatagatgcggatactacactatccgtctggcctaaattttcccatgggttttgtgttgtttgcgtgtgtcgtttgtaatgttggacatcgctgaagttttactcaaggcctcta

SEQ ID NO: 87126 - DNA, 773 bp, Zea Mays
tgggcatcatgggtacatgggagcactcaaacgagaaggcatagaagatgaactgaccgggattgtgctggccgcagtacggttgttttcacggtggcggagactgtaattgggggaaacgagtgattctcggtcccaggtgaataatccggggcaaagtttggtgcaactgatgcgtgattatcctacggagccgcggggacactcaatttatagtgagggtaagcggtggcgtctatttttgcgcagagagaccggcggccgagacgaagggtgagtcatcggcgcggtctatcgtggcgtgccccgtggtgattcctccggcgaggaactaaccttcacaggatgtccttggcgacgtggtaagacgcccgaatacgtggcaatcgaccggcagtcagccaacaccggcgatcttatctatacaggccgcaattcatgggggcacgacggctagccaccggagttatccaaaggtgaagatcttttgccttggggtattatccggttactggggagtgtgaatcataacggcgatgaggattcacggcgaggattcaccggtggtgaggttcactgaacctgacccgactagggcactgtaccatggcgatgatcttcagttgcctgaaccgaccatccacacccgtcttgatctccgaattcttgttaggaacagagcaatctcccttactaagatttgttcaccatgtattagtctacaaactaactataggattcttggactaaaaccgagtggattcaaagatatg

SEQ ID NO: 87127 - DNA, 693 bp, Zea Mays
cggatttgttttaccggccggacttatccacggcgacgtggcacgagcgtgaccagttcaactcgggcacaaatcacggcgacgacgacacgaatcacggcggaggaagtcatcgacggcgaggacagtcgcgctggcgacctgatccgtttggttactgtaccatggggaaatggtattcagtccgtctgacagacaaagtttgggcctcattttctctcaaattcacatgataactaatctgaggctctgcagcaaatttgtagagctataaaccagcaacacttcgactataggggttgaactcacttgagcactggatcaaggttgaattcatactcaaagttgaccctgttacactgaaaagctgaatttcagaatgaaaccggcctgacagtcaagctttgagcataattatctccaatattttatcaacaactatgctcacactcttaagcaaagttgttctccttagtttggtctacaattttgatgtggtgacctagggcaaactcttaataatttggaagatgtagagctccaaagttgagccaatattactgaaaatcagacttaatcatttgagaaaaagtgtggctttttgcatataagcccaaaacttagggtttagattgcaaattcacatatgagtgacccaaatgacttaagacacttatttaacttggtttttgc

SEQ ID NO: 87128 - DNA, 891 bp, Zea Mays
caagcactcacttcactcattctcatacatatttacctatccgtgaagtatcggctcatttccctgtcatttcatgccccgtttcgaatttcaaactctctacggtacatttcactcgttctcacgacgtttgacctctgtttccccaaaattctcagtttttgtgtcataactctctgtgtatgtatttattcacatttcatatacttatgactaatacgtgctcacctctttagtcatttcagtgattctgcgtgcccgcctgcgcatctcctgtcctgcctggttcttctctctcgagacgttactaggtagctactttactctaaatcagtccttacctactgctctactgctctcgcttaccttttctccttatcttgcagcgtttcagtagccagttcaggatggtgcgaatgaagaatgtcacaccatcagggggaggagatgaccaggaccctccttgccccttcagataggataagggcaagactttctacattgagtagcaagggggcaagaagaagagactgttggatagagccacccgtgcagcagttgccgcagtggcagatcaggcagagtagggaggacagctgaggattgcctccgatcagatagccttccaagtctgtcgcctctcgtctcgagctcgctcttccactgctcggtccactccatcagacccaatcaccactccacctcccactttactaggtcctgccgctctcgagccttccaccacatctactgcgaccaccaccgccaccacaccagcttccactgctccagctcctgcttccgctccacccatcccccacctcgctcctgggagcatgatgagagtgaggggcgaccttttgctacgaacccacgcctgctcgacctttg

SEQ ID NO: 87129 - DNA, 437 bp, Zea Mays
tctttctctagctctgtctgctcttgttagccttcaagatttatccataacagattttgatcaggcccttgaggatgtcattcctgaagatatgctgttggaaccgactgttgatgatatgatggatgtttgctctgacgctctagacgtgggattagaggtatcccgggcggtatctcacacatcgtcgactttggaaggcagtcttcggcgtcaagaagctggtcaggattgcccgactcccatggaggtgactgaggatccttcagtcttagaggtggctgttgcagaaaacccagcccccaagggtgatgccggcggttacccagcccccgagggtgtcgccggtaatgatccggctctggtgggtagcgcaaactgcaacgcagcccccgagggtgttgccgatagtgatccggctccgatgggtagtgcga

SEQ ID NO: 87130 - DNA, 1151 bp, Zea Mays
tcggatagatagcggccatgaatggactgattgctgtgctgattgctgatatgtaattttccattttttaatttatagtcgatcctcctgtgggcttgtatgcatcttagatgatgacatgcgaatgtttgtgaatagattgatcttgattcatatgtcttattattagtgtagtagggcttatcctgtaaccataatttgtcaacatgatattatgatcttttattgttggtgcatgcttgctcatgtccttatttttgtgtgctattgaattttggtagttgctcgaagcctttaggccatttgcagcgtcattctctgggtctcgccattaaatgcttaaactattggagatcttgttttgattccttgttatgcaagtaaggaaattcgggtttggacgttggatgcttctgttttaacttctgggctacatatacataccccagagctgaaccctgtggcggacgcagaacaaaattctaggtggggccgacagtgcaaaagacaaattatcggactagactactagttaaatgtagattgatgataataacatgaatgttaaatgataacatctagtttttacaaaatgatatgaataccaaaaaagacctttttggctacctaaaggagagctagagagagaaaataggtggactggctgaggacgaggcgttggggtggagcagccgtatcgacgcgtagttgtggtgagtcatcgaatttgacgtgagatggcgtcggtgagacgacgacaggtgggaggagcgagtgcaggaggcgaggtagcgatagatgacggtgacggcaagcgacaaccattgccgtgttgcaacggcgtggtgggaccctaataagttagcgaggtataggtgatgccacggtcccaacaacagcttgcccatctgctggtgtggactaggaggcaaagtatcagtgttgtgtgcaggatcgcgacgagctgacgagtgatgagaaggcaaggtggcgctgcagtgggtgggttaggtcaccaacttactggtcagtcgatgaccgaagaagcgagtgagccacgagtgggcttgcgctagggaagagaatcgaatggctcaggtggagagtggactgagcagtgaagcatcgagagaaaaaacatcaaaacctag

SEQ ID NO: 87131 - DNA, 738 bp, Zea Mays
gtgatgcgtcgcctgcgattaacctaagttctagttaaatttctagctctagtgctgcttggtaatggggtctgcatgcaatatggtgttcacatgtgatgatacaaaaatgtcaaactcagacatagataaagtgaaattgtttctccttttgtatttccttacaaattgggtattacagaaacttaggttaaaattattcactttgagttattccgaaccaagcacctaataataacttagattatacagaacaatcaagtcgcatggctaacgcctagtcagcgtttgaacttcggacagtgagttattccgaagtccgtggccttctcgatgaggttggtgagcgagtgctcgtactcgaattcagtgaggtcgcacaacatcttcccagcatcccctcccgctgtcgccccgtgttctgttctatagctagaaatacggtggcgatgtgccttgtacaagatgcaaaggcgtcaacgtttttgtttgttactttgctgttttttgaaattgacgggacctgaacattgtctagtcatgagaacacaaatcatccgcagattattgccccgaaatttgtattgctcactgtctgggagagtttgtccagcattccacttgaagcaaattggttgcatatttgaatcctcaacccaatctgcacacgtgtctatctacaattgacctggtacaacaattcaacaacgacgctaagtcactagtttaactacattg

SEQ ID NO: 87132 - DNA, 281 bp, Zea Mays
tgcccggcgacgtggccgcacggtcatcgccgtggctgccgccgttcattcggtcgcgccacgccttgggccgttttaccacgtcactttgagccatggaggctaaccagtaatagccgtacgcctttgtccagtgaacgccacggtagatcatcgcggtgactcatcccctcttctcggccgccagcgcgatttctttaaattgggcgccaccgctgatggaccctataaatcaatgccccagtgagctccgttaggttgttacgcgtccagtgcaccaa

SEQ ID NO: 87133 - DNA, 386 bp, Zea Mays
ccccaactcaactagccgttggagagcaaactattgttggggtggcacaccggatagtcttgaccgccaacagtgcaccatctatgtgctaacggtgtgccaatagtgcaccaacggggcgccaactatgtgtttacaatggctagttctaacactgacagtgaccgctagccgttacgctcatggattgaccagtgtggtaactatgtacacagggcagtccgatgccaactcttagacatggagaaaatggaagctctttgttggttgtccggtgcgcaaagggccgaccagtgaaccaactgtgtgccaccggtgagccaattgtgtgccactggtgtgctagctggcagcccatcttctaggtcttctgttttttattcttg

SEQ ID NO: 87134 - DNA, 564 bp, Zea Mays
acgacttggtctactggtacgcatctttgccactgaaactgatggttggtgcatgcgtggcgtgggtggatagatctgaaatgaccatggccagacgaaaaactcacgtacagaaatgaaataaattaaaggcgtccgtggagttggaccgtaccgatgctttggatgtgaagctccacatggatggatgcatggacggacgaccgggatgagtagacggccggccggcagaggccggtgcggtactagtggccagtgggctgcaccggccaccggcctgcgctctgctgcagcatgcgtttctgcaggctgctagctgcttttgatttgcagctgcaggggtactctctagccatttgcattgccttgtttaagacctcggacggcgactgcatgtggacgtacgcagctgtttttgatccacatcgctgtcgcgctcgcccttgtgcgtaccatgcatatatacgtacgtacgcggggttttataacgaggaggttggcagttttgcagctagcggagtgtacgtgcatggacgttactatattatttattagtagagggta

SEQ ID NO: 87135 - DNA, 1564 bp, Zea Mays
actcgttaagagccctccgccactattcatcgtctcactgacaatcacacataggtccctcgacttttgtttcttctccaatcagacccatggccacggcgcgctcgccgtcgatcaccccgcggcttgatgaccggcggcggctatcccaattagctatggggtgagcatttccgacccaaggtgactcaagaacagccttcaattttggtttgtacacttagagaacgtcctacccacgcgcacgacgaaaaccgtgacgtcgagcccgtgttcccattcaatcacgcccgaattggtcaaatggctgtgacgatgagcttcacgggtatacagagctgctaaaacaacacacgagaagtgcagagccataccagagcgatctggccatggagcgcggagaaggtgtgcttgctggtgacaggaaagggggaaaatggcgtcacgacggctctgggtggaattgggaggtgggattggggctacgcggccgtaaggaactatagcttcaccgtgcacaaccaattttgagagaggtggcagaggtagtgcgaattttggacttcaatcaaactcactagtgaagttgtgagtgtctcgccggggttcatggcactatttataggcacggcggtccggctaactatccacggccatggataacattgttagcgcatgtttaccacgtagggaagagacacagtgagggaggagaaaggcatgggtgacaccgcggcagaaagcactgagtcacggcgaccaccggtgaatatctccggccatgcccgactgagcttgcgggatgatgccacgtccaaagttatcctccccagatcgattccccccactggatcagtcgagctcatctgattcaacagtgtcgtagatcttttccccgtgttcttcagatatttgcaaagtttgatctttagcttcttcctgaaccgaccaccttccagcctctcgatctcttgattcttgttaaggacagagcaaacttcattaatagagtatgttcacctaacaaccagcttcaaacttactataggatacttgggtcaaaatcgagtgaattcaaagatatggcgcgtccaatttggtcccataccactgtgaccatttctgttttcaatttcagtttcagttacccaacaccatcctgacagagcaactttgggctgcagtttctttaatttttgtataacaactaaagaggatgtctgcatcaaagttattctcctataatagctctagacttttgatgtgttgaccctaggcaaattctcaataaattggaagatatagggtcccaaagttgagccaattctctgaaattcagacttggccattggagtataagtgtggctcttttgcaaataagtccaaaacttagggtttaagttgcaaatccacatacttgtgaaccacatgagttaaggtgccttaacatcatggtttttgcactttagtccaaaagtgcactagttttgcacttagccccctggggtttaagtctagggctttctagggttctttttagggtttttgatacttctagggtttg

SEQ ID NO: 87136 - DNA, 904 bp, Zea Mays
atcggctgaagtcatcaactaccaacagaaaatagttctttcctccagctgttgatggttggacttggccacagagatctgcatggaacaaatccagtccctttttagctctaaaagctgtctgttttggaaaaggagtatggtgttgttttcccaaggtgcaaccatcacatacttgctcaactcgatctactacaggcataccttcaaccaactatttcttgcccaattctcgaagagctctgaagttgagatgcccatatctggcatgccacttccatgctatatcatttagcttatgcattagacagactggtggtgtcactcataagttgatgatgtagagcctgttgctagtgcgaggtgcactaattaacagattgtgttctggatcaaacacctttaaccaaccatcaaatagcctaatatcacacccaacctcttctagttgaccaagactgacaatgttactcttcagctttggaatataataaacagtagtcagtactttgtgttgatcatgttgaccttgaatcacaacagacccaagtccacagatttctactgtagatccatctccaaatctcacagaaccccgaatcttctcatcaaggtgtgtcagtgtagaccttgtaccagtcatgtgattactgcctcctgtgtccagtacccattcctcctatgaacacaccaacgacactactttctcctcatagagatgaacatactgggaagacacagtttctattgtttctacttcagctaacaaaagagccccttgctcttcgcctgcaacagccacatttgcttctggctgtttctgttctttcttctctcttttctaactagctatccactaaagaaaacagcaagaataaaaagctagctatccaacgagattaat

SEQ ID NO: 87137 - DNA, 528 bp, Zea Mays
atcgccacctccgtcaagtcccataaagggaagaatcgacatcttcagccttagagaaaggggtcaagaggaaccataagaccctggagaagaggacactctatagctatagcaccaagccttcaaagtaactccgagcttagaaaataatatctaaaccacgggccaggtgaggtccggttttgccacgtgtccagactggtgcgaccagtgtagctagagcctagatcccctcggatgtggtacgagcgcacagtctggggaggcctgggaatgtcgtgtcatcgcttattcccgggctagccctttgtcgagtcagaggtcgagtgtcgatgcatggacaagacatacccgacataagcctctagcataagggtccgccagcattaggtgcagatgggatgcatacttacccacaccaacaacaggtagtgtatcccctgcattaaatgtgtgtgccaagtttgtaacatgcgactttactgttacccgcatgttaccgaggcaggagcattgactcaatgtgtc

SEQ ID NO: 87138 - DNA, 691 bp, Zea Mays
ctttgcttatagggtcatgaaatattctgggtatgacatcaatggataccattttcgcacaacaagctacgaccaaagtcggcccaatcgaaaacaacgtgttctggagtctttacgcccgtccttgacgaggtcgagtattttggacgaatcgaagaaatatatgaactcaattttcatggttctaaacctcttactccagtgatattcaaatgacattagtttgaccctgaagtgacgagacagacacattctaatcttgggatagtcaaaattggacaggattcaaccttaccaggagacgatgtatatatcatggtccaacagaccacacaagtgtattacctcccatatgtgtgccaaacgaaagaacatcttaagggttgggatgttttgtatgaggtatcaccgcacagtaaattagttgttccaaacgatgcagattataacttaggcccggacacatatgacagagagttcttccaagaagatgggctagaagggtgatttgaaatagacttaaccgaagctatcgaaatggaagtagatatgttgatgaggaggatgatgaggtgcaaaatgataatgacttagaattacttgaaggcaatgacattaatgacgaacttttgcctttagatagtgttgactatgaaatggttgatagtgatgatgagacctatgatccggc

SEQ ID NO: 87139 - DNA, 497 bp, Zea Mays
tctcccaggtgagcgcgaatctcattgtaggatcaccagcgttgggttcacagaaccggagatcgttttcagttactgtaccattgcagatcccattcagtacgtctgacagagctacttaaggggccttttctttgatttccatgtgatgagccactaatatgatttcatcaaagttattctcctataaactagcttcaactttgtcacagagatcataatcatttactcactggatcaagcacaatttggctccaaagttgatccaatgcaactgacagtctgatttcagattaggactcgactgatagcccgacttctagggcattttactgcaatttctgtaccattcttgggctaggtcactcaatcaaacttaaactactatagtagctctacaactttgttgtggtgactcatgagaaattcctcatagatcaagagatatagaggcttgaagttggcctgataacattgttttcagagttaagaacatg

SEQ ID NO: 87140 - DNA, 474 bp, Zea Mays
cgagcacaaccctgaaaccagactgacagtaacctaggacccggtttgagggctattttgagcatgatctaatgagaactgaagcatggtgactatagggaaattaaagcctgattgtaggagaacaaccttgctaaaggtggattagcaagttgtcacatggaaatttgagatatgggctctacaaatagacctgtcagacaaattaatgaagcttctgaaggtacagtgcacagaaggagatcaggtgtagtgcacctcgccgccggttagccgtgcgcctagatccacgtcggcgtcacgattcacgcccggttgagcacggataacgctcctcggtaagaaatatcgcgctgtagataacttccggccactgttctcaccggccatcgtgtctcgccgcggttaatcgcactagcatcaccggagttcgccgttatccggcccggctgcgtgcctcaaagccgtaccacg

SEQ ID NO: 87141 - DNA, 674 bp, Zea Mays
ttcatagtagatcgctgcagtttcgttcattctaaaggattgacggatcttattagtactgattctgtaatagctagactgtagagagagagctgggtaagatcgtacacccctttatttcctcaatgaaaaaaagatctcgtacacctcagaagagtactgtatacacatcagctattcctatttctcctacaaagcctatagtccataactcaaatgctgtttattttcctttcttcatacataactttcttgattttcttgtatcgtatgtcagctactctatcgtgtttccaatggattttaaatctttcaaaccgatttctgtgagcaaaaacacgcacttttcgattatatagcgtttgtggacacctataaaaacgtacagtaagatttactccaatatctatttcgtactgcatctagcagcttactcatctacatctcttatttcaaactacaccctctaaatagtatagtcttcagtacagtgttttgcaggaccatgtgcacgatctgctagctttagccttactcccttggtcctccaataagagcacatcttaagttttatacaaaatagtattaatagatagacctatttctcttgaaaagtgatacatgaaagaaagatcccttttatttcaaaataaggtaatctcctttaggccact

SEQ ID NO: 87142 - DNA, 459 bp, Zea Mays
atgctgctcaggaacaagatgggaattaaatttttgttctaccatcatctcccagtctaagtaagcttcagcatcataagaacccatgaacggtggaatagagaacttaatattagcaaatggatcatggtcttgttcaggattatgatgacgacgtctaccattacctcccataccttgtcgattatgtgtgaggcgttgtcgcagcggtgcttaaacatcatcgtcattgtcgtcgtcgtccacaggagagtgagctggggctagagttggtggtgggggacgagcctccagtatgtccatgcgtgtaacaagttcagtaactcgtcgatcaagctgctcataggatgtcgccgcagagtcctggtattttttaaaagcttcagtcatcgtgtgcatcatctccttcaattccatacgagagacacactcatcgtcgttaagcttaggccccttgtc

SEQ ID NO: 87143 - DNA, 288 bp, Zea Mays
ataaaatctagcttcgccaatgttggcgcattctctagcgaggacaacttcgtaaggggcgatcctgaaggcccaattgattggatcagcaacgaagttgaagccttttagaaattttgagtggtcgcggggatgtctgcgccttctcaggtgccaggggaatcgtggctattttggagaaactaggctgtgaccacgtgaaagctttggcctaaaccaaagctaccttatctattggagatacaaaagacccctcggctgaagcaagcttagttggcaggaaattct

SEQ ID NO: 87144 - DNA, 351 bp, Zea Mays
agaggatgagtcagtttctgttcgcctgtgacctccgactgaaggacgtctgccctttatagacgggtcgccataatcccttgattcgatctgctaaattctaggaaccagtccctggaatatctctacgtgcaaccatccggagatctcgcacgttgtccattactcctagttgatgtgacagtctaggtgtgatatttgataaccaaataaacaaaaggcaaaaattaaagtgccgtttaggatggcagggcagagaagcggcggtgcagggaattgagaagaagaggatgagtcaattgatgttcgcctgtgacctccgactgaaggacgtctgccctttatagacgg

SEQ ID NO: 87145 - DNA, 388 bp, Zea Mays
cgaggggggtttggtcgtttgcccaccattaatttccccaaattcggtggcagtcagcctcaattatggagagagaagtgtgagagttattttgacatgtatgaagtgcattacactgtgtgggttcgtgttgcgatcatgcactttgaggggtgggcctctcgttggctggacggagtccactgaacgcaggcttaagcaactttcatggcatgatttttgctatctgttacatgaaagttttgggagcgaacaacacgaatccttaatccatcaagtttttcatatcaagcaaataggatcagtgtccgattatgttgaacaatttgctacactggtagatgaactagctgcttatgagtctaggactgatcctctgtactacacc

SEQ ID NO: 87146 - DNA, 366 bp, Zea Mays
taaaacatacgaactgatcaaatagtaatagtagagataactaatacacaattgtaataccttcttgaacaattacacttgatatgtccttttttggtttattgtgctgcaatgcaaatttgcattcatctattagcgctagataatttatctttgttccagatatatcttcttcattgggatgtataggaagtctagtatgctcatctatttttgcatcgagaggtgattcattatcaacttttgaatgcttgtccaattagctattatcaacgagtacttcatttgtctcgtctgaagaatccatcaagataaaacagtcctacatatattgtgaataaaataatctaaatatactgatccgct

SEQ ID NO: 87147 - DNA, 1061 bp, Zea Mays
ctgtcatgctttgcagaattgactccggaaataaaccatcccaatcaacacagcaaaaggctctgtccagcctaaccaaagtacgggtctacgggactgccgctcattagaccaagtgtatttccttccaagcagggggatctccttgacctccatatcattcaagaagcgtctgaaacttgccatcatcgctgtatccaggtttgcattgtttttgtcagcagcctgatagatgagattaaagtcacctgctactagccaagggccactgtagatcgccctgatatccctgagttcctgcaggaaggacactttctcatcgtctccctgtggtccataaactccagtgaacttccggccttcttgctcagcaaattgaatttcgttcatcctcgtgaagtttcataaactgtcaatgaatgtggcttgaaattcgtccacatgtagccatttttgtgtccaagataacggtcatctgatgacccttatttcataaaggtttcgccaaacatgattgcctctgtgtttattctaatctaattacagtataccgaatcctttatgtgcatgctgacactgacatacattgaatcttctgtaactggttactttcttttagttctgaacacctgcaatgggcagaacacgaaagggtttatgatttttttttcgtaatcatcatctagttgtggagtatcaaagctaatcttgtacgtagatgggatcgattcaagcaccacatgcaggacatgcgtcggcacagtgagatgaaaggtttcgcattaaggaaaccacaggaatccatatacacccttcctatgcctgactgcatgtgtcagcaagctgaagcacgatcaagggacacggcaaggagctaggcatgttccacccttcttctaacttgtaagcaggcacattaagcaaaggaaaaataaatattggtttgagcgtagaagagaatatagagatttcaaattatatggcccttgatatgaatcccttcctcaaataatagaggttcatcagtgagtatttgtatatgtgtgaagaaggtactccgc

SEQ ID NO: 87148 - DNA, 312 bp, Zea Mays
tgcataattaattaattcagctgtttgtcgtcattctacatatactactgcttctggagatttctctatccaatcacctacgacgcattaccagacaaccgtttgcttttcgtacatccatagaaagcaatagatttcatgtgtaggtatagctgaccatgagctaattaaggtcttcgttcagtaccctagctacaaagatacgtatgttataaggtttcggtatggatgaatttgtatttttggttgtacgtggttgctataataatctggtttacgtcttcacagttacaattagaatgtttagttcta

SEQ ID NO: 87149 - DNA, 674 bp, Zea Mays
gaactggggtgaataaaacatttttatagtaattcttctatttgtttcttcagttcaattaaatctttgacatccattcggtaagctctttttgaaatcggtgcagttccgggtaataattcaatagaaaactctatctcacgattaggtggcatacctggtagttcttctagaaatacgtctgagcattcacacactattcgaatgtgttccaaagatttctccaattgatttaccatggcttctgctgttgctggcatactgacattaacttcaattctttctccttgcggactggttaatgtaaccatcctcttatcacaagatattactccatcatacttggttaagtagtctattccaagtatcacatcgattccacttgattccaagataatcagctctactagaaagcttattcctctaatttcaatcttagtctgagggcatgagtgagtggctctaagttcacctcctggtgatcgaattaatagtttcctctttaaagtatagtttaatatattatgcttttccgcaaatgactttgttacaaaagagtgagatgctccagaatcaaataaaaccgatgaaggtatggagttaataagaaacataccatacaccacgtcggcatcctcaggaactgattctgctgtcacgtgattaactcttcc

SEQ ID NO: 87150 - DNA, 413 bp, Zea Mays
tgtggcagaaatatcccgaacttttcgttgtgggtgagtgttgttgattctttaaccttttcttttgtcgttccgatagaagcgtcagaattcgaggtcgaattctttttaaggggggtagagtgtgatacccagtttgcaaagaagagaagttggagtttattctttctgtgttttgttttgtttctcttgcgggtagtgtgctttagggatttggaagttgggaagcattcatcagtataacagtagactggtcgatcgggagctgtcgtgcaagcgagttgggccgtggatctcaatccggcccactagcctccccctaaccctagccccccctttctccccttgggattgcagccgcccccttcccctcccctttcccttggacgccgccccctcccctctcccatctt

SEQ ID NO: 87151 - DNA, 349 bp, Zea Mays
gatccgtaccctaagcctgcacgctccacgactctgcaacgggtaccctagtatttggcactgtgatcctgtgggtccgggcatatggcttggcttcccaggctaaattcttcaggtcctgttgcatgaatcaaaggatgaaagatactagatggtgggttctatgggtgtgctcctaaaacttcaaagccgaagctgtgtgcaggtccagctcccagtgcagaggtaggtagtctcaaactgtagagactacctcctaggggccggaccacaaatttttcctttggtatactggtatctagcatcaacacgtcgagactaccttccaggggggccaagtaccagagag

SEQ ID NO: 87152 - DNA, 923 bp, Zea Mays
caaataagaaataaaaattaaattaatatttaatggtaattatccccgtatacagtagatataagaaataaaaataatattaatattgtatggtagttgagttagttgatgaagaaagtatataatattgttgtggtggggtatagaggattgatatagggggaaccgttgaagtcagtctcagttctcggttcaaccgatctaccgctgttcttgactccgcacattgccagaccgcacgacgagaggccacggaagggagggacaggaggggatcagagcatccacccttcgttttatatatctgtttattggtcggtggcggcgctgctttttgagggttcctgcactcttgctatgcacattagtgtggcatagattagtatggcccatggcaaagaggatcggccgcgcgcggccacgagggtcacatgacttgggagggaggcgcaccgcatggggagggttgagggtatagatgtccaaatggtacgggtcacccgttagcccgaggcccaacacgattttgcccggtaccaacctgacccgttattatccatgctcggaccggaccgtgtttgagccgccaatccggcatgtcgtgttttgcatgacccgacccgatcaaaaggccggcacggacaccgaccgcatgtccatcgaataacccccctcgcccggcacccgaccccacgggcccactctctagaaccctatgtggctactccctgtcccggctccctctccgcctccgtccccaaatctgaaatcctctccgtcctgtcaccgactcgacgatcctccctcgtcggtaagtcacgcggttctagaatggtaagctcagtttggacatcaatactcggtgatggccggtaagctttgagccttcgtcgacgctctaagcctagccctgtctataatcc

SEQ ID NO: 87153 - DNA, 536 bp, Zea Mays
tctctagcaaacgtactcctggtctcagagggcggtatgggcagcctatatatcccgatgaacgagatgatcggactgcggtttgcagcgtgctgaatctgtctgacccaggttatccttccttgttgcgcctttctgtttgcttctcgatcttgcagggcggagagtgcagggacgatgcagcatcaccctcgcagagaggagtggcggttccctgcgcaaacaacggacgctccggctgccacggtttccgcgagaaccagcgcctcgcttggcggcatggaccggcggccacgggcctcccaagaccatcccaagagaatgaaagcgagccatggcgacgaggcagtgagcactgagctgaggatctagctggggcacagcagccatcggagttcaaagagcttctatgactccagacaatccaggccaaatcatggatttttactgttcttgggttcatggatccaaccatcagaacccatttccactttgtctaatcgacgaaaggcccttggtgtcagctagtatttgaa

SEQ ID NO: 87154 - DNA, 311 bp, Zea Mays
ttttcgataactgctaaggccgctttctagcttcggaaagtcgatgctctttgacaaagtgttaactatttttgctccggcgcaatcaggaatacatcccaagatcactttgtctacgccgctaaaaagtatggacctaggttgatagccacccgctatagcaaattcctccaattcagatatatcttcttcagtcggctcctggccacctaggtgcctcaagtcaaaggttttgctctccgaagaagtttcttcaatatttttcatcttcgaagccaaaatttcagggacgactgcgtcatcagtttctt

SEQ ID NO: 87155 - DNA, 760 bp, Zea Mays
cctgggatgaggttgatctggtgttcaatgccgtgaatgggaggaagacctggtggtaactccttcggaaacacatcggcatagtcctgcaaaagcttagtaacatcagggggtatatccaaagatggcacatcatctagtaaaaacagcatatgagagcatacaagcgcatagcaaggtagattatcagcacgtacgtcatcaaaatcagatttagtggcgagcaaaaccggagctttcagtttaatttcatttggtatggacgattgctggtattgttgtttagctctagctatgtcagattttacaatctgttcaggggtcattggatgaagaattattttcttacccttaaacatcaaagagtaattgtttgtgcgaccatgatgtaagctatctgtatcatatttccaaggcctaccgagcagaagtgaacaagcttccattggaacaacatcgcaatcagcataatcatggtaggaccccatagagaaatgaacacgtatcgagcgtgttaccttgagtttaccgcccccgttaagccattgaatatggtaggggtgtgggtgtggacatgtggggagagacaacttctccaccagttgcatgcttgccaagttgttgcagctgccaccgtcaataatgatgtgaatggaacgttcttgcacaacacctttggtatggaacaaggtgtggcgctggtgctgctcgggttgtgcaacttgcgtgctgagtacgcattgcacgacaagactctcat

SEQ ID NO: 87156 - DNA, 359 bp, Zea Mays
aacagtggacctcccaaactccagttggctgggtttagatggcagggcactgtaatcatcttcagattcaccttcctcagcaccaacctgctcagcttcagcagcaggtgcaccttcgtcagaaacattctccgacactaccagccccgaccgtttcatcacttcagaaattggagcggtttcagcagcttcggcttcttctccgtcacgtgtaaccctagcagtggaacgtatccttgccatttgatgatgaattcctcacaatttttgatgaagttgttgacttttttaattttcccgaagctcttcctcttgtgacgaagcaaaaccaacagcggtgcttcggttgagtgcgatga

SEQ ID NO: 87157 - DNA, 339 bp, Zea Mays
ccaaaattggtaatggggtcactactcctttttggtctgacagttggttgatgggtcacaggatcgcagaccttgctccacgcttatttcagaattcagattatccctaaaaggcgagttaataagaggacagtcttagacgctctctctaatgagacctggatttcggacatccaaggggctcttactgttggagttatctcagagtattttgttgtttgggatattattacctcggtccagcttaggactgaggtggaggactggagggcactctctttcgtctagctgtcaatgggaaatattcagcaaaggcagcctatgagggatttttcttgg

SEQ ID NO: 87158 - DNA, 671 bp, Zea Mays
gaggatgaagaggaagaagaagaaattccgctgatccacaagaacaaccgtcactacagaggcagcgacggggtagcgatatcccctcccaagccttgtcggcactcgtcagccttcaagggctttcaatatcagactttgatcaagcactggaagaagttgttcccgaagatattttatcagagcctcttgagggtgagattccaaccatctgttcagaggtcccagatggtggtattatgctgcatgattcttctgggcaagaggtaacccaggtggtatctcatacctcgtcaaccttagaaggcggtcttccttgcaaaagcgttgatctgggtcttccagctcctatggacgtggctgagggatcttcagccctagaggtggctgctgcggaaggcccagcccccgagggtggcgctggtagcgacctagcccccgagggtgttggagcaggctccctctctgctgcttctatggatgtccacattggatcgcccccagtttggtctgaggaggctgtggtgatgcacgtttctacggctcttgctggtcaagtcgctttaaaagcatgcgaaccagatggcaggagcctgccgcctgctgatggggctgaagttcccccaagtcatgctcttgagattattcctgctgatctcccctcatcgagc

SEQ ID NO: 87159 - DNA, 563 bp, Zea Mays
gatgcgatccatgagttgagagggaacgccatccagctccgccgcgcggccgtcgtctgtcaatgcaatccacactcactctgtttacttttcactcactttagtcattgctcttggtatcgattcagtaatcaggacgtagtgagcagtacgtctattaattgcttcatgatcactgccgtgtttatgctgcaactgcaactagctgcctgtgataagatatgatagccacttaaaacgtttagtacgtggcgtgcggccgggctatacatcatcgcgtgtggatcggacatatatagtgatatctctgcatctgcagtgctgggtacgttgaacaagctagcgggtatatgatataaattgaaggtcgaggaggacagcgactcggccccccggccgtggagcgacgaaccgaggctacctgctctgctcgcgatcgacctggtgacacctacctgctggcactgcacgccggtggtttggatcgacgacgtccacgatggcaacggttaaccgatcagttggtaggtcggcctcggtctcggtcgtgcagtgtatacccg

SEQ ID NO: 87160 - DNA, 478 bp, Zea Mays
caagtgatatcgcgttcacttatttgtactgtattccgttgatagcacagtgcatgtaagagatagattgtttgaaaatcataacttatcagttgagtggctttgtgcaagaaaaatcagagcctgttttaaacatactgtaaaacaatttgattgaaatatcgtagtgcatggaggagctagaattttggaaatcgtaagttataatcaactgctttgttttctacaattaaaaccagaaattatgttaaacactgatatgtaattttaggactgtaggaagtgcacattttctttcacgcgcagtgatgttctggccacttagtgaataggaccctctcctgagtcatggcatgaatccaaacccttgaaataaaagaaaagagaaacttttaaaaacagtgactacattgagtaagggggtgtttggtttttagtgactaatttttgctccctctattttagtacctaaattgcc

SEQ ID NO: 87161 - DNA, 397 bp, Zea Mays
gccatacaaagcctcaaacggtgacatcttcaaactggcctattagctattattgtaagagaactccacatagggcaaactcttatcccaactcccaccatgcttaagggcacaagctcttaacatatcctctagtacatggtaggttctctcagtctgaggatgataggccgaactaaaattcaatcttgtatccaaggactcgtgcaacttcttccagcaccgagaagtaaactgtgatccccggtctgacacaatcttctttggcaccccatgtaagcatacaatccgtgccatgtacaactctgctagcttggcacctgaatatgtggtcttcactggaataaagtgagctactttagttagtctatccacaatcacccatatagagtgaagc

SEQ ID NO: 87162 - DNA, 381 bp, Zea Mays
atccaactgcctcttatgcaagacctgatggcaaataagattcagatgcttcctgtacatcaacgccagaagttccaagctaagttgatttattatgacttagaggttggcaaaatatttgccactatcaagcaatgtttgaataatattggtacaaagcagtccaatctagcttctacatttggagagttgattgatgaggttcttcgggctgatgaatctcttacacctaatactgttagtatttaagcttgacttatatatattttctgtcttgatagcgtgcatttcatgtttacatattatgattaacgtatactccaccttttttgtgcagcaaggtcagacattgccaggtggcatagttgacataactctggc

SEQ ID NO: 87163 - DNA, 591 bp, Zea Mays
caccctccgatacctgtgagtagtcttgtcttgttgtctcagccttgaggattcagcaaaccgcctcccataatcccatctccattccagttacaggcgcgagtatatatctcatgctgctctccgtcctgtctgcgtgtgctcttgctgcaggaggctgaacaacaacagcttgtccgggccgttccccgcgtcgctggccaagatcccgcagctctccttcctgtacgtacgcacgcacgcacgcgtctcgtcgaagccatctcggcttcctcgattctactacatgtgcacctgttggctgcttcgtttcccttttgcgctttaaatcgaatttcaatccgtgaactcgatgcggttggtcggtgtctgttcccagggacctgtccttcaacaacctcactggccccgtcccgctcttcccgacacggaccttcaagtaagtgcgcttaatactgctgctgccccgccacacgaccgtcttatcctaatgcacactgtaacttttgcttcttcttcttcttttttttttaaaaaaagagagctcgagctgtatgatggtggtggtagtagcatcgaatctaatgcgaa

SEQ ID NO: 87164 - DNA, 525 bp, Zea Mays
taaagctggattataggacaataactttgatacaggaagattagtaagttgtcacatggaaaatggagaacaaggctcctcaaatcgcgctgtcataacgactgaacaagatggccatggtacaatacacgaaaagatcttcaggttcactgcacttcaccgctggtgacctccgcgccgggattcgcgccggccgccacgattcatgcctcggatgagtggattacgctcgacaatgaaaagatcttcaccgtggatgagtttggggcactgtggccgccctgtcgccgtgcccacttgccggcgacgtggctgcatggtcttcgtcgtggttgtcgccgtttacttggtcgcgccacgccttaggctgtcttaccacatcgtcgcgagtcgtggtgattacctagtgaccaccgtagctcattccccagtgaccgccacggtagatcgccacggtgactcatcccctcttctcggccgccagcgtgatttcttcaaattgggcgccaccgctgatggacccta

SEQ ID NO: 87165 - DNA, 764 bp, Zea Mays
caacactagaaactgactaatgatccctgactaacacggagaaaacacgacccacagcgctgttttaagccagcagctcttcgacctggaggaaagacagggccttggctccattcaaggaccagagcaccgcctattcccttgccaccctaagggctgtgaccaagctaggattacacccatcaaagacacatctattcctatgcttccatatggtccaagcacctaggattactagagaattgaaacccttcctcagaagatcagatgtccgagagctgctagtcttccactacgactcgaaagaatccttgtgagctggacagagctcttgcagcccactgaactagggaaatcataccagaactgcttggcaaaaacacattgaccaacaagtgatttatagtttcagcctcttggtcgcacaaggggcagtgctctggccgctctagccctcttttttctgagcttgtcagctgtccagcacctatttgctccacaagccaaataaagaacttgcacttcccaggagcccaagatctccacactcgttctgctggttcgaactgaactgaacatggaagagagctttataagcagaactagctgtataatcccctgaagcactgaatttccatatatgtgatatgtcgatccaggctgaagaacaactgcctcaagcacttcacaaagttccaggaattcagccttgtgcggccccggcgacttcggccccgtcgacaagcgggacccgcttcgccgac

SEQ ID NO: 87166 - DNA, 352 bp, Zea Mays
gccctccctagctgcttcaacgattcagagattccctccccttgcttctgaattctgatggcaacgaggaaccgtccaaaagggcatattcatctctcccttctccagctagtctgatgcgacgcaattgttgtgacacgacggcactgaagcgtctgaattgtaaactactacggagtaccaatgaacctaccaaccacgagcatattaaataaattcaaattcatagaaaaatagagacgttgcttcatgatgtgcacatgtgagaggagacggcatcacaaggacctaacacgcgataggtagcaagaatatgagcgagttggcacgtagatatttccatagacatccc

SEQ ID NO: 87167 - DNA, 547 bp, Zea Mays
aaggcctaccctttatagttcaagggtaagaccttacaacaaagacttgttctctattggtaatagggcgttctgttgccctgggttgaggtaaagttcccaacatcatctatatggtcgtgcgcaaccgaactcctggtatggtgtattgacaacctattcgtgacacaggtcccaatagcgagtctgatgctgtcgtagtggcggtgcagcttcgtcattcgtaactaaccctgtgtcaccctcctgtgtgcgtaggcatactgagagcacctagaggggggggtgaatgagtgacccttttaaagtagctcaataaaacaaacttggtctaatactgaattagtgagataaaaaaccaagtccgaatgaagaggagagaacttcttcacttaattgctctcacaaggtgagtattaaacttagagcaatattgtaagtgaagtgaagtgctagaaagagtagaatcgtagtaacgtaaagtaacttagacaagtgacacaacgtttttagctcgtggttcggtcaagcgtaaaatgctcgccta

SEQ ID NO: 87168 - DNA, 485 bp, Zea Mays
cctagatttgagaatgatcaaactcatgagaaattgtgcagactcaagcaatcactctatggcctgaagcagtcaccacgtgcatgatttgatagattcaggcgagctatgtgtgatatgggctattatcaatgtaatgaagatcacatggtcttctacaaacatcgtggggtcttgtatcactattctggctaacctttgtcagaggtagttggttgattgatatacctttatcatacaaggccagatattacttatgcagtaagtgtggtgagtaggtatatgcatgatcctagaattggacatatggaggtagtttatcaaattcaaagatacctgaaaggaacacctagcaaaggattgtggtttagagcaaaccaacacctaaacctggaagggtattgtgatactgactggcaagaagtagagatgatcggagatccacatctggatattgcgtatttgtgggtggtagtctggtttca

SEQ ID NO: 87169 - DNA, 1088 bp, Zea Mays
cattcgcaaggtttgtatttcgggtagctcggagatttgaagttgcacagatccatgcccttgctgttaatttggcggccgatcaagtagttccaagcagtcaaatgtctctgatcatgtcactctttaataaattctagatctttatggttttgaactcctaatggtcgttgctttgtggtttcattaccactctttaatggagtattgatctccgtatgtgtccttgctgcagccgatggtagtagccgcttcgggcatgtcctcacaagcctcccaaagcccggtggtggagagtacgggaagtactatagcttaccagccctgaatgatcgtaggataggtaagctcttcttatctgatcagaaatgtttgcgatgtttatagaagatcctgtaggacatacgtcataccaaaccttacaatttgtaattcatttatgcattccgttttcagaaagattgccatactctatccggtatctactggagtcagccatccgcaactgtgacggttttcagattacagagaaggatgtcgaaaatatcattgactgggagaataccgctcccaagctagtggagatacccttcaagcctgcccgtgtgcttctgcaggtgtggaaatgaaccgacttcattcttcgcttcatgtggtgtaaaataattattcattttctctctctctctctctctctgaaggattttaccggtgtcccagctatcgttgatcttgcaagcatgcgtgatgctatggcccgactgggtgatgatcctggaaagattgatcccctggtaggcagcactcaatacagtgagacacattagaatcatcatgtaaggatagtcatgccactgatcatcttctaatatttctcaacttctcgcctttttgctattcgcttgcagattccagtggatctagtcattgatcattcggtacaagctgatgtggtaagatcagagaatgccctccaagctaatatgcagcgcgaattcgataggaacaaggagcgcttcgctttccttcggtggggctctgtggcattcaataatatgcttattgttccaccaggttcaggaattgtt

SEQ ID NO: 87170 - DNA, 970 bp, Zea Mays
gattccttttcgttccttttaatggcttcatcagcgacttctcgtccgcccttcagccatatctcggagtaaaatttcccaccgagggtagtagcttcggctgaaggattttttatatcatcaactgagaaggcaaagtttgactgagccacagccttagtatgttcgcaactagccttctccaagatggatgtggccccctgggcaccagcaaaggcatagatatctcctcgatcactaagaatttctttgaaagctttggcttccccgctgatccactggataactccatcgaggtcaccacagataaatctttacttagaggaataggctccaaccttagcgaagctgttctttaagctcttagcacattccaaggatactttgtaacatttttctttgatagcgcgaagctcatccgcattcttttgtgctcttaacttttcgatctcgcatatctcatgtttcaccacctcacttcgaatttttcagttgcttcagcaatcttcccctttaattcatgtacttcagctttatgagcttcggcttgggcagcaagcttagcttcattagatttcaatctatccactaaggagagtaatattttatccttttccaaagcttcgttccttagtgtgataacttcagagcgaagattccctagaggctagagctattcgacagctctcatcctccgcatctttctggggctcaaagccttgcttagaattaaaccctgaaaaacaaagtgtgagcacggaacaacggcaagaaaaaccataacagtagataaatcaaagtatacacaccttcaggctattgtaagcaagactgactgcaagctgatctttcgacattgctaataggccaagttcaagcttcggatatcctatgttgtccattatttcccggcatacatgtatttctttattgtttggtagacaataaaggaagtcatcttcgtcatttc

SEQ ID NO: 87171 - DNA, 458 bp, Zea Mays
atttaaataaaaccccaagcaagcttctcaagtggggactcaacagggaattctgaatttcagaattctaaatttcataccttgagccaaagatcaagcgtgttcaccttgatccctagctcaaatcctaatgaccccattgacaaaaacgtgtctcactaacccctctgtcgcatgccagaagatagcattgggacgtgagacctagacacgacaaaactttggatttgccttgggtttgagcagagagacagaccggatttccgggctccaaatctctgaaactagtaggcaaaatcctatgacccccacacaagatcggtagcttgtagggaggagaagaggttttgtgcactgaccaaggcgagagcaggctcggatgagtgaccacacgcgccagaacacgggtagaacgaacggacacacgtgttcgaccctggtcggcacgccggcgctcg

SEQ ID NO: 87172 - DNA, 349 bp, Zea Mays
ttcaactgggagacttgaagaggaaggctatttcataggggcatggtagcagcagtgttcatcctcgctatgttctgccacagggtacaccaactcgtctagaaggaggaccacgcccagctcagtacgctccataggggtctccacggacacctcctactcgtcaggctgcccccactggcaccccgacgaggcctataggacagaagaccgccctacatgcttcaagtgcagttagattgggcactatgctaatgcttgtccggtggggaattctggtacaccagctaagaacaagcaacagactcctggcaagggatactctattgccagggttaatcaagtcagc

SEQ ID NO: 87173 - DNA, 412 bp, Zea Mays
ccagcaccacccttgggggctgggttttctgcaacagccacctctaaggctgaaggatcctcagtcacctccatggaagtcgggcaatcctgaccaacttcttgacaccgaagactgccttccaaagtcgacgatgcgcgagatactgcccggaatacctctaatcccacatctggaattttagagcaaacatccatcatatcaccagcagtcggctccgacagcatatcttcaggaatgacatcctcaagggcctgatcaaaatctgttatggataattcttgaaggctaacaagagcaaacagagctggagaaggaatatcactatcccccctactacctctgtaacgccggctattattacgaattagcggaacttcttcttcctcttctttgtcctcataaaaaatac

SEQ ID NO: 87174 - DNA, 324 bp, Zea Mays
atcaacagccaataaaatagcgaggtactctttctcataagtggatagccccaaattcccaggtcctagagctttgctgacaaatgccaacgggtggccatcttgctgcaaaatagctccaatgtctgtgcttgatgcatctgtttcaatagaaaatgggcgtgtaaagtctggtaaagccaagacaggggctgaagacaatgcttgcttgaggtcctcaaaagttgtctgttgtactgatgcccagacaaatactgaatgcttcttgaggagagcagttagtggtttggcgagcaatctgaagtgacgcacaaactttctgta

SEQ ID NO: 87175 - DNA, 416 bp, Zea Mays
cgaggacgacgatgatcccgataatgagccacaaccacagagagtgatgacagccttgacctcctcgaacttctcataataatcttccttttgttgacctaattctgaggaaaatcttacatcgcttgagctcacttatggtaggaactcaataagtatgtaggaacaaatatagtgtaaggcttactaaggatcggatatgcttgaggctaagcattagcttttaattaagttgatcaaacttttgttagcaattactatgtataaataaatatcatctcaattaaataatgatcatttgtaccggacacttcaccatataatcctttaatcatttagtcttcatccacgaatctttgcaaccatccatacatatttcttcttcaaataaaaacttgtttctctataatagtata

SEQ ID NO: 87176 - DNA, 527 bp, Zea Mays
agagtatcgaatgtagctttgtcataacaacaatgggaaggtggcgcaaggagaggtgtcaccacgaacaacgaaggcagaaggcaatgttatccctgttccatttgtaaatcttgtgtgtaattcttaagggcataagtgtaattttgtatgaagctgtacgattctctataaatagatgcacagtgccccgcataaagtaccttttggcggattaggccattattgtgtaatattcatttattcacgttggtaaacatgatttattcacccaacaattaaccttcgtctccaaaaaaatcatctcaaagggatgacttcttcgtgacgaaggttgtctgtctttttaatattatgttgtcgtgtttttggttgtgtatagcaatcgagaacgagtgaccaacagatgcccctctttcttgtttacgatactagattttaatgttgtttgtatcttaatatatttgatagatagtcatttgtatcttaatgtttttttcattcacagggcaccacatctagtcgac

SEQ ID NO: 87177 - DNA, 525 bp, Zea Mays
cagaagtagatcccaacgactagagggagccaatcatcatatacataagaagcgaagaagaaccagatgacaaggctatggcggagcacatcgcgagacagtcggcccattataccattatagggggcctactatatagaagaggtgcaggaggagtcctcatgaagtgtattcactcggcttctggaaagcagctgttggacaagatccatgctgggcaatgtggcgtgcatgcagcatcatagactctagtagggaaagctttcaggttcaggttctactggccaacagtaaagaacgatacagcgaagttagtccagaagtacgaggcatgtcaattcttatcaaagcagcagcatctacctatgcaacagttgcagactattcatgtaacctggttgtttgtatgccgggggctagacatgattgggcccttcaagaaagcccaagggggatatacacacatactagttgccattgataaattcacaaagtggatagaatacaaactcatcgcctctttga

SEQ ID NO: 87178 - DNA, 744 bp, Zea Mays
tgaaacttgccctaaaaagaaaatacctctttccccaagaaaagtcttctctactcctccccgatttaacagacccttcttttcctattccagatggaagactctctggccattaggacatcctactgctcggaggtggaagggttcccacatcttttgcaaagttgtgcgcttcgcatgggaatccgcaagaagtcggaatacatctggaaggagtatttcgagggtggaatggagaaatgctctatggcagtctacctgggagaaagccgaaactatctaaaccatccttccttccaagtcacttttaccggataccgctttccagatacttgccaggatgttgaccgatcagccctccgacaactatgccagaactacaacaaggtgatctttgaaaccccccttcgctactttccacccagcaacaagaatacccccacctggaggaaaagacttcaggccctgtcaggaggagatcctattgagaatgatcccaccatcgtctacatggctggataccttcacacccttcataaccaatatgatgacctcaccctccactgcacctacctaacctcccgggtggaaagtctggagcaaaaagtcaaggaactttcaggggaaaaggcgtcccttcaagagagcctcgcaatagcagaaggcgaggaagccaatacccgtgaggcctaccgcaccctaaagatggactatgacaagaaactgaagaagctcgcccctgca

SEQ ID NO: 87179 - DNA, 350 bp, Zea Mays
aaatctattgaaaattcctggacgtcccccccaatgggtgtagccaagggacggcttggtgtgctgagcatttagcaaactgcccttgagtagtaactttacatgactgcggggcgtaatcatatcgtccaagtagttgacctcagtcccaatggtgtcgtgttacgtgagacggcgtctgccgcctgacttgtttctaggcggtttgaatggcttattgaatatttgcgactgttcagtgaccgtggtaggagatgagtggttgcctcccgcccctataaatagactgcctgcttcactagtgtcttcacacatctcccggccgtttgttgcttattctccacctttct

SEQ ID NO: 87180 - DNA, 720 bp, Zea Mays
tacccaagttattcagcgaagttgacagctttggctaactgtttagcacccataacatttccggctgagtggtgaaccatgtatcgtcggcccccaaactcttgatcaaaaggcccttcacctagtagtgtgtcattctcgatggtcttcttggtatcctcaatttcagtaggccccttccccttatcatatgtagtcgcaggcttcatagaactagtcttttcctcgggcactatgactaccagatgtatcgccgctagggacatggtcggcatcttcagatcctctatcaccttttaaaccataaatagtgttttatgatattaagggcattgtattcacatgagagggtattatagtacaaatagtggatgaaaacgttattgggctagctaatgaccttttgtgataccaagtttgccataatcccctctattcaatgcatacttagacgatgtttatgtccactcaagtaaaacaccataaatcattatggcacatcatttctcaaaataaaataaagaccatggaaaacttagcccaattgcgtgagagaactgtccaaacacaggttaaagttgtaaggcactttatccaccatacacatgctaaaaatttggaatataaagaattcaaaacaatagatcacactttaaaccacaaatagtgtttctttgatgttgatggcattctatttgcacgaaagggtattagagtata

SEQ ID NO: 87181 - DNA, 295 bp, Zea Mays
ccgaacggccgatcccgacgccggctgcgtggctcgcctcagagccccagccgtatcctgccacccttgtccatgagcgcccgctatcagcgcagctagtccctccctccgcccgctatcttgagcggtggtgatggagtttactttcgaggatgcagcggaactgtgcgcgctcgtttcgaatcagcaatcccacgtcgacgagaagcggaggtcggtgtggtttcttctaccggcgcacctccgatcagaatgcatttctgtttttgcaccctgcatcacaaaagattcgggg

SEQ ID NO: 87182 - DNA, 386 bp, Zea Mays
tgcttggtgatcacctaaactaataaaaacttgaactgctgtgagctagtaggcaaatgggaatgcatggactgagtcttataaaatctggtagtcataagggaacatagcatttcaaggagtcgtgtgatgcactgtcaaaatttgctgcatatcaggacagttcatatggtcttagtttgacaaccaaattcatttgttcaatgcatcaacataatagtgtaccacaagcttaactagtatggtgtcattgattgttagacctgataatatttctaatttattacctcacatatatgttcatgtgggagccgccagcactgggtctattattttcttacctcacatatatatgcactatacttttatccatgtgacattttttt

SEQ ID NO: 87183 - DNA, 298 bp, Zea Mays
gtaggcaaaaaaaaaggaagcataaaataataggcaaggtaagtactgtactatacaagtgcaacattaatctttccaattacaaagcacccaaaagaagaaccgaattaaaccccagtagtgcacagcgagacagtgaaggcaacacattgatgcaatggtgtgggatcagtgaaagtagccataggcctagggacggaggtagcagctgctggctctcaccaaagagaatgcagtacaactgtacaaacatcaaacggtgtttagaaaaagatggaaattccatgtactgactgac

SEQ ID NO: 87184 - DNA, 452 bp, Zea Mays
tggttcctaatttaataactaaaatataacgtcacgtttagaaagaccttgatttttataatcctagccacgagcgtagaattgtacaggagcaaaaattgtatcttcggcatgaacaaaagcagcaataattctataatggaacaactcacattattaaattttaattcaaactacgaggttctaagttaggagcaaagtagaacttgagtcaactcttttaataaaaaaagagagaattataacacgagagaatttcagacaacatcgactcaaatgtctaccaaattggttctgttgatgtctatgtgatcgcgagctgtttgataagaaaccaattaataattaattacagtaaatagattaagactctaattatttatttcttgatttttctcgtgtgtcatgttagtagtgttgcaaaaaaaaggggaaacacacgcacacaacac

SEQ ID NO: 87185 - DNA, 1091 bp, Zea Mays
gaattttcaaatactcacttagaaatattctttcattcttaccttaccattttctggtagtcccttatcttgtaaggtcagggtaacaaagtgcaatatataggaagttggagatcaatgaaggttgattccatatttattaggttatgcatgcatcatgttaaaaatctactaataaatctttctctcttatggagacatggcgcgtacaaggaaaatagcatgcaaatctactgtacctcttggcctgcctcgtcatcagctagcctccagacatgaagggagtagtagtggcagcaatgacccaattggagacctggaagccaaggtggaacaacttcggtcagagctacgtcaccggaatagggcatgggcgcaggacagttagcgtatacctgaattgttagctgacgtcagccgtttgcaatacgagatctcagaatgggactcgaccattgactgggccgtcaactcacgttcgatcgcttgggaccgcgaagcaaaagctcgagcccatgtggtagagcttagtgcggccctcgactgcacccggacgtgccttccgacgttgctgcaatgggagccgaaccttcaggaacagcaaatgaaggacctgatagggagttggacctttttaggcccccttcttccatgaaccttgttgacgaacaatatcctacaacaggaaatgaagcaaccaaggatgacgaagactagaatagtatagtttagatgttatacttatgtaaaataagtactgaagtcaagttgtatgttggagtctatataattaaattttggtaatgtaatatgatggtgtgtgctggcatgttatattttccaaatgtctctttgcctcagatgccatcacggactcgcgcacatgatggtgcggggacttcccgcggtcgggaagatactcctaacctgccaccagtaccactgacgttgggtgaggctatcgctgccctggtcaatgccactatggataatacacgcttcttgcgttagatggcgggcaatcaattctaacagcacggaggcagagctcgtccccaaggattgcgtgatactacatattcggaattctc

SEQ ID NO: 87186 - DNA, 538 bp, Zea Mays
ctccacgatacccttaaacttatcctttcataggggtttggtacaccagccaagggcccaatgatttcaactagtagcgctggtggcgcatactaatttgaatactaatagggattcattcagatgggacttgactgctaatgggttgtttactgttaaatccttgtaccgggcagttctcaacaatggagtggtaattaataacaaggacctttggaaacttaagatacctttgaaaataaaagttttatgtggcacctcaaaagaggtgtgtaaccttaacaatggataacttggctcggagaaattagcaaggtaatcagagctgttgctttttagcacaccggagacaataaaccacctatttttaggtgtacttatgcgtctttcatttgacgtttggtatagataagcacatggttaagacctccccgtgatgtgaatgatttgtttggggactcggcaagggtactgttggtcaaatcacgccgtttactactaactgtagcatttgcaatttgttgggccatttggttaa

SEQ ID NO: 87187 - DNA, 530 bp, Zea Mays
ctggaagccaattagttttgggtcgtgaatatcgaccttaatatgcgcatgccatagtgcatggttggacttcgtgaggttctcataaacggatatgccaagaagaggattcacgaaggtagatgatgatgaacttgccatgactttgattaccatgtaaaaaatataaaggcacttgaaagaatcacagacagaccaaactcaggtttgcatgtgttacatgttgatctattagatgagaaacaacccttgatgatggcttatgtttataggagcagattatgggtcctagataaatacaatacacgttcaaactagattctagtctaacttaaaataagaacatctatttggttacaattcctcgttctatatggtatctttacactctccatcctatgttgtgagtcagggtgttgcttgcagtcaaacaaaccatgaaggacttagtgtagcaacactaggttttgaaactcaacttgtatccaaacatttcccaactgcaaatcatgtgctaggacaactagagt

SEQ ID NO: 87188 - DNA, 615 bp, Zea Mays
caggtgccgagggtttctcgggaaggctctctttcacaagactttctggtgcagtttccgaaggtcccgcctcggcatgagcagaagtactggcagtgattacctctgtgacatcttcagttttgctaccaaaagcttcggcagaagaaggaggcgacattttcacagattctagaacagcttccaagacactatccatcctcctcttccttgagttcctgttggagctggcagcttcggcactgctatcaccatcatcttaggcttctctggtacttttctgctacgttttctggctctggttctctggccgggtatgcaatggcttcaataggcatagaaggaatagtctctctggctaggcgggttgtttccaccctttcaattaacttcgacacatcggtcatctcgatgcgcctgggtctgcgtgtcaaaaccttgatcttcttggactttgacacaccagtagatgttgaggcagcaactttccttttcctcccttgcttatgcgtgggatagcagtagtctgggtaaacgaacccaataacatcaaatactctattcaacctcttcttgtcgtgagcgccgaaggcagccgtcatagcttcgtcttct

SEQ ID NO: 87189 - DNA, 599 bp, Zea Mays
gtgctgtaaagaaattggagatgaatggacttaaagtcgggctatcagtcaacccggaatctgaattttgactgatagtgacctgggacgaactttggaagcgattttgagtaatccagggagtgttttattatggttgctatagcaaaatcaaagctggtatatagagcaacaactttggtgcagatggaccattagctctccacatgaaaaatggagaatggagcttctcaatctggcgcactgaagggaattcgcatggtacattaacctgacgaagatcgccaggttcagtgcaccgccgttggtgatctccgcgctgcgatcctcgccgacatcgcgatttgtgcaccttggcttccggataacggtcgacggtgaaaagatcgtgtgcatgcatcatcttggggcactgtttggccttgtcgccgtacccacttgcaccggcgatgtggccgcgcgaccgtctctgcagtgccaccgtttctcacagttacgccacgctttcggtcgtttcaccatgttgtcgcaagccgtgaaggttagccagtgacagtcgtaagtccttgtcctataaatgccacgatagcgttcgccgg

SEQ ID NO: 87190 - DNA, 839 bp, Zea Mays
cacacagtattgaaagccatcaaacacgcttatacttcgtttccacttgcaattaacggtcttctaatgccgaagcgtgaccgtatgggacgttggacaatgcccttcacatcttcccttttacttaaatcattcttgacatagaaccattgtttcatccaagaacccaaccacttctttcggaatgtcggcacagggaacctcgcatcaaaacggggcacaaagctgtagcacccgaagttgttgtgatactgttccttcctagttgccttcgtctggtaaggaaattcatgaatgttgcataagcacttgccatctggctctagctcttggctccacatggcccaaatgaaaaccctcacttaattaaagcttcgggagtaagctgatgaaggtatatctcaaatgtctttaatacttcaactagcatcttgtgcaatggaaaataaagtccagccttcataaaacttttaagtactaccacttcatctgcttcaggaagtggaacagtgttttctcccacagccctcactatagatatgttgtggaaatattttcccttcatcgcttcaatttgcccttgcttaatagttgatttcccgaaaacaacatggcttggcctccatggccgatcttcgacatcttcattatcactccccacatcgaaactgtcactatcgctagaatccacagacagcccagccaacatttcattagtgattttttcaacgttggttctttccatagcattgtaaaaaccagcgagcgcggggtccatagtcttcttgtcttcagccatttcgatggtgatcacaacaaaagctgaagctcaaaagaac

SEQ ID NO: 87191 - DNA, 443 bp, Zea Mays
cagatggcgaccattcacccatgattaggttgctcgaagcatttgaagccgaaggctgctgtggcttgggatcttggggttggacatactgtggaatgtagggcaaatagtatgaagatgtactaaacacctcctttggctgagatgattgagcgactgtagcaacactctctttttgcttgtggatggtgtgctgataggtcctagttatgaggtctttatctttgccacaaaacaaacagaatggctttcttggttgtgcattgaacataccactgaagcttcagcctcctcttccccctctcggagatggtgggtggaatgtactttgagaggactactgctgagtgtttggctattattgttggcttggttgcccctaagacttagttgtattctcctcactttgtcctgggttgtgaatgcttcggacatacctcaag

SEQ ID NO: 87192 - DNA, 1030 bp, Zea Mays
ttgtttccgtctcttctatcagattgacactagcttccactgtcacgacaaaaattgtttccgaagccaaggggatagcgtcgacctgttcagcaatctctatcttctctataccaagcactgcagctgtcctctctaaagaatgtggcctcggcctgcgagttaaaaccttaaccttcttcggcttaggcacggtggaagaagatgaagttgccatttttcttttcaacccttgttttcgggcaggaaagcagtaatcaggataaaaaaatccaatcacattaaagatcctgttcagtctcctcttgccgcgagcaccgaaggcaatggtcatagcttcgtcctctaccttcgtataagctcccaacagttcgtctctggtagcctcaacggcctcaagccaatcatcatttggctcgtcaaatcgactcctatagcggtaggtgtatcttaaatagaccggaccaccttcgctggagccagcagcagtctccttcggcatctcccagtcattaacaagtggccacaccttataggaaatatgctcttgaactaaatccctggtgccaatgtatgtacataccgtgttaaaggccatcaagcatgcttgcacttcgtccccactcgcgatagatggcctcctaatgccgaagcgtgaccgtatgggacactggataatacccctcacatcttccctctcacttagatcattcttgacatagaaccattgcttcttccaagaaccctgccatttctttcaaaatgttggcacaagatacctcacatcagaatggtgcacaaagctgtaacatccgaagttattatgatactgctccttcccaattgctttcgtctgttaggataattcatggatgttgcagaagcacttgacatctggctctagcccttggcttctcatagcctgtaagacctcaagaatcctaatgctagaatctagtaaaacttcctaaagaatttgaatttgaaataccttctagtaaaacttaattgttttaagaatagtaataag

SEQ ID NO: 87193 - DNA, 552 bp, Zea Mays
atcaacttaagaataaaagttccactaagtattttatcttaagaaatcatgcctaaaccatataatgcatccaaaaagggaaaaatgttgaaagcctagaacaaccctaattgaaccacttaagtagaaaggaagaaaaggggtaaaaagaccatgaaaaacatggaatcatggcttaggccaattataaaagttaaaacacactaactaagctacaataaagattataaaagtttggccaaaatagtttgttaaaaacctcaagcaagccattcaagtggaggtttcatagagaaatctgaaattcggatttctgaattttcagcctctaaatcaaaaccgagcgcgttcaccttaatctctatctcaaaaccctaagctcccattaacaaaaatgtgataaactaacccctctacctcatacctgaagatggcatttggtacgcgtgccctagacacgtcaaacccgggatcttctctcggagttcagcagtgagacaaacccaacttcacccctccatatctcttgatccagtcagcgaaacccataag

SEQ ID NO: 87194 - DNA, 1103 bp, Zea Mays
gatcttcgcaacaaccacttcatctttggaaccgattgatgggtaccacaaattctttcatgtacttcggccatggctaatatagcatcatctaggcccaagtacttaagcaggacgtcgttgactgttcggcggtagagttcatcactcatcaaaacatacttgaaagttgtacgccgaatgttcttatctttcctgatattgggatctcgtaaataattagttttgggcgtcctccaatcacttgcatcggcttcattatcagccaaatcaattaggagaactttcctggtaacccctgacggtccggagtctttactcggacggtccgcaacctggggaattggccctgcaccggttatcagattttcagtattgtgaaatctccctcgctttatccaataacctgatgcatcttgtgccaaattgttagctctatgattctcaactctagagatatgccgaatactgaattcgtcaaaagaatgaattatgccccaacatttttcaaggtaactatttagagtaccatcaaaacattgatattcttctaacacctgttggacaaccagctgagaatcaccaaatgccttcacatgttttactcccatacaatttaaaagttccaagccgaataaaagggcctcatattcggcttgattgttagtacaataagttttcaatcggctagagaagtcgaaggagacatcactttgtgaaacaagtacgatgccaattccttgcccttcattgcaaaccgatccatcaaaatataaagtccaaggagtaatagtgaggtatgacatgtctagtttatgagtatcattaatccgatgttctacaataaaatctgctacgacctggcctctcatagatttcaatggttcgtaggccaagtcatattctatgagtgcataagcccacttaccaattctaccactcataattgggttatgcaacatgcatttgatcacatcgccttgaccagaaacagtgaatgactagacagtaaataacatctacacttggtgcatgcataaaacaagcataagcataatttctcaataaaagtgtacctcgtttcagcatccaccaacctccga

SEQ ID NO: 87195 - DNA, 660 bp, Zea Mays
tattgaagaatgagtttagtaggttccatccgtgtcaatggcatggatgttgatttttgtcgtgcagtgaaatgagttacgcgtagaatgtgttggttcgatgcatatgtaatcgtattggtgaatgtgaaatgagttgagtatttcaaacagttagttgatagtctctgtttgtgctattgtgttgattttgttgtatggtgaatcaatgcttcacattaacaatcatcacatgctatacgtggtgagtggttaaatgttatattaatcggttagaggttctatacgagtgttatcgctgcaccaacgttgtttggaagcaagtagtgtcgatacgtcaatttctattgaaattggagaacgatgcgataaaatatgtatatgagtgctttaggtccttaggtttccaagttgtaatattgtggaatcctatgatatgtgataatgttctatgtgttaggtctaaggaagatgtgatgtttatttagtggatgtgttaagcaagttaatctagtaaagtggtttggagcactagttaatctacttctagccatagtataagtttaggtgtcctataataatgagcctaacctttgtgtagtctttggtgtcattccctcattaagaaaaatataaacagataatgtgtttagtgttttc

SEQ ID NO: 87196 - DNA, 662 bp, Zea Mays
aaattggtagcaaaaaatagaaaagagttgtatcctaattgcaagaaatatacaaagttgtgtttcctagttagattgcttcatatcaatcaccttggaggatggaccggtagatctatgaacctgctactagatctacttaatgatgcactccctgagggttcagcattacctaagaaattggtgaaatctgtagaaaattggatacgctagtattcattcatgtgaaaatgattgtattctttattcgaaggataatgcaaaattaaattcttgtccaaaatgtaaggtttcacgttggaaatcaataaggtagagtctcgatgggaaacatatatacaaggttcctagaaaggttctccgctaattccaataacaaaaatgctccaaaggccatttatgacccctaaagtagcaggtctagcaagatggcatgatgaagaccggataaaatatggtttgctatcaaaatagtcctgttgctgcaacccggatagtgcaacgccatcaaaccagtcatattggttcagccccaacaatgcaatgccatcaaaacaatcctgttggtgtagccccaacaattcagcaccaccaaaacagtcatattggtgcagtcccaccaaaacagcctcgacggtgcatcagtacgagtttagcccacc

SEQ ID NO: 87197 - DNA, 392 bp, Zea Mays
gtttacctcaaggtatcaccacttcgtggaatgaggagattcaaagttaagggcaaattgtcacctcgttatattggaccattcttgatctttaggcgagttggggagatggcataccaactcgagttacctgatagtctatcggatgtgcataatgtgttccacgtatctcaactgaagaagtgtctccatgtccctgaggaacagttaccaatggaagagctcggtgttcagggtgatttgacttacacggagtatccgatcaagattcttgacactttaactagagttacaaggaataaggtgataaagatgtgcaaagtgcaatggagtcaccatggcgaagatgaagctacttgggagagagaagaagagcttcgcatagattttcc

SEQ ID NO: 87198 - DNA, 1194 bp, Zea Mays
ttttggattcgactttgtgttccctagggaactgctctagagtcctttttcacctatacctggagagagcaattccccttcttttcactttatatctatgaataatgatatgcatgatatgatgatgaaatgatggtatgatgcatgatgtttggtgcaagatgatgatggtaaaaagggaaagaaaataagtgcgtctttgtaagcttttgtatcatgactctacattcccttaggaacgactttggagcttttacacctttactaggtgttttcattgagctatgcattcccttaggaaagactttggagcttttacacatttactaggtgttttcattgagctcttcccttaggaacgacttcagagcttttacacctttaatttgttacactagatagtgtaacctcagatttattatagagtgctgaaggatataccgtcttgatgtttcttcggacataaatgtaaaggaaaaaattgaaactacaatagattattcgaatagcttcagttgtttggtcagtcccttaggcgtttcagtagatgtgcttcgattctggtacaatactgttgactattttggccttagattattgccttgtgtctcgctgtggtgtgttttgtgcagaaaactgctgctggatctgaagttgtcctagatgttgttgctcatatgataaaggtgctggtgtaaatggctgaggcaaaatccaacgagtcgaagagtgacttgccgaagcaactgagcccgagggttgtgaacttggttgttagttacgaacatattctggaatgtatggggaatagtacgaagtggtgtgaaagacttgctttggttgattatatcgtgctttagcttcgacaatttccttctgcttctggatttgacttgataggcacttcttgtatgccccttgtcctttccacagaaaaggtagaacatttttcttggttgaaagttgaatattcctagtccttcctcctcttccacctcttggggccagtgatctgaaggtattttgtgattgttgcttttgttgggttcctataggttgaggttgactctattgtccctaagtgtgattgtttttgtctttgttctaattcggattatgtatggttctgatatgtcttgggttgaaccgtccaccgaagcccctggtcatcttggaatatctcaagacctcctc

SEQ ID NO: 87199 - DNA, 315 bp, Zea Mays
cacagtccagactccacacagagcactgggagtgagagcagacagagagagagcaggcaaacagacagtccacatacacactcggtcactgagaactgagaagagctcggtgactataaatccacatacacacagaaagtaaactgctcactctcagctcacaaagtcacaagagctcggtcaatgcttcctcagacagcaaactgctcacgcttaatttaaatcggttggtccagcttcatcctagaaataaagagaacacatcacattttagttcaagtgttgaatcaatcaattagcaacggacaaaattca

SEQ ID NO: 87200 - DNA, 837 bp, Zea Mays
ctcacagaaatcgaagaattcagagctggtgaagttggatcctaggtcggtaatgatgctatttggtatcccaaacctaaatattatgtcttatatgaattccactgccttggctgaggtcaaagaggcaatgggcttgtactctatccattttgtgaatttgtcaatggcaaccagtacgtgagtatggcctccctaacctttcttgaaaggtccgatcatgtccagcccccagcatgcaaatggccatgttacaggaatggtctgcagctgctgtgcgggtaaatgttgttgctttgataagaattggcaagcttcacatctttggactaactcaacagcatcactcttcgttgttggccaatagaaaccagatctgaaagccttcccaaccagagtttaggacgctgcatgtactccgcactgcccgacatggatttcatctaatagtttcctcccaatagccgagtgaatgcacttcatgaggactcctgccgcacctcttctatacagtatgccccctatgagggtgttgtgtactgactgccttgcgatgcgttctgctgtcgtcttatcatccggttcttcttcattttttatgtacctgatgatgggttctctccagtcattggggtccgactctggttggctaaaggtgttgcactcttccatatgatctgagaggatacttggttgtgatatttcttggacgaagatcccgggtggagcctgggcccaactggatcccagcttcgacaacgcgtctgctgccgcgttgcggtctctttccacgtgatggaactccaatccttcgaatttgtcctccaatttttggac

SEQ ID NO: 87201 - DNA, 537 bp, Zea Mays
acaaattgctccgattacacaaagcgctgaagaaccgaccgtaatgccgaagacgcatacagtcgagccagtcgaagataaggttgataaggctgaagagccaaaggttgaagaaataataaggatgccaaaaattctgagccctccgacagaggcaaaactgcctatggtgccaaaggcttctaccatgactcccaaaaggaggaggatgaccaacgtgctagatgctgtgctggagactacgaaggccttgagccctgctcctacaaggaaagctgctaaagctgccaaagcgcaagccaaaactgaaactaagcaagcagaagtcgaatctacaaaaactcaagctgaaaccgaatctgggccttcagcgcccgccgcgacaaagcctaccgcgcctgaggaagaaatggcagggcagattgcacctgaaaaggtcgagactactgctcccgaagctccaattgaaaatatcgactacatcgttcgacatgcttcggggaagaaattgtccgaagatgaaatcgctgaagcaag

SEQ ID NO: 87202 - DNA, 704 bp, Zea Mays
gaagtatttgaggcaactgactcacaaattgatgctttaggtgtcaaaaataaattatatttctcctcagcttcacaatgagcactatcaacaacaccaacatgcttaagcaatctagctttaacattccaatttctaaaccttcattaacgaaagcatctccaccagagaatttgttgttatctttgaacagatagcaaacaaaacaatacaacatctttatccatactatactcaagccaattaaactcggaaaaccactttggtaggaagcgacttatgcctccacattcatgttggggaaaatcatccttctttatatttggttgacatggccccaatgcaatataagcccttctaaccgcatcttggttattaataaaatagcttgagaatggagtcctgaatccaggatcatgctcaatgccataaatatcattatcatcactatcattatcctcactcgatgttgtcccattcaagtgcactgattcaaaatcatcattgtcttcaacatcttctattattggaggttcaggctcaactctctcgttctgcgggcgttgcattattagtttcagtctgtccttggaatatcaccaattgcatctctctttcattagaagatggagcagcactatctttcttttttgcagcagctcttgctaaaaaagctctcaaatcagtggtagcattgatcttcc

SEQ ID NO: 87203 - DNA, 949 bp, Zea Mays
tccgcaaccatatccgcggttgctaccaatatccgcccgcgaccgtacccacgggtagaaatttatatccatgcccgtgcccatcggatttcggacgggtttcggatatccatcggataatgacagacacaatcatttatacaatatttcaataacataattagtcaaatttcttcccaattcaccatcatatacaattaaaacttaataaaagaattattatgggcctgtgagcctcggttaggagcactagagcttggaagggccagccgttagtggtgctacggtctctgagacttggaaggggccacgaggcacaacgtaggaagccagcaatgctataaggggcagtcaacagtgggaaattaggaccgttaggcgtggggtttatggtgttaggatttgttctttgctatgtaatatgtgctaggccaaaaaatacactatgggtcgatttcggatatccaacggataacccgcgggtagaaggtaatatcctaatccgtgcccgcccgacttcggatcggattcggatctgacccacgggtcaaaacatgtatccatatccggctccgtcgggtcggatatccggcggatatccatatccacgggtcaaattgccatccctagtttcttcatagcctagctcaccgcaagatgctctatcccatggtgacgggaacgggaacacagccaaccaaacattatctctcgacacgctaaacgcacaggctttgatcacatgaatattctccgttcccaaaatcacaactcaactcaagtgctctagcaactctcttgctattctaactctcaaaagatgtttatactaaacacctttctatttttttagcacttggatgtcttgtatgatttgaagaggatcccttcacctgcacgtgatgtttcttagctcattgattgagtgtgaccaattgggtggtatagg

SEQ ID NO: 87204 - DNA, 409 bp, Zea Mays
aatttctgaagaagccaggggttaaactgctaaaaaccggacccatacgtaatattattagaactatagaggacgacgggtttattctaactaaacccaggggctcttttgaatgtttgcatggcgaaggggtattggtgaaccaggaccgagtgaccacagatagaggtcttggattaaatcgcgctcgacctaaaccggtacgctattattttcgttagatcaaggatccacgtcgcatatttaatagatccagcatcgaatcgtgaccgcacgattgcgatcaacgatctagatcggatcacgcgaaggggtatactcaactccaaatctggttcgttaaccagcagatcaacaaactggccaacacaccccttcccccaacccaaatgcggtggcacggccagcc

SEQ ID NO: 87205 - DNA, 479 bp, Zea Mays
tccgggtcagggataagcgtggtgagttcatgaagggacatcccccggtgttccatcacactgctgaccctatggaggcagatgattggttgcgtgctgtggaaaagcaattgaacatagcacaatgcaacgacctagaaaaggtactatatgcttcaggccaacttcaagggccagctcagcaatggtgggagtcctatcagtatggatgaccccaaggtgcacccgagatcacctggaaggaattctgtgataatttcaggtcctatcacatccctgaaggattggtggaactgaaacaggaagagttcggggcattgaagcaggggacaatgatggtgggagaatatcgtgatagattcgtccagctgtcacgatatgctccgaatgaagttgctaacgatgctaacaagcaatgtcgttttctgaaaggactttatgatggactctagttgcaactgatgacaaacacttatccc

SEQ ID NO: 87206 - DNA, 716 bp, Zea Mays
aagttcatcgtagtttcttggtaaaagggtggtagagatagagctataccgtgcgaaggggcgagttttccatctggtgcagctccttttactgatgatacagctgaaaacttggagaactatctagaggtgactcagctgcttaactgttggaggtgttgtccaacatgcagtgaaggagtattcattgtcacactgtatttctcttcgacgtggtggtcatgcagaagataagtggagcatgttggctctcttttaccctctgtatatgaccccaaacggaaatccaaaccggctgcaacagatgtccttgttttgggcatataagcacacaaactgagatcccccaagttctagcggattccatacttctccaccgcgccacaccattcacaaacatctagggtaagccctcaaaccttgtccaaacctctgtttcaccaaaaaggctagaacaccgagcaggctctgactgtggtgaccataaccatcaaattcttcatctccccgtggtcagcccattcaagaaggtaacatgttcgatgtgctcatgtttctgaacccagggttgtggtggtgctcacggaatcttatttttgaattcgaccgcagtattttcaccggaacgccgtcgtgtcatccggtgaacgccgccgagggtagtgtccacatcgaccggccaaaccattgcttctccgggtgaacttaggtgagca

SEQ ID NO: 87207 - DNA, 1007 bp, Zea Mays
gaaaatacaatttggttcatcaaacatacagcacaactaaaacagtgtgtgcagcccaaaacagaaattaataaatttcagctcctatacaattcaagaattgccatgttctagagacttgaattattctaacactttgacaattgttagagttaaaataactaaatgagaaataacatgtagacttactaatttttatacaagttatttcgcgcgctagaactaacatacacatttaatcaacgcattcaccacaatcatcaatttcggcatacatgtatatcaaaacgcttttcacccactagttcgcattttagtttagacaccatatgagcactacagatttttacccgcgatcataaccatgcgcatttagactacaacaagtaaatcactgtgactacgatcttacccaaagacatctattaattcggctaactagcgcaacaacataggccgctatacatcctacacgtcgacttgcctcttattatcgtaatctgagacaacacatttataacgaacacttaacgaaatcgactcctatttaacttgagctagctaatcatagtagaagacttagcgaaccattttagacatcgcaactcaaaaaatgggtgggagcaggttacttaatgtttcttaaccttttctcaacttaaactggacaacacacaagtcacttaaaacaccatattttagggggtctaacataaaggctttaacacctggcctaaaactccgtaagacttacactggctactgaaggacctacagcacccatgtgcatatgttatcggactgttcttcaattttagcaaggattgactcatgaacgctactcgcctccaataattattgggctgcgataactctcatataagacctctaatcgatcaacaagatatttatttatccaaagggaatggaatgcaataatttataaagctaagcatcgatctgtcatacaacaaaaatcatgacaacaccgacagatactatccact

SEQ ID NO: 87208 - DNA, 519 bp, Zea Mays
gtctcttcgaacattactaaaagattttaaaatacttaccttggaatattccttcattattatcttgatcctttcttgtagtaacttatcttttaaagtcgggggatagagtgccaaataataggctaggcgtaggaggtttggggtcaacgaaaggttgattccataatcgtaggtcatgcatgcatcatgtttaaaccatactaagtaatctttcccttttatagagctatggcacgtaccaagactacccagcggaaggcgaccagacctcaaggcgtgcctcgacactagttggctcctcgacatgaggggagcagtagcagaagtaatgatcccataggggatctggaggtcagagtcgaaagactaacgacgaaactgcgccatggaagcagggagcgtgcgtgtgatagccgtcgttgctgagatgtcaacagacgttgaccgtttgcagcgggagattgtggagcgatacatggctatagactaggctgtaaattcatgatctatagcctg

SEQ ID NO: 87209 - DNA, 470 bp, Zea Mays
gccgggtgcaatcacgcgaggaccgtcaacaagccaaacttcaatcttttatcatcggatttggttgatgttccaaccaaggcccgatgtataggaaattgatttattaccaaaatttgggcaaagggcgggcatgaattggccggggatgaagcacgaaagctgcttaactcagtacgaaacattacctttgtctttttacgttgatttttccttattaaatttccgattaccttataccttgttttttctgcaggatgatggcgtcgaaggttgctaagccgaagcttgttctgaagtactgaagactctagaatctccttttgtatttatctgtagaaagacttaggaactctttgtatcatatggcaaaaaatgtaattgacagttggacaaaatattgtacatatttgttaataccttgtaatacattttacctttcgctcatgtgtgaattgctttgttatgga

SEQ ID NO: 87210 - DNA, 633 bp, Zea Mays
ctggtcgctcgacctagccatggtcgcgcgcaggggtaaggaaagagacagggacttcacgggcagagaagggggagggcgactgtggacgttgaggaggtgagggagaggggtccagaggaagcacgactgcgacgttacagcggaaatgagggagaaaatggaggagtatggagttcactcaccagagaaggagatctcgccagagtcgaggagaaaccgttgattaacaatgaatcagaggtctgatcgatgaaccgaaaacaaaacgacgaaggtctagatgagacgaacgcaacgataccctcgaattccacctatgacacacggattgaaagaaatttctcgtcggagttggaactgccccaaactttggtgagcaaatgcaggagatgtggatcgaatctagcgaaaccgttttgtgatttggtacatgctgagcgaggagaaaccgaccatatatataggtaggctttggacgaaaagaaatccgggtcaaattcggatttttaccatttaataaattcagaaaatgcaaaaaatcatttttaatgctcaaaatattctagatgcttccaaaatttctaggaaaattcctagaaatgttttggcacctattgaactcaaaaaact

SEQ ID NO: 87211 - DNA, 437 bp, Zea Mays
tccatacgcaattcatgctaatcatatattcatcttattaagttactacaagtacttaatttcatttgaatattttatttactacataatgaaattttcgatctcttgcatcactttgcaattgagaccttaaattatcattcatttatgcaatatcgcattatattgcctattattcatctcaattgggtttttctcttaaatccaatacgagcaagaatacatgtatgttgtgaacaacacacatattacaacacacccatgatgatttcttaatgaaattctctggttgcttgtgtaggatcatggcccgcgagtttgaagaacttgctcttgatggtcacaactatcctacctgggcgttggatatcaagatcagcttagcctcagaatattctgagtgcattactccctcccaacgagagggttgacccact

SEQ ID NO: 87212 - DNA, 688 bp, Zea Mays
agagaccaccgtcagaagttacacccctagtgtttggccctaaatcggagccaacattgtgcgttcttgatttgtgatcaatcatagggcagcaatagtattttctaaacttataagagtgagcagacaagccataaaatgtgaagaaaacagtggaggggcataaatatccattctatttttcggtatccattaaaaataatccaaaatatgtaataaaccgtagtgcgatactggggtattttaaagcgcaatgaattttagaatatattagcgagtggcaacgagagcaaaaaaaaaaaatcccaaagcgcgcagcagcagcagctctgctatcctctgcttagcctaagcccaaaatactagccgggccaacttctaagcctaattgtgatataaatgagctctcgttttggggtcccaaatgcaaattccattgcaacttctaagcccaattgtggtacaaacttcaccaattccctccgtccctccctctttgctaacctacggttttttcctcctcagaccaggtgcaacgcctatgtctgccgccgcccggagcatagctccgatgatcgatgggggcatctgctctaattgcaatggactcgcgagcacgcgggatcgaaccacaacaaagctcacgcacgtctcaagcaaccaacagctcgccaaacgcaggttgaag

SEQ ID NO: 87213 - DNA, 632 bp, Zea Mays
gtttatggctctaggccatcatcacatgcatcacaacaagcataggcgaataaagttattacagacccagtgttcattacaaaaataaaaagcccctgagggctaccaagccaagctgtcaatccttctccccctttttggcaactagcaccaaaaatgaagagaaacatcaaccacaaatcaccacggaggagttggatcaaagaactgagacgccaagttagctgcaaagttttcttccctaggctgagctgggggggatagctgcccgatggatcctggggaggtggatatgaagaagattgacctggatccccttggtggggaggcggggcatactgctcacgatcatcaaaatattcttcctcttcttcttcttcttcatcttcagctgtcatgaagggcaccccataggcctgctggtgccattcattgatttctagcggaggaggatgaaggggcacatcaggcgagcggggagcaaatggcatacccatggacgaggcttggcgatggaggttgtcgtcagtctcccgctgacgccttaccaactcatgaacatcggaagatatgttcctgcacatagaaaagaaagctgcaataccatgagccagtcgagctcccatcccgcg

SEQ ID NO: 87214 - DNA, 454 bp, Zea Mays
gtcgtttttgttaactgaaaccagttttcagtgttatcctcaacattttgttggacctgataactcttgatccctgcacccgtggttttgggcaagtgagtcaatctgatagcgctatggtcggaggacatgtttgtctaactgttttgacttggtgccattaaaattttggaatgagacaaggataaacatgtgggttcagtaaagctaatgtggctgggttcagagaaatagaaaatatcggcaaaagatctcattctgttatcttttcaatgggagattctacgaaaggacttcaaactattacagtcttatcccaaggaggggaaagaagtgatcccaaccggtgaatattttttccagtagtttctacatgtagctgggtgtcggacacagctaatatttactgtgtggtcgtggcaacgtggtaatctgaggccgcggcgcgcgtcca

SEQ ID NO: 87215 - DNA, 317 bp, Zea Mays
gttttgcttcgtcacaagaggaagagcttcgaaaaaattaaaaaagtcaacaacttcatcaaaaattgtgagtaattcatcaccaaatggcaagggtacgttccactgctagggttacacgtgacgaagaagaagccgaaactgctgaaaccgctccgatttccgaagtgatgaaacagtcggggctgatagtgccggaggatgtttttgatgaaggtgcgtgtgccgctgaagctgagcaggttggtgctgaggaagatgaatctgaagatgattatagtgtcgtgccatctaaacccagccacctggagtttgtg

SEQ ID NO: 87216 - DNA, 951 bp, Zea Mays
gcgaagacaccacccttgagaaacagcaaaagataacaccaatcgaatagtagtcggtttaaccactggactaaacgtgtcttcataatctatcccgtatcgttgcttgaatcccttggcaactaggcgggccttgtaacgatcaatggaaccatcagctttctttttgattttatagacccatttacagtcaataagattggtagcctgattagcagggaccaagtgccaggtgcaatttcgcataagggtagaatactcatcatgcatagcctgtgtccaccgtgcatcagacatggcttccttgactgtttctggttctccagtggcacaaaaatgaccatagcgaatcataccagggaacaacttcttaggttgcacaatattattccggagtcgagtccgaggacgctcagccagatcaagcattggaggctctggtatagccgaagaagcaggcaatagagaattaccaactgatgttggagagaggccttcagagaccgcaggagatcccgctgctggtactgcatcgggtgcatcagtgggagcagattgctcaggatcaacagaggaaccgacatgggcaacttcctcggcaggatgatccggtgcagagggtaggattagtgcctcgtgtgcatgctcctgtacaccaagaccgtagctttctgggaagcaagcagtacgtcgagataagtcatgtacatcagaaaattcctgcacaggacaatcttcacgcaacagattagtagacttaggcattaaggacaaatctacagtatcacccccggtaacagatggattaagcaatgttggataaaggagagagatctcggagcgtaagcgggcaccagcattggggtgtagcgtagcaaaaggaaaaattgattcatcgaataccacatcacgcgaatataaacacgaacagtagaaatatcaagacatttg

SEQ ID NO: 87217 - DNA, 1632 bp, Zea Mays
tactgccactaaaacttgagcataacatcatgagcattagcttatcatgtgattgttacacttagaatgcatccactagacaaaaatttcaaataaattctattgatgtgactagtcatgggtgaaaccctagggtagggcacttaaccctaaacaaggcttaagtgtgccaacaaagcccaaatgaaagaaaacttcaaaactccttagaaatgatcataagatatcatacttaatggacttaggtagcaccaaaaccctaaagtgtaaaaattctagaaagacccctggaaaaccctaaataggaaccctagggggctaagtgtaaaattagtgcacttttggaccctagtgcaaaagccaaggtatttaggcatctcaaatcatatggttcacgcctttgtggattaacaaatcaaattatggaaattggacttatttgtaaaatgggcaacccataaactatatgttactaagtctgaattcagtgtaaaggggtcaactttagagatttatatctcccaattcataaataatttaccctaggtcaacacatcaatattatagagctattaaaggggtataactttgtttaagtcatcaaacacaagtgttatgtaaaagttggagttaaatggactcaacgttgggctgtcagtcagctcaagatctgaaatcttactggcagtagcttagggtaaactttggagctctgttgaagaaaatccagtgagtgtttgagtctgaccactatagcaagattgaagctggattatagggctacaacttggttactgagagattagcaagttctcacgcagaaattggagttatgggtcctgcaagttgatcggacagaggctctgaattggagttctcatggtacagtgaactgaagaagatctttagatacatctcccctcgccgccggtcaccgtcgcgtcatgatccgcatcatcgctacgtttcgtgccctctagtatggagataatcacggccgcgtaaagatattggcgccagataaactcagacccgatcgacgaggagttcgccgcgcccacttggattgcggtcggccgaattggtcctcgccggtgttggacacttaccgaccatgcgccacgtgcccgagcgtcttaccacgttgcagtgggtcacgttaagcatatccggtgatcaccgatgagcttgccacggtgaaagccactaatcgtttgcgccagtacaccctattctctccgaccgccaccgtgccatccccgattcacaacccaccgcccccagagccaataaattgagcacaccctcggctccgttaggtattcaagcatccaatccacctgctcgtgccttcaattactcacaagagcccacgaatttcttagttcccccaaatccgttttccgccaccgtgaaagagtcctcgccgtggctagcttgttccaggtctgttcatgctctctgctctcccgtttcagcatccttaggttctcctaatgctcctcgacccattcgattgagctagactgccctagatcaccaggaatatttctgttcatccgttgtctgcgctgtctccgtggatagggtgatttagagctcgagctatgcaattgatcaaggggaaacact

SEQ ID NO: 87218 - DNA, 345 bp, Zea Mays
ggttagcacacggcgtcgagctcgcgttccaaccaagctatgccagtaatgaccagacgagcacttcggtaaacttcaccaacacccagggatactcaaacactaaatcaaatgcgtagaaccataccgggtttgcctggccacggggacgcggagatgaacacgcactgcggggtccgacgggagcgatggacgtcgtggtgaactccggcgtaaataggcagtcacgcaggagctatacgaccaaaagagacaacaagttcaccgtgcactaccaatttgggacgaggaagtgagggcaccgtgaattttggcttctactgaccacaccggaagacagtgaat

SEQ ID NO: 87219 - DNA, 342 bp, Zea Mays
ctgcggcgggaggtggttggttggttccacttccatccaggctgctccgtggatgcgacggtgattcacgagcggatacgcaagtgtagctgtggcctgcacttggggccggattgtgacccattatcaggcttaggcctgcgtgcggggtcgtttgccgttgtgtacacatggaagaacggggcaccaagtcttgcttccattgccgccgccccttccgtgcacgcgcgcacggcgcacctatacatatgcaccgccccatgccccgcacgccctccctctcccagcgacaccagagagccgaatttacttcgttctcagcctccgttgcccctcgcgcgc

SEQ ID NO: 87220 - DNA, 1204 bp, Zea Mays
caccccctctttgcaaggttgcattccacaccatggtcgcacaactaccgattagtcaactggcccaagtacaatggcaactccgacccctcgcaatatatcatgagttatcatgtcacagtggcatcatcaggggtgatggaaatgccatggagaactccttcatcatagccctagaaggtccagtcttgacttggtacataaggctacaacccctgtccattgactccaagagggctctttgcaaagaagttttttctcagttttcaaggctagaagctagatatcgacacccttgtagagttatcccatgtaagtagcaagaaaaggagtgtatccacaattagtacaaaaaattcttgctgctcaagtcctagctctcttcgattgaggaccatattgcaatccactatgccattaatgtccttcacactggacacctctacagtcattgcaccaaagtccctcctagcacacttcaagagctttaccaactcttcaaaaaatatgaaagatcagaagagttgcattataggaagcaggaagcacaatggaggccgaatgagaccccacacaccagtaaccggccttgggccaaaagccaacagcaactagatcaccaacaacaataagtccacaaataacaagaattaggcacagttgggtgaaggcccccttgcactcaagaaaagcctcaacaaccagaaggaagggggaaggtaggtaaatgccgaggcagtgggagaggatttggctaagagcgaaaccatattgcgcttccacggtgaagacatcaggcattcaaccaatgaattccctatcacaaaagaggccaaggaaagaatggtgagatctatcccagaaagattgccactccctccaccaccacaaaacatgctgcccacacataaactcccccctttgcctcctaaagacgaatatggttaaccctagctgtcgatccaaggaataataaacatgatctatagaggatctaatgcagacttcgacaataaaaggtggcaaaaaggatactatcaaagggtgaaccatgtcacattcactagacttgttgtacaaaccaaatggttgcacatcccactaacattggatataagggacgtagatcatcgaagtgctccacacacagatgtcatggtaataaactgcaacatagctgactatgagctacataagccctcat

SEQ ID NO: 87221 - DNA, 418 bp, Zea Mays
atcccataggggatctggaggccagagttgaacatctaacgatggaactacgccatggaagtagggagcgtgcgcgtgatagccgccacatcgctgagttgtcagcagaggttgaccgtttgtagtgggagattgtggagcgggacagggctactgactaagctgtaaattcatgatctatagcctgggattgcgaggcgactgcccgagcccgggtggaagagctaagcatagccctgtaaaatctgcaagcgtataataacactctgcacgaggaagtgcaagtgttttatgaccagttacatccgaacgtgccaccggaggttgtggcaatgggagccggaacatcaggagcagctggcggaggaccttatggggagttagatctctttggatcccctctttccatgaacatcac

SEQ ID NO: 87222 - DNA, 871 bp, Zea Mays
tacaatctccccaactagctttaggattttgaaggatccaataaagcgaggggacaactttcctttgactttaaacctccccataccacgaatgggtgatacttttaggtacacgtgatcaccttcttcaaactcaagtggtctccttcgggtatccacatagcttttctgccttgactgtgctatcctcaagttctccttgatcattcgaacttgttcttctactttttgaataatttctagtccgaagaactgtcgctcactagcctagtcccaatacaaaggggttctatacacttccttccatacaaagcttcaaatggggacatcttcaaactatcctgataactgttgctataagagaactcagcatatggtaagctcttatcccaaatcccaccatgcttaagagcacaagctctcaacatatcttctagcacttggttggttctctcggtctgcccatcagtttggggatggtaggctgagctaaaattcagctttgtgtccatactatcatgaagactcttccaaaatgttgaggtgaactgatatccccgatcagaaacaatcttcttaggtacaccatgtaggcacacaatccgagacatatataattctgccaactgagtgcccttataggtagtcttgaccggataaagtgaccactttggttaatctatccacgatcacccatatggaatcataacctttcgaggtgtgcaacctgactatgaaatccataccgatctcttcccagttcaattcatgcacctttaatgggtggcagtccggctggcctctgatgttcagcctttaccctttgacatacatcacatatgaccacatgtgcagcaacatctcttttcag

SEQ ID NO: 87223 - DNA, 906 bp, Zea Mays
gtgaccatttgttgtccaatagagaagatgttgaaagtaacctgagttggtgtgggaagaagcgatggccagtgcttgtgttccttctcgggtctttctccttgctttccctttcctccaatagatcttaccgcacccatctcctcctagagatcacctactatatccttcactttcttcccttcccctagcatagatattctattcacagatcttgtggtgccaccacaatagtgattaatgtttgggaaaaatgggctggatatggagaaagagatgagcgaggatgagggtgccttacccacgataagtgtcgcgacagatcttatgataccattgaggtagcaagaggttgctccatgaccgacacccctagtggtcagcgaagctaccatggtcgatggaccccttcgtcttctctcccctggtagaatagccgatctattaatcctcctcagccttgcccattggccttcgctaataaccaaatcaagaacaaaggtgcacattagggtttgactagagtaagattagagaagtattgggtgatggaggaggatagagtagtccacaccgacgaagtggaacatgggtggttgggtagcatcattgattagaccttgcagcttggcgtccaagacctcgatgcccgcgaggaaagcaactcgcgaagtcgcgtgagaggagcgctacatgatgtgtcatgctagatgggagcgataatgagatcacgtggcctgaaccctaaaccataaatgcctaaaccctataattcaacatgggccggtcgaaccaaacatgcaacaacgataacatgtgacactataaatggatcacgggacaaaaacgtccaaccaaacagcttcttagctgaaatttactgagactaaaggcacacaaaacttt

SEQ ID NO: 87224 - DNA, 1237 bp, Zea Mays
atgaggcaaatggtgctcatgtcatataacgtctttttctcctctcaaaagagataaaatttgcaagactcataaatcaatgaagggataacaacaagaaaaactaatgtacttcttgacacagactcatgcaaaagctccataaataatactttcaacactaaaataataacacgatactatgctcaataggagtaattggactgcaataagataatccacataaccaaactaccttgattaaccacacatacaacaaaacctcctattactgcacttgaacaatttgtacctcgtgatatcacatgatgcattcaaagtagtagacatacatgatctatcaaaccatcattcatataaaaaaaatctcaatctgatgcaacaaccacatcattatagagatagatgactaacaaacataagcaactcccagttaagcattgacttcgtttaagataaagcggtccaaaacaatgattcaacaagcatgcataaggaaaatgatcataaaaaatcaaactaccatatatcgtcatcgaataaaaaatatataaaatgggttgtcaatatcgtccacatgactagcctgcaacaacaaaaaattatgcatagcctttatggctattgaaacaaaccatagaaggaaaacatgcacgcctcttcaactataatattgacataaaatccacttgaaaccaccctatttattgttaaaaataaggttgcacaccataagaaaacctatcaggtaaacatggttggacttatcaatctacgtcatctcacaaattcactcgagttctactagtctaaagatttcatagacattacaacattgcctctgctctatagagactaaccaattttatactaagatcaagttagcaagtagccacactagcctaaaaaagtgaggcgcaaagcattgcacccatggaaatattacattgataagttgggttgttacccaacagtcaatcaaactcaacaacaccataaaactacattatatagtgttttcacactacaccaagtcggattagacctaatatacacaagctcaataaacaatcggtcctataagtacaagaacccaagaatccttttgggaaaaaacatccacagtcaagcatatagaaatatatgatggtaatagctcagagatttgaaaacattgcatcccaaaaaacatcatgacgatatgtatataaaacaagtacattagtagcttcacttg

SEQ ID NO: 87225 - DNA, 318 bp, Zea Mays
aaatgcttctgcagcatgcacgaacttctgtacgagacgaaggccacagggaaagaacaatatcacaacaactttggttgttatggatttatggcccgtcccaacgcaaattacccagtgccaacatttcggaaaaggtggccaggaaattggatggaggaatggttttatgtgaagaacgacttggtggcgagggaggatatcaaggaggttattatgcgtccaatttggtcccgcttcagcctccgaaggccgaagattgaaattgacgaagccgccgaagcaagtcagaaagcatttggtactgtctgcttcttt

SEQ ID NO: 87226 - DNA, 646 bp, Zea Mays
tttctacaattaattttatactaaaaatctatttccataatcatttattcattttctctatcctctggatcatgcgcactattacaaaaaagctcagggggctactttataaaactcgcccagactcagccaaccatcaagtggactgcgggttgaatttgagataaaccaggggctcttataaaagatgcgcgcggtgaaagggtatggatgcgcaccagccgaacaatcaggtttctacggctgagattaaatccgatcgcgaccgaagcggtacttagcggccaccgcgagatcattgatcgatggccctaatctaaaacaactagattgatttactcccgtttgatcatgatcgaaccacccacactggatccccccaaaacggtatgacccttctaatcgccgccacacacgctaagatctatggctccgattcatttgcccaaatcagaacgctacttcaatcccactcgtctgctccacatccaatggttgggcgcaggttttcctcatccgcgtatagacacacgatcctcacccccggcgcatgatccctcaccacgatgggtgctacgcagttagaagatggaggtggatccgagaaggaggttctcaccaggatttgtagcttggagcaccatgg

SEQ ID NO: 87227 - DNA, 509 bp, Zea Mays
catacagatacagcagcgccaattgacatgcaagactacatcgtgggcgtcgtgacagctagctgctgctttcgagatactgtaaagcaaagacaatgacgaacaaatgattgcacaagtcaaagccgaggagtggggtgcgggtgcgggtgcagggcgagcgtgcagctggaccatcatctgcaacagatagctctgctctggctaggaaaaagggaaagcgaggcctacctagacgcagcagaacacatctacgctacgtccgtgcatgggccatgggcccccttctcagctttgaccagagcggcaggcaaagctccccaacgtgcagtggagcaggagcaccgtcgtcgaagctcagccactggccaaaagcagatcgagcaattaagagaaaccagcagccacactgacccgcatcatttgcaccagccgcctctcggcaaacgttgcgctgtgcgcatacatgtgctagtaatagtagcacacgtcttcctcctcctccggcc

SEQ ID NO: 87228 - DNA, 292 bp, Zea Mays
gtgctttacagtttaggcagacatactgaagttactatgaaggattatttttaggtttctcatgtctgatcgtttggaggaagctaagctataaagctgtgaacttttgtgctactgttaccactgcctgtttaatcatcatctcgtctattgtaatagttccgtttctctagttgttgaaagattatatttctaaatatcattgctcatatgacattttgctgttagggccgcaatttgagcatcattggacaatggtcatgtgactgattatggtggtatttgtgatgtg

SEQ ID NO: 87229 - DNA, 786 bp, Zea Mays
catggttggtaaactatcaagctttgtccacgcggaccgcggacgatgaggacaattgcacgcgttcccggcgactagtgggctcctagttcaatttggtggttcggcaagcatcacggggttatgagaatactcaaacgagggagtagaaggtgtgggctgacctgaatcgcgctagccgtggcgagctgttcttcgcggtgtattcgaaccggtttggggagaatatgaaattagcgctctctggtggggggtttgggatgcaggtgggtgcagtaactgctggaatacatggcgaagccgaggggggctcaatttatagatcccatcgatggtggtgtccaatttcgcaaggtcatgctggcggccggagggaacagggatactggagcaggggatgggtggctttcaccgtggcgcttcctccggtgatcatcggttgaggagctacggcggttaccgatgagctagtgtggctagggacgacgtggtggaaggcttggagcgtggcacagtcacagtaaagcacgacaactccggtgacggccatgaggccacgtcgccggtgaaaaggggcatgggacagcgaggccacaatagctcatgcacatccgcgatgagatctttacctggtgaacgaaattcatacgcctgtggcacgaatcccggcgaagaggtggccgacgataagcattttgcgctggcgttctgatccttattaggtcactgtaccatggcgaaatcggattcagtgtacctgacagtcgaagttcagggccaaatttc

SEQ ID NO: 87230 - DNA, 564 bp, Zea Mays
ggagagtagtttggatcaaagcattgcgttcaacattagattttcaactaaatttcttacctgattatcttgtattgtaccatggcgagcttctcttgtccaacgctttaatatgtattgatctagaagcgtcttgatattcatcaaatagcatgaccacataatattccaaccctcactactggaatccagctctttgccgagtgccactttcggtgaaataagactctcgacacagacctcctacagagggtgaaacactcggcgtagaaatacactcgataaagaaggctttgctgagtgtcagactctcgccaaagtagctgtgtccggtagtgcatgttgaattgaccacatgtgcatgtagctgattgctccaatgaattgccaataacttcacactcttcaaatcttgattttttgcaaggatatctattgtgactaggtacttatcagttccagccaatactctagtgcatgctcgcatgaacctttcatattcatcttgaaaaacttcaaatatattgtgtatgtacagtttgcttacttccaacaacataggcg

SEQ ID NO: 87231 - DNA, 379 bp, Zea Mays
cagaacaatgctaggtgagagagggaagtggtggtgataggaatgtgagaggagagggattgttatctgttaggtcttatgaatatggaggactggccggcagcaaacaaaaaagtgaacactcatcatagcagctgttggcagggattcttttccatctcgtgtcctctggttgagagatatatatgtctgctgctctcgctatatagagggtcggcctgccctgctagctagctagcaagttcaagttctaggcacggatcggatcggatcgatcaacattaatttaattacttaattattagttcccgacgaaattaatatatgttaaacaaagactttaattttcattatatccttatatatatatatatattat

SEQ ID NO: 87232 - DNA, 387 bp, Zea Mays
aaaaaagttatacgaaataggctcttagccatgttacatattaaaaagatgtttggtacaaaagctaatcactcgctagctaaaagttagtttaaattagttccaatgagaaataataggtaggctaattttttacataactatttgtttgccaactagctagtcaactttggttaatttagactaatttttagtccaactaataactagctctagctcacccaaatagaacttaatcggtgtgttttcatgggagttatgcaatatttattttaccatatgctctggaccaggtctataatctcacatcactcgttttccattgtactcttttataccaaaacagaacgcataacaatacgtatgacaatcttttttctagggcat

SEQ ID NO: 87233 - DNA, 384 bp, Zea Mays
attttatataaattttatgcttaaaaataaattactaggaccaatctgctaaaagtatgagcctcagtttaattacttttatactaaattagaatgcagcttagttcctccaaatttcgaagactggaacacaaaaataccctaggcgctagctgctagggacacgtggcggctagggactggctgacatacaccacacggaggagcactgggttgacacacacgttcaatggccgcattggatccccaccgcacgcccacatgtgctattaagagattttaacttggaccgttggatctgcgatcaacgactatggcacattccacgaagggggtacgcacgatatgatcccaaccctccatcttcggagcaacggccagcgc

SEQ ID NO: 87234 - DNA, 280 bp, Zea Mays
acgcctgggcacaattattgtctattacaacattagacgacataacatagagctattatgtcctccacgatttatggttcgaactaagtacaatgttctcaacaaagatatcacataaaaactgtccacgccaggaatgatgtcgacgccatgtgacacaacgttaaaaattactcaaacttaaaaataaactgctgcaacttctttttctgttccttcatgagaatccaaacttctggatcaacatcttcctcattcgttgaacacagcatctgtaatc

SEQ ID NO: 87235 - DNA, 801 bp, Zea Mays
ccccaaagatccataccctctcccttgcattcataatatagtagactctatttttaggtgtgaacttttatcttttactagaatatagcccatgctaacgctacgatcctagagaggggagggttgacgacgacggtggcgcgagtgaggggaagggggtgatagggacgcgagggaggctgggtgtggtgggctgtgggggagggagaggggaggaatgagtgatgagagatgattcgacttatattttccattggatttgatccaatttttgctagatttagtggagattatgggtgtgggggtgattttggttgggtgggttttgcaaagtttaatgtggtggattatatagtgctatagatagaagtgtactccaatttctaccatattagtatggttagggaagatgaggataaaacttcttttataactcctcgaggcatgtgttgctatgtggatatgccttatggattcaaaatgcattatcaagttttatgcagacaacacacattatcttaggcaatcgcataggcaaaaccattgaggtctatgtagatgccatcatagttgagtcctaatagagtgacttgaccatctaggacttagctgatgtatttgaaagcctttatcaaactcgtatgatgctcaaccctaagaactacgtatttagagtatttgtaggaaagttgattgatttttctagtatctgatcaaggaatcgaggcaaacccataaaaggtctaagccatagagctcattcatcctatgagacacattcaacaggtttgtgcctaatca

SEQ ID NO: 87236 - DNA, 349 bp, Zea Mays
cacgacaagcatcaaaacatatgacaagcaactaactctaactaagactgactaagactaagacactgaattaatcattattacagacttcaactctatcgatctatggatccaaatctatctaggtcctacagtcaggggtaccataatcaaagcgaccacggggcggcgaggggtgctgaatcccgacaggggcgggagaaccaccatccagatagtgacacgctgcgcgctcagcacgcaattccacaacctccgcccgaaccttgcccaactcgtcaagggcatggtctagctcggtgttgagcacgacgactaggttgaccatgttgttcagcctgggattgcc

SEQ ID NO: 87237 - DNA, 428 bp, Zea Mays
cccctctcaggcgaatttgtaggggtgggcaaagtcaccgagacgttggccaagccgttctaagtcaaagtaggctaggtcgctttgaatcccacgcacacgcgtgcatcaatggttggcttcctggccaggacatcccatcgcattaaatgcctgtgctccctacggaaataacaccagacagcgggcaccatttcacattacacctcaaaacgtacgcctttcttccccttctcctttccctttccatctccttgcagataacaggaagagggcatctcctaccttgggcattctccctcagaaaggaaaaggaaagaagagtattgttcagaggtttgaaggccaggccctcggaaggggtcgggaaaccgcctcagagcatatgggccttgagcccgttactgatcaagggttcgaaggttggc

SEQ ID NO: 87238 - DNA, 334 bp, Zea Mays
ccattttagccgatcttcccctttgtcatggtatattgattacgtatatgttgcaagtatcattgcttcagaaaatctcggagaatccgggcggtacacccaatgggtgtgcctaaagggtgtctgcccagtaaaaggcgtctatcgcgttgtcctgaagtagtaacttgacatgacagagaggtttagtactttgcttgagcggttgacttgattccatccgatgtcgtgttacacaaagcggcgccagacgcctgactcatttctaggcggtttgaattgcttattgaattcttgtgactgttcggtgagcagggtaggaagtggacggtcg

SEQ ID NO: 87239 - DNA, 589 bp, Zea Mays
cttggtttgaatttaggcgaagaaaatggaatttgggcactcagcttggaaacgatcgctcgaaacgggtaattgagtgaaattgaagcctggtatatcggattggcgtgaaatttggcgaatatgttactggaggtgttgtgaaggtgcctgaaaaatttggtttcaatcggagcattttttggctggtttggacatttcaccgaacacgtggtatgcggtgagatagggttttggagatttggtcaatttaggctgtgaaaccctccctaaggagctagaaacctacaggattacttcaaggagcatacagggactcaatcaagcacttggattctcaggatttacacaagaatttgaaattggcactcaaggggtggaatagaggctcactgcactgacaaacagagagagaagagagggagccagagctactcacgagaggggagaggaagtgagagggcagccgccggtgagaaggatcgccggagaggggtttggatcgccagagagcagacaggcagagagcagaactgagaagaagttcctggcctcgggcgcgggcaggggaaaagattttttaaaaacg

SEQ ID NO: 87240 - DNA, 312 bp, Zea Mays
gctagggttacacgtgacggagaagaagccaaagctgctgaaaccgctccgatttccgaagtgatgaaacagtcggggctggtagtgccgggggatatttctgatgaaggtgcacctgtcgccgaagctgagcagattgttgctgaggaaagtgattctgcagatgattatagcgttgtgccatctaaacccagccacctggagtttgggaggtccactgttaccgaagacgatatgcctaagttgatgaagttaggctatttcagcgaaaccaaaaaggaactaattcgctttggcggagaggaaattact

SEQ ID NO: 87241 - DNA, 275 bp, Zea Mays
tgccttgaacctcaacaacatacttcagctaaatacttgaaccaaagctttccttcgttttatcctcacatgtgttgatgtccttcgacaaaacacatgtcagttattcctgaagcaaattgtaattttaaggaccttcgacagaggcatttccccaacaatgtcttaaatctgggtgaaatttgtttgatggatttagtggattttatggatacgagggtaatttggttgagtgagttttgtaaagtctaaactggtggattatacagcgatat

SEQ ID NO: 87242 - DNA, 725 bp, Zea Mays
cttctccattaatttggtgataacattatatccatttaagccaaattctttaatcattttattcttcatggcaatttcttcatcatcatcatcatttggaaaatcattactaaataaagttaccttatctccttttgccatgaggcaagttggagtgtaggagtcatcttgtaggttggtgaagagttgtgagcttgaagtagattggatggcaacgtttgccaccacgtcctcttcttcggagctagaactctcttcatcggagttccattcttcaccaatatgggcttgaccatatttcttcttcttgaaatatcccttgttcttgcctccctttttaaacttgtccttcttgtattccttcttagcttcttgttcctttttgttaggacaatccgctatgaaatgaccggtttggccacattcatagcatgccctcttctttcctttcctttgaaacttgtcatttttccttacaaatttcttgaatgttttgatgaacatagctgtgtcttcatcacttgagctatcttcatcacttgatgtctcgaccactttctttgccttgtggtctttgttcttcttgggggtgtcttgttcatttgagatcaagacatgagagtctcttgccttgattggggcttctttggattcatgttgttgaatctttgcaaataattgatgaggcgtcatttcctcatagtcatcacgatcccttatcatcc

SEQ ID NO: 87243 - DNA, 867 bp, Zea Mays
gcagagtttcccatgtttttatgctctcaatagaaatatttcagattaacaaattataacaatccaacatatgcaaatacagaaacatatatcatagaactccatacaagtcgatacaaatccataatagtacataacagtccatagccatacaaatccgttcagttcatacaagtccataactttaataatcatacaagtcaataacacaaagtccatatccatggaactccataaagtcttcatccatccatttcaaccaaagacaatagaagtcaaagatgaaccatcaatgcctcctagttttacccttaccgagagcgacggtgcctggagtgtaacgaaccggcgagcgatggcgcctatgctcttgtggctgcgaaggttatgtcaacgaagcatctgggagctgggaatgcccaatctcgactagaaggtcatcgtagccaaatcattcgcatatgggcgtcgcagatgtgtgtcttgaggtaccctccacaggcacaccaaaggacgatacatgtacgtcctatggcacaacggtcctgcaaccacaacgagcggccgctctgcgtagtcgtgtagacaagcgctatgggccaatagcatattatagaacataagtttaaactaattgactagactggtaagaaacttacctccaagaaggtacgcatgccgctgtcgcccacattcaaactaatccgcacaatatcatgtactaagcattttagtgtgttaccctataaaagtaatcaacgtcgattacatagttgtcatgttattttgaattcaaaacgaatatgccatgtttgaaccagtaccactcgatccaagatcggtgcagcctcaacttgcctacccact

SEQ ID NO: 87244 - DNA, 462 bp, Zea Mays
ggggaatgagaatggtgtacaattaactaaacatataggccaagcattagaatctcgaccacaaagacagttgagcaccccttcgattgccagccgagcataccaaaaatatttcatgcatgtctcgatccattcggttggtcacaacaatcagttctttggcatcccacattcataattgttcatttaagtagcacaaaagaactctgccttgtttttgaaagcatcagttgtacaagtgaagagaaaaaaactactagttcatcacgactaactactacaacaaagcatggcagctctgtgtgttgccattgagccaaaatggatgaatagttacaagttagcactaaagcaatcaaggattcaaaggaagcaacctgtaatctgccggttctgccccttgatggatatgcaaataccaatacctcttcaagggttaggctaacgcactgcatagccttt

SEQ ID NO: 87245 - DNA, 301 bp, Zea Mays
ccccaccccgattcgtcaaaatcagcataaatggcgggggacagagagcaagttggacactttgcttaggatcaaatctattggagcagtccgcctccgtaccactgtgcgcaaaacttcgcatcaatatacagcgcttttccaggctccttcatactcgctgcactgcactgcacgtttgaggaattataagctgggctgcaattgacctggtaacagagggtagctaaatgaccagtttgttctgtgcttcttacactagcagtacctaatactccctcggttattagccgttttagct

SEQ ID NO: 87246 - DNA, 628 bp, Zea Mays
atttcctaactttctagactggcgcaatattatagagaaaggcagggtttaaatcgtaaaatatcccagactcagcgaacactacccccaggacggtgggtttattcgagtaaacttgagctgctcttttaaaagacttccagggcgaaggggtatcgacaactgtgggtcgttggattagatttgaacgcgctagattagatctgccaaacagaaatgttcccacgccatcccagccgttcgatccaaccctatcgttccagatcacaacgcgaaccagtatgagcccgcgagcgcaggatcccgatccaacggtctaggagcatggttccctttcacccgtacgtccgctgatctccggccgagattgactcgaccgaaacggaacgcagattcctatcgtggccgttggcaaggaatctaacggctgcgcccggttcatcctagaccatcggattgacatccagcggacaccagtccttgtcgcgaatcggtgaatgcctaatgatcacagtcgtccatctacccatccacggtacagacctactcctctacctctcacgccggagcgcggcggtgcagactagggcggcgaactccggcgaactgcccaggtgcaaccccgccc

SEQ ID NO: 87247 - DNA, 1860 bp, Zea Mays
acaattgtggtccatttgcttctgcagtaaagatggcacaactcctggaattccatgtttggaagctccttacaaccatccccatgaatatctaggcagtgactcatcataaccctgaacccatccatcccaatccatatgtcagccattgcttcaagtatttgcttaaaagagtacccaaataacgacaaactatgatcaaagtcgaataatatatccaccaaatctatgtcatccacaactcttatctgcacatcttcaatagatagataataattcttgactacagcctcaccttcaacatactccaaatcttccattgcagtaccaatgcttcgaggaaacggtgatggctggaaaagtggagaggaagaggcatccactaatgccaccacattcttgtttggctcgaacaatacaactccaggaattattctaacagctcctaccgttgccacaaccactacaatttcagcaacagatcagggttcttcagggtggtacctttgggatggtgttatgatcagcaccccttcacctgaatggaaaacattgagataactcctttccacaaccatatctctaattaaacctctgcgcatactcaggttagatgaaaactcctcatcccactgaattttactaagaatttcatcaggcaaaccttaagcatcactaatccatctcactgcactcataactatcacctgcaccaaattccctgctacttcttttccaaagagcatttcctcttccccagtcccaccatctgctaactcaacctgcatcacctcatccacaaccccttctttagataccacaaggtaatcttccacctcttcttcactaatttctctaacctgtagtatctcccaatcctcatcatcaaccttaggggcacttataatctcgcttgcaccattagtttcatgggttaattctggaaccaaatcttgagaaaggataccaccagcactagtagcatcagcattttcaacattctgctccttctcagggccttcctcaagcacactaataacactagcaggaagaagcccctccatgcttccaccattcataaccatagcaactgtctcacttggttggtcagacttgctggtctcatctacaacatcacccttcttcttagccaattcttctaaggcttctccaccttgagcaagttgctgcagtaatccctcatgtgtgtgtgtttcaaattgcatctccccgtcccatgccactttaagacccatttcactagacactgggtatgtacttgcttgctgtggcattccaacaaacatccatgggacattaggcacaacatcttggtcacaattattgtgccactcatcacccaccccatgagctagctgttgcactaggccatgtgaatctgaaccaaataccctaccccataccatcttctcagcataattttcaccaaacactgagaaattggtacctccaagtatcactggaacatagttgtgactaccacgctcctccgtcttccgcacggtagctgcaaccagttctgcctggccctgcagtctatgttgtcccacatccctattctcgagttggtggtctagcaggtccagaatgcgccacatcttctcccacctcttctcctccttcttcgaagttgccatcgcttctagaagaaatcttgtctgcacgaacggtttagtggagggttccgtggacgtgacttccgagaatcgggggcttggtggaggactgtgtcgtagatggtgttgacgccgctgcctgttggagtccagctccaatcttccgatgaagagcacttcgtcttctagtcgttgtctttcccagcagcaaggtggtctcctt

SEQ ID NO: 87248 - DNA, 640 bp, Zea Mays
tgcagttggtttatagatggatcattagacaacaactttgatactggtcgatcaacaacttgccatgtaaatttaggagaaaatcaatgccaaacttggtctgtcaggttaactgaagaacaatctgatggtacagtagccggataggatcaggttcaggtctctcgccgccgatgagctacgcgtggatccgtgctttcaccgccgtgattcacgctcagatcagttggatagcgccgaggtcagtaaatatctcgccgtggaaatgctccggccattattttactccggccaccgtactgagcagaccacggctggttcggatgagttcgccagagacagttgcttcacggccttgcgccacgtgccttggcacatccaccgcatcgccgtgactcgcattagccgcccattcatcgccggagaacttgccacggtaataggtcacgaatccaccgcaccagtaacccctgtcttctccgaccgccgcacgtcttcgtccaaatcctcggccaccgctcatgtctgctataaattgagcccgctgtgaactccatagggtaattacccatccatagcacccacgcttgccttcaattgtccaccaacgaccgcgaatcgctcatttcccccaaacctg

SEQ ID NO: 87249 - DNA, 615 bp, Zea Mays
ctgtgtttcctggtcatcctgtcctcgaagtgagtgattcgaatattactcacctcaccccatagcttttgacttggttgcacgtgaatttctggttggagctgggtttccttgcggcgcatgtggatcgggaatcgcttttggtttcacgactcacgagcttctctctcggcgccggctcttttcgcagcgtgtagggtttggtggtcctggtccagcagcaacagctactacgccagccatgacattgatgctttgctcgcttcgatcaaatcgtgtcagatgaagcctgaagatgatccacggccgctgtagcttgtagcttttttttgccgtttttttaaagttcctgacttcaccttggctacctgcttgcctctcacaatgttctccatcactagctacacccaccatccatacaatctcctccatcgtcatgcccaccatcacattgctctggcgctctggcaatgtacacttttttatgccacctcactagacatcattttaggtctgttccatcagaacctcaaacaaccccagcctaacacatgaactcaatccctaattcgtggggacgtcgaaccacatatgtagcaatttctttagaagttt

SEQ ID NO: 87250 - DNA, 1312 bp, Zea Mays
cttctagaacatagttctcatctcgatcacaacgatcgaaatccctatccactactccacatgtcctggtgaagttatgaagtgccatgcatgcagtgataattttggattgcttttgaggtggataacttggcattgcagttagaatctgccacttcatcttaagaactccgaacgacctttcaatcacattcctaagagaagaatgtgcgtagttgaagagctctttcttaccttctggcgcaggaccatctcgatattccggaagatggtacttggttcccttatatggcgcaaggtatcctggacagtttggataccctgagtccaccaagtaaaatttacctacagcaacaaggttatgtaagtattaaatagtccaactacaatcctaaatagaacaacaggtaggtgtttaccagtcggtggatgtgggaagacatgactgtacgtggtcatagcatcattgaacactctcatgtcatgaacaaatccaggccatccagcaagaataaatgtgaacctcatgtcaaagtcacaagcagccatcacattgtgagaagtatgtcccttacgagacatgtgctgaaccatcttatctctaggcaccacacaaggtatgtgagtcctgtctattgcgcttatacacttgttgaagaagggatagaaccttgggttccttagcctagggtgaatagttctgaattgtgggtcagctggcttaactatgtctgcagctagctgaaccacacatttcaaaacctttttgaacatgttgtgaactgttcttaaggacctctcaaatctatcctcagcttgccttactgcctgcttagatccaaccatccaaaggaacattcctagagcttcaattgaagtgctcttggtagtagattttagtccataggactctactaggaggtcatgaagtctgtggaatatagttgggctcgttctaaacatgttgtaacacatggttctatctgctatcttcctctacccattcctgtccagtaagtgctggtgttctatactcacccctattgcagtacttatcaaggtgcagtgcatggaggtacataccataaatcagagtggtgtcatcatcctcaaaaaattgagactccatttcatcctcacttgattcatcattactgaccaatggaacatggataggtcctgcggcctgccaacagaaaatggaataccaatttccatgttcctgtaccaaatgacatgcgccacaagctcacaacacaaccacataccaaacgaaactaacatagttcaaacgacatagcgtagttcaaat

SEQ ID NO: 87251 - DNA, 463 bp, Zea Mays
acacttttctacaacagactgtccaaaagataagtaaacaccgtccgacaccatgcgcagaccgtccggccccatgcatgggccgtccgcttgttgaagatcagacaaacccaaaggtgccaggttcggaaaaataagttttaagcgttcacacggaccatccgaaggcacgaacagactgtccgcgttagactttatcttacatctgacaacacatttaatgcgattatcgctgttgatatagccgttgtaactgacagttgcgatacaactattgatcttgcaagggcagaccgtacggactaggagcacggaccatctgcacgtgacaaaattatggcaacgactaggaggtggttggtggatacatacaaccccaactaccctgttcaaaggcacccaagcattccattcattcacattcaataacagagcaagaactccgctaaaaggcacactcaaa

SEQ ID NO: 87252 - DNA, 595 bp, Zea Mays
ctatactacaagaactgtcttagatgttagtgagtatactagacactcctaattatgaaaccgtctctttatgatatttctgataagacatactgtgaataacatagtaaacagtgaattcggattagttgatgatatatataatataaaatgtaaaacttatctctacaactttatatagatgataaaatggacccaaatgcgacccgatcattagtgtgtcacataagtcatcattttgcttgacatcgttctttttggagaattacaatttaattttttaagatctgagtggtttagaatcacgaagaagattatgaactctctagtgatatgaccaatttagataatatagtcatagatatggaatgagtttataaacaataaaagtgtgaacgtgtgtgacagagtccaagtcatgccctgccctgcacactccgtagtgggcctgtgattcaattaaagtccagcccgacatcctcactccaaattgactgctaaatcctccaccagctccaaccactagggctgcaatcatccaccttctgctcgccgcctcctccaacgccgactcatgctcatcggtcgccacctc

SEQ ID NO: 87253 - DNA, 770 bp, Zea Mays
taatgctttctccctaactcacttcatatccttggttgtatcatttatcctcactttaatagttcatggttatcttatctcactcttggccaccaacaaatatgtcttgtctaactccttgataattcttacccaactccttgactatataatatctttcttattccaaatcttgtctcaccttttgttttggttgaatgagtagaactggattatgttgtgctggtatgcttgagttcattgtcctttgtgttcatgtttgatttgtttctttgaaatgattgttggtgtattgtgtgatttttgtccacaatggcatcagttagctaggtaaaaccttagatagatgggttttctctgctctctacaatctgtctttgctcaaccctttcgtcccttccttccttgccatacccatacagatgtcagaccttggaatgtcaacgacaagtgatgtcactaaatgcaaagaatgcggtgtgttggcaaatcaaaacaatactatgaataaaatagctgatgaacagaaattcaagacccaaaaggatgcacaaccaaaccaatagacaagtaaccctggaacatgttgttgttgcgagtattatggaattccttgtcgccagatcagtacaaacgaaagtgaaactacaaaacagaagaaccggattttgttttctggtataaaaagacaatggtctcaccaagaacaactaatagcagatgcactgtcagacgatgaattgtcaggtattccaaaaaggaaacatcac

SEQ ID NO: 87254 - DNA, 407 bp, Zea Mays
agacacctgccaagtcatcgctcaaggcattgaggaccctgtgtcaactttatgaagaagaggtggccgacaccccgctcagattctttccgccctttcagagagaccgtcccgtttggatggccaggatgtgtgcattggaagggaagcagattcttgaggatgaccccacagtcacgtacctcactgcatacctgcttaccctggatgcccagtatgatttcttggctcggcaccaccgtcagatgattgcccaagcagaagatgcagagaagctcaaccgtaagctccatgtggatctcacctcaactcaagcccgtttagctaccttggaaagtcgtgaagtcattgctcttgaagccctgaagcaagccaaggatgagcatgtccagaagctgatggatgcc

SEQ ID NO: 87255 - DNA, 405 bp, Zea Mays
ttgcctcaatcggattggactctttgtcatctactgataaatggtgacatgctccttctagttcaggcaagtacaacttaattactacttcctttccggatggggacaccaacttaactgttctcttgtcacaactgacagtggcttgatttctgtgtagtcaattcatccctaggatgacatctaacccttaagttcccattactactaggctagcggggaagtctatcccctttatttcaatccttagattaaggcaaattctatcggactgaacttttcccctaactgaattaactcttaaaggtgggatcattggttctatggggatgttatgtgattctacccaagatgtagaaacaaaagaatgtgtggcaccagtatcaaataatacttttgctagat

SEQ ID NO: 87256 - DNA, 924 bp, Zea Mays
aactcggcatgtttttgtattctgcaggtgcattgatggtaacatcatcgcaattcctgttgaagttgagacgcctgaccaccactactatcatgtgtgtgaaacgctatcttgttactgatgctgtagcttaaatttaaactgagtccttgtaattttgcttttctttctctttgtttatcagctggcattcttcacaacgagggaagtagaggcttttgaagaattgacatgggtatgtggtgtttcctgcaattatgtttattcatcctccatcacactttagttgcttttaactagtgggttaacaaacattggttgttgggtagccatcttttgtagggaaaaaactgtgaaatgaccttccacctagctgaatttggtttcatcttgttttatcataggccttgtggtggccaatttatggatttagagatatgatcaatgaatactttaccgcactggtggagagggagaggacggctagtttggaaactcaaatcctcttcgggattggagagggttagggtgaaataaactaatttacctctcaatcctctccaatcctagagaggatttgagatcccaaactagcccttggttgttgaatatggatgctaatatcctaatcaactggaacaaactccatagatgtcgcccatgccattgccatgctttggcaaattctggtgctgctcatggttgcattacccatcttgtccctccttgtgtagtggcaaacccacataacacctagatcatgccctactttcagttgtctaccagagcatgctataaactcgagcacattacaattgcaggactatggaattgattttgatgatgtcaaccatcctgtaaaagcattcaaatgccattgtggaagcacattttgtcggggaagataaaagacctatctcaggt

SEQ ID NO: 87257 - DNA, 798 bp, Zea Mays
cgggggtgaagggggctgaagttggtcaagctagccgggagttgtctgtggacgagtacttgattgaagatgtcgacatgttcaacgctcatacggggttgtcggctggcgatgagtgtgtttactgccgtgtaggttttttatatacggggctgtcagctggcgatgagtgtgtttactgccgtgtaggttttttatgatggtatgtgttcttctattggtctatttttggttgcaagggctgggtctaggcagatggtggtggtgtcggcaaagccggttgaagtgaggacccaggcgaagactgtgatgcgactttgctagacccatgggcacgattctactctgctgttgacatgggcgaagaggtcgccagcgtgtctgcggctaagggtgtggcgacaactgtctcacgacaactgcgttacatgagtgtaacattcatgatgttaagcattctcatacatttcatatgcatcatgaaagcatcatcataagcataatttatcattcaccacttatatcagaatcttgaaccgtttgctgttggtgtgaagtgatttcatgcttgaattaatagaaagcctatgttctagaatcttagattattaaggagtacttgtgtgtataggtaaaccaagttgaatgaatttagatgttgttttggttagatttcaaccctgttttcatgtgatgatatcttctaaacttgtatgtgacgtcatttgacagattttgacacggttagacgatcagtttccactgatttgtgcagccctgacaaacccaagtttgaaa

SEQ ID NO: 87258 - DNA, 363 bp, Zea Mays
cataatgatgtttgtttcattctgataggcatcctgctttagtcctcaacaagctaggacttttgttttagaacgtcgcagaagatctgtgagtcaattcattaagaaatgagacaaacagaaatggagcgactgaagagttagcaccgggtacaaagaaggccagaaatgtgcatgcccatcaacagcccccaaaacagccactttacagaaacacacacctacacaggccacacagctatcagcgacccaaattataccctaagagcgggttggagagtgaggagctcctgaagagcagaggcacccgcagcacaccaaagggtacattcattggccacaacctgcaaaacagtatgaaca

SEQ ID NO: 87259 - DNA, 424 bp, Zea Mays
ctgggtgggcaataatgcaagagttgctgcattgattgtcgggaatgcaactccacctcccatttggatttattttggagttaaataattgttatctagttcttagtatgagtcgaaacattatgtctccttcatgttttatgaaggatggttattcatttacaagtgaaaataatggttgtgtgatctctaggaatggcatgtttgtggcttttgcatccattgtgaatgggttattcattttaaatcttaatgacacacatatctataatataaagtgataaaaggcctcagcctaatggtttaagtcctacctacatgtggcactgtcctttaggttatataagtgagaatcacatgaagaagcttcattctagtgggcttttaactttgtttgattttgaatcatacaagacatgtgaag

SEQ ID NO: 87260 - DNA, 615 bp, Zea Mays
tgctgatgcatggaaggctcttgacaactttgctccagagtttgctagcgatgcaagaaacgtttgtatcggcttggcaactgatggtttcacgcctttcaatatgaccgttgcgtcgtattcatgttggcctatcattgccttaccgtacaaccttccacctgctctttgcatgaaatatgattttatgttcttatgtcttttatacttgggcctgagtatcttggcgtacgcctgaatgtgatgcttcaacctctgattgaagagttaaagatactatgggaaggggtggaagcctatgactgcttcaagaagcagaaatacatgcacaacatcgacgtcatgcatcaagagagtaacttttgccaaggcctcattaatacatgcatgaattttctggataaaacgaaatacaatgacaaggcgtgcatggacttagccgtgatatgtgatcgtccaacctaagtgcttagagaaaatggagccaaaccaaaagttgattattgtttgaaacctaagcaacggaaagaagtgacgaagtggatgaaggatctaaaattccccgatggttatgctgctggttttagaagatctatgaatttgaagacaatgaag

SEQ ID NO: 87261 - DNA, 634 bp, Zea Mays
gagaagaacacgtacgttggaggaacactcagttctggtcgccgtcttaaaaatagttcttacttctcgactctcgctgccttgtgcccttgttggagaagcgtcatcgctgccttgttgtcttgttggagacgtcaaacgacgtgcaacccgtgctggagatgcgccgctggacgctgtgcaccccgtgctggtgaagcgctgactgccgcggtagtcttgctggagaagtgttgtcggccgcggtagtcttgctggagaacaggagaagcgcaaccactgcctcaaccgagtctagatgtcgctgccgacctgccgtcattgagtcacgaactgtgttgtgtgactgtgtcctagggttgggagttgggacttcagcagacttgactacttcaggtcttcagcgtggtgctagcttgctgggttagtgggttggatagttggatgggctcacgtggttaatttggatagttcgattggatgggctcacgtgatagcctgctgggttggatagttggagaacagattgacatatgacatttacgttatgtgggctgactgacttatggttacatgggctgttcggttttcttggtaattcagtttggtatagtgtgaaaaccgaatacaatac

SEQ ID NO: 87262 - DNA, 500 bp, Zea Mays
gtggctccatactctcacactctctctatgctcgcaaaagatgggacgtgaatttgttgtctacaacttgctttaattgagagacaggaagtgtcattcatataacagtcaggaggaagaagaacagtagtcgcacgtaatgactcaaaactgatgactgttaccagcgtaaagactgaaaacggacggacaaattttataccaggcaaaacgtataattgcgtggaatatttggaccaaagattctatgctcgcaaaagatgggacgtgaatttgttgtctacaacttgctttaattgagagacaggaagtgtcattcatataacagtcaggaggaagaagaacagttagaaggcagaggaaaccgtcgcacgtaatgactcaaaactgatgactgttaccagcgtaaagactgaaaacagacggacaaattttataccaggcaaaacgtataattgcgtggaatatttggaccaaagatccgatagaccacggccaag

SEQ ID NO: 87263 - DNA, 367 bp, Zea Mays
gaggagactgaagccactgagacagctccgatctccaaagtcatgagacaatcgggattagttgtgacggagggagccattgacgaaggtgcacctactcccgaagctgaacaagctgatatcgaggaagacaatgttgatgaagaacaggaagactataacactctgatcccaacaaaacccagccacttggattttgaaaaatctactgtgtctgaggccgacgtgcccatgatgatgaagctgggttacttcggagaagctgagaagaagcctattcgttttgctggagaagaaaccactccaaagccgaaagatgacgaagtaatggttttcaaaagatttttcagagcaggattacgttttt

SEQ ID NO: 87264 - DNA, 859 bp, Zea Mays
cagcacccaattttttgatgacgtcaagatgcatagagggggggcactttgagtgcagcatgagcaatttttcttgccaatcccagtgcaatttttgaagcccttggcctttgccctaagcctggcactccttctgactgtcgtgtcgactgagataggctgcctttttctgggagttgcctctgactggtgagggggttgaggcttagcaggggaatcctgactgggtggagggggaattctgaatgaaatgatgtccatgttgggtgcgacgaatgccgagatagctccggacaaaaggaatttcctggcccaatcaaacgaatctggcctcattaaaaggcccatgaagaaagcagcccaaatctttggaatagaaactgagtccccattgtcagggaacaaaccagcccaagaggaggaacgctttctggccaagaaatcttcaagcgcagggccagggacggtttgatccaagtgtaacattaggcccacattgatgttgtcttcaatttgcatgtcatcctgtccctcgacattgtttccctccaaattaatgttggcatgagggaaagcaggcagggcgagaaccgcttcagccggcgttggggcttcctcctgatggagctggactccctgagggataatgatgtcgttaaaatagcccaccgaatcgtcagaaggaagatcctcaaggcctgaaagctggtagctgaactgctcttcttcattgttcgcagcgttaacattatttggtacagcctttggcacagggggttgagcctgctcaacaggccaagggtcccagccatcatcagcattggcagcaacattttcctcagcattgattccatcctcg

SEQ ID NO: 87265 - DNA, 647 bp, Zea Mays
agactcagacaatggtgatactggacggcgggttgattcttaagttttctagggtctcttctgcgaactggcaaagtgaaggggtatcggccatgatgggccatcggatcagacccgaatggcccagattaggtacgtgcacttaagtgatcagtctgcaatgcgagcccttggatcgggatcctacggcccatagccaatccgtgggttggaacgcagagccaaatctacccgtctgttcccaaaccaacagttccgatttaaagaaattcatcaccgcgccagcactaatcccaagcgcccaaccaggatccaacggcccaggttacaactaagccaaaagcgcgcacatccgatcttggccgctggcttctaatcgtatggctaggaacccttcttcaacctcaagtctcccaggctgtgcacctcccgcagcggccagcccctctctccgacagtgcacagatcgtcgccccgcgcacaaccatagcaacgaataaaacggagcacgaaagggggtctcaccgccggtgaagtgaacacggccaacgatgtcgctggtgaagtgtgcggttcaatggcgcgcggtgatgtcccgatcgaaatcgcctctgtgcgatacagagaatcgccgagtcctgcctctt

SEQ ID NO: 87266 - DNA, 730 bp, Zea Mays
gtaatttggccgagcagtgctggcggccggagatagagaagaaccttggctcagtggattggtgtcctcagtcgtggcaaactcaccgacgatgattagacgggtataaagagtcacggtgccgtgacggaggtgttcagatacgtggcgcaaggccgtgcaacagcagtcaccggtgttcttatcggtttccaccgcggtgaacatggtacggcggccggaattgtttatcggccggagtttatccccggcgacctacacagggtgttatccactcaccccgagcacaaattggaccgacggcggcacgaatcacggcggaaatcggtcatcggcggtgaagctgttgcgctggcggtctgatccctttggtctactgtaccatcgcgcgctgccatcagtgcacctgacagtgcaacttcagggcaatttttctctcagatttctatagcaactcgtaccaagtcctgcagcaaagttggagagctacaaatcagctacatctttgtcatagcatctatgggcagattctggcttgatcatacctaaattcatgctcaaagtttctgtggttgcactgtttgtctgaaattcagaccttatcagactgacagcccgactttaggcttaattatctcccatttcttctcaacaactatgcttacactcttaagcaaagttgttctcctttgttaggtctacatgtttgatgtggtgacctagggcaaac

SEQ ID NO: 87267 - DNA, 829 bp, Zea Mays
cattttctagaatttatttggttctggaagaaaaagaaaaagacaaacttgcaacagttctgggccgaattcaaactaggaggcccaacagcacatgaaaccggggcgcgtgcctgcgcgcgcccgcacgctctggctattttgcacaaagggcctcggtttatcagctaattcggagtaggttcatctactattgcacttagtcgctgacaaatcacaggaaagaccctaaggttctatttctctaccccgacaggtccacgacggcgctcagcacggagagcttgactccgacgagcaagaccggccggaaggggccaagaccggtgctccacgttggtctaaaccaaattcagggccgagtgaaggttttccccaagttaatttcataaacaactacaccaatgtctcaggccacggtgagcgcggacatcacggcaatacagttgtgttccgagcgattggcgggttcctagttcaaattggcgacaccataagcatcacaaagttatgagagtgctccaacgaagaagcaaggagcgtggactgaccggaaaaagggctggccgcagtgaggtgttcttcgcggcggaaaaccaatttgggggaaacgagaaatttgcgagctctagggggtgattcgaagcacgagttgcttcactggttgcgtaactacctaaaggagcgaatggtggcagcaatttatagcctctaacggcggtggcgcccaattttaccgggatgtgctggcggtcggagagaacaatggtactggcgcgtggaagatatggctttcacggtggcggctcctccggcgatcaccggccag

SEQ ID NO: 87268 - DNA, 527 bp, Zea Mays
tgcacttggtaccacaaatagaggcattgggtcctatgtacttgcctaaaatgtggacgtatgagcatttcatgtcaatactgaatggttatgtatcaacacgtgctcgtccctgggcatccatgatagagcggtactgtaccgaagaggccattgagtccggaggtccattttgcaatagtatcctaaaagatcaggttgcaatagatctgcctccgtcacgacacgagggtagactgtatggaagcggtaggatgggacaaaaatccttcatcccactggattacaatacagtacttgaggcacatcacaacatcctacatcagctagagataatggagccatttatccaacaacacatcaatgagcttcgtgagcaaaatcctgggcaaacagatgattgggtaatgaagcaacataagcagcggttcaacacatggctaattgtgaaggacattccacatggagatacaatagaagaacaaaccatcaaggggttggcatttggaccatcatgccaggtcatg

SEQ ID NO: 87269 - DNA, 320 bp, Zea Mays
acgaggactaacaagtagacttactaatttttatccgtgtcatttcaagcactagaagtaccatactcaattaacaacgcattctccacgataatcaatatcgaagcgcttttcacccaataatttgcattttaacttagacatcacatgagcactaatacttttcatccgcgaccataaccgtacgcatttagaccacaacaagcaattcatcgtgattacgagtttaaccgaaccatctaacaatttggctaactagagcaacgacatagcccgctaaataacatacacgtcgacttgcctattattatcgcaatccg

SEQ ID NO: 87270 - DNA, 304 bp, Zea Mays
gtggtctctaacaattaacatctgatccacgtacgtacagcattcctcatgctttgacagtcagcttcacacgcatggcaataataattagcagcccccttatggtagcacgctagcttttctgtggacacgactagagcctgctagctcgcttgttcttcgcaatcaggccggtgacgacccgacaaccctaaccactgtatatggtatatgacctgatcgaagccgcgcgcacctgttacagaccacattttactgtcacactactgtactagcttgttgtgttgtttggtcaaggtcaaag

SEQ ID NO: 87271 - DNA, 1324 bp, Zea Mays
gccggaaatgcaaaccaagaatatagcaatatgttattctctctgtcccaaattaaaatgtattttaaataattaataaattcatataatacttgatgaatgtgtcaggtacctaaaaaccaggtatccttaaaagcccgtaccctaagatgaccggtatggggacgaatcgaacaagtcttcgtcgagcaacctagcgaggcgggactgtcgaccaagtctctatcgagcaacccaccgagacgggacgagcgaccaagtccccgtcaaacaacctaaggaggcaggacagacgacaagctccctagcaacaaaacctgcaagaggaaagggtctacctaatattattgagccacgtcagggcgacaagacacgtcaccacgaaaccgcgtccgagccatgagcacattacacagaggtctctatcagacacggcggtacgccccacatctatcctcagatacgtcctcactaactcgtgtggtcggtcaactccggtcgcgatgatctcagcaccagagtctctataatggctcgtatacctgaaaggacgaaacaatacgccacaccaggtgtatgtctacgcgtgctgaagggtgacacaagggacatgacggaagatggagttatactaaacacgacactaaacctcgccatgagaccactatgcggaacccgccaagtaccattacgttaacatgatacaagttacagggactcaaacgctggacggacaagacaaaataccatgccaagggtacgacagcgcccgcctatacggacgacgccaggagggctaaaacaacctagaagcagcaatatggggactcccgagtagaatacaagttgccactgtaaagaccacatttgagctgtaaaaggaaccttctttctacacacaagcacatcagatgtaacatattccactgcaattcaattatcagcaccaccctggactagggctccgtcctgaaccagtataatcccgtgtcccacttcctcagcccaaatcacagcaattcaccattcggagtatcaccacccaccgaacataaatctattgtccacccaatttccgaaaccacaacagaatgtgttttatatttttatctagatccgtcattatctatttgaatatagacaaataaaatcaacgaatattattttgggagggaggtactgttttaggtctgaaatagagcgcacagcagagcaatttcatataattttagatgctcgtctcagtctctcagatccaaagattttcgttaagctcaaattaaagcgcgtggattttacgcgtcttgtcttagagtagcagctc

SEQ ID NO: 87272 - DNA, 517 bp, Zea Mays
ctctcagtaagcactaagcagcggcgacggctccaattcctccacagctctccgtgctcgctgcaccttcagccatgtgccatagccttgcagccttgcaggcagtggccatctacatcctgggtgtcgttacgtccttcgctgccctctgcatcagacagtctgcagttagattagaaccaaggaccgccctcctctcatcgggaccacggcatgctccggaatctggatagacggtcaagaacttggacgatcatgtggagtacgcgatcgcccatcgccaccagccggctggccggtcttcccaggacgtacacagtgggatgatggcaccaaatagcaagagcttgctttgtagcattagtatactcggcatggtaacctaacttttaagcatacttatactgaaacttgttattctaagaaagtgatggagatgtcgttccggatattccaccatataacttttgtttcggtggaacacgatccagcttcagatcaaaggatccgatcaaac

SEQ ID NO: 87273 - DNA, 313 bp, Zea Mays
attcatatctgaaagttttttcttcaaatcttcgacttcagctctatgggcttcgtcgtgggcactaagcttggcttcgcaagttctaagtttgtccactaaggagaacaatattttgtctttctcaagagcttcattccttagtgtgataatttctgatcgaagatttccaagagctaattggcagctttcatcttcggcgttcttctgggactttaaagccttgctcagaattaagccctacaaaaacaaaggatgagcacataatgataaaaaaagctagaaaaagatctgttttgcaacaagataaaat

SEQ ID NO: 87274 - DNA, 808 bp, Zea Mays
gttatcaccgttgcagcgcatgagttcatcctccgatatcttacccttatgtgctgcactgctgccttgccctgcggccacgggtgcatatgtaatctagaaggaataatgttattttttaaaaacttaattatatcatagcaaaatcaaaaggaggacaataataaaaaatctgattatttatattggggcacaactttaacaaagtttgacttattaggtttgttatgttgtcatatctgaatcaatgtcttcaactcgtctttgttagttagaaaccaatttcctttcgagcctcattttctatatcaagtttaaattgatatgtatgcagatgagcaaaacaaaaaatagagcaaataatgaatctataatggttattagaaggctaatgtttaaaccagtgccaccacggatgctgacccgtctacccctactgcagacatctttatcctttgtcaatgaagtgagcagcgagcgctgacctttagctaaaaagcactgcccgcctgcttctgtgctcttctcccctccccctccaacaccattcaaaagacctcgtcctcacttctccaaccacatctcctgcaaataaaaaaccaggtgataaggcaaacaaaatctttcaaccaccaattaactgagggtgttttctaacttatcttcttcctcaatttttcttggttcaagggagcttctgtaaattttggttggttgcaggcaatgttcaggctgcgtaaagctatgtctgaatattcttcaagctcattcagtcattatcttttgctcctagactttagctctctat

SEQ ID NO: 87275 - DNA, 533 bp, Zea Mays
aatttatttttgttgttatttatgcttgttctatatctccacacaccaccagcaccaccacatgtgtgggggttattttattatatttatgtttgtcctgtatcttcagcttacctctactttattttgggcttgatttggtaattcttaatgcagcgggtggaaccagattaaggacatcaagatggcattattaatatgggcttgtgtatgctaacgacaaatcagagatcccactttgaacttcccttacaccattgactcaaagcaccacaactccacaatgatatcagctttcaatccttggcgtcgccctccctcctaaggctgcaaatggtgtgcgcggctatatgtagctgctgcgcaaggacagattggtagcaacctagcagatgcccggtgtcttcaccattttcatctaacatgagcatccccctgtgatctcttcttgatccttttttcccatctcttaccctcacaagtctgcactaccgtacgttcgctgaatatataaaatcaggaggagcaagaag

SEQ ID NO: 87276 - DNA, 416 bp, Zea Mays
gtgtaccttgtgctctattgaatccccctgcaggttcctagctccctagggaggatttcatatcctcaaatagccatttcactcaaaacctaaacccccgcacactaagtgctcggtgaaatgcctaaactagctaaaattgctcaaatcgatcccagatttttctagcaccttcatgacacctcaagtaacttattcaccaaatttcacaccaatctgatatcccagacaccagttttcaacaaattcccatttatagcgatcgatttcgagccgagtgccccaaatccactttcttcgccaaaattcaaaccaagcgcacccttcactcatttgtactcatatatacctactcttgaagtatcggctcaattccaagtcattgcatgccccatttctaatgtcaaacctcctat

SEQ ID NO: 87277 - DNA, 501 bp, Zea Mays
caagtccccaaaagtacacataaagagcggagcgattcttcgagcggctccattccaatatacggctgatagctgggatgagcctgctcggcaaaatagatcggacgcgagcgctcccgttctcttttgcgtgaccggcctagcctcctctgctcctcctcctcgtgttctctctcgtgtgaccgctccatccttgagatgccgctgtgacgagctcgtcgtcgtccatcgagtcaggtgaatctgccgctaactcttctccttccttgtcgccctccttttctcctcccccgccgaccctttctgtttcggtcgtcgtcccctttcctcctccatgccatcgacagatctaccttgcctgctcctcccttcaacagatctactgggtacaggaagattttactcaagtatcgtccatgcttctgtggtcggtcccctgcttaccttcggatactgggagatttgctcacttgttcatgtctttggcttcgggtactccgc

SEQ ID NO: 87278 - DNA, 611 bp, Zea Mays
ggctcggagcgtcgccggtgttggcttaatttcttcccggagacactgcgtgtcgtgaatccgcctaacttcgaggagagaagaattggctgcatgactctcggtaataagtccttccatacttccatcttagccctagcttcgtgctgcaagtgtcggatatgtgttctaggtagaaattggggaataggctagtgtccggagatggtgccgccatgggggagctgttctccggtgactggtgaaggggataatgtgaccgggaatagcgtgccgtcggattcctcgcggacgatggtgatttacgcacgcgtacctcttcgccagtatggccctaaagcgttgatctcggatcagacggtggtcgttgcgtaccgtttcatcacgctagcgatatgatcctggccgtagatttagtatcacgtggtcctggtcgaaacataccccttcggccaggtaaatttatcaaagagaccctacagtttttggtaatcaacctgcggtccagaatcaggcatactaagtgatgaggacatcctccactattactcgttggcaaagatgcaattggcccagttggcccaattgtagtctgacggtgaccgtgtgag

SEQ ID NO: 87279 - DNA, 557 bp, Zea Mays
gaatatctgatatcataattttttacatctatactgcatgtggctatatatattgggatggtttacttcatatgctgtagctacaagtgtatggaacacacattattgcacctatctccttttctccaatctgtgtataaatgtagcagaagctagtatttctttttgtcttccagaacgaccttgctatttgaaattgtctgtacatatatagcagtagcaggaagcttcaggagcgtgaattgtttctgtctacttcctattggatggttgctatcccgttcgtatgcagtggcaagtgcaagggatcatatttctctacttcctagatcgtaaattatttccgccttactaattgtagttggtatatatcgatgttttcatataaatcacgcataggaataggaagcatcaggagcgcctgcattaccaattctttaatattctctcgatgagacattggtcactcatctagtctctttgaacacactggtgcggaaacctctagatgtgatttcctagaggttggagaactgttttaagagcagagtggtctt

SEQ ID NO: 87280 - DNA, 1254 bp, Zea Mays
cgcgcgcccgcgtgcgctctggcggatttgcgaaaacgccctcagggttttcactaacttgcaaaacgttctacagaattttctaagagtcactgacatcttacaccgaggtccctggaaccttgcttcttccccaaatacgtcccagaccacggcgcactcgccgtcgactatcccgctgctcggtccggccaaaaactactgcggatacccaaaccagctgctgggtgagtatcaccgacccgaggcaaccatagaacaagctccaatgtgactaacccggaccaggatgtgcttgaccacggtgatggcggacaccaagcatcaatcaatacgttccggttgcatacgtaaggtaaagctccctgggttgcgtggataacaatcccgagcacatgagggcgctaaaacacgagcaacaagggcgaggacggacctggaatcagttgggcgcaagtaggcggttcacggcgacgcagtcgaccgaattaggggaaaacggcgttacggtggctctgggtgaaattgggggcggggattgaggctacacagccgtaagagactgtagtttcaccgtgcactatcaatttgggaagaggtagagaaggccgtgtgaatttctggttgtactcaagcttgcttgaagaacagcaagcacctcgccgaggacccaatggctatttatagccgtggcggtccggcgatcacttcgcggccacggacagcatcactagcgcatgccgaccacgtcggtaggaggtacagtgcgggagaacttcggcatgagcgccaccgcggcggaattcactggtctcggtggccgccggtgaagtctccggctggactcagggaacggtgccacgtatgcgccgtttaacttcgactctatccatttcctatcgcgcacgaacccggacggcggcggcacgaattttggcgcaaagaggtcgctggcggtgaacattttgcgctggcggtttgatctgcacgagcactgtaccatggccaactccatcagacagcctgatagagcattttggagcttcattttctcccagattcaaatggcaactctactaaagctctgcagcaaaattgtagagctataaaccagctacaacattgctatattgtactgccacaaaaagtcaatggagcctgcttgaaattaagcttgaagttcttgtcagttcactgttaatctgaaaattcagacccagtaacctaacagcccaacttcagccttatttatct

SEQ ID NO: 87281 - DNA, 788 bp, Zea Mays
accaaatcgaactcgtcacaaattcgtcacaaacctttatctgtgacgatatatacacatgcagtgacgcaatacgaacgtcatcgatgataagatctctactagtgacggcgaccgtgtccccagccctggggtgtgtcgccaggtggccatctccatcgacaacaacaccttcgcacatctcctgctacaccctcgcgatggaggtcttcgacattgtcctcagagtgcagtggcttcgcaccctgggaccgatcctatggaacttcaccgacctcaccatggcgttctggcataaggagtgtgatgtccgctagtcctggatcagcggcccccagcggcagctctccatgctggccgtcactagggatctcctaacaacactactcgactccttcgtcgacatctttgaggaaccacacggcctgccacctccttggcgccatgatcatcgcatcacaccactaccgggtacaacaccaattacggtgaaaccatatcgttacccgcagttgctgaatgttgagatcgagaagcaatgcgaggctatgctgcaacaaggcatcatcagggaatgttcatcagcgtactcctctctagtcctcctggtacggaaggcagatgggtcgtggaggttctacatcgactaccacgtgctcaacagcaagacagtaaaggactcctttcccattctagtagtagacaagttgttggatgaactccgcagtgcgaggttcttcgccaagcttgacctccacagcggatatcatcaagttcacatgcatccg

SEQ ID NO: 87282 - DNA, 675 bp, Zea Mays
ggaagacatcaaataagtcattcagcgccctatctggtcttgcttcggcctgtgaaggccaaaagtggaaattgatggcactgttgaagcatgtcagagggcttttagcactgtgtgtgccttcattggcacaagggatttgatttaagagaatatatcctttagggtatggccacttgtggagagctgggatatgccgaaggagaccaccgccgattctagtgagggtggtctggtccgactgaagtataccttcaaattcagagagaggtttgatgagccagacgatgactggatgaagtgtatcgaaactaccaatgatgagctacttggagcttactccaagaccgaagataatgctctgtccgcagctttcaagggtcggggcaagaaaagattgaacaaggtatttgatgctattggcttcgtataccctaattaccattacccactatgagggcaagagaaaaagagaaagactgtcgcttcagccactgcagctgagccgaagggcaaaaagatgaaggttctgacccatcggccacgttacattgaaccggctatggtgcctaaatttggcgtggggacctcttcagttgccgaatcaaagcaagctgctccgattgtgcagagcgctgaagagccgactatagtgccaaaggtgcctacagtcgg

SEQ ID NO: 87283 - DNA, 512 bp, Zea Mays
cgtggaccatgcggacagatgcacacgttcccgacgattggtggcggtctagttcaatcaaaggggtcgaagagcttgaggagagcctaaggatgctagaacaagcgacggagaaacttgaactgacctgaattgagctggccacggtgaggctaaaccgagcggagttcggacgggatttggggagaatccaaaattagagctctctggtggaggatttgaggtgcgggtgggtgcgttagctgcttgaatacatggcggagccgagggggtgctcaatttataggcctagtgagcggtggccgggaattcgagcgatggcgcgcggcggtcggaggagggaaagttcactggcgcgtgtgattggtggcaaaccccgtggcaaggccttaggtaatagaaggacggtgtgttgcgatcgactgcgacgtggtaagatggctcacggtgtggcataattgcgaagaacggcggcacgccgatgatggacatgcggccatgtcgccggtaag

SEQ ID NO: 87284 - DNA, 707 bp, Zea Mays
tgaatatttggcatatgcaaagagctagggcctacaaagcttgtatctataaataggtcccagttagataaaatcggttagggagcgcttatcacttcaagtcgaaagactataaaatgtacatttcatgataataataattataaggcagacattcacccaagaaacatgtgcttctcatctcacgcatcgtcgccccttgaccaagggtttcctaagataagtcccatgatgccatggctcaatctcttgtagatttcatcaagacaatatgatgttgtcaccttacctagtagatcttggactaatcgttgtggttggcaagatctgctagttatcttgtgtagtatcaatttatttcatgctgagcttaatgttattagattgatcttgcatgaccaaacatgtatctcttgtacaattgctacaatccacaacatgagaatgcaacatgtgtatgtagcaactcgagagtttgatatgcatatggcatcttaccttacattctttagtcacattgtttattctggatgaactttttttgaggtccttatctatgtttgcttgcatgaccatcaatataccgactacaaatgttcctagggtaattggcatgatacataatatagattggatctaggatgttcctatgaatgatttactatttatttggccctagatttggttgatagtgtgtttaatcctgg

SEQ ID NO: 87285 - DNA, 613 bp, Zea Mays
gaggaattccgtgctataatttccggtcagcttctctcccacagattcacattctcgtatggtatgcgtagatcgtctcggttgggggattaatgccccgatgcatcggattgggtttctcgccggagtctgcgccgccacgtgtgcttggggctcgctgtgctctgctgttggtgggggagacgacccaggtccgttagatctccatccgatggatatgatccgatctgagcgcaccccttcgcggttctgattccatgccgtccgattgtggatgggcgtatgtgatgggatcgtatagcattgaactcgcggccgttagatcgagatccgatggtcgcgggtttgtaccggttcgtgccttggcgcatttaatcgtgaccgttgaaattagatctggcggctcagatgccctcataccccttcgcgggtatattttgttaaagagacctcgtcaaactttaaaaacaacccgcagtcctcgggtactattttctgtgtcttaggaatcttgcaccgagacccctgaactttccagaaaatgaggcccagtccagagaggatttaaaatagagaaatgattatagaatttagtttttaatacaaaaacaaa

SEQ ID NO: 87286 - DNA, 666 bp, Zea Mays
tggcccctccagggaaaacctagcgccgccatcgccatattgccatgcatgtgtgtgagggtagactgaatcctcgccgccaccgacgttccacgtaatcatcgttggcgtggccccgtgtttgggctcggggcactcgtcggttcgtgtgggagcctagagtgaagtcggttaaccggttgcgtccacgggcgggtgttaattgctcatcggagcacttcatcgccgcggagccgcttaaagccacagactggtttcgtcaccaagcgaccccggtaaggaaccttatctctctgtccgcttttgtctcctcttcgccatgcaccgatcgggggtcgaaacggagtagttgggcgagggattgcgttactccgacgatcagccaccgtgagcgcggggcggcgctgctgcctagtccgtcgtggggtggaagatggccctcgggccgttggattcacaagcgacaatctagattaggcggattataccccttcgcctatctcgaatctaggctgttgagcgtaatatggtcggtccagatgcaatctcgcgtaattgaaactgggccgctgatggttgatcttgcggccacaattgcgtaccggttcgatcgaagtcagttttaatctgcactgtgggcttttgatcgtgcggctgtaatctctc

SEQ ID NO: 87287 - DNA, 393 bp, Zea Mays
aacacatgcacttcctcatgcaaattaaagtgttacaatacgcttgcagattctctagagctgcgcttagtttcgcaacccaggctagagcatttacctcgcaatcccaggcaaaagagcgcgaatttacgacccagtcgatagcagtgtctcgttccacgatttcctgctgcaagcgattcacctctgttgatagcttagcaatgcggcggctatctcgcgcacgctccctatttccatggcgtagttctgacatgagtcgttctaccctggcctctagatcccctattggatcattgcttccgctacttctcccttcatgtctaggagccaactggtgtcggggcacacctcgaggtccggttgcttttcgttgggcgatcttggtacgcg

SEQ ID NO: 87288 - DNA, 315 bp, Zea Mays
ccgaaaactcctctatccccaggttgagaccaattgagtggtgtcctacaccttcttccatagagagcttcaaaaggtgccatccttaggctggattgataactgttgttataagcaaactctgtcaaggagaggtgcttatcccagttcttaccacaatcgattgcacaagctctcagcatatcctccagaatttggtttaccctttctgtctgaccatcagtctgtgggtggtaagctgaacttctgattagcttggttcctaatgactcctgcagttgttcccaaaatctggcaacgaattgggctcctcgg

SEQ ID NO: 87289 - DNA, 633 bp, Zea Mays
cgagttcaaacgctcataggttggagatcttcgcgtatttgggcatgatcactgcacaagatttgctctcccaacagagctttgtcatttatgtgtggaagtcgagcgttttggggctgtggacagagagttgtcgcgtcgctaaggtggcagtgtcacaaggttgagtcccgagataaatccatgtcaagatcatgccaaacggtggagagaggttttcaaactttgccacggtgtgttccaagaaatttggcgccacttttctatttagacatgtttgatttatgttttgaaaaaatagagaacacggttgatctttggaaaggggctgaaattcagatttctgaatttctgattttttcccaagtgcattagttcaggggctgatttagtgattttgaagaattcaaatggcaaaactttcttactatactttgttggttaattagtgaactaaaactttgttatttggtttttaccaaaatttgtatttttctcccaagtcttttcccaaatgccctttatgtgcttaaatagtccacttaagattaattagggtttgagagttcttcttaccttgaggttcatgacatgattaaggagagtttctttaggataaaagacttattcaaa

SEQ ID NO: 87290 - DNA, 577 bp, Zea Mays
atattatgatctaatctaaagtaagttacttaatgctggtacaaaagataaggccatactcctaattcacttgcgcctaaattggtgacttagatcaactcgaccctacccaacaacttgacctacaaaacaggttacacaactaattccatctagcatatagctattgaaccctctacccatcttgtcacaaacccggatgaagacaccaaaggtcgaggaggaaaggatcaactgcgttaaggaaggataagagtcaagccaaatatggtcttcagccccaactcaagccttcaaagatcaagctagatcatcagatgaatcaagatccacaaatcttggatggagtcttcccttaccctactctgtcttacccaaacctatctatgctttatagacatcttttatcctacatgataaagtggatatacatatatatacccatgccttcataatcacctgctaatttgtgttataaacctgaacaaaacaaaatcttttggtattaaaaccacttagaaactgaaacatagactacacaccaaactagttgcatcctccttcttactaatctcga

SEQ ID NO: 87291 - DNA, 508 bp, Zea Mays
gtgaaagatacacattcttgaccgttaaatctcggattaacagcctatatgctaattaacggagatcaactccgttccatccgatcatgatccgagggcgcggatcgatcacgccgaggtggtacacgtcttctaatcggagtcgtccatccaaagatcggcggctgtgattgaatgagtgaaggggtatgcgatccttctaatcctatccgttcgcaaccgaaccaacggctcccattcctccatcctatagctcgtcggccaccaggcagcgccgccgcctgggattctacgacaacgacacaccggctcaaagcacaatggcgcctaggcgccctaacctcgaattcgcctagctctacacgatgcagaggaagaagcaaaataatggagaagtctctcaccgcagaagatggcacagatgaacccaccaacggtgcaaggtggatccacgtcgccgcatgaacgactgcgagaaagtcactggtactccagcctcctcccacac

SEQ ID NO: 87292 - DNA, 377 bp, Zea Mays
tgtagcgctcggcgcgaagaggaagaggcggcggagggagcgacgacgccgaggagaagcccccaagcggggccaaagcgagctgacgtgagggagagtgccgccgaagtatccagaggcatagtgagctgggattacaagaagctaagagacggtatgacctttgattaggaatcggacgtcctaaaaaatttgcgccgacgtggacaacgtatctggtctcgtttcttaccggctttcatataatagaatgtaaatttacatagtaaaagtcgtgcacctgtagtgtcggattaaaaagatgagtgttttttggaaacaaaaaattcagacaagtgggccgatacgtatgggttcatttagaatacggcccaaac

SEQ ID NO: 87293 - DNA, 490 bp, Zea Mays
ccgccattgccgtgttggttgcgccgggctggtggggcggagctcggccagggttacgcgctgggcatctgggaggttcccctcgcgtgttcgtcgatgggaggactgggctccttcacggcgtgttgaagaccgaactggacgacaccggtgcgaggctgctcgttcctgtgcagagccatggtaaaacatgcctccatgatcttcctctcccttatctccctgtcgtttgagcttgcgtgtggtggattgtagcctcggcgtaccctggtaattctccggcttggcatgccgtagacggactcaccgttgttagatgccgaggtgcgcaggtagaagatgactcgctggccgtcggatgtgggagcaatggccggatctaggatttgtcgctcatatggatgacgtccactcttggccgtcgatctgggatcagacgcatagggttagatcgtgggtactgaaaatccgggccgttagattgacattg

SEQ ID NO: 87294 - DNA, 501 bp, Zea Mays
acggaaaggaactcaccatcacggcgactcctttctaccccgacatccttttcatcgggggtagattggaatcgtctcccatctccaacgatgagccaaccatgcagggggaagagcctccccagcgtgaagcacgacgatgaaggaacaggcgccagaatattcagcgacaccacgaggctggggagcgggacccagcgcagcccgtatctcaagatgaagtttcagaagtaggcgaaactcctaatgagcgggtataccgagaaaggcagaattctcgccggcacgatcaccgacaatctcaggaccgagatcgagaacaagccgagcaaggcgcaaggctatgacgagagaatcccctctttgcttgaaacctaaaccctgactttgctcgtgcaatgaacacgccgagcgaagtcggaggagtgttggcccagatagctgatggcatttcgcgaactccagacgctgaaggctatcggtggctgcttactagggcag

SEQ ID NO: 87295 - DNA, 338 bp, Zea Mays
gaacatggaatccagtgcaggggaagcagatcgacaagtgtaatcggattctgccaattgtctatacagtttcttaggtagaaccgaatggtccggtcctcaagcgaatttttaatcctgttgatttatgcttttttgcgggggggaaagtctggaattcgtcagagctgagttaacgaatccttctcaggccatatctgcgcgtgatagattgtgcgcgcgcgaatcgccatggcagcccaccagtccaccaccattctctgataggatcttctgagctcctgatacactgttaacgaatccttatcattgccaatgaacagacttttaatagcgca

SEQ ID NO: 87296 - DNA, 459 bp, Zea Mays
cactcgttgtcgacgccacctggacttccgtggtgccccaatcttatcggacggttggcgcaagcacagcttggctcgattccgttcacaactccatatttctcttgtttagaaacgactccgtcgccatcgtctatcagattggagactctttgatcctgcgtcgccgctcgtgcgattccaattcaagcgactccttcgatcgtcgtcgtcgtggtggtgaggcccgcagtccaccgtaaaaatgcatgttcctgtttaatcatctactaatcttcttagccctagtcgtcatggaggttgatttatctctcggtgaggacgctgctccggttgaagatcgtgatgtcgtcggatatgaggatgttgatttcaacacacagtctcgtaccatggaatgtgtagatgcagggattcatgcaactcatgaaggggatcacacagctcaagtaagctcac

SEQ ID NO: 87297 - DNA, 655 bp, Zea Mays
agaatgtctatcttctcgaaggccatgggtgcgggggaagggctaggtcaggcggcatctctggctaagagctagtgctagttagctcgcgaaactcatcggtcgctagagtcgcatcgttgcgacgagcgagattgagcttgtcggacgggccgatattgcgatgacgacaagcaagacgagggcaggaaggagtcggggctaggcagtgtcgcgtctcagtaaggggggaagagagcgatgtctgggacagggtatcgaagcggactagctaggacgacgttgagaaaaatgaacctagacagatatatgcaagaaatggggcaatgagaaggccggaagtaggaggattggacccatcggaccaagagacctagaacgatgttttagttcaccaaaaatttcaaaattttctatacttaacattagatataagaggttttaatgatcgaatgagatcatgacctactttacccctatgggtccgccctgcttaaaaattacgtatgttgtaaacatagaaatattttagaaaatagtttaagaaaataggtagaattgtactatggtaaatctgatagatagaatttaatgttaatatgttagcacttaattcttttacattatatatatactaccgatatttgatatggaa

SEQ ID NO: 87298 - DNA, 830 bp, Zea Mays
ctttctatctgaccatctgtctgggggtgataggcggtgctgaagtctagtttggtgcccatagcttgctgaaggctcatccaaaattttgaggtgaactgtgttcccctatctgacactatcttccgtggaataccatggagtctgactatctctttaagatatatccgggcaagggtggctcctccgaaggtagttttcactgggatgaagtgggctaccttggtaagacggtctattatcacccagatagagtcattccctttttgtgtccagggcagtccggttacaaaatccatgcctgtttcctcccacttccattcgggcactagaaggggttgcaataagcctgcaagcttctgatgctcggccttagttcgttggcaagtgtcgcaccgggccacatactgtgctatctctttcttcattcctctccaccaatatctggttttgaggtctaggtacatcttggtggtccctaggtggatagagtaggctgagttgtgagcttcgtcaagcaggacttctcgtgcctccccttttggtacacacaatttttgaactaaaggactccttcctcatttgtcctaaagtccggaagtggttccttgcgagccttttccataagacctgctgtctcagtgtccaggcgttgagccttgcatatgaggtcttctagcattggcttgacttctaggctgccattgtctcccaaacatgcattcagctgagctaattctttcttccaatcttctaagaagttggttcctttcttcccgaaaggttttcggctgagggcgtctgctaccacgttggccttcccgaggtgg

SEQ ID NO: 87299 - DNA, 1176 bp, Zea Mays
gccccgctgatcatccattccactcaccactcaccttgtgtccgtacgtcccttcttctccctcagtgaaagacagaaagggtgggcatggactgcagtgcatctttggaagaagggtgttttttgcacagatgattattagctacctcttgcccagggaagaagcagctgcagctagcagcatcattctctttccctcaactttcaccagacccctactccatttgcaacaggaattcattattgatgcaatggcagatgcattcaataaatggaatcatgctgattttgtgccgccattgccagccagatgctgcctcagacgcacccccaccacgtacactagcatcaaatggggaggcgaggctagctgatggtgcatgtggttacagcagggagcaggggggcatttaccagctggaattagtcgatgcatgtactaccattgttataggacttagctgtggtttcacatgcaaggcacacccctctcttcatgtgatatccttgctttgtgcatgacccactttattttgctctcacattaatttgttactgtcgtgtgtctggtgtgtgtaagtaagccaattaatcgtgttgttccaataaataacatgttttaatcttaagtctatagcagtgaaattcctactgtccacaccaaaaggccggctatatatatctaatattttgatcagacgatgtgatgggagcttaagaagtcaagatacgtaatgaagaggataaaccagagtgcagccaagacaaggcataaggggataaacctaaaccagaaagccactccaaatatatatgtgcacattccaagatctcaagttgttaaaacgggaccatccagtgtcatgactttgggagaaggattaggacaatcaccgcatcgatcgagagagcggcatttcggtcggtgtgtgctttgataccgatctgacagggaaaaggaagcaaagttaggtttatctccatcggctaaggtccaagtgtttgggcgttaacatcagtccgaaaacctgattaccacgcaccagcagttgctgttgtgtgtgaaacatgagttgaatgattgagtgaataatggtgcgcgattttgaccagtaatcgatcataatgtgaaccaactagttgtcagcagggacaggcaacatgtgtacgtcgtcg

SEQ ID NO: 87300 - DNA, 881 bp, Zea Mays
gtgccgacgtaccgaaaaaggtgacccggggcctggatggaggagtggttttatgttaaaatgatctgattaaaagggaagacatcaaggagattatccagcgccccatctggtctcgcttcagccttcgaaggccgaaggtcactattgaaagtgacggcgaagcatgcccgaaggcatttagaaatgtttgcgccttcattggcacaagagatatagtccaagagcacatagcctatagggtgtggccacttgtggagagctgggatatgccgaatccagtgaaaatggcttagttcgatagaagtatacctttagatttagagagaagtttgatgaaccaaatgatgactggttgaaatgcattgaagctaccagcgacgagctactcgggacatgttccaaggccaaagatgatgccttgtccgcagccttcgggggccaggggaagaaaagattgaacatggtatttgatgcaatcggctttgtataccctgattatcactacccactgcgaaggcaagggaagaagagaaaaattgtcgcttcagccaccactgttgtgtcgaagggcaagaaaatgaaggttctgacccaccggccgcgatatattgaaccggtcgtagtgcctgaatttggcgaagggacctcttcaactgtcgaagcaaaacaagctgcttccatcgtgctgagcgctgaatagtctattgtaattacgaaggtgcctacagtcaggccagccgaagctaaggatgatacggtcgaagagccaaaggtggaagaaacagtaaagatgccagaaattctgagtccaccggcagaggcaaatttgctaaagatgtaaaaaggtcctgccgcaactcgcaagaggaggaggatgg

SEQ ID NO: 87301 - DNA, 812 bp, Zea Mays
cgcaggggaacccatgatctaatctacgccgcctcttactcgatcgatggctcctatcgatccgagccgaaaacgttccccgagcccttcatcacgcgatctgtggctggaattaaatcccgaaccggtatgctgtgtaagccgccagatcgacgatctatggacgatcacacgtgacgcgcccagggccatccattcaaggatctagggcccagatcgaaccacagagaggtgcgtgtatcttctaatcataaacgttcatccactaatcaaaggctgatgctattcttctcaaaccagaacactctcgcggtggcgcgaccctgtaccgcggccgaggctcgctagagcctgccgaaactgcgccacggtggacggatcccaacgaaattccgtgaaaatgaattgaagggcacgccaaacttagtcataggcatattaccgtgagtggagcgatgcaaggccctgaccacgatggccattggcttcgcgccggaggggagcaccacgagcaattgccacaggttcacgtccactggagcacgattataaccatcaacacgttccacaaaagattgtgaagctccctgacccgaccacaagccccgatgagggcttatgcgcgtatccccattcgatctccctcctacatttcctcttgctcggagttcatggtgaggcgcaggtattcacggccagccggccaggacttcgggttcaagggggagcaagggcttgtatttatacaccacgacagagaaaccaggcgcaagcagtttggattaggacaagaaatcgtcacatgcgatttc

SEQ ID NO: 87302 - DNA, 358 bp, Zea Mays
cgcggtcggtgggtcagaaccttcattttcttgcccttcggcacagcagtggtgaccgaagcggcagtttttctcttcttcccttgccttcacaatgggtagtgataatcagggtatacgaagccaattgcatcaaacactctgttcaatcttttcttgccccaacccccaaaggctgcggacaaggcatcatctttggccttcgaatatgtcccaagcagctcgttgctggtagcttcaatgcatttcaaccagtcatcgtttggtttgtcaaacttttctctgaatctgaaggtatatttcaatcgaaccaggccaccttcactggattcagcagtagtttcctttggcatttccc

SEQ ID NO: 87303 - DNA, 833 bp, Zea Mays
ggaagttggggatcaacgatagttgattccataattatcatgttatgcatgcatcatatttaagaatatactaataaatcttcccctcttatggagacatggtgcgtacaagtaaaacagcacgcaaatctactggacctcttggcgtgcctcgtcatcagctagcccccagacatgaaggcagtagtagtggcagcaatgacccaatcgaagacctggaagccaaggtggaacaacttcggtcagagctacgtcatcggaatagggcatgggcgcaggacaaccaacgtatagctgaattgtcaactgatgtcagccgcttgcagtatgagatatctgaaacgggattcggccattgattaggccgtcaactcacgttcaatcgcttgggaccacgaagcaaaagctcaagcccgtgtggcagagcttagtgcagccctcgacagcctgcaagtgtactataatactttacatgaggaagtacatgtactgtatgttcgactgcacccggacgtgccttctgacgctactgcaataggagccggaccatcggggatagcaagtgaaggacctgatggggagttggacctttttaggccccctccttccatgaaccttgctgacgaacggtctcctgcagcaggaaatgaagtaacaaaggatgacaaagactagaatagtatagtttagatattatacttatgtaaaataagtaatgaagtcaagttgtacgctggagtctgtataattattacattttggtaatgtaatatgatggtgtatgctggcatgttatatttttcccaaatgtttctttgcctcagatgccatca

SEQ ID NO: 87304 - DNA, 1425 bp, Zea Mays
gatcaatgtagaactctacttctctttctggcggcattcctggaaattcttttgggaatacatccatgaatttttctaccacagatatgttttcggctactaggttaaacaccattggatcttgggtgggtggctgagcctgacatgaaattgactttccttggtggtcagtgagaagaactgttttatctgcgcaacttatgatgccattgtgcttggttaaccaatccattcctaagatcacatcaattccttgggatggcaagacggctaagtctgccaagaacactaccccacttaaaagaatcctggcttgggagcatttgagatggcatagaagatctgaccctggggttcgggtaaccaagggaatttctaaatgtgcagtgggaatgccatgcttttccacaaaactagtggctatgaatgaatgagatgctcctggatcaaaaagtatagtagcgggagtaaattcaactaggaactcaccgagcacgactcccggggcttgctgagcctcttgagcgtcgacgtggtttactagttccctgccatgatactggctcttgctctgttggctattggaggcggttgctggggcattcttggggccattcaccgagttggagtaagtcgacacggatgccttcaactgggggcaattattcttgtagtgactagggtctccgcagtgccaataggcatttgctgggggttggttgcttgcaacggagggagcctggagggaactttgcccctactgactgaaatgtgacgaagtgggtccagctggcttgttgaagcttggtcccttgggtggaaacccaaaggatcgaattctttggtgcctgtcctgctgctgagctcggaggacttggaatttcctcttgaggtgacccttttcttcttcccttgccctttatacttgtatggccttgtttgagaggtgtgagaagctaaggaaatcttggttggcaaggatagtcttgagttctggtcttagccccttcaagaaacgggccatcttcttggcttctgtgctgacatcgtcaggtgcataacgagccaattctgtgaatttgtgcacgtactcacggatagatcttcctccttgagttaattcccaaaattcatcttccttgagctgaacgatcccttggggcacatgatgttctcggaaggcggcttcaaattctgcccaggtagcatctctgacggcaacgctgaaggtatcccaccaggatagggccatcccagaaagttgatgagcagccagatgaatacgctggttctcagggcatccgatggcttctaacttcctttttattgtgcgcagccagtcatcagcgtcgagcggattgctggatccagcgaatgtgggaggcttgagccttagaaaatctcccatcctgtcctaaggccttc

SEQ ID NO: 87305 - DNA, 496 bp, Zea Mays
acggcattggctgctctccgacgagcgcaccaccgcgtcggggccctgtgccgctgcgccgaccgtctggggaggaagacgccctctgggccgtccgttgtgtaatgagcgacttagattagatctagccgtgggtccgacatgaaccattgatcacagatcatggggctcagatagcacgggctctttaaccacgatgacctgatctgagccgtccggatcagatcgtgcggccctaatttctccataccccttcggccaacctttttgctaaagagtccctgtagtttatagaaatcaacccgccatccatgtgtcactattcactgtgtcttggcggtcttgcgagttagccccctgcacatttcggtaattgaggcccagtccagtaacgtgttaaaatgaataaatgaattagaaaatgtatttttaatacaaaaataaactctagaacttgtaaaactcatagaaattccatttttggtccaaattgagc

SEQ ID NO: 87306 - DNA, 1199 bp, Zea Mays
tctcacatcaagagcccaaacttgtctaaatctttgtgtctcctgtttgatttactttcagttctcgatctcgtaggctaccctgttaaatcactacaaaacaatcctcgatagttggtgcactaggaaggggatttcacgctgatcattgaagatttgctgatagccatggcttcgcacaaggagaggaaatcttcttcggcaccttcaacttaactgacgatgcatccaagaatctcaggcatctacctgacacctcggtgacatcaaaatttctctttgacacattccactttgtcagcgacacgcttgggcagctctggctagtgcatgattcctaagaaacatcaagatcaggagcttcgaattgaatagatccaatctatgctttgatctggcttcctcgaggtctcagtttgtgatgattcaaacagacacaacaacttagactcaaacttcgattactcgaggtctcattttgtgatcatagaaaactctaggcgatgggagaatcttccctctaaggagaaaggtgacaacaatggccccacgacaaggagggttcaggaggaactatgacagagtggccgagatgcccacaaccaaattcaaatgatcgacttttaacgccatcaagtctacaccaccccgacacaaaaacactatgacagccaagctactactacacaagattactccactactttcataggacaatgtggaagctcacaacgacctgtggatgattcacaacatggagtatgcagcggttgatgtagatgctacaccggctttggataacaccgaggcatccgatgattcaaactagaaggaaaggtctagagatacctcttcccatccccacagataaggaatttgagacatctctcttcattcctgccgagatggatcacaagatttttcaccttgactacatcaagatgaaactcggtagtcgtctctgtctaataggactcaacaacgaaaggcacaagttgagcaataaaataagccccaagagaaaatcatgaccaactttgaagatggtggtggcattgggaataaaaataaaactagaagaggagggagaagaaggcatcaattagatgccaagatggtgagcaaaaccaaatattaacaaagatatgtctcatataaattgctacaaatgtggataaattggtcattttgcctctaag

SEQ ID NO: 87307 - DNA, 528 bp, Zea Mays
cgtgcctcgaatcatccactagaactccccaatttgggatttcccccaaatcactcaagaacatcgagcggtgtgacctcgccatggctagctcacctcaggtctgctcataccctctgctcttttgtttcaacgtccttgtgtgcccctgatgctccccgaccccgccaattaagctagggcccttagatcaccgggaacgcattggacaccgtggacagagcaggttagagcgccgttagtgaaattagttgaggggaaacgcttgttagggcttgaattaggtctgcgccgaagtagagcaccagtcgttgcgtgattcggccggtgtaggctcactggagctcggccctgtgctgttcacggtcgtggacgtcgggctacgaagaaatagaagcgcgggggtgtttttgcaaatgtcagtgatacatcagaatagtgccacgacttccttttcggttattcaaaccgtgaagggcatttatgcaaaaccagcagcgcgggcgcgctttcgccagtgaatgggcc

SEQ ID NO: 87308 - DNA, 731 bp, Zea Mays
cgagaaaaagtgccataggaggtttgaaattcgaattgaggcacgaaatgacatggaattgagcagatacttcacgaataggtttatataggtgaatatgagtgaagtgtgtgtttggtttgaatttaggcgaataaaatgagatttgggcactcggctcggaaacgatcgctcgaaacggggaattgagtgaaattgaagcctggaatatcggattggtgtgaaatttggcaaatatgttactggaggtgttgtgaaggtgcctgaaaattttgggttcaattggagcatttttggctggtttgggcatttcaccgaacacgtggtgtgcgaggatttagggttttagggaaatgactatttgaggtgagaaaaccctcccgaaggagctaggaacctgcaggaatgttcaaggcacacagagacacacataccacaacttggtttcacaagaattcacagagatttggaattggcacacaggggtggtgcactgcctcattgtcagagaaatagagagatagagatgacagagggagaggagagctgctcaccgagcgagggagaagggacgagcgcaggcacagggttgccggaggacagatcgccggagaggagggatgatcgccggcgagggggagcaatcgcagagaacagagagcacagagggagaaaagagcctctagctcggtctcgggctggaggtcgttttttaaaacgctatatgggcg

SEQ ID NO: 87309 - DNA, 687 bp, Zea Mays
atggcatgacaagccgtgttgatcgcttccgcccaaaatcgatccaattattgtattcttcaagcatagccctcgccatattagttagagtttgattctctctctccctaaataggagtaacttttcaacttcatctgagaaaagtgggggcaaaatcacaattagaaatcaaagtgggggcaagaacacaataaccccttgcaaaaaaggtccttatacatctttctaacctatcttgctctccaaacatctctactcttataacggtcatgagtcatcatgtggcgtggaccgttatcttgtaaatgggctgtgagaaaacatcgaagcccaacacgacacgaagtcgcatgcagcgctcatccaagtccaacacgacactaagttgcatgctgcgctacttgatagtaccatatcgctagctatagaaaaagttaggtctctttttcaactcatatgtttttcagcctttcgactaagataaagtgcggtatttacagtttaatatctgatatatagactatacgtgtactttaactttaaatttattttttgaggggccactttaattttaaatttattttttgtgtggtaaatatgattaataatgtgccatcgtaacgcacagtaatgtactagtacctaagaaattggcatctcgtcccaccatattcttcaaaccaaac

SEQ ID NO: 87310 - DNA, 549 bp, Zea Mays
tcgacttcagcctccgaaacatagaaccagtagtcccaccagttgccccacttatttcgggcacaagggaccagctccacaacctccatcgaagtcttcccggacttcggcgtgaaagtgcacgatccgaattgcgcaattacgtcaccaatccgtcttttctgccagtgtaaacagtagtgcttggcgaagacctccaccgaaggctgaccgccatacgacgttgttgcccagacatacttcgccaacgccaccatggcgttcggtgtcagctgatgaacttggaccccaaacttctgcagcacctccgacacgaaacgatgcgcaggcaggcgaagtccggcaacaaaaaatgcctcaaacacaaccagttcaccctcgggctcaggaatctcctctgcccccggcacacgcccgaccccaccgccaaaataccccaactgttgcatatcctgcacgcggcctgacgacatccacgaaacaccaaattccaccgtatcacccgggtgcaattccgccgctgcaccgcccgagagaccctcggaaggc

SEQ ID NO: 87311 - DNA, 806 bp, Zea Mays
cgccatcagcggcgacgccgtcccactggaatcctcgtcgtcagcgtacgtggaccctggccgcttcgagcggttggaccgcgcgtacgacagaccccttaccttggaagatcagcaagacgagaggaacacatgggagcagacagagaggcgagaggccgcgatggagagcgggcccgatgaggccttgacgactgtggccgacttgttatacatcaacggcggaggaggggcggattagaggagacatgagagggagcgattgctacgcggagggaagcatcgcgtggagaggcagaaccaggaatggaatcgcagacatggaatgagaatgaaaatgacatgctgctcgaacctttttcataatagtagagatatccaatttttaagtctcacattcatggctgcaacgtccatgatactccgactgatccccgggccagacgagcccgtggcaaaaggagatgtattgaaatctccgcaatctggtggttagagctactgtacaacaaaccgaggtcgatcggcgacaacacaccggctcggagagccgtggcacacacacggcctcgtcctagagaaggggtgtaggcctcccagtctacttcgacgcacattgacataaagcatcgcatcggaggcattcgcgacacctggcacatcctcgacaaccggcgtcaggaacaagaagagatcgagcggccacgcgaaaaagaaggcgtgcgcgcagccctagcccactgtgcatcctaaccccacgcaccgtcatcctccacagttcctccgtggccattgcttgccactcc

SEQ ID NO: 87312 - DNA, 536 bp, Zea Mays
gggggattttttgaaggaaatgaatctcgtggatttttcttccttggaatgaagtcgaaggacctcttcaaatgcgagcatatatatcttttttttgtggaaacatgaacgacgtcatgcaaatgattttcttgaagcattgctgtcattccagttctataagatttgaagtgtttctgtacaattacaatgcttttcatgaccccatttggttttgctttctgttttcaaacaactctgagatttggctcatgagaattgtatatgttcaattatcagtgcatcttggtgtgagtgacattaggcaacggaattttgttatgaaagactgaactgtacaagaaattgctatcataaggaaagcgaattaaggaattttggttgatgctcgaaatatgtcaattattcgcactgtgctagtgattatgtacagaatcagggaatgtctcgcatccaattagggagtgggttggttgggttggactgtgttatactgtctttggtggatcatgtaaaatatgtgatgcgatattgta

SEQ ID NO: 87313 - DNA, 493 bp, Zea Mays
ctttcaatactatgaacgttcatgtcgttcgcttcttcgagatgctcctcattatcgagcctatagcgaagttgctagaaaagaagcccaaaacacgagcatcaagctcacagggtatatgtctgctggtgttttgggaggctccaacgccttccgagtgttcgtcgtcagctcccatccggagcttggggaagtgaacgtcgagaacgtgtaaggcccctacctggtgcgacaattgtcggtgttttgaaccagcttgtatgtgcacgctctatggtttggatggtgtgctcggtgggtgtaagatttatactggttcgggaagaatgtcccaccatctggtcttcggttgctcgcactaccgacaccttatcgctcaatcctcgtagtaggggttacaagagggcgagagaggtaggagctcccaagtctcttatgcgtggctagacctaaagactgtgggagcggtgctctctattaagccttggacatc

SEQ ID NO: 87314 - DNA, 1473 bp, Zea Mays
ttccagagtagtgaagttcagccttccctgcttgacttgcactttctgcttcttgcccttgcctggagctgcgatgggtcctagtattggttgatttcgtgatcaatctttggcataatggtcggtattgccacaagtgtaacacttgtttccatttccctgctgatactgttgcggctgttgctgacgctggttgttcctttgagcggggctggaaggcggttgggtgcttgcggctactgaggcaaccttatcacccattgtcctgattgcttctgacgtcccctgctctaattgtttgaaatgatctggaaccactgaggttgtgatgaagatccggttattggtgcctttcttttctttactgcccggtgagctatggtgcagtcctcttgagagatgacaggttgaccagctcattgtagctatctgcctagacagtattgagacattcttggagcttcgtgctgaggcctcttcagaatctatccttcttctcaccggtgtctgcatggtaaccagtgtactagcatagatcattgaaggcttgtgcatactgtagcactgtgcgggttccttgagtcaaagccaggaattcattcaacttgctgtccatgatgcctgtcgggatgtgatgtctcctgaatgctgccttgaactcgtcccatgtcacaacatggtcaactggttgcatggcaaggaagtggtccaaccatgtcctagcgatccatggagctatcgggcggcgaaccgagacttggctgcgttagggcaagctccagtaagaaggtggaacttggactccactacttagagcccaacgtctgcatcaagcgaatcttcgaccctggtgaatagtagtgtctgggtgctgagaaactcctagtaggcggcagctgcctgaggacgttgatgctgtccaccaccacagtgctgtggctagggctgacactgcaccggctgtcatagaatctcattctacttagccatttgtgatagaactagagtgcccgatctttcggtgaggtggacaattttgatttgctggaggaggtgactctcgtgatccaactatgaacgaacatgtcatggcgccttagcaatcatagaaccaagtccaaatggttattgaccttgctggtggcaaaatcaacctgaacacgaagtactattcctgcgagcaatcgaagaaacaagcatgaacaagatgtaggtaaaactgaatatcaatcactcacgagttggggttcactaggctgtccataggtggtcgttgagcacaaccgccatacaggaagtttgcacgatggctaaaactatcaaagaaaaccaaactctaggagggtgcgcaacccctggctaaatagagaggaggaggtgggcgcctagtctccccacaaggcaggaaattaggcgcgcaattagccaatcaatctccttcccacaaggcagggaataggcacccaattagcc

SEQ ID NO: 87315 - DNA, 387 bp, Zea Mays
gcctcatgatcatgtgagcatggaggcataggaggcggaggaggaaccccaaaatcatcatcatcatcatcatcatcatcagctgttgtaccctgagtgtcaagctgtcgaagagctgcatcctcggcctgagagtcaaacacagaagcagaagctggcacaggagtctcaggcgcaggacggtaggatccaaaaacaaggcgagaggcctcaagggtgttctgaaatcgagggggctgaatcagctgcgcaaagatgtggcacaagtagtgagcataaggcaactgccgacgagcacgaatcccatccagaacggtgtcctcgatctcacaaatcaggaagtccacaatgtcaaactcagagtgggagaccagggcaccaaggagc

SEQ ID NO: 87316 - DNA, 1622 bp, Zea Mays
agatttgcaacagttttgggccaattctgacccagatggcccaacgacacaggaaaagggtcgcgcgcccgcgcgcgcccgcatgctctggctactttgcatagaggccctcgtcttttcagctaaacagaagtaggttcatttactattgcactaagtcgttgacacattgcagaaataccctcgtacttctatttcttctccacaaacgtcccttgccacggtgcgctcgtcgttcatcacagacgccgcactggctggccatgaccggcgatggtcgccttgtctagctacaggggaggcataaccgacccaaggttaccctagaacatgctctaatcggactaattcgggccaggatgtgcctgaccacggtgaccgcgggtacagaactcagatcgaggtgttccggttgattaggtgaagtcaagctccaagagctgggcaagtaatgatcacaagcacatgtgggtgctgaaacacgaacaacgagggcgaggacggacctggaatcatctggccgcgagcaggtgattcacggcggcgcagtcgactgaattggggaaaaaacggcgttgcggtggctctgggtgaaattgggggcggggattgaggctacacggccgtaagaaactatgctttcactgtgcgtaaacgatttgggcaaaggtggagagggcagtgcgaatttgactcgatttggttcactggtatgtgtgtgatgaccgagcctcgccgcgaaccatgggctatttatagccgcggaggtccggcgatcacctcacggcacaaataccatcacaagcgcatgctaagcacgtagagaattggtacagtgaggaagaatcacggtgccgaggacaccgcggcagaaaggattaacgcgatggccgccggtgaatcactccggccgagcacaggagatggcgccacgtacgattcacccttttcccggcgttatccgtctataccgtgcacgaatccgggcggcgatcaacggcggcgagctgagctggcagtctgatccatcggggcactgtaccatggcacatcttcgttagtcgcctgaaccgtcccccttccaccgactagctctcatgattcttgtgaataactgggcaaaattccttaacaaggtttgttcttgatttaacagtcttcaatccttatacaggacatttgggtcaaaactgaggggattcgaagatatggcgcatcaaacatgacctcacctcactggaaccttgttttaaccttaggttcagtttcagttttctgaaactgttctgacagagcaacttgtaacaggtttttctctaatttttgtgtcataactcaagagaatatctgcatcaaagttgttctcctataataggttaacaaaattaatgtggtgacctagggcaaaaaccctagaattttaaagatacaaggctccaaagttgagccaatatcactgaaaatcagacttagactattaaggacttaagaggtgagttttgcaaataagcccaaaacttagggtttaacttgcaaattcacatatctgtgacccaaatgacctaagatacttatttaacttggtttttgcactttagtccaaaagtggactaattttgcac

SEQ ID NO: 87317 - DNA, 398 bp, Zea Mays
gggatcacaacataccttggtctaggcataatatatcaattgcatcacaaaaagataccaattgaatagatgacataatacaacttatgacttgtgaaaacaatgcatgcctcaagatatataacattttaaaagcaacctaggcacacttcacacatgatgatcattgcaacacatataccaattgataaacgacaagatcatgcatataaagcacaatgtctaagcacaccatgattaagaagtattttcttaggtacaccaaagtaaacaacattttaaagcataaagcacctaagccacgatactaccaattgaaagacaagaacatagctatgatcacaatcaatagaacttcaagatattcaatgaaattgcatagttccattctccatacc

SEQ ID NO: 87318 - DNA, 611 bp, Zea Mays
atggcgagcatcagtgaagggtggccacgggcgcaataggcggcttcagcacgacagaaattcccaggacgacgacaggagcgatggggccggggtgtgagcaagatgtcgcatggtgtggcacgtagtactgccgtcgccgatgagcatgatgagcgccatcgtcacgagtgctgtggcggagaagagagacgaaacgtcatatgtcattgctatcggctaggagaagtgtttcctcaggagtgacgagctacaaggctgtcccgcgcttgcgacaggtccttggcgagcattttattgtagctccattcgaagttgagtgtgtaccgtttcgccagagctaggccagttgggaacgagatgaagatggttggtggccttctgatgcaaagcatggacgactgttgttcgaggcatttggttcattagctcatctgtttcttgtagctggatcgaaattaactatccctcgtgcatgacgcaagacgatactggacaccgctcaactcatgcatgctacatcatgaatcctcgcattgcctctgtttgataattgttgagtcatgttttcttctctatcagattattgtgcaacagccagagacatcttt

SEQ ID NO: 87319 - DNA, 743 bp, Zea Mays
gcgggctatagattggaacccagatctggtcccttgaggtctccagccgagtggcggaatgcacccacctaatccttagaacaaggggttgcctagggttttcttgtggagatgcaagaacacatagatacataaagtggttcaggccgccagagcgtaataccctacatccattgtgagttggattgctgagagcgtggatggagatgagtctgagtctcggagagcttgccccttgtatcatatgtgacatcccttttatagtccaagggtgtcttgttacaagggttctgagtagccccgacaggtaggccctaacaaactagtatcaaatatatatactacatgaagtagtaaaggctacgacggaaagagatcttctcatcgcccgtcgttctgattttctgaccaggcgtgtcttccaccccttttgcgagcttgtgcctgctgcaaagtacacctggtatgttgacgtatgtaggggtcagtcctactgacgtgtggtggatttaatgcggtggacgtgatagtgctgcccgagccaacgactgctgatgatggtgccacccatgcgcatggcacaaagacacaactgcctgcctcagttaccgatgcgggcggtcattcgtgcatgcaatgtctgacaaaagcctgcacatgccctatgtgaggtagggcacgcctccgccgcttgcattaaatgcgggcgatcaacttacttctagtcgaaggctcctatcacg

SEQ ID NO: 87320 - DNA, 656 bp, Zea Mays
tgtcttgcctggcctaccgatcccaatacaaaccctagaatcactcctccctaatgggtccctctcaggaggcgagatccaactaccgttggcaaacacgcggaccgttcggccaccaggtgtggaccgtctggccaccaggaacggaccgtccagccaccaggcatgggtcatctagcgtgatgcagggaaacccgctcctcctgctaggtcgtggaccattcggcccttagccacggaccatctggacctccacagaggtcgccaaacgaaacaactcccagtgtttggtgcctagatctgcgccaacacactttttggcgactccgctggggaacctaagattgcatctatcagatcagccccatatggtcggtccaagggataactccaatctctcaccaagcaatatcatcaaaccaactacggatggcctatcggtatgggtcggtccaagggataactccgatccctccccaagcaatatcatcaaatcaactatggatggcctatcagttgaagaatatcagaggctggaagaagctaagaacaagatgcaggcagaagttgacgagttgttctttgctgatttcaaggtcgacctaaaccagaagctcgtccgagagagggaatacaacctagcgaatcttcgaccc

SEQ ID NO: 87321 - DNA, 380 bp, Zea Mays
atcagatcagctcgtgttgttgcaggagaaagcgcagaaaagacctgcaccagcatgaccgacctgcatgcacattacaactccacacgcacgttgctgaaacaagcagctaacttttgtttccttgataccactctgacttgcattgtgttgccttgcctctacaattttcttgtcagcatgggcggtagacgaatggatggatggatacaatacaactgaggggtgggagagcttgaagagcaggtcaagaagatgcggtgagctaataagaactagtcccttgcttgcttgtttaatttcccttctctgcatgcaaatgcttcaagaaatctagaactagcatggtacgtactacttccttgttccttccacaggcc

SEQ ID NO: 87322 - DNA, 425 bp, Zea Mays
tatatatagccccacccagtcaatatagttgttgggtttttgttgaccttaggctcatcctgatagtccaaccgccagcaccgtcaatggtcgactgcaagcaacaatcatcagctttgtctagtcccatgtgtcgatcgcatggacctagcggtctagcaatgacccgctctattgactcctctacgccaccaacgattgcacatagtagggactccaccttgttggccttaacctggcagttcaaccgatggatgtcacaatcccattatgagcatcgtgaatagtccaagcgcttcatctgacagcctccacaccatcaaccattggaccaaatgggctaccttacggtcccacttccactaggggcggttcgattgtgcggtaggtcaaaggctgccctagctcctttacgccatctttgt

SEQ ID NO: 87323 - DNA, 784 bp, Zea Mays
tccatgcaaattgcttaattgaactatttatctagataaataaaatcaattaagaatataagtggtgcatcccatgttgagttgttttgttatgcatataaacttgagtggaagttcatagccaattttgaatcgaatttgaaacttagaagttgaaaagaaaggaaaactaataaaaaataaaaagatacatcacctacccgctcgcaggccacattccttcagtccaggtcgctacccttcctccttcaccgaactgggctaaaataacactgctcgcaggccacattcattcatttgttgatcgatgtctcactggcttgcgggccccacccgtcagcctgccagccgtcttcttccccgattctgcgcggagtatgttacgatctaggaatcggctgttacgatcctatacatccccttgtgcctataaaactatgcacctctccatgcccgccaccacctacgtatccaccgtcgagttcgccaccaccacttggtttgtatgccaccatctccatggagagtgtcgacgccgaagtagagagtggaacatgtcgccacagtcgaacccgcggttcaccatcgccaggtcctcgaggaattaccatggagcgtcgtcggggcatgtgggagctggcgcaagtgttggcgtgcacaggtagcagtggggtgaccgggaattgctcgctggagtcctccttcgccgcctgaaccatcgcttgccatgggcgaaggccaccgactcatcgtttggcggtaagtatgtcttgattgagttcgc

SEQ ID NO: 87324 - DNA, 304 bp, Zea Mays
tctgcactcacccccatggctacgcttggacgcttggtgaccacgacgtggatcgggatggcaagggcggtttctgggctccatctatttatggctgggcaagcatcaaggtggagtggtggcggagtcagatccgagattcccggcggatttagctgcaacaaccgagcagggagatggttcaggcgagattcttgcgcgggatttgctcctggtttgttgagctttgccatcgaacgaccgagctccagcggatgtggggaaagttgttgacgccgctaggggatacgctgcgcaatctccg

SEQ ID NO: 87325 - DNA, 329 bp, Zea Mays
ggggtatgccagatctagtttccgtcgtttatcaccccatcaacggccacgacgcgctcatccgctcttttaatcccagccatccagcgatggatggacgacccgagactcctcttcctccttcgactcggccacgacgatgcacaccctttccacggcggcgccatcgccgaagagttccaaacctgcaacccgcgccttgaatttcaatcccgacagtgctacacgtagtggagacttaggtgcgtctagggagtaggttcataccagagcttaggggttgtgcagtgccacccacaggttgcagcagaaaccgaccaacggcgaga

SEQ ID NO: 87326 - DNA, 633 bp, Zea Mays
catcactaagcttctagcaaatagattggctagtcaccatgacaatatggtatctcagaatcaaagtgcttttattaagggcagatccatacttgacaattttatgcttgttcagcagacaaccattatgctccaccagaaaaattgtgcaaggatccttcttaaattggatatcaccaaagcgtttgattctgtctcatggccgtttctcctcgaagttatgaagcatttgggctttgggcaaatttggtgtgatattattagcactcttcttgcatctgcttcttctcaagttctacttaatggtgcaccagggcataaaattctccatagaaagggtcttcggcagggagatcctctctccccaatgctattcatcctggttatggatgttttgtgctatttaattaaaaaggcagctgttgtgggattgttggaaccattatcaggaaattcagaccactcccgtatatctctttatgctgatgatgtggtaatcttccttcacccggtgacatctgatgttgtgaccaccatggatattcttaggatttttggagaggtttttgggcttaaaacaaatatggcaaagagcagcatcttccccatccggtgtgctgctaaaaatctgga

SEQ ID NO: 87327 - DNA, 640 bp, Zea Mays
caggtaccttgggtgccctggtatcattaccatgacagtcacccacaaactttctagatgatcaccacactcctaatcgccatcgaaccatctggtgatgccaatcaccaagagtaacaagcactagactcttacttgatcatgacaagcttaatgtaagtggtggctgcacacaagtctctctctctacgcactaatgaggttgctaatcacaagattatcacttctctaatcttctcactatgcaaatagtcttcctttctctcaagaggttgtttcagctattggaagggtcaaaacacctcaagaagctaaaatggagggtataaatagccctaaagactcaaacaagccattacaactccactctacattcttgggggcatcaaacatgtctggtgccaactttccaactaaaccggatatgtcggtacctctccaacgactagtttctcaaattagtcgttgttgtgactcacattttgtgccaacactggtgctacatcgaacatgttcggtgagtacaactcaaaacgacatagtaaataagctctctaaatttcgaatttgttggcacaatcagtgacacacttgacatgttaggtgagtacttggttaatttgcataggttacatgctct

SEQ ID NO: 87328 - DNA, 442 bp, Zea Mays
tgtgctacgtgagggaggcaaagcaatagccctaaattggcagattagtgaggaggtgggtgagtgggtggcaaatccaataatataaccggacgactatagaagagaagaggataagataggggtaaggcatgtaaggatgggaaatatgagaaggaagaagagcaatgatcattagatcccaatctctaaggatgtgaaatgtgagaaggaagaagaccagtgatcattagattccaatctctaacattcatatgggctgtcttaaaagctaattatagataatcatgtctcattgatccaagcttgccctactcattcagaaaattggcgatagggggtgcttcagccttggctgccttctaatatgaatcagttcgtagtgtctggtacaccttgaggattgaatatttgataagtattgtacaaaaggtgctaaaat

SEQ ID NO: 87329 - DNA, 493 bp, Zea Mays
aagcggtctgggcgctaaacacgactgagtgtagggcgactgggttcacccccttccgccttctatatggatcggaggccatgaccccgcaagaaataaaacatgggtccccacggacagtctcgtcagctgtccccgacgtggacgaacccacttcgaaggatctcatcgatggagaccgcgtcttcgccctacaggctctaaataaataccaagcccaaacaaaagcatgacgtgaccacgtagtcatcccgagggaattcagcgaaggggacctcgtactcgtccgaacagctcggacagagtccaggggcaagctggagcccaagtgggagggccctttcatcgtcaagacgaaggcatcccccagcgcatacaggctcgcaacgccatccggcgaggacttggaacattcctggaacattgataatctccgcaaattttttgtttgactcatcagggccagctcgcccttgtaattcgcaaaaacaat

SEQ ID NO: 87330 - DNA, 566 bp, Zea Mays
cgtcgacaaggctataaacaatggtactgcaccgtatgttttccgaattaacggtgtggttcatcatcgaattggaacctttctacctcgtcaaggttcacagcccaagtttgcttagctttacatacatgatcctgatgctaagctccaaagtaggctccacgtttttgagagcgatgatgttggtgctgcttgcccagactccgctattacacagtccttaatggagatgcttgatgcacatagtgagcttgtaaaggcattttgttgtgctcgtgaacgcatagaacaaacacacaatagcgagataacgttacgtttattgggctacaatactagacacgatgtccaatttaatttgccttcgagcggtgagatagctgccataattgttggtgattactcatctgctcagtgcatgtatgatgtccttgttcatgctaagaaccatggtctcaaacgtgtttcacatttgcatctgtgtaatatggctctacaatacccactccttttccccaatggtgaacatggattccatcttggcattaggtatgcggatgatgatg

SEQ ID NO: 87331 - DNA, 327 bp, Zea Mays
aacacattgggtccgtagtgctgctagttcagcacctgttagttgccaacccacggcgtcgatcgcctgaaacaggcagcgatgggtggctgtacctgtggctgtgtggcagtgtgtaagcgcaactggttgcaaaagtacgcacgcaatgtatttgcacggatccatgaattgcagatggctggagagtggagagggaccggaggctgctcactagtagtagtacggctgtaagcgactggatttaaacctgaaagtcgtgttggtggctggctggtcacagctgggagtctcttcagacttcgtggtttgcagcgcgtcgtcgtc

SEQ ID NO: 87332 - DNA, 626 bp, Zea Mays
caaattctttcctcaagttctgctctgagcgcggcatcaagcgttaccttactgagtcgtatagccacaaaacaacatggtagagtgttgtaatcagttcatgctcaccatggtgtaaagcttgatgaaggccaaaggggtccctgctagattgtggagggaggccgtgatgacagccgtgttcctcctcaaccacgccccaacaagaagtttggtgggcgcgcacgccatatgaagcgtggcatgctgaaaaaccagtcgtgcacttcctgcgggtgttcggctacgtggctcacgtgaagatcaccaagccgaatgctaggaaacttgatgatcgaagcacgaagatggtgatgattgggtatgaggctggttcgaaggcctatagggtgtatgaccccgtcgcgaaccgagtgcatgtcacccgcgacgcggtgtttgaagaaggcgcaacctaggattggaactcattcgacagtcgcgaccaggaaggctcctgcgatgatggatactaggacacattcattgttgaagagtgggaggagcccactactgcttcaccggcaagccacgccttcactttgtacatgcatgacggaggcgtttcttcattgccgtcgttttct

SEQ ID NO: 87333 - DNA, 634 bp, Zea Mays
caacatgaggcagagaagatggctagaattgatcaaggattacgacttggaagtacactaccacccggggaaagccaatatggtagctgatgccttgagtcagaagtcacaatgcaattgcatgatgatggattctcgcatcaataccctgtgtgatgagttgagcaagatgaagattaaagtaattccttctggtaccttgtctcacatctccattgagccaaccttgcaagaccagataattatggcctagctcagtgacaagggaatgcaaatcatcaaggagaatcttcatcagaggttggaaaagtataagtgtttttgccaagacggaaggggatattgtggtttgaagatagattggtggttcctaagaataaatacctcaagaataaaatcttggatgaggctcatctctccaaattctccatgcatccgggaagcaccaagatgtaccatgatctgaagcccttgtattggtggaccagaatgaagagagaaatagcccattatgtatcggaatgtgacacatgttagaggacaaagacaagccacttaaaatctgttggtgccttgcaacccctatcaataccttcatggaaatgggatgacatcagcatggatttaattgtgg

SEQ ID NO: 87334 - DNA, 997 bp, Zea Mays
attccattaagcaaaacttgcgtgcatgaagtgaccagcagattagagacaaggttgtgccatctagccccaaaaccaaggtgacataacacctcaagaagaaaggcccatgagactgaatcaaaagctttagtaatatcgagcttcaagaacaggctagcaacctttttcccgtggagggatttaataaagtgttgcaccatcatataattatcatgtatggatcgaccactgatgaaagcactttgattcgccgcaaccaacttctggaggtgagaggccaggcggttagctaggatttttgtgaccaacttggcaaaactgtgcataagacttatagtcctatagtcaccagctgcaatagcttctgccttcttaggaatcagcgttagaaaagctgagttcagcaaccacaatttctgtgcattaccttgacgaagggtgattattgctgccattaaatcagccttaattatatgccagcaagcattataaaatcttcccgtgtatccatccgacccaggagctctattagagggcagactggagatcgtggaccgtacctcatcatctgtgataggaaggtccagatcacccaaatcgacatcatttctgtgacacccctctagattgagggtaaaatgtctttgatgtgccattctcaaaaggtttgaataatactcatgcaaaacctcttgtttttgctcatgagaggtgatcacttgctccccattaaccagcttgtgaataagatttattttctttctatagcgggcctgcatgtggaagaaggacgtattggcatctccctccttcaaatatttgatctgggacctaaagcgcgcaaccgtcctctctaaggaagcaagagccaggcaatgttgtttgagatttcttttcaaccacaactcctctgatgataatggcttgttgtcttgagccatctctagcctgtgcaggatctccctagccatggccaactaagatctgacattgc

SEQ ID NO: 87335 - DNA, 351 bp, Zea Mays
tccttacgttcaaaaatagttattgatcatctggaacttttgcatcccagaattctaatcagatttcaactgctatatacatacatgacaaagcgcccatgcatgcatgttgttatatagtaaggcacagcctgctccctcttcgctttcgtgttgtcgtcgtcgtcctactccactctgttgccgccgccggtgtacacaaaccaatgaaaattgagtcccctctcaagttttataagctgctgccgcctgccggccggagaggcagaggaaccatcgcatcaggcattcctgtgggctgggcagccaggccaaacagctgtggaaaacctgcagggtgggctgctgggc

SEQ ID NO: 87336 - DNA, 324 bp, Zea Mays
aaggaacaccactactttccccgctggcaatgtagcgtcggctgttcttccaagttagagggatttcatcctcctcttcctcatcctcatcaacaacgcggacagtacacccattggggtcagctctggccagatcacacccattgggttcaatatcatctaggtcacacccattgggttccacagcagtcgggtactcgggtcacacccattggggtcagcttcagaaaatgcaggcaccgacacttcctcagcagcaagaaaagaaggaccagtatcctgatccaagctagacactcgatgaagacgtctcttcttcttttt

SEQ ID NO: 87337 - DNA, 671 bp, Zea Mays
cgaaacacaaaatgcagctggtggtgttggaaaagaaacagaaactcctccctaaagaaattgaactcagaaacggtaagaacattaatttttcgattagattttgacttttatttatcaaaattaggtggcttattacttgtacgtgatcttgttgcttggagccttggagccaagaaacggtccaccattatgttcaactattgcatggtcttggtgttagaagtaggataggggaagggaagaaagagcaggggaagaaggaagacggaggctgaccgaagtttttcttggtgtgtttcggctgtcctgctgtagctgtaatttatagagacaaaatattgtagaagccgcaacaacagcaggattaaaaccacaacaagccgcagcaaacaagtcgtttggtttagtttttccatactccttctacaaggcaccagagcaaacttatacccacacaccacacacaaaagttacatccacccaaaccctaaacatgggtattggtgtgacgctagtgacgtggacgagttggaacctggatatcatcttagttagtcggcgcatggctcatacttggggattggttgtcttattagggtaaacactcttagggcctaattgaaaacacccagattctaaggaactagttatacaaactaggatgcttc

SEQ ID NO: 87338 - DNA, 438 bp, Zea Mays
catgacttcgcctcattaaaaacctcaccccccgggaggaaaagagtgcgggccagaataaaaattgtctttgcgaattacaagggcgagctggccctgatgagtcaaacaaaaaatttgcggagattgttgatgttccaggaatgctccaagtcttcgccgtttggcgttgcgagcctgtatgcgctgggggaggccttcgtcttgacaatgaaagggccctcccacttgggctccagcttgcccctggactctgttcgagctgtccagacgagtacgaggtccccttcgctgaattcccttgggatgactgcctggtcgcgccatgcctttgtctgggcttggtatttgtccagagcctgtagggcgaagacgtggtctccgtcgatgaggtccttcgaagtcggctcgtctacgtcggggacggccgacgcggtt

SEQ ID NO: 87339 - DNA, 536 bp, Zea Mays
cgaaagggtagctggaaatccaaggatacgtaacacatgttcaaaacaaacacagtgcaaggctgggatgaaacttaaaaaatctacgatgatgctaaagagaatgttattccggtccggattgatctggtaaactatgagcataatcatgaattcttgaagaaagatacagaaaaagggcaattgcaatgcaacaaaacgcatgatcgtgaatatatggagttccttagtgcgatgcaagaaagcaggattccacaacattgcattatggattttgttacagaaatgcatggtggcccagaaaacgttccaataaccgtgcaggacatgagtaacttgtaagtgtattatgcattgacaataattgtattatatattacagaaacaatcgtaatgtgttgagttagatatagtgcataatcattacattttttgacaggaaaaaagcatggcaaagggaaagaaatgcaaatgatgtgtcgaagctattatcttttttttttcattatgcaagaaagataatccacaattttttt

SEQ ID NO: 87340 - DNA, 694 bp, Zea Mays
atttggtggatcaattacttgcatgtgggttagacctagtcgttacacatgaaaaatcatttgggaaattattgtgaaaaatgctaactcacgtgtacaagtgttgaaacacatttgaagttagcaagttcaaaaaagggatgcaaaatggagctagagatggtatttggggggcatcgaactaaagtaatggacaccagactagatggatgccaagtttggtgactagccctagctccacgatgtctgagtcacaccaatctatgggaattggcctaacagtctcggtcgggcagcattggaccaaatggtagcactattcatcgagtaggccccacctatcagtgcatatgcctattttaaaggaggcatcaaaccatggtcattggtacaatcgtggcattggcctagtttgatgcatgttttacttttcgcaaatgcactaaaccatgggagccatttaaagtagtttcaacattcgagtgtcgtgtggaagcaacaggacatcaatcccttagcctatggtctagtaggaccatcgaacgatttgattcccttgactagggcacagtgaggaggcccaatggcttttgcttaaggagtgttataaataggtgttgcttagtttttgaccaattctcttgacactctaacatgatataaaccattgtgagattgggtaaacatatcccac

SEQ ID NO: 87341 - DNA, 753 bp, Zea Mays
ggatgctgttcgtactgtagacgactggaacactgctctctgatgttttgccttccgatgtgtcacgacctgtcaccaagtagaatctgttaaatttcaggcgcctcagccgactgatcactgccgaatttgctagatttagccgtgcgtcagcgtcttcttctgtctcctcctctcgctttttttatgacggcgacggttttactgcggagcggaggaaacgaaacgtgcatgcggcgcgaggggaaagagtggagcgtcacgtacgatgctgtcaagtccaaggcaaggctaggtagggaaggggcccatcgtctgtcgagagcagtcgagctggagaagtggttccggctgcgttggggacggatggcgacggtggccgtccacaggcacagctagagcgggagagggacagctacctcgggttaggttaggcgaatagctaggcgccaagctcgtccatgcctgttggattggatcgtccagccacagacgttcgttttaggcgacaacacagcaggtgggggttttctggttttgtgtgctcgtttgggcttgaggtttaacgacttgccaacttgattgacctatggggttttaatgttcaactgttgggttgttcaactatattttatccgtaacttttttttttatttttatggctaccgtttctatttgtcaagaaacatggtaaaatctcgaaaacaataccctggtccccgattaccgtttgcatcactactcgtactcgag

SEQ ID NO: 87342 - DNA, 495 bp, Zea Mays
aaatttcaggacctatgcacaattagttttgatcggggctgtactgcgggttcattaccctgaacccgaggggttcttacacaaaaattccacaacaaaggggtatctttcactatcgaccgttggattgcagttctacgattaggattagaagtgtaagtctctggatcggcatgcgataccacgcgtaggattcgacttcaacggtgaggattttaaatacacggggtttaactcaactcgcgcgatcaagattggatgatccagattcctctgcgcgaaacgcttttcccccacatctaatctaagtcggtcatcaccagatcaatggccctaactgatcacggcaaaagggtatgatgtcgtctaatctaagccgcacaacgtacgatcgacggcccacatcccatcttcccaacccgtgcccagacgcggtggcgcggttgaactgcgtggcggcgccatggccgggtatggcgatcccgtgccataacg

SEQ ID NO: 87343 - DNA, 294 bp, Zea Mays
gccctcgcctccgatcatccaccattgcgctttacttcgggttttcccccaaattggttttccgcgccgccgtggataactcttctgtggctagcgtcacctgaggtagttccagcccaattactgtttgttctagcttccttagggtgtagtgatactaccgtacatggaaattgaacgatgccgaacctagtcaccgggaacagtttgatcttccctcggtacttgccgtcatcgtgaacaaacgggattctggctcgggctagctcaattaggggatgaactaggttcacc

SEQ ID NO: 87344 - DNA, 487 bp, Zea Mays
aaaataccaaaaacatgtgcgttttgttggctagatgagtgtgaatgtgtgtttagagccaacaagcatggtttaccattggcccgcgagggatcagggagaggtgcatgggaggggtgatgcacgtagaaactcctgcattatagcatcagagattagtaatcaaattagtagacactcatagtggtaagaaaaggaaaagtgaaacattattctcacatttatttgttgggagaaactatttgatctagtcgtttcagtaattccattgaggtcgttctagaaggtacttttatttctctaagatttgattttggagacgttaatggattgatctatgaagatggctactgtgtttacacccactagtcgctacagaatgtcattttggaatgggtgcaaccaaacctataaactttgataatagataccttttagtgttgagtttgaacatacaaaatgatgtgtccatttatctcaaaatgaa

SEQ ID NO: 87345 - DNA, 287 bp, Zea Mays
gcggaagatgagttggagcagagatccaatataggtgtgcatcgatggagagaaagtagctgatcacgatcgtctccttctccatagtttgtcggtgcagcagtcacaactgcacctccacgaagtccaaacatacagaaaagaagcactgtgcaccggtgtgctaccaccgcgcacgtagcgagggtcttgcgcctaggtatgaggaaagcgatgactagggtttgcacgtgtggtgggatcacataaccttggcccctttccatgtgtttatagagcgtgttaat

SEQ ID NO: 87346 - DNA, 464 bp, Zea Mays
tggctagaaatttgtgcaaagtcctgttataacatctagatgccagcaaaaatatgtcttaaggaataaccttctgttaaatggtagttgtagttcaaaccaccccttctgccttaatatttaataattttatccagaaagaactacttacttgttaaaccccaaattttgtgacagaggagtatgcatcagtaagaagcccctgtaatttttccagaatttttgaaaatttattaatataacttgtagttcaaacccaccataaaagcataaaggaaataagaagaagaaaggaaaatgataaacctcgctccaataagtttaactagaaatcttattaaattctcactaagacattaaaaggaaatcagtggaaccccaaaatagacttaccacttagtttaactaagcttgaccctaaattgctaagtataccacaagaatcttttgtagcaagagtaaac

SEQ ID NO: 87347 - DNA, 826 bp, Zea Mays
gttgtcatggccatggcgaccgacgcacacgtgtttggttttgttttcttttccttaaatttggtgtggttgccaagggaaaataggagaagacaaaaaggtatggtctgctgtgatgaaattgacatcttaaatttctgtagttgataaccgcctttcgaggttgattttgtaggtaccaactattaaagtgcttgaagatagcttctcttttttgacttgcttcgacagaacctcaactttccctattacattcatgatataatcctcgatttgtttcttggccatcatactacaccattaattgaattttgtgtttatgcagcaaatattgtcacttcagccctgttaaccagttaccatttattcagtgccacatatttaccttaatttagtttcctcaaataatttctacatatttaattgtgattaagtaataccatgtaaatattggattctttactgatgttgcgctacattattctgatataaaaacaatgtaagcagctttgtgattaagcattgtatgccatgcttcgataagtcgttatcattctttctatcaattcttacataaacaataatggtctatgagaaatattatagtcatttgtcaacctatatttggttctcactgagtttcctacctggtatcactacaatttatttggccagaatggtcatgaagggtgattttgcttgctgtctactactacaagtttacatcttcacattcttcactggtcgtatatgttaagaattgttctactactacttatatattataaatttgaaattagagagtatgtcgcgaggtgaggtcggc

SEQ ID NO: 87348 - DNA, 498 bp, Zea Mays
cgacctagtcgggattataaagccatacagttggaccgacctagccaggattataaagccatatagctggtttccctctcccctcatcccatctttgcagtgcacgtgagctgccggagtcgaaagcgtgagggagagagagtgagtgcgtgaggagcaagccgtcggtacactccgcactgcccggtcctcgtccgatacgcaaggggattcatccgtgatcgtggagtctacgtcaaggtgttctggggcgtcggacgctcggaatctagggcaattcctggccggagttcttgctccaccgcgaattcgccttctaccaaggacccgcttcaccacctcgtcgttgccacatctaaagaaatgataatttgcttctctaaattatcatcacaatcagagaacatatgtgtagcaatttcagctcatgcttaacaagatttaatttgactaccgagcaagattgtcgatgaaacaccactaatacttagattttaa

SEQ ID NO: 87349 - DNA, 533 bp, Zea Mays
ctttaacgttggaaatgaagtatttcattgtcatgcttaattcgttccttttcttgcagggcttaattcttagcaatgtcttgagggcacaaaagaacgccgaagacgaaagttgcacaacagctcccagcaaccttcgctcagaggtaattgagctgagaaatgaaggtttggagaaagataagattttaattttattggtgagcaaggtgaaggaggacgaggcgaaatacaatgcctaggccaaagttcataaagctgaggttgaagaccttcggagacaacttgccgaagccaaagaaagttgtgaggttgcaaaggccagccaaaaaatcagcgaatggtggaatcccaggctagagaaaaatattgaggagcttcgcgaatccaaggaaagatgttttgaaaaatccttggattgcgtgaagaaactaaaaaccagcttttccaaagtgggtgcgtattcttctgaggaaaattttatccgaggcgaccccgagggcgttattgagtggataagcggggaagccgaa

SEQ ID NO: 87350 - DNA, 810 bp, Zea Mays
cacacttctatttcttcacacccagaggtccacgacggggagcggcggagaaccgagctccggcgagcctacaccggccggatcactcaactaccggtgctcccttgcggcagacaccaaattgaacccttaacaaacatttcccctcgcttaattccaccattcgggttcccaaactctctgctcaaggtgtccgtgcaatacaagaacaacaccgaatgttcccggcgatctaataggttctagcttaatcggctgggtcggggagcatcagggacacacaaggatactgaaatgaaagagcagggggcatgagcggacctggagcacgctgatcacagcgagggcacaaggtgcggtgtttcgaactgaattgggggaaatccgaaattgggtctcgctggtgagcaattggaggcacggcttggtggattgggagcttgactaccttacggacccgacgacacactcaatttataggctccgggggcggtggcctgtgaatttggagttggcgcggtggcggccggagagaagagttgcactggcgcaagcgattagtggctttcaccgtggcgggttcaccggtgatcaccggacatgcataacgcgagcgactgcgacgtggtaaatgccgaggcacgtggcgcaaggccgcgaggtggctaactccggtgaacctatccaaagcgaccgtgacatactcgggtacaggggccagagtaaaatagtggccgcagttcaaccgcggcgcgatatttccttacccctcggcattacctaactgagccgagcacgaatcaccgtggc

SEQ ID NO: 87351 - DNA, 644 bp, Zea Mays
gagggtttagggtttagggtgtaaaccctgcgcgcgtctctgcagagagtgagagagagggagaggagaggagagagggagagggagagggagagggaagagagaggagggagagggaagagagaggagaagagagagggaaagggaagagagaggaaagagagtggagggagggagagagagagaagagagaggagggagagggagtgtatatataggaaagagagtggagggagagagagaggagagagagggaaagggaagagagaagaaagagagggagagggagggagggaagagagaggaaagagagggagagagagaggagagagcagcggaaagcatgtttttttggcttccactctctagtataaaatgtagactagattcacttcacttctaaggtgaatctatagtggccccgtacaactttaagacacacaatgcttcaatttcaagacagggaatccatagtgggcccgtacaactttaagtaagtgtgattttgcataaataaaattaataatttcaatacacatgtatcacaagtttgattcgtacagggaccactggatatgcttcttcatttatcctaaggttggaaaggtgctggtgctcgactccttgcacaccgagacttcgac

SEQ ID NO: 87352 - DNA, 676 bp, Zea Mays
agtagaggagaagacccccaacaacaggcccaccaaccacgaaaccagtcgctgttgtggaaggagcggatctcccaactgaccccatggacgactagagaatgttgtatcgtagcttcttaaccagtggcttgcttccccaagacgaaaccgaggcatgtaggcttcctcgatgggccaagtctttcatcatgattggggaagatctctacaaaaaggggcatatcagaataagccatttatgcatcccgaccgtacagggaagacagctcttggaagacgtccacagcgggactagtgggcaccatgctgccctagggagcctcgtgggaaacaccttctggtagggattctattggcctaccatggtatcagacacacaccaagtggtgagaacatgtgaaggatgccaatactatgcgcgacagacccatctgcccatgcaggcacttcaaaccattccatttacctggtcattcgctgtctggggacttgatctggtcggacctctcaaaaaggcacctggggctacacacacgtcctggtcacgattgataaattcactaaatggatcgagacgtggctaattacgaagatcacctccaagcaagctatgaaatgcgtcaccaacattgtccaacactttggggtaccaaactcaatcataacggacaat

SEQ ID NO: 87353 - DNA, 677 bp, Zea Mays
caaaacagcaatttataaattcagcttctatttacttcaaaaattgccgcgttctagatactcaacttattctaacttatatcaaggcacacttaagcattgtcacacaatagatgacgtgacggctacatagtcatgccatcacttcaccccacaatcccaactaacaaaataactgtaaccgaacttggcatttagccgatcgattcctagcccatttttcataccaccactacacgatatgcctaatacgttaaatgacttgttcacaattcacatacatctttaccaaaacattcccacatcgcttgcaacttagcctaagcttcactacacaatttcaggacatctacttaattcatgaatatcatcgtcacacacatcgactcgatttgaattaaccacacatgtctatcacataaatggagcatttcaacaaatatcctaaaacaaactaacttcatcacacatcttgcattacaaccctacttgtcttatttgaagtgtctactcgaaaccatgagcacaatcatacactatatgcgaagcataattttaatgaacgcataatatgcatcgtcacgacttgacctataaatatagagaaagcgatgactactctggcatatcaccacctctctatttaagccaagacaatttctaccatcgactaagag

SEQ ID NO: 87354 - DNA, 1185 bp, Zea Mays
ggaaaggtttctccttttttttaatttccaaattctatttctatttttatgtccttttcttttgaacaattaattaactagataatcttaggtgctaaaaaataaaatctaagtgaggtgcttctaatcaaacgaagtgtacgcatatgatgagaagacctatggggagattagggagagacaaataggggggggggattagattagggttccaaacctcgggttgaaaatctaggatgttacaaacctaccccacttaaaggaatctcgccctcgagattcagatggggctcgagaaaaggtaagggtattccctcctcagagagtcctcactttcccaggtagcttcctcttctccttctctgctccactaaactttacagagtcttacttctgagttgcgggtttttcggactgctgagtcatgaatctttattggcttttcccggtactggagatctttttgaatctgaattgtctctgcctcgatgtggttctctggtacttgcaggcacttatggagctgggacacatgaaacacattgtggatatctgacatggattctggtaattcaaggcggtatgctgtgggtctcactctgccaatgacgggataggggccaacgaatcgcggtgctagctttcctttcatttggaaccttttgaccccacgcattggggagaccttgaggtatatgaagtctccttcctcaaatatgagttctctccgtctgttgtctgcataacttttctgtcgactctgagcttcaagtaacctcttgcggatcagggcaactttctcttcggcctctttaacaaaggcgggtccttccagtgtcctttcccctacattagaccacattagggggtctggcactttcgtccatacaatgcttcgaatggtgacatcttgatactggcctgatggctgttgttatatgagaattcagcatacggcaaattggactcccagtttctgtcgaacgtcaacacacatgctcttaataaatcctcgaggaccttgttgacgctttccgtctgaccatctgactgggggtgataggcggtgctggaatctaacttggtgcccatagcttgctgaaggctcttcaaaatttttgaagtgaactgcgtccctctatctaacactattttccgaggaataccatggattctgactatctc

SEQ ID NO: 87355 - DNA, 401 bp, Zea Mays
catctgcataatcgtaactcaatgtttaactcaaacatcaacacaacatgatttcacgcataaaatgatatattgccatagaccataaatctctaacctgtcggggtggggggcactactttcctccgctttgtgactaccttcttcaaaactttcccaggactgtcgcccaagttacgcttcttggataatggcataaagtcatcatcctcatcagcagcctgccatgttttgggtctaacagtctccgtcggaacacggggtatgtcaacgctgaagcactcctgagtagactggattataatccgttttggattagaaggaggtcggtctacgttcttcatgtctgatgttcctgccaaatgaaacaacacatatacataaaatacgtaaaggatcaa

SEQ ID NO: 87356 - DNA, 460 bp, Zea Mays
taggctgagttgggcaccgcaaccaattaggccctataaagccttgacctctgctccttgaggactttgctgaatccttctcctcttctttggctcccaatcccaagcttcatcttacaaatgttcacactctttgaacacaaggtctaagtctggatgtaatgttggcgtggctggctggaaacacgacaacagctcagtgatcttggcacttgaaccagatttgggtgtggctgactcagtttacactatgctatgtgtttatttaagaagggacacatgcagatgcgacggaaataatgaacaagaggagtgtccacttgcatacatctcaagactggcagcccaaagtgtatgtacttggaccatcagacaagagagtgaaaattagtatcccactgtttgtctgatcatgtgacctgtcatgttcctcatcttacaataatctgctccacgcgca

SEQ ID NO: 87357 - DNA, 366 bp, Zea Mays
catagagaatttggaaaggtgagcttcatctagtatctgctttctgagctcagggtccttgggaacaaccaatcgatctccaaaccatagaattcccttgctgtcctgtcggaaacacttgtatttttctgccttttgcttgatcatatccttgataatctgaacacccttatcctcaacctgtgcccggactatctgttcttgcaatgtgggctccaccgagatatagcttaggtcacccacagaaacaacttccaagttcaatctgcacaactcatcacacagggtggtcactcctacatccaggtttatacaattgcactgggcctttctgctcaaggcatctgccacaacatttgcctttcc

SEQ ID NO: 87358 - DNA, 526 bp, Zea Mays
ggaagacactctagttgcggcacctaaccaccgggtagctccaggcccagtatataccatccagaccttaggacaagtgaggttcggcgtcgccacgtgttcggaccggtgcggctaagacctggaccatctcggtgcgacccgggtccacagttagggagggcctgggaataccgtgtcaccacttattctcgagcatgccccttgtccaggcagaggtcttgtgccgacaagtggccagacgcacctgacgtaagccgtcggacgatgcctaaggtaagcctttgacatgtggctcaccagcattgggtgcagatgggatgcatacttacccatgcgagcagcgggtagcatgtcccctacattaaatgcgcgcgacgcaccaggtctgcaatgtgcgaattttactgtcacctgcacggtactgaggcaagaacattgacccaatgcaccgtttgtgcgcccttcattatgacttccattgttcttcgtgcgttattgaggcatgaagagacgtacggaggag

SEQ ID NO: 87359 - DNA, 444 bp, Zea Mays
ggaactgtcccttaatttcgaacagaatgcacaatcactggccacaccctggcctgactagtatatagtatatactctggattgcaaatttgcaacttcttttagctcattatggctcccctgctagaatacaaccgtcaggagaacaaggcctctgctacccccacataatttacccgtgctctcttctgtctccctctctcgcactataactaccccttgccaaccacggcaccctcgccccaaagcaagcagtagccaagaacagaagcaaagcttcgtccggggagaacgtactagtcacccacagcaagaaaccaccccccatccatggaagacccctacacgagcttcttcaagagcagctactactactacggctcctcctaccccgctgccccagctccccaccatctcccaccgtacaccaccctctacccggcg

SEQ ID NO: 87360 - DNA, 872 bp, Zea Mays
gtcgtcttcgcacgccagttcgtcgtctgcgggactgacgtcaacgcgaaatattcgaatcggcgacagatcgacgctcaccagatctgcttcgttcgagctacgacgtcgaaggtacgcccctttctctcctcccagtttttcatgtcggattcaatccgtgaccaacaaaaaaactccgttggtttaaccgtagtgtttacatgtccatgtacttgatttagtagatggattcatttgttcatggcgatttgcccagttagggtttacgggttctccccatcgcctattgttaggcttttacgcttaactgatccgtcgttatcttgtagaccatgtccaaggctaatagtttttggagcatacgatagaacacgaagagtcgggtgtgattttgatagtcgtcatcgtggcgtgcttattctttgtttatccacctaagtcgaacagctcaaataatatgtgctcatgtcacttgtatgttcattggtcagtcatgttggtacacaattcattgttcatattggaatgccaacaactaagcacgaattaccgttcaattcctcatgacaacccctttgtttgatgcatatccctttttttgcattgtaataagttactctgtttatgaactccacttagttaacatacaacccctttgtttgatacatcactaagcattgcatgcaactaacgaaaccttcacttattatgcaacttgaaatatttatttcattatttgacgtccacttcaactaactgaggttgtaaatcctttttcgctttagttatttgtttataatcaacttcttaagtgtactgtccatgtctgatgtctgtgctcccatgtttgttgtgcaagttcattttat

SEQ ID NO: 87361 - DNA, 419 bp, Zea Mays
tttggccttgattttggctgtggatagatggagaccatatctttagagagctcctttcataatcaagactgaccatcagtcccttacttttttgggagaacagctattggagtttgatcttcaaagaaaggctatggctaaaattatgggagaacaacagtttcagataatattgtggcagatgctttgtcaagggtgaactctctcatggcattatcacaagtgtttgaagtgcaacctctctgggttcaagaggttttgaattcctatgaaactgatatggaggctcaagagttgaaggttcagctccttctgcaaagtcctaatgagcagggttacagtttgcatcacgacattataaggaggaatggtttgatttggattgggaataactctgccttaaggactaagctgatcac

SEQ ID NO: 87362 - DNA, 471 bp, Zea Mays
cacgacaagcatcaaacaactgataagcaaactaactctaactaagactgactaagactaagatactgaactaatcattattacagactccgattccatcgatctatggatacaaatctatccgggtcctgcagtcaggggtaccatagtcgaagcaaccacggggcggtgagcggtaagggtgctgaatcccgacaggggcgggagaaccaccatccagatagtggcgtgcggcgcactcagcacgcaattccgcaacctccacccgaaccttgcccaactcgtcaagggtgtggtccaggtctatgttgagcatggcagccaggttgaccatactgttcagcctggggttgccctcaccgactggcgagacaatcacacctccaacactgccggtcgaacagcgagggtagtacttcaggtcaaagtcgtcagctacccaactgaacaacgagcaatattgagaaagtg

SEQ ID NO: 87363 - DNA, 694 bp, Zea Mays
tctcggcagggtccttgatccaaattctgtgcttcgccaaaacaaaccggagcatcgggcgggcgtaacaactttcctccccttcggactctgctttcctcggcttcggggtataaagccgggggcatgtgtggaagatccgccgctgggaaccatagaaggggtcaggggcgttcgcctgcaaccaaggagcgtgcgcgggcttgcaatcgggcgtgggcgtcgccatgttccaacgaattcctcgccgtcgctcctacgccgccgcgggtccgctcctcgccatggctagctctcgtcaccaaatttctagtctggtaagttgcatccctaggttcgcctttatcctgtagtcgtattgcgcgcgcatgtggtcggtttgggtagcggagtgcggggttggacgttcgccggcgagtacgccgccgggcgagctctgtttctcgcgcggggtgtttcgtcgatggagtggggcgtatcctccgtcgatcagtgaacgaacgggcgcgattagttcatcttactggtgcgaggggaacaaagtttggtcgttggattgtagatgaaggagtgggatcggatctcgcgcgtattaaatctggggccttggatctagatccaacgatccctggcacatacagattcctcgacggcaggatctaatcctggccgcaggatttagatcgtgtggctc

SEQ ID NO: 87364 - DNA, 359 bp, Zea Mays
ttgcaagttgatgtgctggtagatgctgctgttttgataagtactgacaggcttcacacctttggactaactcagctgcatcactctttgtcgttggccagtagaaactagacctgaagaccttcccaaccagagtcctggatgctacgtgtatcccgcattgcccagcatggacctcatctagcagttgcttcccagtatccgaaagaatgcatttcatgaggactcctgatgcgccccttctgtatagtgtttccccaatgagagtataatgagttgactaccttgcaatgcgctctgctgcatttttgtcgtcaggctcttcctcattctttatgtacctgatgatcggctccctc

SEQ ID NO: 87365 - DNA, 343 bp, Zea Mays
tacattattatcatactggttaagactaattacccacgaaaaatgcctagaaactgctaatactactgctgttcacccacctgaaaatctgtttttttggacagcaacataaccggattcaaacaacgatatctcctaaattataactccgaatcgagcgcataagtacccgttggaaaggtatgacaaagctctacatgattcacccactgatccccactaattacccacgaaaaaatcccagaaatccctagaactactgctgttcgcccacccacaaaattttcaggacagcacctctaccgattcggataggtaaacatataatcaattggattacaac

SEQ ID NO: 87366 - DNA, 597 bp, Zea Mays
tttttaatcatctctggactaggcctcattttctggagagctaaggggccttagcgcaagatttctaggactctgtgaactgtcagcgtggacggtgggttaattcataaataatagaaggtctcatgtgtaaaacgacacggtcgaagcaagatcatgcattgtgagccgcacgatcgggattccctggcctggattgaatctagactttaatgaaccggtacgtgccgaggatcgttgatcacaaaatcgacggtcacgattaaatgcgcgaaggggtatgctaactcctaatctgcaccggttgcttcaaaatcaacgacgcacaataattctgtgtccagcctcgatcctagccgttgcttgatagatcaacggattacgatctatcccctacctctgagcacccgagacggcggcgccgctccacgcttcactcccagccgagccccggtgaggacaccaaatcggagtttgcccaggcgctaagcacccaattgaaccgaacgacccaatgcggatgacaagatgaacactagcgacaggattcttaccgagggaacgcagcacaggggtccgaccactgtgacacgcggc

SEQ ID NO: 87367 - DNA, 393 bp, Zea Mays
ttccttcataggaaacgacataaggtctatgggagtggtgggtttgaaaccatatacaatttcaaatggacaaaatttagtagtcgagtgtatggttcggttgtgcgcaaactctacacgtggcatgctttcttccaaaattttaagttcttcttaagaatagctcgtatcaacattgatagtgttcggttgacaacttcagtctatccaaccaattgaggatgacatgttgtagagaacaacaaatgtgttccaagttttccccataaagttttccaaaagtaactcaaaaatttagtttcacgtcggacacaatggtttttgggactccatgtagacgaacaacttctttgaaaattaattcagcaatatgtgaagcatcatcactttgtg

SEQ ID NO: 87368 - DNA, 748 bp, Zea Mays
caagaaaggggtacaacttcataggtgggacaatctagttctccccgagcaaaaagtgtatccgtatgcatgacactgtaactctatttatagtaatgcagtacaacttcgtaaaaattacaataatgtcgtggttcagaaatcgagggacaataagatttgtgcgcagtggggatgtaacgtggacttactcgaatgtgaatcacggggattcatggatggatctgagacaggggattatactggttctagatcgcgctctagtccaatgtagtgataatcgtagtattggttaaggcgtgttacaacaggtgtgattgtgtgtagaaagaagtttgtcctgcccttttatagctcaagggtggactttacaatgggaacttgtattctactaggggagctcggcttgttgcctctgggtggcgtagccctcctgacggcgttcgtagggtcatgcacgaccgtactcctggtatgacgtactgccccatccgtccggtatacgggtccctatagcaagttagatgttgacgttgcggcgcctggcgagtcccgtagagtagacttacggtggggttcaagatcgtggttggtgcggcttcgtcttccgtcatgtccttacatgactcttcaacatgcgtaggcacacacatgatatggtgtattgtcccgtcccttccgatatgtgggtcactgtagagactcaggtgctgaggtccctgcgaccgagattgattggccccacaag

SEQ ID NO: 87369 - DNA, 797 bp, Zea Mays
gaacaagctgccaataacgtgttgtcttctgtagcaactaatgtccttctctagattcggaaatccgatgctctttaataatgtgcttacaattttagccccagcacgatcatgaatacatccgaaaatctcttcgtcgacgctgccaaagagcatggatccgggctaatagccctagaaatagcaaattcttttagtgtcgatatatcctcttcggaaaattgttggccaccaggtgtcgaagatcgaagcttctatctttcgaagttctctttcccttcgacgttgaagtctctacagcaactgccccctcagtatttttcccagccacaacgtttgcaataagtctatcaatttctgatatagttgtgccaacgggaccgccactgttctcagcttgatggggaccttcgtcagctatagcaggagtaatttccttttgaatcactagaggaggggtgttaaggatggccctcatcacgttcatcattcgacgtttcttctgagcgtttcctccgctcggcgccgaaggatctttacttgcctctgcttcggtattttcctcaacaattttcttctgtggctgtaacaagcttgttagatcggaccctagaggactcaacattgggaaaggtaagggtgcgatcattacctctaaaatttccgttaccccaacggaagttgccaaaggggtcttctctaaatgtttcggcgaagaaggtccctcttcatctccgcgctcggaacttgtaacctttcttttctttggtgtcgaaggctttgatgccagcttcggc

SEQ ID NO: 87370 - DNA, 597 bp, Zea Mays
ctctcactttcattttcttcatcattactatcttctttttcaattgccttagaggctttagctttgagagcaattgattcattcttcactttctttgccaaacttatagcatcggcttgagatttcttgaatatatcttgagtaagaattttccccaatacttcggttggagaagttgtagatagatcacttcttactaacattgtcacaatagtctcatatttctccggaagtgatctaaggaacttatgagtgaagtccacatccggtacattaaaaccaagtcccttgagttcattcactatctcatttaaccggttgaacatatcggatacacattcatcttccttcataataaattgctcaaacttccctttgcacacatatagcttggcactcttcacaattgtagttccttcatgaatttccattagcttaatccaaatctcatgagcggttgtgagattcttgatacgattgaattcatttatatcaagagcatcatagaatacattcatggcttgatcatttgtaagaatattctcattgtcactaacggatggttcatcttccttcaacacaacaaatccatctctg

SEQ ID NO: 87371 - DNA, 686 bp, Zea Mays
agaacccgcatccttcccattttttcgcggtgacgcttctctggcgattcatcccgtatatttgcatgaggcaaagtctccccaatcatctcacacccgcacatcccacctgtttgccgcattcttttcgaccttgagagccattgcgggagaagcaagctcgaagtcgccacgatgaatgtgtcgcggttcatggacaagcagatccagagcggtgtcgcctccgtctcttcagatgggaggtgctgcagaccatgcccctgccggtgtagtgaaattgtggttccagggtggaggagcaccccgacgtccgttgcttttgtcctactggagtagaagcataccctcttggtggagtagaagcaacatcacttctatagtgatttattaatgcaaatcgcttgtcctcttggctcctgtcgccggaaaaataaatcaaggcacatggaactaagctagaaggacagtaggaaaataaaagggcagcaaaccaggctcatttagctgtgatggcccatgtaggatgtttcaaaaatattagggtgtttttatttagcagtctgctgtgagattaatatttttttacgaatcttttttttcagcagtccccaatacgagatttttggaaacaaaattttagcaatctcttggagatgctctaagacattgtcgtatttgcaacaaaa

SEQ ID NO: 87372 - DNA, 443 bp, Zea Mays
gtgtctccacatcttcaatgcatgaaccacggctgctaactccaagtcatgagtgggataattttgctcatgaggcctgagtgccctttatgcgtaggcaatgacccagttgtcttgcatcaaaacacaacccagtctagtgccagaggcaccacagtacacatcaaatggcttgctgttgtcgggttgcgctaacactggtgttgtggtcagatgctacctcaaggtgtggacagcatcttcgcacttctgaccccaatcaaacttggctcccttcttcaacaattcagtcatgggattcgcaattcgagagaagtctggaatgaatcttcgataataaccagccaatcccagaaaacttcgaatctgacggacagttgttggcggcttccagttcatcacatcttgcactttatctggatcaacagctatgccagcctgag

SEQ ID NO: 87373 - DNA, 346 bp, Zea Mays
tggatgcgtaaaatacacaacaaaagcactctattcactaatccagtaggttgcacatgcatttgcgcaaaagcacgacctcgctcgaagtcgtgcatatccgtgggttctcccctttgagcatccttttgttcatataaccatcaagttctctttcctctcttcccacatcactgctcctcctctttcgcttccttcccccagctcactgtgtcgcctgcgatctggagggccatttcgcttcgcctagaagccactgctatctctctacaggattgcttcctccttgaagtcgcggatcggccatcctcgcaccacctctccctcctcgtcactgcttgctcct

SEQ ID NO: 87374 - DNA, 2440 bp, Zea Mays
tgcaaatagctctaggaccgccactatagagcttctgcgtactagtgcaatccgaccactaaatatttactacaagactgatgtaagcacctactagcaaaaatatgtgcctacctacaaataagaaagtagtagcatgtatatgtatctctaaatatatataaacacgtcgactatttggtttacattgcatcatctcggtgataataatatatgtattattatacacacggtgacaaatattgatagtcgtcaatgatactgttgcatagtggttatctaataaatactggttttgatataaaaaatcaatgtgttatgatataatccattgtgtgacattgctatacatgtgattctcatccgatttcatgtatagtggaacatctggttttgtccttagaaccgggtgtgacatacttcacaggcggccacatacttagaaacgtcaaccttcatccgcttccaccagaagttttgcttcagatctcggtacattttggtttcgccagggtgaacggtgtaaggcattttatgagcttctcccaagatatccatcttcacctatgatttctgaggcacacaaaggcggcccctaaaacgaaccaaatcattctcatcaatggagaactcccggggttaaccatcgccaaccctctttcgagcttcgtgcaataaatgatcctgctgctgagctgcacacactctttccatgagggaagattgaataagcatacaagtctcctcactagcggtgccgacatagcacaaagcgatccccaaacggtccagatcagcgatcaacggcaaggccacttttggaaccccggacctgctaagggcatcatccaccacatttgccttccccaggtgatattgaatggacaaatcataatctttaatcaattcgagccatcaacgctgcctcaaatttagctccttctgagtgaaaatatacttgagacttttatgatcggtgtaaatgtcacaagcctcgccataaagataatgcctccacgactttagagcaaaaaccatcacgaccaattcaagatcatgagttggataagcaatcactttgccttcctgcatcaacacacagccaagaccaattcgcgaagcattcatataaactgtgaaacgcttaccgctctctagcaaagctaggataggggcgtccaccaacttgttcttcaatgtctgataactgacctcacaatcgttggaccagacgaagagaacacccttctccaagagtctagtcaaaggcttagaaatgctggaaaaatttggtacgaagcgccgataatatccagcgagccccaagaaacttcggatttcagagacactagagggtctcttccactccaccacagccgcaacatttttgggatcaaccgcaatgccctgctgattaatcacatgccccaggaaagccacttcggacagccaaaaggcacacttctttaacttgccatataactgattcttcctaagggcacccagaacgagacggagatgctgctcatgctcagcccggtctttgaataaatcataatatcatccaggaacatgaccacaaagtcatccaagaactcatgcaacatcctattcattgcttccataaaagcagcaggggcattagttaagtcaaacggcatgactatgaactcataatgcccatacctggtgcaaaaagcggtcttctcaatatcctcctcacgaatcctcaattgatgataaccagagttcaaatcaattttggagaacacctgggcacccctcaactgttcaaagagaacctcaatacggggtagcggataattattcttgattgtcacttgattcaaagcgcgataatccacacatagcctcttgcttttatccttcttctcaacaaacaatactggggaagcccatggagacctgctaggcctaatgaaacccttagccagcagatcatccaattgtcgcttcaattcaacctgctcctttgggcccatctgatatggggccttatgaataggctgcgtacccaaaatcagcttgatctcaaaagttgcatcgcgctccggaggaatgcctggaagctctgctggaaacacgtcggcaaagtcacacaccacccggatgtcctgcacccgcaaggcagcctcaccctccaccaccatggagaaaaagattcacgacttccttgaccggcaatccagaagcaattgcgccaacaaggataacgtgaactttggggaacttcccaagaataccacctccctacccgatggcgcctgcaataacagtgtcttccaaaaacaggatatgactgcgcgatactgagataactaatccatacccaagataacattgaatgcccccaaggaaatcacaacaagattggccgaaaagacctcatcagcaagaatgacggaacacccctgacaaa

SEQ ID NO: 87375 - DNA, 446 bp, Zea Mays
ctcttaagcaaaactcacacgcgaaggggtacggggtaatctcggccatcggatcagagatcagcggcccagattagatcgcacgggcgcgcaggcacggctgacaagtggggtgtcggtaccctgaatcatgggtaccacttactgcagtgtgaaggcgtggagtccatgcgactgcctctagccacgtggaaaacagcgcctgaccccgccacgtgggcagcaccggggccaccacgtggccggaggagacaatatactccatggtgtcaaaagtgggtccggacccccacgggaaagtgccggacccctggatacacagcccgaacctcctagcagggtccatgacctccatgagtacagactggaccgccgacacgggtcccggacctccctgtgtggggcccaggtcactcacaacaaggtcccgggattctaggagaagg

SEQ ID NO: 87376 - DNA, 737 bp, Zea Mays
ctcgtaccagctaaaatacgcaatggctggtgccctaacttggctaagaccagattccatacctaacgagtgtttcccctcaatcaatttcactagcggagctctaaatcgtccattccacggagacagcgcagacattagatgaacaaacgtgttcccggtaatctagagcagtctagctcaatcgaacgggtcgagaagcatcaggagaacctaaggatgccgaaacaggagagcagagagaatgatcggacctgaaacgggctagccacgacgaggactctttcacggtggcagaaactgatttgggggaaaagagcaattcatgggctctggtgagtaattgagggcacaagcggttggattggatgctggattacctaacggagccggcggtgtgctcaatttataggatttgggggcggtgacttgtgaattggagttggcgcggtggcggccggatagaagagttgcactggcgcaagcgattagtggctttcaccatggcgggctcaccggcgatcaccggacatgcataacgcgagcgactgtgatgtggtaaatgccgaggcacgtggcgcaggaccgtgaggtggctaactccgacgaacctctctccaagcggccgtgacatactcgggtacgacaaccggggtaaaatagtggctagacttcatccatgacgcgatatttctttactcctcggcgatatctaactgagccgagaacgattcacc

SEQ ID NO: 87377 - DNA, 348 bp, Zea Mays
aaaagacacctgtcaagtcatcgctcgcaagacattgagggccctgtgtcagatctatgaagaagaagtggccgacaccccgcttagattctttccgccctttcagagagaccgtcccgtttggatggccaggatgcgtgcattggaagtgcagcagctgcttgaggatgaccccacagtcgtgtacctcactgcatacctgctcaccctggatgcacagtatgatttcttggctcggcaccaccgtcagatgattgcccgagcagaagatgcagagaagcgcaaccgtcagctcaatgtggatctcaccatagctcaagcccgtgcaactgcattggaaagtcgtga

SEQ ID NO: 87378 - DNA, 534 bp, Zea Mays
cccgggtggaaagcctggagcaaaaagtcagggaactttcagaagaaaaggtgtcccttcaagagagcctctcaatagctgaaggcgaagagtccaatacccgtgaagcttactgcaccctaaaaatggactatgacaagaaactgaagaagctcgcccccgcaagaaaaatccgcaagaagaccaaaagccaaagatgtcagactgagcagaaggaagaaaaccctccaaggaacccgtctgacaccgaggagatgtccctggccagccttgatgaccttctcaaggaatttggggacactttagagaaggagttcgggagtaccctagatagcactcgtgtgtgatgagcttgtggtagcagtgtgctgtgttatgtaatggcttgatgtaatgaataaaataactagttaaaaaaaatggcatgtgcataatagtgactcttttcccatggcagatggcttcggataaaaccacgcctaccgcctccgggattggagcaagacttcctctaggagctgaaggagaggctgg

SEQ ID NO: 87379 - DNA, 409 bp, Zea Mays
gcgggccggtgtggatctgactatctgaggccaccaccgcctaagcatcgcccgatcctgtttgtaccctgtcaacggccaccagcccaccaccgttacagacccgctcggtgagcactctattctccctgacgagcctcatcctttcttgcgtattagtatcactttggtgccaaactttgaagcgtaattatctaattatgcgaatagctggagctacttattaatgcatacacatagcttcaaagatgactaatcggacatatgtttatctaatgtcaaatatgcaactagctgcagcttacttagttatgcatacagcatacaaataccttcatagatgactaaaacgtaaatagagttgaaattaccagtttatgaactgatgtgactagtatattcgacgatt

SEQ ID NO: 87380 - DNA, 277 bp, Zea Mays
cagtttctgaaaatgttagcaactagctgtatttggacccttataacttttgatccgtggatgctttgaagatgatcattgtatcaaacttgtagagctctactaggtgcacaagtttgattaagttgcccagccctaaaaacatatgtaactgcttgtaaaacttgctcaaacgtggtatgtcagaagctggattttagactgaattctgaaactgaagattgtatgttctgaagccactttggaagcttgttagtgtttaacccatacagttctg

SEQ ID NO: 87381 - DNA, 457 bp, Zea Mays
cgactaattctatgttgtgcccctatatgcccccttgccaaaagtattttattctagtatggtctatacttctctcaatctattagatctgatctcactcttgtgcttgcgacatctttgtagatgccccctggacataaccttcttgtattttggatcccttcctcttttgtcattaaattgtttccattttgcaatctttattcccctggtattgacatgctcgtatccttggattctttaatactcttgtttcaatacctacctctaataaaaactctactgcctatttaaacatttcagtttatatgtccatgatcttactgtcttttgagaccctttcctattctattgatagtcgctatctttttggcaatttgtactttcttggtcttggtatgctcgtaccattggaatcttgcatactcttatttttatatatgcttacctttatgtc

SEQ ID NO: 87382 - DNA, 549 bp, Zea Mays
gctgcgatttcacggaaattgctggttgtttggttaggccagaaacagagcggtcattgcttgcctttttctctcccccgttttgaccttctttttctctgctccaatcatgcatgctgtatgcaacaaacatgacacgccggtcccaccacacagccattactccggacggcgctgcctccacatacacgactccagcacgacagcacctacacgctacgctacgccatctgcgatgtgtaggtcatctcagaaacacacaaggtcgactatactgttgcaaacgcctacagatctatactttgctccggcgatgaattttcacagatttaaaccggatctggatctatcgagttttcttcgtggccacttcttgttctgcttgcaataattggggcgcaccgtccggcaacatgtagcatgccacccacaaaacaagggcagtctgttcttgagctctcgtgacagtaacactcgggtggggcatgtttgcgtgcattcaaaataaaaacagtacacccttgatgcatatttcttcccctgcgtttc

SEQ ID NO: 87383 - DNA, 624 bp, Zea Mays
ttattacaactggattgggtttaaaaaggagtaaaaatggaatttctatgaattaaataagttctggatatatttttatacacaaaaaccatttactaaattatttttttgaatttcctaagcttttggactaggcgcatgaataaacagaaggccaggggctattccataaaaattctttagactcaaaagtatccgtgggacggtgggttctttcgaagaaaaccgaggggcttatttgcacttagcgcggccaaaggggcacgaagggttttctggccgatagatctatatctgaccgccaagatcagatcagacactacataaaccggtatgtactgctggccgctggatcaatagttgacgcttcagattttaaattacctagatcggttttcaagcatcaggtccagatcggacggcccaggcgcggcgggtcgagccagccccgagctgttcaatctcgaccgcccatcacgatttgaacagttggcgcaggatcggacggtcgcgggatggtcttcttcctctagccacgcccgcggggaaaagtgagcacccaggacgacggcgccgcactggtacgctatgcctcgcccttcaaccgccgtcggcatggccaca

SEQ ID NO: 87384 - DNA, 804 bp, Zea Mays
cgaatcttggagttaggatggacaaggtggcaaggtctgtcaagtatgatttgaggtcttcgaatgcgactgtctactctgtagggatgaaaacgaacggaaaaaatcccatcccgacccacgtcgtattcccactttttcctcaccattttcatatttctgggaaaatatgaaaacggtaagaaaacgggatgtgaccaacagggaatgggagcaaaaacaattgaggttgtttcccgctcgtatttccgatatcccgtttttatccgatattttttcgtattatcacgctttatcatattcgggaaatcaagtagactgattggtccaaagaggcacacccagcccagccacgcaaccaccccaccgagatcgtcagaccgagcctagaaagcagcaacacatgaggtgagacttggtgcctatgtgcccccacccttgtctttagggtgtacactgctattgtgctataacgcctagacatgtccatcttttttatatattgttattgctagactgctactgtgcatggtgcgtgtgtgttgtacaaacaactgaaacctccctgttgttattgtatacctatacaccgtagtgttgtgtgcctgtgaactaggggctgctgttgttggcctgccgtgcacggattgttaataggtagcacagctcgctcgctttcttcattaagtcccgaaagatatttcagttaacgtttggtttcatttaattttagttatatttattcgttttcgtataccatatattctgctcgcgttctcgcttccggctgtcccgttcccgctc

SEQ ID NO: 87385 - DNA, 814 bp, Zea Mays
caaaaaccgagccaaaccgaagttctgctgactctgcgcatttgctaaaatttgcaccgcggatggtctgctcttggatcccaaactgtccgcaatacaaaatatttgtgttgaggatggtccacactcaatccctggatggtccgctcttggaccccaaactgtccgcaatacaaaatatttgtgttgaggatggtccacactcaagccctcgatggtgcacagttcaaaaatgaaaaccaaaacagaacttctcgagttctgtccaaacactagtccttcagctgcggacggtccaccaactgggaccagacagtccgcattacaaaacttcgtgaaaaaaggaactctaagtttttgtccatcacctcaagttagacctatggacggtccgccatgctagcccgaacgatccgcaatacctcaattcaacccacatccaaaaacacttttgaataagtttttctttcacaaaccaaagcgtcgttagccctcattatgaggcactaagaatctcatcaagaagacactattgacccctcttgatagtacgactatctagcctacgaatccagtcaatattcttctctaaacacgttttgactggcaaagacgaaaacctatattttacttttgccttgagtattcaattccatctccttaaatgatgaacaatggtcatccataagtgtatccaaccatgctaccttttaccatttgtccatagcatgaagttcctcctccatcatcatcaagccacttgatcaatagcctatatcaacacatggcttgataactctacaatgatatgatc

SEQ ID NO: 87386 - DNA, 275 bp, Zea Mays
taaactttcatatttgttagttttgtacacgcacacataaaggagagtctaacgattaacactttttacacgtaggatgcaatacatggatgataagaagaaacaacttaagacagggtttcttgacccattgataatatcccaagctcactacaaagaagttgctcagagacatggagaagaatacaaagacttggatgatgatgaatttgagaaagccgtcaaacagaatcagagaaagaaaatgaaggtaatggcggcatacattggacgag

SEQ ID NO: 87387 - DNA, 1612 bp, Zea Mays
aattacacagctaaatactaaacggagacaaatttattaatcctaactaatacatgattaaaaaatgttcactatagtatagacctactcatgggccacccgatccgaactgaccaatgtaatgggcgggtacgtgctgtaataatcacgggatggtacgagacataatttttgacccacaatccgatccaacctaaaatacctgacccaacccgactcgacacgtcaaatagggtagcatgggccgatccgacactagacacgggtcggatatggaccgtgctaaatggtctttgacccgaccttaatccgatatgacgtttgaacaggtctaaggtagcataacatgaacgaatcatgactaaatagctttaatagatctgccctgtctgccctgtctgcgaagaaagcattcaaagcacaagatcgtggattttcgatttcttggatgaaaggaagtacactttttttctctgtttttcatgcgcggacgaatttgttttttactatatctcaacgttggcctgcaaatgtttcacgtctatgtgtgttggttgtgataggcagcgcacaataatgggatgcgatggcccttcttatatagatgatcaccgtgtacaacgatagtaacagcaggagataattgaggagagaataaaggagacacacccttaggatggaaagggttctatcctaaccatatatacgagatacatgctatacatctaacacccccctcaatctggacgtagagtgacaatgttcagattgcgtcgaaaagagttgaaagatgtcaccggaagtggcttggtcatgatgtcggcaatttgatccttcatggagatgacccgaacgtcaagttggcgcgtagacacacgctcacgaacaaaatgataatccacttcaacatgcttggatcgtcgatgaaaatttggattggcggacagataagtagccccaatattgtcacaccagagtgtacgaggtcgtgatagggtgataccaatttcgcgaagaagcacttgaagccaaatgagttcagctgtggcatcagcaatcgccttatactctgcttccgtgcttgagcgagaaacagtttgttgttttcttgagctccacgaaatcaaattgccgccaaaaaagattgcaaaacccccggtgcttcgtcggtcatcggaatcgcgtgcccagtcagcatctgagaaagcgctgagtagcgaggagccagatttagtgaagtaaagcccctgatcaatagtgtcatgaagatatctaagtatacgcttgaccgcagaccagtgctcagttgttggagcagagagaaattgacacacacgattaacacaaaaagaaatgtctggtcgtgttaacgcaaggtactgcaaggagccaaccacactgcggtatcgagtggcatcttctgatgataatggggtgcccccctgtaatgacagcttgtccttcggaagcatgggagtaggaactccttttgaattcagcatgttcgtcctagttaatagatcctgtatatacttgcgttgtatcaagaagactccctgcagagtgtgtcgtacctcaataccaaggaagtagtgtagggaaccaagatctt

SEQ ID NO: 87388 - DNA, 581 bp, Zea Mays
tttccacctgaccattggctcatgggtgtgccactgatgcgtacttgatctggatactcctttgctcacagaaatcaaagaattcagagctggtgaaattggatcccaggtcagtgatgatgctattcggtatcccaaacctgaatattatgtcctagataaactccattgctttagctgaagtcaaagaggcaattggcttgtactctatctattttgtgaatttgtcaatgacaaccagtatatgagtatagcctccctgagctttcttgaaaggtccaatcatgtccagcccccatcatgcaaatgaccatgtcacaagaatggtctgcagctgctacgcgggcaagtgttgttgcttcgacaggaattgacatgcctcacacttctggactaactcggcagcatcgctctttgcagttggacaatagaaaccagatctgaaagccttcctgaccagagtccttgatgcagcatgtacccacactgcccggcatggatttcatccaacaattgtttcccagtagccgagtgaatgcatttcaagaggactcctcctgcacgtcttctgtacagtaaac

SEQ ID NO: 87389 - DNA, 468 bp, Zea Mays
ggctttgcagttgtgggcaaaatgtccttttccacactcaaagcacttgattggcttatgagtctgtcttgccttgtattgacttgttgctttcttttgcacaaaagaattgtatccaataccactcttattatttttcataacagtgttcatgagtaactcattttgaagatattggcctttgttgaacttttgtacacttgtggcaagatgttctttctcaatcttaagtttcttgacttcatctctaagcctttcatcgtccactcccaactcgttattaatatcgttgctttctatgccaacttttcctctagtggttgcatctatcaagtacttcttcaatttctggttttctagtgtcatgacttcaaccttttcaatcaaatcatcatgaagactaggctgatcaacttggctcaaatcatcacatgaggttgctacatcaatcttaacaacagggttaat

SEQ ID NO: 87390 - DNA, 415 bp, Zea Mays
agagactacactgactgataaggattagttcgccatgacttttgggtaactattctcgttttatttgttatgtttacaaatattctaattccatgacttctaactacacaatctttatcttgttgctttgttttcggttgcctgaggtatagattacatggggcacgctgaacatgtgttccaaaagaatgcacagaagatactgaaggattcaatatactatgcaaggatccaggcaacaacagagcacgtttctagctacaccagctcaggtacgccatctcattctagtaattatagcaaaacttagcctactgtatgttcatgtgttatttggtagctacatgagataaaaacatgactttaatatattaaatagggaccgaagatgcatggaaaccaatttaacaccccc

SEQ ID NO: 87391 - DNA, 489 bp, Zea Mays
gttcaaggcaacaaaaattgaattaaacatacatctaactctccaaacgattacaagaattaaagggtgagagattaaacacaccttttcaagccggagcaccatagatgacggaacggagcctaggagcagccgagcagagcagataatgggagcaccagatccgaccagagacagtgggacaaccagacaggttagaaggagggcgagaatgagaggagaatgaaaacagaacaaaaatatagatgtccaagcacgtggcactagtgaccagaccaggcgaccaacaagcaaccgaatcccagataggcgcggaccggagacagtgaagaagggaaacacacacccgcacggagcaccaggcgaccaactgtctagctacaactcgatccgaggaggcgaggagcgccaaccgaccagcgaggagcaccagcgatgaacgagcatcaccaatcaccagatccgaatggcattagggttaaggttagg

SEQ ID NO: 87392 - DNA, 562 bp, Zea Mays
gtcgggtcaaggacacctctcgtccttcgccggggccggtgctactaaggacctcagtttctccttgaacttagtccaaaaacctagtttcctacctcagttccaccctaaactttgtaccaaaaactagtttcatcgccactgccgaccatgtttcacctagatcatcacctgcacatcaacaacacacacaaccatgtaggagcacaagtctgcgacttgactcaaatgttaatccattcaacaccactccatcgagtgtgttacaacaatatcaaaacacatgttaacacacatgcataaataaatttcgtcctaaagcatgtaaatcattttgtgatgacaatatgggtccaccctcccccttttataaaccaagagagagggacattacaattgccatgtgggggcaagccataactccccctaccataccattaatggatgcgctattaatatcaatcctaggtcctgcagtagtacaccttccccttaggaaatgattctcgtacatgcatgtagtgtgggaagtctaggacaagacaattgaagtatcctgccc

SEQ ID NO: 87393 - DNA, 664 bp, Zea Mays
cttttttggaatttaaatcgataaggaaggcgtacaagttcatactttttccctcttccttcttcttcagcatcccccatccactagaggttgggaaagttcttttgccaagtattcctgcaccaagtccctagtgctaatgtgctcagccaccaccttaaattctacctcggccacttggcagggagaccctagctgcatattgcacagaggtcgagtcatgccgaagcttagctttaagggactcattgtaacgccccaggtgttacttagggttttcactcaagactatacaagtaagcccatcatcacatgtgacttaagttgggaaaagtacaccaaatttggagctcaagatcctaagtaagtgcaacctatcttagatgtcatgccttggcttaccatgtacattgaaggggtagaaattgcccaaaaccctaatgcaccccctgtggacaattggagtactataggtaagtatgaccaaaaagttatgaaaaccacttgatcatgtcttgggccaattataaaagatgtagtgcacttaataccctacaaataatagtaagaaagtaaccccaaaaaatttcagaaaaaccccaaaagattcacaaaagggttgagcataagagaaaaatcagaattcttctaagtccaaaaccac

SEQ ID NO: 87394 - DNA, 831 bp, Zea Mays
aggtgtcttcgccaagattttattttaatctggctgcgcccttaggcgtctttgcacccagaggtgtctttgcaaagattttcttttaatctggcgtcgcccttcgacgtcttgtgctcccggaggcgtcttcgccaagattttattttaatctagagtcgcccttaggcctctttttgcacctagtggtgtcttgtcgcatgctgtgaacgggttttacctggtgtgacgatgactgtcttcgtggtcgaatgttggctttgagagccttttctgccatagcacatcacttgggggattttagctgctttattacaaggctctgccttattgaaaatctcacccctttgtgaggaaaagagtgtgggcccgcatgttgtttaaatattacatgggcgttcgcgggcccttacagttgaagttgtttttacacaattttttttttgtagattatccatgctccaactgtgttccaactgtaggcctctttggctagttagtctgtaggcatatgatgaagtcttctttgaaatgatgtagggtccctcccattttggttcaagctttcctcttacttgtgttcacggtgtccagatgaggactaggtcttcttcatcaagctctttggctttgacagacttttctctccaagacttggttgcttcttgatatcttgcaattgtgttaagggcctcgactctgtggccttcaagcaagtctttgtccacaggttcgtcagtctctggtgttgagctattttccactctcggggattttaactttagctcttacggtgtcattgcctcagtgtcatacctgtacatcagcttg

SEQ ID NO: 87395 - DNA, 823 bp, Zea Mays
cgaccctctcttagtcttgaccatgatatcatcgacgtatacctctaccctgtccctaatcaggtcaccaaaagtcttactcatcgcccgtacaaatgttggtaaggcgtttttcagaccgtaaggcattacaacataacagtatagaccatccacggttacaaaagtggtatgcttcctatcttgtctagacatctggatctaatgaaaaccaaagtaagcatctaggaaggataagaggtcacacccggaggtagaatccacgatttgatctattcgtggaagtggatatgggtccttgggacatgccttattgaggttggtgtagtcgatgcacatccaaagcttctcgtttgccttgggaacaatgactggattggccagccatactgggtgatggacctcttcgatgaagccagcgtccagtagcttccggacctccttaaggatgaaatcctgccactcgatggactatcttcgaggcttctgactcaccggtttggtgttacggtggatcttcagatggtgctcgatcacctccctggggatcccaggcatctgcgatggttcccatgcgaatgcgtcagcatttgcttggaggaaggcgatgagcgcgagttcctatttctcctccagatcacccgcgatgcaagtggtctgggaggtatccgcgctgagcaggatggtcttgacggggacaccgtctgccctagatggttgcaccttaggaaccttagtaggcatcttggtacaggaagtcgaggggtccctcccctcgtcattcgggtgagcggcttctaccaccagagcatgcaacttctcg

SEQ ID NO: 87396 - DNA, 576 bp, Zea Mays
ctcatattgcctcaacacatatgcacaaacaaaaatctcagcatgatgcaataatttattagcaactcatgggatctaatagaccttattattcctcctaaaacagtatcatactagctaccaactaaagtaacaattaattaaaatagtaatatatatatatatttatgtagcttggtggagctggtggagctggtggtgttggtggaggtagtggaagattgggagagcataggtatccagctactatttatgtgggatataactgaacaggttgaggtaagaaagattatggcaagtaaaaagaatttatcaaaaatgtttaagtcatgattcatctcgagattcgctttaactgttatacccttccttgtcgatgttgatcttttccttctccgatattggtctcattgctttggggttagtgtatttcatcaacgttggggaaatatggttaagatagacatggatgagatagactacatgatgtaggtcaaaattttgtttgatgttaggtggtgacagatggattataccattcatcatgactctatgggttgggttagctcatggttg

SEQ ID NO: 87397 - DNA, 748 bp, Zea Mays
aaacggaaaacctaaccctgcaactctgcctaggccgccgcccgagttcgaccaccccatctcacaaaaacggaaaacataatcgtacgactgtgcttggcgattttcttactcccggtcccggctctgcccctgtcgcgccgtcgcctcggtgcctcctcccaccgtcgtccatcgacagccgacgtctctggtgctccctgaatccctctcctccctccctctgtctccttgttcctaaccctaatcccattcggatctggtgattggtgataccctaaccctaatcccattcggatctggtgattggtgatgctcgttcatcgttggtgctcctcgctggtcggctggtgctcctcgcctcctcggatcgagttgtagcttgatagctggtcagctggtgctctgtgtggtgcgggtgcgtgtgtcccttcctgattcttcactgtctccagtccagtggtccgtggctccgcgccttgtatggtcactggctcactgcctcacttgtgcggtagtgcactagtgcccctgctggctgcttggacatctataattttgttctgttttcaatttactcccattctcgccctccttctaacctgtccggttgtccgactttctctggtgctcggctggtccttgcttgctgttgctggtcgctctgctcggctgctcctcggacctcggctccgttccgtcgtctccggtgctctagtttggaaaggtacatttagttttagccctt

SEQ ID NO: 87398 - DNA, 623 bp, Zea Mays
tggttcgaagatcaactggttgttcccaaagacctagaactcaagaagaaaattttagacgaagctcatctctccaaattctccatgcaccccgggagtaacaagatgtatcatgatctcagatccttatattggtggaccaggatgaagagagagattgctaagtacgtatctgagtgtgacacttgccaaaggatcaaagctagtcatttaaaggtagcaggtaccttacaacctctccccataccatcttggaagtgggaggaccttagcatggacttcattgtgggattgtcaaatacctcccgacaccacaattctatttgggtcattgtggataggctaaccaagacggctcatttcttgccagtgcatgccacacacagggcagaaaaatacttagaaatctatattgaccaaatagtgcacttgcatggaatccgaaggactatcgtgttagatagaggagtacctttcgtcgcacgtttctgggagcagttgcagaagtcgcttggaaccaatgtgatcagaagctcagcataccatcctcaaactgatggtcaaacggaaagagtcaatcaaattctcgaggacatgttgagagcgtgtgtgttacactatga

SEQ ID NO: 87399 - DNA, 666 bp, Zea Mays
gcactggaaggatctgattgcggagcctgagattctagagctagagctagagttggtactaaaactaccactattagagtagacactgtagagactagtggcactgatggctgaacaatcacaactccgatggcctgagatgagaaatctagagttactggccggagaggagagaacgtcgaaccaaaagagtgcaactaagctcctgactgtatggctggcactactgaagtctgaaggggcagaggcggagtcgactgcagtggaggcacaagaacgtcggtgtgttgaagaatatgaatcataaaagcccggtgctctgccctatctgctagaagctgttgctgaagggtgtcctagtggtcctgagtagtctgaaacatggagagcatccactcggacaaatgttgctgcatcaaagactaaagaatgtctgccagggctggatgaattgctagaggtgcagcactggaaccacctgcctagtgatcatgtgagtgaggtggtacatgaggtggtggtggtagaatccctagatcatcatcatctaaatctaaagaagtatcagcaataagaggttccataccctgatactcaatgtgtcggatcgcctcgtcctcaacttggcactcggaggccaaagaatctagaggtctagtatccaag

SEQ ID NO: 87400 - DNA, 410 bp, Zea Mays
tacatttgaaagactctaaaaatagactatgaaaaataatgtgaaacaattacaaattatagcagatttgcttaacaaatactctaaaagctatacatttctagcgcacgggtcctacaaaaaatagactatgatatttactttcatttcagaaaattgatggcagacaaatggaggtaataatttgatggccaaagccaaggacaactttatctagcagacaaatggaggtaataatttgatggcagatcgattcactactggatgcaattgcattttcacaaattgtagcctccctaagctcttggcacgaacgaatcatacgaagtaaaaaatctgaactcccttgggatgggacaggcgatctcactcatcgatctcactccccttcgttccatcgacccacaacc

SEQ ID NO: 87401 - DNA, 501 bp, Zea Mays
gagattttgttgacggaatcagagaacagtaactttgatcttgacgatgagagtctaccttcagccgatggagatgagttgtcaaagactgagaagacaaagaggtcgacagtaggtactcgggtatccccctccaaatgcaaggtgaatagagtaaagagggctggttgttggaagtattttaaggtggtcaatgttgcatctagaaaggaacttggagttatggagacaaaagccaagtgcaagttatgttataggtcttatctataccatcaagggggagtactacaacactgaaccgacatctaggcaagtgcacacagtatttgaacaacctggcacgggctaagaaaaaacttgctcaaagtactatcccctttactttcaatggtggagttgttgttgttaatcccactgaatatgatcatgagcacactagacttttgattgccaagatggtaattgtccattattatgcatttagaatggtcgagcataaat

SEQ ID NO: 87402 - DNA, 506 bp, Zea Mays
gtcgggcctaggttccacttggtgtttttgttcaagaagtacaacaaccaagcatcacgacagagcacgttgaggaatgcagcatagtggaccaggcaaagacaaacctgaatgactggagggagctgattatcagatatataagaaatgatgatgagccagatgataaggccgcagttgagcgcattgcaaggtagttagctcactatgccatcatagggggtctgttgtatagaagaggtgcaggaggagtcctcgtgaaatgcattcactcagctatgggaatacatctgttggaggaaatccatgtgaggcagtgcgaaatacacgcaacatcgaagaccttggtaggaaaggccttcagggcaggtttctattgggcgacagcaaataaagatgcagcagacttagtctagaagtgcgaagcatgccaattcctatcaaagcaatatcacttacccgcccaacacctacgaactatccctgtaacctggccttttgcatgt

SEQ ID NO: 87403 - DNA, 564 bp, Zea Mays
cttgatcattacctcggatgttaccttggatggaggcatgattgagacttttggtagaggtattgattttcttcttttgttccttcctcttgacattcctcgtgtccatgacattttcttcgagggattttgtgcatgctaaggttattcccgcctcaagcttcttcaccatgtcatcacggttatcttgagaaggttgagcaatgcacttccctttcagttgtgtcaagctcgttcttagcctctcattctcttctttgagctcttgatatacaatatcatctattcctggaaattctagctcaaggaaggatttgcttgctggcgagcaattagcacatgacaatatagtttcaatttgaacacatgtgcaagcttgaggttgttgagattttacgttttctatcacaacctcatgagcaatatttaacatgatatgatcacccgtaagattttcatgagaacatagaagcatagcttgtttttcttgaaaagctagattttcaatttttagcctttcaatttggtccttaagcagggtattcctatttactaattgagcaa

SEQ ID NO: 87404 - DNA, 446 bp, Zea Mays
tcacacattacatctgctcaacctttgggatgatacccatctccctataattaaacaacattatcctcaattcctcaccctcaaaaagcttccgaagatccccctcgcctatgctcgccccagtcggcgaggacaacaattctcgtttaccaacccggtttacatggagacggccacgctacatccccatacgatggcgcctgccactccacaaaaattcacccacactatgttttcccaccacccttcgccgcctacacccagcactcgcactaggaagatccccagcaccctccatacgcggcgaagtctcagccgcagccacatccaacccaacaaaataatccaagccttcatccgaggactcctccgtccaaggaaacgaactcccagattcaccatcggactcaaaacactcagacatagaaccaaacaaattatcatcg

SEQ ID NO: 87405 - DNA, 837 bp, Zea Mays
ctccgacgtgttccaggcgacacagtacaacaacacacaaattgggagcacggtgagcttctccaacataccaggacccaaaaacggccgctaggaaggtggatggaaggccaggacagcaggtcgacggaggaggtgttcacggtggcgcggagagtggatttgggggaattccaaattagagcgctacgatggacgatcggaggcaagggcgggtgctctggcttcgtgacaacctaacggagctagcgacatacttaatttatagtgtccgaaagaggtggcttcgaattttgaaagggaaggctggcggccgaagaaagggggtgagtcaccggcacaggttacgtggctttcaccgtggcaaagcctccggcgatggacggacttgctgctatggttcactgcgacgtgttaaagctactaggcacgtggcgcacggtcggtaagcggccaatgccggcgaggatcatctcggtcgaccgtaggccaagtgggtacggtgaacccaccagtgaccgggtctgagcctatccgacatcaagatctttactttgccacgactatctcctcacccaagagcacgaatcgtaccaccggcgcggatcacggcgcgagggtcaccggcggcgaggtgggatgaatctgaagatcttttcgtgtactgtaccatggccatcttcttaagtcgttctgacagcacgatttgaggagccttgttctccattttccatgtgacaacttactaatctgtttgtaacaaagttactaacctacaatccagctataattcaactatagaagccttgagcgaattctgattaaatcatacagaat

SEQ ID NO: 87406 - DNA, 566 bp, Zea Mays
caaatcatattgcataggaaaaagacattgtatcacacaaaacgtagggtaatatctcgcattgagaccccaaacctgcctaaatcatcgtgcccattgtacattcacccctagttcttgatctcatgatatgtcctataaattcactgtcgaaatttcctcaatagttggtgcaccaggtaagggcgatcacgctggtcagtgtagatctgatggcaacaataagcttcacactatgatagaagatcttctttggcaacctcaagttcatcgatgacatgtcaaggaatatcaggcatgcgcataatgccctgacgatctcaaaaatcttctttggcacgctccacttcaccaacaatacacatgggcatctcaggttaacacctgacaccctggcgacttcgacatcaggagtttgatcagaactaatgtacacgacaacatgacaatcactgcaacaactgttcagactcgagcttcacacaaacttggacacctgtaatgactcaaatactcaggacctcaatttgtgttcatacagactctaggtgagaggagcacccatc

SEQ ID NO: 87407 - DNA, 573 bp, Zea Mays
tcaagcagtgacagtgctccgcgggcccctacgtaggcacattaatcacctcgaccagtgaggacttcgtcaaaagcctcgactgcaccctctatccatctaattgtcccttcgggatcgtcgcgaataaaattttggtcatatgagaatgcaccaactttagcaaacatactcttcagcttatcacaacattgcatagctacagaaaaaccttcttcttttgatagacgaagctcgtcaacattcttatggactctattccactcagccttagctatctcacgcttttctttctcacattcaaaattctcgctcatttcatcaagcttcttttctaatcttagcacttcgaacttatgaagctccacttgtgtagatagtgcatattctaagttggctatgcgctttgtatcagcttctttttcttttccatcttcgaggatttcgagcctccttaaaaaagttagccaaatttgcttggctcttcttcagcttttgaactaaagaaaaatgattttgtctttttcaatagcttggtgccaaaggtctataacttcggatcgtagatttccg

SEQ ID NO: 87408 - DNA, 412 bp, Zea Mays
attatttcgtagctaccatgatgtcgtgcttccaatttttttgtttacttactgaaacaatatttccttatatatgaaagccagttcaaaacaacagctctcgaagtgtccacgacggcccaaatgttttcaggcgtacgatttccaatcaacggtgaaggcaaggtctttctctcacggccactgcagattctacttatccagttcggcaccatcattttgtttagtgtttgctcggcttcgtggttttgtggttcgtattcttcgcttgtgagaatcatccaaaacaaaataccctttttctcttatattttatacccgtcgctacttattaaagaactttatcatgttcgacgttagtgcctccaagcgttttctctagaaactctttccctagcctcctcaccctttt

SEQ ID NO: 87409 - DNA, 661 bp, Zea Mays
tgtcgccaacatcattcaccacttcaaggtgcctaattcgatcataatagataatggtacacaattcattgggagcaggttcctagaattttgcaatgaataccacatacgtgtagattgggtcgttgtggctcaccacgtgtgaatgggtaggtcaaacgagctaattgtattatcatgcaaggcctcaaatcttgggtattcatgcacctcaagcagcttggcaaacaatgatcgaagctgttaactgcggtcctctaaagcttgagaacaaccccgaaccgctcgactagatatgcaccatactttatggtctatcaggccgaagcggtgctccccaccgacttcgagtacggcgccccgacgatgaagctatatgaagccaagcaaaacgagtcaagcttggaggacgcgctggactagctcgacgaagcccgcaatgtggcactattatggttggcaaggtaccaacgggtgctacaaaggtaccacaactgccacgttcaaaacagaaccttgcaggtaggagactcggtgctacgacgggtccagacaaacaaagaccagcataaagtgtccccactatgggaggggtcatttgtggtcggagaggtacttcggtcgggcaccaacaagttgaaggatgagaaggggaggacgc

SEQ ID NO: 87410 - DNA, 1728 bp, Zea Mays
aaatccgatcacggtcagtcactatagatgaaggaaatccatgcagcttaaaaacactgtccatgaagtgttgagccactcccatagctgtaaacgggtgacgcatgggaataaagtggctgtatttagaaaatttgtctacaacgaccataatacagtttgagtgatccgatgttggcaaaccttcaataaaatccatcgtgatcattttccaagcgccatctggaactggtaaaggttggaggagtccagggtattttactcgttcaacctttgcttgttgacagactgcacagtgattgcaccagtctttgatcatctgtttcatacctgtccatctaaacattcttttaatcttctggtatgttaccaaaaatcctgaatgtcctccaataggggtgtcatggaatgaggaaaatattttcttcggaaattctgattgagccggcagcaccactctgtctttgaaccaaatcaacccattttgcagtctgtactgagctgaaggagtctgggctgcaagcattttcagaagaggagcagtatccgagtggctcgagtaagaatctgcgacagtaaacagccaggtaggttgcaccgttgtgatggaatataaatgatcaccaggaagacgcgatagagcatcagccacccggtttgtgtgtccctgtttatagcagatcttatatcgcagaccgagtaatttagtcaaagctttttgttgccacggggtcgtcaaacgttggtcatctagatgaattaagctgcgctggtccgtgcgaatgataaattcactgcagatgaggtaagatctccagtgttccactgccatcaggattgccaaacattccttctcataagttgacaaggcttgatgacgagggcccaaggccttgctaacaaacgcgatggggtgacctgcttgatgtaaaactgctccgatgcccttgtcgctagcatcggtttcaatctcaaattgttgagagaagtcaggtagagcgagcaccggtgcgttgatcagcgcttgtttcaaggcattaaaagcttgttcatgttcagaatgccatacaaacagctgtcccttttttagcagattggtcagtggtcggctgagaattccgaagttagctacaaacttcctatagtaacccgctagacccagaaagcttcgtatctctttggctgatcgaggagatggccatgatttgatgaccgacacttttccaggatctgtagccaccccattttggctaatcacatgacctaggtaatgaagttgtgttttagcaaaagaacactttgagaggttcactttaaaatgatgttggtccaatgtagcaaacactgctcggagttgatgtaagtgtgtagtccaatttgaactgtaaatcaagatgtcgtctatgaacacgaccacacattttctgagaaatggagacaatactgaattcatggctagttggaaagttgctggacccccggtgacaccataaggcatcactttatactcatagtgaccattgtgagtttgaaaagctgttttgtgaacatcctgaggatccatttgaatttgatgatatcccgaactcaagtccaaacttgtaaaccacaaagcaccctgaagctcatccaaaagttcatcaattattggcaatgggtacttgtttttcaccgtgagggcattgagacgtcggtaatcgacatagagtctccaatcccctgtctttt

SEQ ID NO: 87411 - DNA, 495 bp, Zea Mays
acaaggtggtacaagttgttactgataatggtgccaattacaaggttgtaggcaagcttctaatgaaatggattcctacattattttggagtctatgtgctgcacatttcttggatctaatgttggaggacatagaaaacttgaaggaattcaagaaaccaattgcacgtgcaaggcgtgtgacaactttcatgtatagacatgggagaatccttgctgccatgagaaaactggtggggctaatcttgtgaggcattatgccactcattttgctacttcctttctcacattgaatagcttgtacaagcacaaggatgctttgaagtctttatttggaagtactatttggactgataatagattggtaaagactagtgttggattgaatgtgtatatcattgtcttctccacacagttttggaattcagtagaagattgtcttagagcctcaggaccactacttattgtacttagggtggtagatggagatgagag

SEQ ID NO: 87412 - DNA, 728 bp, Zea Mays
aaattcgagtctgtatcattaccttttaagtaatgtaaaatgatggtgtgctttggcatattatattttccaaatgttctttgcctcagatatcgtccaggactcgtggataggatggtgcgggaacctcccgtgggagggagactactcctaatctgccaccagtacccccaaccttggctgaggctatcgctgccttagtcaatgcaacagccgacaacacccgcttccttcgcgaaatggcgggacagcaatatcagcagcaaggcgagcaagcttatccgcaaggaccccgcgaaactacatatttggatttctcggaaacacgtcccccactattcgtcaaggttgaagatccccttgaagctgacgaatggattctggttattgagaagaagtttgggctcctctgatgcatagagactcagaagcccttgtttgcagcgcagcagttaagaggccctgccagcacctggtggggaaattatgtggctatccagcctgccggccatcaagttacctgggacgaatttaaattggcatttcgggagcactacattccagaaggggtgctccatatgaaacatgaagaattcatgtatctcaacaagttcaaccatttgtcccagtatgccattgatcaggtcaacactgacctgaagaaaagaaattgttttatgaggggccttaatgaccggctacaatggaagatgaccacctgcctcgac

SEQ ID NO: 87413 - DNA, 566 bp, Zea Mays
gcagcccaggcaccccttcgatgtcctctagtgccacattaaccagaaatcccaccaattaccccacttgttcttggtgcacgacacaatctcaacaactttggctgacgtcttcctagtcctcgacataaatgtgcaaaacaaattgggcaatcaatccaccaatcatcttcttctgccagtgaagacaataattcttggcgaagacctcgaccaatggttccctaccatacgaagtcaccgcccagacaaacttcgccagtgctaccatagcattcggtgtcaactgatgaatttgaattttgaacttctacaacacttcaactagaaaccaatgcacaggcaagcaaagtctagcagtaaaaaaagcctaaaaaacaactaactcaccctctggctcggggacatctttagcccccggcgcccgcacaactccattctcaaaataacccaagcgttgcatctcgtgcacgcggcctgagtaaatcctcaaagttccaaattcaatactatggtctggccgcagctccacgactgctgctagatcactaatcatcttatccgac

SEQ ID NO: 87414 - DNA, 536 bp, Zea Mays
gtgtttggaccgcgggtacttaaccaaccagtaaatgtgccgcgtggtcgactctagatggtgtgcgaggagacacaagcgattatcctagtcgggctactcaaggccctacttccagcagagaggatgagacttatattactcgcacggtggtgcctgtagtaggggtttacaagcataacgggagatgggaaatccccaagtccctagagataattgaggcaagtgccaatatctaaggcagagtggaggagtgagcgttcgtctatgtgtgtcgatgtgtgggtgtcgatgtcgatcccccgtccgtggagggaccacaaccctatttatacatcaaagggagcgtccttagggaagccaggtcttatattcgaagaagagatgcctggcgtctcacgtgacggcgtactatgtagtagattcgtgcctgctgacttcccgtagagagccgaggccgagaccgaggggttgtccgtacgcccgagccctcgagggagaggccacccatgccgtagtgattgtaacagcgccag

SEQ ID NO: 87415 - DNA, 348 bp, Zea Mays
gtatgcccgtgcgttgtcacgaaagtcaaaatttagtactctatctgttctaaaatagtaatcattttagaaaattagtgaattcaaacaatactgatgtatatgttttatagttagatacccgtgcgttgctacgatttctatatatatcacacaggtagacattatagcctttgatgattcattcacgcactccatatacatgcacaagttttagtaaaatatataaagactatcttaaacttttgatgcaatagctcaaagcataataacttggatctacgtggagatgcatgctacatgcaagcaatagaccaggcaaccatcaaagcagcttaatactgataa

SEQ ID NO: 87416 - DNA, 641 bp, Zea Mays
gcttcatcctctggggcgcgacgtgcgccctgggcacggcgctgtgcaccgtgctgtacgtgcggtcgcgccgttcccccgggaggctacctcgctagggcgctggttggctaacgcagatgacgacgacgacgatggtgataacgagggaccagaagcttctctgatgaacgagtttagctgttcactagatgcgacaggattgagttgagaggagaataaaatatctagagagtgctgctaggtggacatagcatctttttttttctttttaggattgttttgctttgttagtttgttgacagttgacacacagtccggctttggagaggcactggaaatctctctgcatgcttatatgggtgaaacggaacagagtacctgtaaacagtgctggaaattgcaacttttgccaggccagcggtaaatcctacgttctgacacagttcatatgacacgtatagtaagtgccattctcatttgaaacctaatcatttttttagataacttctcaagaaataaaatgtggtcttagttaaagactgatggaatacgtgcatatgcgtgtggtcttagttaaagactgatggaatacgtgcatatgcgtgtccataccatttcagacaaaagttgctaattcc

SEQ ID NO: 87417 - DNA, 821 bp, Zea Mays
caaggaggccacagaagaagggggaaactagcagagccaatactctgatgaggaaaggcacggaaataactgcctcatgagtatcctctgtcgggacggtaattccctgcttgatccgcaaggagcataactccttggaggacagaacaatgacctcaacaaggtggagaaggtcagttttagagaaaacggaagtgtagttaccacagaaaggaagttgacaattgggatcaatcggagggatatttggcatggcagcaccctattttctcttcctgggcgccatcgcgatcccgtaggccaaaaagcacaagaacagcgcgagaaagagtgagagttcaggaggctagaatgcggcggaggagttacaaagttagggttcatgcaccaagaaaccattgacaaagatataagtgagcgcattaagtcgggcgcaacgggacaggctggtagctaggaccagttttcggcataacagagcagaatgtgtcgggcagtgtttctggtcgggtacacttgagcgttttcaaaagctaaagtcgtcgatcgagttcactggaatgaattcatcaagcaaagacatgaactatacaagaacacataggcaacgagcagatttcattcaactggtagaagaacattacaaaaggaaataaggaccgactcattatgagccgaccttgatatccttgttctgctactactactacaactactactacatatacaactatactacactactaattatgtcggtggcatcttgccaccagcgttgtcgctgtcgccactgccctcgtcgttgccctcttcgccatcgt

SEQ ID NO: 87418 - DNA, 528 bp, Zea Mays
atgtgttcaaattgaaactatattgccatatgataatgttggttgctcgccagccagcaaatccttctttgagctagaatttccaggaatagatgatattgtatatcaagagctcaaggaagcaaatgagaggttaagaatgagcttgacacaactgaaagggaagtgcattgctcaaccttctcaagataaccgtgatgacatggtgaagaagcttgagacgtgaacaactgtagcatgcacaaaatccctcgaggaaaatgtcaaggacttcaggaatgtcaagaggaaggaacaaaagaagaaaatcaatacctctaccaaaagcctcaaccatgcctccatacaaggtaacatccaaggtaatgatcaagctacactccacactaagaaaaataagaaatgtagtgaatgctttgaagaggggcacttgattaggtcatgtccctatattaaagaaaatggcttggttattaacaaggatgataaaaaaaattagattctctgagaagggacgtatggttaaat

SEQ ID NO: 87419 - DNA, 430 bp, Zea Mays
ttttgacaggtactcatcagcggtacaggttactactagtagtacaggtacagcccagacgagaaactgatataacacatgacgacatagcccagtcttgtgtacccgcgtctccgtccgtgtgtacagactacgtgtaccgtgtgtttggtgagtgccgacgacacctgtacatggagacagtggaggcgctctgaccgtcgtgcgtgtgaagaaacgtgtgccttctatgcccacgcctgcgcagcgccgcgccgcgcaccaaggttctccgtcagctacaaacaaaacaaagcgccaaaccgtgctccgtggcctacaggctgcatctggatgccaagccacgacaaactacgacgacatcggaaacccatccacgttctgaattggaaacagccggggaggcctgtgcatgcatggctgcatctgc

SEQ ID NO: 87420 - DNA, 297 bp, Zea Mays
ggaatttagagatctcgacaaattaggacaggggtttacattggtcgatcctttggaggcaatcgacatagaagatggtaaaactccaaggccgacttttatgaacaagaccctggagaccgatcctagagatgaaatgatcggtctattgaaagaatattcggattgctttgcttggaattacactgagatgccgggattaagccatgagatcgtagagcatcggctgcccattaagtccggtttcagacctttcaagcagaaagctagaacatttcgtccagaccttctcccacg

SEQ ID NO: 87421 - DNA, 348 bp, Zea Mays
acaaaaggccatcgaacattcaagcttgatatggtcacttttacctggccaagaatctttgggctgtgaattgtcaccttgatggttatgttgaatgtcatgtggcaattccatccctcatttcttctgtcagaatctctgacattctataaatgcatccaaattaacgtgtttctactatctttaaccattaattgtgagccagtgctgttgacaattcttgctgcaagacaataatatttgtggtgtctgctacatgttgcttccaatatctattctgactggattcacaaaacacttgaataaaattgacattttttaccaactgtctttttcttaatcttcgat

SEQ ID NO: 87422 - DNA, 295 bp, Zea Mays
gctagctgtacgaactggatcgatgacttcatgcacggatcgtcatcgctttaatccaccgatcacatacaggagtattaaattggtctagatctcgctcccttttcgatttggtgcgggtttggtggcgctctgccctggaggcctgaacttactgtccgtgcctgaaccttgtctctgcataagtcaattgactggtgaactgataaaggctgaggattcttttcggagggcgcaaataagagaaagttggcaaatgatgaaactctttgctggctccaaacaaacagatgga

SEQ ID NO: 87423 - DNA, 490 bp, Zea Mays
ttaaacctttgctttacttttgcaattatgcttgtacaatttacgttcttagaattgccatgataacataggtttggaattagtgtgcaaaaaattttatgtacacattagacagttgagtgaagtcgggcttgccattaggtttaaattcttgcaataaattttagagaagttcaattcaccccatctcttgggcatcatgatccttttagttcaccttgtgaatcattctcattaccttcttgattgtttagattgtatcttcatcaatttcaaaggatgacatggatggttgatcatcttcttcagcttccccatcttcatcttcacttaacggcttgagattgagctttgaacttgcttgttgcccttcatcttcgtgcgcccttcacatgtgagagctttgttttttcttgatgatgtatcttcttcttgacctatctttcatgatatttcaaatgcaactaacttgccaatgacaagccctggc

SEQ ID NO: 87424 - DNA, 654 bp, Zea Mays
attattacgagtctaatgcaacttgaacatgtcaaatcggtgctaaaataaatgagatatggattaaacaagtttctagatttatttttacactaagtatcaattttcattttttttaatttacttaaaacaacgttccatggactacgggtatgattatcttggagtacatggtctaatttacaaaaacttgggcctgttggtaaggatcttaggctacgggttaatttctaaaattggcaggggtctttagcaaattatctcgacaaaggggtatgctggattctgagccgttcgactcccatccgtcggtctagattaggacgatgccacgtcaaccatcggatcaaccatcaacggcctcgatcgctacacgaaccgggcacacacagaccgttggatccaagatccacgttcccgacatctccctcgacccggtacattataatctaatcatatccacccattctccgatcaacaactaggattaaatataccaaatgtatttcccgacctgctgaggcccgttcgatcgtgaatcaacgatcggatggacgtctccctcctctcgcagttgttccgtggcaaagcattgctcccgcgacgactccttgctggcgcggcagcaaatcagctccctaccgccccaacctc

SEQ ID NO: 87425 - DNA, 455 bp, Zea Mays
aaaattcttgtgtcctccttgtacaccatctgtaccagatgtgcaaagcacgtacattactagtcattggtttcagaacaccgacaagtgtacatacaagtttcaattacttaagggagctgagacatgcactcgtatttgtaaggtcaaaacactattacatgtgggcgctcaggagatgagcgactagagtcattggtgtaaaattcttcgacattggtacttcaaaaatatcagcatgcaggttatcgacatcagtgcctaaaggatggagtcattcgactaacttgtcaccgaagtcattcagggttattgctagtgatgtgggcatagagtacctcattgccctaaatcctaatataaacatattaccatagggggagtcaagattggctaagatgaggaccatccgaactacatcatcaaactagtacaacgctcgtgcacgcaacaac

SEQ ID NO: 87426 - DNA, 1285 bp, Zea Mays
ataaatattttttttttcagaccagtactttacttgtaacttgaattgaatttggaatatgaactttaaacttgaattgaaatgagaaattagaaattgagaaagaaaatagaaaaagaaaaggtgagaccataaccgattttgggcccaaaagtctcctaacgtggcctgggaaacaactccacttgcccacctggtctcctgcgcgtgggtcccagctgacagtgttatcttcttccccgtggcgatctccaaccaaatgtgcgacttccgcgggcgcctcaaccaaactccgcccggatttctcgccgtgaaccaacaacattcactcggactttcccctcctcctgtgcataaaagccgatgctatgcggcttcctactcctgcagctcggcgcgctgaatgccatctctagcgcgcgcccccttctctgctctcagactcgacgcccgcgcagcaccgtgacccacacttcgtcgtcgactaaccctgctcgtgcgtcgttactgccttcccctctccgcctctcgcgaccaccaccgttggcatacctcgagcgtccgcttgaacaagaagcacacataagtgagagatcgagcgccaccgccaatgtgcgtcttcactgatccttcgcctcggcatggcgcttggagggttatccagatagtatggatcatgttggaggaagctattcggtgcctgtaaccctcaggccacgggaattcctgaacggagtctcctccgccgcagaagcgctgggcgatgtggttgggggatccccatggcatcacaacaggtaatactcccctcctgtcaatccataccctctttgcgtcgcgtagcatcgggaggcgtagaagctcaacgtgtcggatagcaggaattgctcgccgccgtgtgttcgccgccacggctcgggcgcagtcgctcggtagcgagagagaagaagatgcatccctggccgttcaatcggctatcgaactcacagcgggcggacctccgtttcgatccggtcaataacagggtccgtgtggggggtcctcgatttgcgtgctcgacggcgtgctatgccgagcagggtggccggctctgttcggtctggggttcggcgtgtggggacgatggggtcctggccatcggatcttgactgtgcggctagaattagaagctaccctagatcattgatccgtggattgatggtgcagatcaaagcaaccatcacacactcgcgatactaaatccaaaccgtaggccttagctccattggttgcgattagatctggg

SEQ ID NO: 87427 - DNA, 626 bp, Zea Mays
ttggggcactccggtcccatgtgacgaaatcccccattcccattcagccattcctatcgtgcaagccatcacacactctggacgttgggcccacattgcagactacgggcgcccacgtgatagccaccctaagttttgcacacaccggacccacgtctgctcgcacaaaaagttgcctcaatttgacaccgggaggagcatttgaccacgattgctttctctgaagaaggaaggcttataagccggtagaagctatgttggctggccggtatggtcataaaaatgtgcaagccgtgacgatgacataggtcgcgtgggctgtgtttctttggtgcggcccaagtagctgccaggaggccgcacgcttcttaccctgacccagcttaggctttagggtcagtctcccttgctttctctgcccagcgagccctcgccctctagctcttcctgctagcgccgtctccatcccgtgctctcctcttcatcgtcaatctcagccatctcaggagcacccgctcactcccagacgcccgcgcaaaggaatcccccacgatctccctccaaacttcccactccctccacgatccccccctctagctcatgatccctctgcccgccctcacccc

SEQ ID NO: 87428 - DNA, 414 bp, Zea Mays
cagaggttgacagcgcatgtgaggaagcacctcacctgtggggacggcacttggagattgggttcaatttaagatatcagacagttcctcgacagctttatcgtctcttcaattcgcggtacagtacagtctacctgatcaagcctgtccagcggcccagacaagttgctcgacagctttatcggctcttcaattcagtgcctgcagctggatcggtagcacgtcatgtgagctctatttcgcagcatggcattgccatcttcatctgatcgagacactcggccaagacacaacaagcatggcattccaagcaccggaaagcgccccatgaccggcaccagcatgtgcaagacactcggccccatcaaaatctcatccaaatcctgctccctgacgcgtcttggaacatcgcac

SEQ ID NO: 87429 - DNA, 528 bp, Zea Mays
caaactgagatacatggaatatatcatgtacatcagccaggtgttcgggtagttctagctgatatgcaacttctcccactcgctttaagatcaagaaaggtccaatgaagcgaggggacaactttcctttaactttaaacctcctcataccccagattggtgacaccttcagatacacgtgatcaccctccttaaactccattagtcttctccaggtatcagcatagctcttctgtcttgattgtgcaattctcaaattctctcttatcattcacacttgttcttctgcctcttgaataagttcaggcccaaagaactgtctttctccagtctgatcccaatatagaggagtcatgcacttcctgccatataaagcctcaaatggtgacatcttcaaactgatctggtagctattattataagataactatgcatatggtaagctcttatcccaacttccaccatgtttaagagcacaagatcttaacatatcctccagcacttggttagtcctctctgtctgcccat

SEQ ID NO: 87430 - DNA, 426 bp, Zea Mays
ctttatttgtagcctttcactttcagttttgttatggatctaaggtcaagtttgaacattgatacgttcatcgacttgctcaatgagaaattttcaaaacgtcctgacatccctgctagtacaagacatgtcttattcgatggactttctcctgccaatcatcgacatgaggatgtccccgttcatctccattttctgagtccgcaacctctattcccatatctgtatcctcctctgtatccatactgaccattcaataatgctcctcctaccactgaacctcctaccactgaagctcctaccttcgatgctcatactcaaccttccacttgtccatacactccttcatactcgtacgagtatctatatggtgattctccttatggattgtatggtgttccttccatatgctcctctatatggtgc

SEQ ID NO: 87431 - DNA, 278 bp, Zea Mays
ggaagatgaataatgtaaattaatgtcatcctaaaacctttgtaaatttgtccactaaaatgtatccagacaataccaatccactatgttatattcactgaaaacccaagcctaaagagtaataagcctaacccactgggagccccgcatgactaagaaaccctaagttacttcttaacttagttctctttagcataatattattaaatcctgcataaatcatgacatacatgttcattgcatttcgatagactgtaatcttgctgacggagagtaca

SEQ ID NO: 87432 - DNA, 844 bp, Zea Mays
ggcacgacacacagctattgtaatacatctcaagttcattcagcactagcatatttcagaaaatttcttgagactacgacgacaaggcatcgagcttatcctgcacataaaagcatcacaagcatatttacggaacctatcggttaacctgatcgacattctagacatgttcttcacccttcaaaatttatcgcacaactaagatcatcacacttgctaatgacaccaacaatacctactgatatgttattcacatctcgagcacagttacacgccgcatactagtttctaacataatcctcatctaactcgtaattcaaactactctccaaaaaataaatcacacacgacaaatttcgccttaactggttaatttatttggagcaccgctgagcgtaccactagtaccccgcattttgactcgacatataaacatagaggaagcgatgactacttcggcatgtcaccacttctatatttaagcaaagacaatttccacctacaacgactgatcatccccatcgagcacaccttattttactatgtctcgcatacaaccatagtgtggtttgcactcgagacactaccgattaacttaacgcaattaccactacattgcacttcgatatacacattcgacgtcacagtgcttcgacaaaccccacacttccaatctacttgtcacttccaaacacaccacgtttgataacacgcctttctaactaaacatatctcgtcttccaaatacccatcatatgtcacctattttatatcttcgatccattctatcctacactacgatgaatacataaaatatttttaacatagacgaacccattagtcg

SEQ ID NO: 87433 - DNA, 396 bp, Zea Mays
ggcggacggacgctgacatagaggtcgcaatcggcgttgcgtgtggggttgggtggagggggagggcacggacggtggcggaggcatgtggtgaaattgtggacgcccacgatataggcttatagagtagtagatattgagactccatcgctaatcccacctatccattactaaagcaattgatgagatctatttggtacatgcctcgcatggaactagacccattactgaaccaggaagtgatttttctcattgctcaatttcataatgcataggtttagtgtccctatttctagattctttcgtggcctccattatcaccaaatcaagttggttcatctaaacccttactccatttttcacattgttattttgtctaattttcgaagcttatct

SEQ ID NO: 87434 - DNA, 314 bp, Zea Mays
gcgacagattcagagttttctaggattggcaggatactatcggcgatttattccggatttctccaggattgctaagccaatgacggaattgttgaagaagggagtaaaatttgaatggagtcagaagtgtgaggatgcctttcatgcattaaggcagcatctgacaacaacacccatgctagcacagcctgacaacactaaatcttttgatgtatatagtgatgcttcgggcactggactaggttgtgttttgatgcaagacaacagagttattgcctatgcatctagagtgctcaagcctcatgagcagaact

SEQ ID NO: 87435 - DNA, 682 bp, Zea Mays
atggttgtaagtagtaatatgatccaaactttacatgtctcattgtattcatcagattgtgctccaaatgtagtaggaccaagagagtacataaatggcattgggttgtcaaaccaataaacatcatcacttaacagcacattgtatttcttcatgctatttttttgctaaggtagtggaactacttaacagcatgaagggataagaacgatgtttccactcacatggtcagcctcggcatggtgatggttgtaaatgacggcgacgcctaagcaatggttcgagttgatgtcagtgcccgtgatggggatggtggacaggtggaccaggaacattgtaaacccgattgggagcagggcaaggatttattccattcatcccatagataaatcaccgataaccatatctgtcaaggttccacggaggcacgaacgagtaagcaggcaaggttgatactactcacccacacatggaagaccttggcgtcatctccattgcagtgatggtggatttgtctgagcgagcaaagtaaaatcctaagttcggacggtggcaaatttattggtcctgtaaacaagcaacaataatgagatgcaacaacaaatagcagagtgcttggcctaaaaaactagtagccctagtctatcatatttgtttttatctatttagtatggttatgcca

SEQ ID NO: 87436 - DNA, 397 bp, Zea Mays
cagccgctcatcacttgcattgaagcggctcaggggcgcggatctccggtggcggaacgcgaatgcgaacgcggagtcaaacgtactgtccggccgcacattttctggaataactatgcatcgacaagggacgcgcgttctacaaaaatcagataccgtgaattaatgcatgcacacccctgtaaattgcgtgcattattgcatccagacgtgtcatctggttgcaccaaatacacagtttggaaaagcaaacctagctaattaattagacgatccaagtatcgaacgggacgaacctatacatcatctgtgccataattttcatccacactggccgacgcacactaccggaatcgacagctttgccgagtgtcacactcgacaaagagggctcggc

SEQ ID NO: 87437 - DNA, 738 bp, Zea Mays
atcactaccatgtcaacccccatccaaattgactcagccggtggtagaattcgagctgatagcatttgcttgaatgtaagtgtggaaataagggggatagcgtttctcgctaatctcatagcaatgggtactcagggaataggtgtcatcctagggatgaactggctagataagtatcaggcagttatcagctgtgataagaggacaatcaagttggtgtccccactaggagaggaagtggtgaccgagttagttccgcctgagccaaagaaaggaaattgttatcatatggctgttgatagcagtgaagcagatccacttgagattatcaaggttgtgttcgagttcccagatgtgtttccaaaggacttaccaggtatgccaccagagcggaaagttgagtttgctataaaacttcttcttggaaccgctcccatctttaagagagcttacagagtatctagaccagagttggttgaacttaagaagcagattgatgagctatcagagaaaggttacatccggccaagcacctcgcattgggccgcccctgtcctattcgtggagaagaaagatggcactaggaggatgtgcatcgattatcgagctctgaatgaggtcacaatcaagaacaagtaccccttgcccagaatagaaaatctgttcgaccagttgagaggagccaacgtgttttcaaagatagatctgaggtcaggttatcatcagctcaggatccga

SEQ ID NO: 87438 - DNA, 764 bp, Zea Mays
taacagtcagtcaccttggctaacggagaaggaaagcgtgtgtgacgataagacgagagaaggatatatacatatgcaatgcaatgagccgcgccaatgactagtagacccgtgagtcgtgacctataggttgctgttgacataaatttatattggagaccctacatctcgcgatctttaatttctgagacatcatccctgcactgcacacacacttctttgaaccatccaatggcaattcttcgacagacgatgctgcctgtacgtacgtacgttcagtcctatatatacgctgcatgcgccaaaaggggggaaaaagcacaaggtgccgcggcccaaacagatacagtatgattctagattttgtttttgctaatataagtatccataaacgagtttttataggaaaaaaaacgaggaaccaaaactgctaaagtaatttgatggtgacaaataatgcaagttaaatataggctgaaatggacaggtagttgttggcacatatatactagtacaaaaaaactgaaaactcgaagcaacggttgcacgcgcacacacacatggcggtcagtttcgaagtggttcatcagcgagtagtgtagtgcgcccaccaaatgagcccaccgtgtccggacgcgacaacgacaagggtggaaaggagaccacgcacgggcgcaggcagagtcaccgatccaggtcaatcatacgtgttggccataaacattttcgcccactttaattgctttgccgtaagtgcatgcacg

SEQ ID NO: 87439 - DNA, 1605 bp, Zea Mays
ggaaaaatcaccatataactatcttttgatgaagaaaatgatgataactgcttggcaagaacgaaacaatactggtatccgcctaggatccatcttcaacaacagatattactgctctcatacgaagaaatcatcaggagtagagaggatacaacaggtctctacaagatcttcatatttctatcacaaattatcatcactagtaatctagtggtcaagacatatgactcttctggctccgaggaccaaggacatgttaatgtctaatttggctccaagctctgtggtgatgtgggatttcatagttatttgtctactcttctcacttctggtagatcagaggtagataatggtaagcatgccaaaggatggaattaagtgtagttcggctacataaatcccaggtatgtgtccattcaagaccgacctttaccatttagcttacagtgtataccaaacttatcaaaggactatctagagtcaattcagtgactataagtatttacaattctgagagatatatgcgacacaagcatagaggtcctagataaaacgagtaaagtggttcgacaggaacacactatggttttcacaccaacatagtgaaaaatttctcagaataacctctcggtatactcgcaacttcgtgttgctggcgattacatgtccttttatctcatagtttgcttcatgtcattcagcgacaaagagagcaatgtgtcaacaaccggttgagcaatatatggctgaaatttctagcctttattcatttggtaaggtcatattgcttactaatagaatcccaatatgtcttcgatgcctaaaaaggactttcatgcattatattatatatcttcgggttacttcgggtaaaactttatgcatgaggagagagcagataattaacttatttgtgtttcattgtatttcaatttaatttcccagatttccaagcactattgagcttgatatagtcgttatggccacttggcgatatataaatatataatgccacacaacacaatcaaataaaatatagagctaaacaaaattgtttacgaaggttgcgcataatgtgactttaggggcttgaacaacccaccacaattcacgcgagtacaagctctagcgtatctagcgtcaacacgtgtgcggccatcagggctacgacaatatagcaagccttcgtaataaacgcaacaggcacaattatggctcggtaattggggtacacgataaatccacgcaacgtgcgcaacaggcacaatcgtggctcgcggcagacagacagtgcctacagggcatgcaaaaaatacgcgactcagcgatggcggtctgactcaacgggagcgatccgattaattgagagcgcgacatagtaatcacatgacgcagccaagttcgaacggcacaaatattgcgtcgtattgccagggcacagtcaatattcagctaatgccatgactcagccgattaccaacgcagcctgatcggcgtgtctgagtacccattatacaatttaatcgctcgacgtgagtccaaaaactcaacacatcataaatatttagagcgattttagtcagcgtagtatagtctgcacacacg

SEQ ID NO: 87440 - DNA, 1038 bp, Zea Mays
ctcagggagaggaattaatggaggacccaaggctgccaacggttgactgatgaaagatgaggagcttcctgagtcgaccaacatcagcactttcttagagaaaatagtggccattaacttaatggtctctagggcttcagtgtcgtgaacagcatgaaaggataacaccaataagtccttcggtgattgatctagactaacaagtgggttatcacgtgagtctggttgggccaatagctgccacaactcttccacgatgtgtaagggaactatatcactgcatttgtgagttgtactccaatgaaggccgcacttataacaaagacctttagccttacagtaagccatgagggccgaggctttacgttcatccgtgcctgatttccatactcctcccccactattggtaatcattggttttggaatacgttgaccatctggttgcaccgtcccaaaaaaatttccttgaagaaggggtcgacttagtggtttaggagctagtggagttattccactagatgtcgccaattcttcctgtaacaaagcaagaaatacagcagtatccaaatcgagcggatgatgaataaagactatggcccgaatttcaggtgccagaccatctatgaatctatttacgatagcagcaacactaaactggggatcatgtgcaagaatttggtgcaacagagtgtcaaactgttcaacatactcaacaagtttatcaatttgtctaatgtggaaaaattgtctaataagagagttgtgctgatcacgctcaaagcgagcacaaactgctgcacagaattcagaccactgtgccacacgtaacatcggatcggatgattgcaaccaaaacgctgctaacccgacaaaatgcattgtggcaattttaacccaaagctctcggggtatggtgaacacatcaaaataggactcactcttagctttccacattttaggatgatgtccatcaaattggggaaaatttagttgaggtaatgtagcagctaagcgagactgatatgatgcccaatcagg

SEQ ID NO: 87441 - DNA, 986 bp, Zea Mays
caaattttgaagtaaatcgcccccaaatgtgctctgtcagaccgactgatgaagatggccatggtatagtgcacgaaaagatcttcagatgcagtgtatcgtgccgccggtgaactccgctctgcgatcctcgctagtgtcacgattcgtgctgagcgcaaagtggataaccgcggggggtaaaagatctcgcgcgggggatgagtttggggcactatattgccctgtcgccgtacccacttgcccggcgacgtggtcgcacggtaatcaccgaggctgccgccgttttccccagtgtcccgcgccttaggtggtttactacatcgctttgcgccgtggaggttaaccagtaatagccatacgcctatgttcagtgaatgccacggtagaacgccgcggtgactcagtccctcttctcggccgccagcgcatcttctcaaaattgggcgccaccactgatgaactctataaattaatgccccagtgagccctgttaggtggttacgcgtccagtgcaccagccctcgcctccgattagccaccgtagctcgggaatttcgaacttcccccaattcgattctccacgccgccgtgaaccaccgcgtcgtgaaccgccgtttctaggttcgttcacatcctccttaccctcgattcaacacccttgtgtgctaaggatgcttatcggcccagccaattgaactagaccatgctagatcgctgggaacacctcgggttgtcctcggttttcgacgtcatcgtggacagagagattttgagctagaattttgcaattggtagagggattagggtcgccaggggtagaatttggtgtcgaccaagtaataagcttagcctttgcgtattccagtcggtacagactcgccggagggcgtgttcaccgtcgttcgtcgtcgtggacctgggtctacgaagaaacagaagtgcaggggcctctgtgcaaatgccagagagacagtgaatagtgg

SEQ ID NO: 87442 - DNA, 812 bp, Zea Mays
aatatttctcacattagcatgggaaaccttaacttgacccagctagatgagaatgatagaaattttcttacttcccctttctcttatgatgaaattaaaatggtgattgactcgttaaaacacaatagtgctccgggccccgatggtttgccggcggaattcttctagaccttctgggatattataaaaaaggatatgtttgcattgtttgtagatttttataatgaagtgcttcccatagaacgtctgaattttggtgtgattactttgcttcctaaggttgagaatgcgtctgagatgaaatattttaggccaatttgtctgttaaatgtttgttacaaaatcattactaaagttctgaacaataggcttgcttgttgcatcaaaaaggtgattagtgatactcagtctggttttattagagggaggtatattcttgatagtgttgttgccctacatgagattttacatgaagtgaaaaggggtaaacaaagtggtattttgttaaaaatagattttgaaaaggcttatgacaaggttaattggcagtttttatatcaaatgatgattatgaaaggttttggagttaaatggtgtgactgggttatgagaactgtcagaggtggcaaggtggctgttaggacaaatgacttaactggtcctttcttctctactcacaaaggggtcagacagggtgaccccttttctcctcttcttttcaatctttctgcggatggcctttctaatttagttagaaaagctcagcaagaaggcttaattactgggctcattcctcatattgtagataatgg

SEQ ID NO: 87443 - DNA, 455 bp, Zea Mays
cccggcgatgctcccacgcagtggatttggttccttggtgggggctggtgggcaatcgacgatcaaccgcggcggacagtagcgctccatttttttctctccctccccggatccatggcaacaccatggctacgaccctgtttggaggtcgaggaccaccgcacggtagcagcgaagcaacggaacctagttttatagtctggactccgaatcctacccaacgcgagaagatctcaacacccccgctgattccgccaggtgagcgctgcaacagatttggggagcaagaagctgcctgacggcgcgggcccattcgtcagtcacaaggcggtttcacagagactgacgggttggtcccacccaccggcgcactccacagatcgggccaggttgtggtaaccggtgggatggcttggtgggctgaaatcggaataggcccagtcggagttctcttc

SEQ ID NO: 87444 - DNA, 1303 bp, Zea Mays
tgtacctaatttcctcttcttggcggccgcgatcggcgctgttccccgcaaagggccctcgtcgcccgttgtcaccacctttttttccccggcggacagcagcatcggcatcgtcgtcccccgggtagccggcatatggcaaacaattcaactaaaaaacacagttcaacctaacatttgaaccgcggatatcccaactcctcatggcctccgtcttcggcacatactttcctacaatcttcgtggcctcgacctccacttcacacacaaatgcggtcgggttccgaccgcgtaaatccaccacaaaggcaggacttcgcaccaactggtcgcccagggttggcatccgacggtggcacacgtcgcccagtacccaaccttgtgccaagggccacactccatagccgataaattcctcaaccaagtcgtgcccgctactcaagcgggcagcatatcgaagggccccttcgtcctcgtcttcctccgccacctcgaatcgagggaacgccacatagtagtgtgagcacagaatggccggagagaggccaggcaggtctttgatatcaccaggagccatatagaaccaaaaatcccactagttgccccatttgttcctagcacaagggactatctccacgacttcagccgaagtcttcccagtcctcagcgtgaaggtgcacgatccaaattgtgctatcttatttcctatttttcttttctgccaatgcaggcaataattcttggtgaagacctccacagacggctgcccgccgtagaaagtaaccgcccaaacatacttcgccaacgcaaccacgacgttaggcgtcaactggtggacctgcacttcgaaccttcgcaacacctccaccacgaattgatgtgccgggaggcgaagaccgtcgacaaaaaagtcctaaaacaaccaactcgccttcaggctcggggatctcctctgcacccggtgcccgcctgacgccgtcaccaaagtaaccaagtcgctgcatctccagcacgcggaccaaggaaatccttgacgtaccgaactccacagtattgccaggctgcaactccatcaccgccaaatcgctcaaagactccttggacgacgacatggtaggcggcgcactcgtagcagacgaagaagaagacattgcaacgtaccgtcggcagcggcgcgcggtctgcttgatgcgggccagatttctgaagcaggagagcaaggaggacagacgagtttacaaaagctagggtttctactgcgcaaacgcaagccggaaacaggcccggccgcggtcggcttttt

SEQ ID NO: 87445 - DNA, 1456 bp, Zea Mays
cccctacccctagaaggatagacgccatcggtggcaccgacgaaatggggtgccatgcgcggttggagccgaaggaatcatcaagcatgatgtctctgccaagatcctccagtagttctcagcaggagcggattcatatcccgcttgtaatttctcagcggttatgaataaaatgtggtttcaaaactgttccagtgtcggacgtaggaaaagggtagcgaaccccaacctaggcatgattcgctttctctctctatctttctctttcttgccccctcgatagatcacagggtaggcggcacgctggacggcggaggaatgggacgaacaacaaagggatcaacgaagtgatgagcgggaacccccatggataaaccaactatgttactcttccctaccaaaactaattctttcaagttttcttattttacatggaaggatgctcagcaaaacgcgtcactgctctatgcctccctcgcatgggacccttgacgggaagggccccaagagaacgtaacctgaggcccctataatcgaaccttatgggagagagatgaacgaggtgaccctgccttcatcttcgttagaacagacctaagggacgtatgacgtgaacagaaggtcccatcaaggaagctggccgtgactgcgaacgcttacgcctcgaaggctacaacgatggtcaccagtggattcgagagtcctcaaaaatcgtggatacccgtcccagtaggacgaccgctagcaagaatgaagcaggaaaaggagcacgaaaccccgacaacatttattaatttgttcttgatcttacaattcaattggaaaaaactaatcctcgtcatttcgtcttaggaaacacgaaatatgcatgcctatatatcaggcactgggcaaatggttcgactgacgctcccaagtcttcaagctcaccgtctcgccatctgttggcatacctgatacatacttgatccagcttgatcgagtcctcgtattgagaccgagtaacgaccagggcgtggttgaccccgagccgaaacacttcagcctccagctcacgaatgcggccaacgataagcgccattcgggatgttagggcgaacaaatccttcgatcacggaatctcgagacggtcgtatggattccacaccagacctaggactgaccagccataagtgaccgaccatattaactgtgtctggcaccaagccgcagcggaagagtcggtccattttccactcatgacctacgggccctaggcctgcggcccactaatgacctatcaaccctaggcctgagtgcactggttgtttgcagggcccgtaacacgatgagacgcaccgagaccaggctacggaggctaagggtcggcgtgacacagaggcgacaataatgatgccaaaggtcttcaccgcccacttgcgcgaccaggtaagcccaaatgaccaaggcacctgcg

SEQ ID NO: 87446 - DNA, 491 bp, Zea Mays
gtaaagttgacttgtaattaggggacattggcagcggcatgtggacatcggtggcacaagttgcaacaggaacaacggatagggcagcgtcaacatcgaggtcggaggccttcaccaacaagacatcatgagacatagcgttgaggcatggccgcagacgcgataaggtagaataagaaatatagagcgagagaggtctacctgtacgtggacaacttcaggtgcaatgctgacgcacgactgcagcaagggctcattagccatggcgatccaggactgggcggtagacgaacgagatgcagggctggtcggcggcatgaaacgaggaagttagacaaacagatcaatacgatgcagggcagggcagatacggaggtatattttcctattatttctgtattggcgggcggcttactgtaaaaaaaacactaccatcataaatgaccgctggatatcaattggacgcttcctatttcaagtttgcatagttg

SEQ ID NO: 87447 - DNA, 1136 bp, Zea Mays
ctccgattgcttattcgtcaccttgcctcgcacctgcaagagatacagtctcgcatgcgttctctgcctgcacacagtgcctcctatcgtggtgccccaaccatcctgtgcgtgtccgtggacggcgcagcgacgccaccaacgcctgagcagacgtcgctgcctcagcacgagcaggccgacgtggccacatggcgaatgacaaggaatacgaggaggtggtcgacattgaatcgctgcactgttgatgatgaagatatagggacagacatagcagagaggattcgtccatggaagctcttccgtaaagacgcgttatggagctggtaacctcaagatctgatgccgatgatgtggaggggatggtttgggtaatgtactttccgccattctttttccaacgtcttcccctcctaaaatgcttgatgacaatttggttgagttaatgtatgtatagcgccacaataatcaaaattcaacactcgccaaatcctcccctaccctcattttttcatgtttgctccaactatgcggatgatttatttttctaacagttaagattttaccatcttgaaactctctttacttttttgttacattagaaaagggacaaagctgcagaaatcatgaaacaggaaaacataccatggagcagttagcagttaactataattcaacttctattttgcatattacttctcccacctttctctcccacgtttaagtattagaatggagagaggggaagaggggggcactgttcaatttttactgccaatatattttcttgaaaggaaaagaagagcaagaaatcgagttatgaggtaaattctaattgtctagttagggaattgtatttttttgttatcacggtgcttatagatcacgattggttctgttttttttattttctacaccttgtgttgcctgtttttggctgtagcgaagaacttcagaagtattgatcatggtgaagaaaacatatttccatctttatatagcccaaattatacttatgagtaaatacatgtaatacaagatttatctgtatcagggacaggtcctacgagagatcttttcttcattgtgtgaattcatgagaacctttatttaaaattctggtgtcaatttctttt

SEQ ID NO: 87448 - DNA, 445 bp, Zea Mays
gagaaggaagaggagaatagaaggaatcataagataagagttcgaggaagagcaggtatgtattctattattccataattccttctggaatacacaagctggctttatatatcagccgccgaccaacacagtacaggcccaaaagaattcaacaacctggcccactggcccagacttcactgcacaccacaacaacaattctcgctccgtctctacagggcctgcggtgatacctgtcaacctccggcgatctgggttgtgacacacccgtgccgcagtctggcgccctattgcctaaaccatttggtaatagcccaacggatttgcctctgtgaccactctggcactgcgcgaactcccaaaagcactacgagacatacttcgattaggagaaaagtccaaggaagggcatttctaatatattttgagagatatttaggaagtt

SEQ ID NO: 87449 - DNA, 294 bp, Zea Mays
tttgccaagtagctggctaagttaataagtatctgcagccaatggtagtagctagctagtgtggtttgatgcaaacatggtacgatcaatctattttatattatataggttccctagcttccaaatctaatggcgcaattgtggcgtgcatcaaccatgcgtaggcttctaccgtacctgatcgatggaccattgattaacactgcattcgtggtatgtttatgtatttggggcctttgccttgtcgccttgaattatttcatggagatcccacgcatgcattagcactgtgag

SEQ ID NO: 87450 - DNA, 527 bp, Zea Mays
attgtataggaagcccccagtgcacacttcaggtcacaccagcaacccctggccccgctaggagcactggtgcgtgattttcaattcaattgggtattcgagtggagaccgccccgatcaagacactagtgggtgcaccaccaggtttgaatgtaacatcctcaagtttgatcataaagagtgtcagatgtagtgtaactgttgttacaaaggtcagtgccatgtcattaagatccctcgtaacagaagtgcgagaatctatatggttaccgcaaataccgagccaacatgagagatattgatatctctgtgacattgtattcacgatcataaaattctcaagtttgaatgtaaaaagtgtcagatataacataaatgttcttacaatagtcactaggttgtcacgtacgacccctctgtaacagacatgtgtgaatctaggtggttaccgtaaatactgagccaacgtgagagatgtggatatcactgggacatggtattcatggttgtaaaattctcatgtttta

SEQ ID NO: 87451 - DNA, 366 bp, Zea Mays
aacgaacgggtttcggaaaccccaaaatgaaaatgtagtccctagatgagagagagccacgacgagaacaagaaacacaagcagacgagaatttttttccttccccgtagatcaatagggatggaatacgaaggaccgtgacaattttggcccataccacattcaaatgggagccgaggatagctggggaagagaagacgcaggcctcgtctccccagcagattgggccgggatacctaccggggtttggtcatccaaagaagcccttagagaaaataagagaagagacagtctagagggaatatatcaccataaggattagagaagcagatgtctgagcaaacccttttggtccagaggtctaac

SEQ ID NO: 87452 - DNA, 368 bp, Zea Mays
gaaatcccggtcacccgcacgacaccatgcccggtcgtgccctcggaagtgttctacgggtgacgccgaactctttttaccactcgccgaggtcccacagcgatgaggcacgactctcaacaatggcggctcaccccctgtacttcggcaagctctccatggcgaattggtttgggttctaggggtccacggcaaccggatataggcgcagctattgacgagtccgatcatagctgcgaatttcagggaagatgctagcaggatttgttgggcaccaccgcacgcgctggatgcagagttcgggtgagagggatgaatatgatagtgaggtcccacaaacaagtgactgagtaaggatttggggaggc

SEQ ID NO: 87453 - DNA, 457 bp, Zea Mays
tgacaaacaaagaatcgattgggatataagtgagtgctcagttattaaagtcaaacaacaaaccattatttttgaatcaatcacatctcaagaaacaagtttggctacaaaaaatatgggaagcacaagaagctggctagagttgattttttagagctaaaggtgttatatgtttacttagtgactaccacatcatttgtgaacatcaaattatagcgaaacaatgtttggttgacaaagcatataaaagtactgaagattaaacacctaaaagtaaaaaataaagagatgaagtttgtatcacagaagtcagccatgcctatttcagcatctactcataggctagcaagaccaagtttgcatcggccaaactgacttcgcctgcctaggtcatccaggctgggttacagtcagccaagctaactttcgttgtgccttttactatacaagttgacaa

SEQ ID NO: 87454 - DNA, 527 bp, Zea Mays
cacggccccgacgtgcgtacggttagtccgtggcgtgtgcgtgcggcctcgcgtgcgtgcccgcgtagtgcgcgtgccttggcacgactcgtcgtgcctcgtctaccccccctaacccctcgtctacccccctaacccctcgtctacccccccgtctcctatatgcgctaatcacgtcgtttatattaatgaggtaggagtcttaatttgggaattggctacgatagttaatttgtatattcaatcgtctatcttgttctatgttaatctactaaaagtgatcgcgtttacagtagtgcatgtagctaattcttttgttagaactgattaaaactagagcacgtgacgtctagtctttcatttacccgtagtgtccctcgagcataagcctcaacccttgcgagactttccctcgtttctttctaaccaaggtaaattcattatcgtatgtggtattctgtgcatatttgctttacttgttctcttgtatggtgtactgttggtttcctaatttcaatggatggatg

SEQ ID NO: 87455 - DNA, 335 bp, Zea Mays
gtggtactgcaatgcaaagaacggaaaagcaggaaacacatgcacgattcacgcccagttcctgccgcaggaccatctgctactgtggacaacacaggacctgaccccgcatggggaggaaaagataaactgtggacaacacaggacaggaccataactccataagcttcagattgtggaatcagattgagatccaaaatagatgaatgcacaaaaaagattccgaaaaggagaggtacctgaacatgtttcatgcaccgaaaaagttcatgttgtcttggaaccatgcatggaccaatcacagggaaacagaaaattacaaaagatcaactggt

SEQ ID NO: 87456 - DNA, 762 bp, Zea Mays
aaacaaatgaagcctggacatataaaggccattttggacgcatcctcttcagctatgaaaatctgattatatccggcattatcattaagaaagctaataattctatttcctgacgcattattgatcaatgtgtcggctatgggcacgggatattcatctttaggagttgctctattcaaattgcgaaaatcaatgcatactctgagcttacctgattctttcttctccaccggtacaatattggagacccactctgcgtatctgcaaggtctaataaaattagcttctagcagccggtgaatttcgtcctttattcgtgggagaaggtctagacgaaatgttctagctttctgcttgaaaggtctgaaaccggacttaatgggcagccgatgttctacaatctcatgacttaatcccggcatctcagtgtaattccaagcaaagcaatcagaatattctttcaatagactgatcatttcatctctaggatcagtctctagggtcttattcacaaaagttggccttggagttttaccatctcctatatcaatttcctccaaaggatcggccgatgtaaacccctgtcctaatttgtcgagatctctgaattcttctattatgtctcccacaaaggaattagatgatctttgcgtgacggtgttccctccggtctcaggggccggatcgttcgtgacactggttttatgctgtgatgaatgtttggtcttaaaagccaaactatctcgtaaaagaccggaccat

SEQ ID NO: 87457 - DNA, 454 bp, Zea Mays
gttttttgacaaatataagtagattttgtgcagagatgaacaaatcataaatattgatttattctagaacagcttattttttggctggaggtgcacttcatattagtataagcggaaggaaacaaaacatacacttctttatgagggcagaggtggcaaacattttgcagggaagactgaatattggacttttcacaaaccttgtattcttcctactttcccaggattaatttttacaggaagcttatccataatagtttaataaaaagacaagagctcgattaaggttcaacaacagcaaatttccatctcagacaatgccaaatatggtatgttggttttaactttgaggatttcaatctggatttacaaaattccaagcacacaaaaatctaactacattgataaacatttccaaagaggcatgatgcttcagtaacttatagagaaaatg

SEQ ID NO: 87458 - DNA, 589 bp, Zea Mays
tgtggtcgcccctgctattgtcgccccccctttaagcgtcgagataaggatccaccacaagcaaccgtggagaccgcgccatattccaccgttggagacgacgcagctgccacatagctactcgctcccaaccaccgactagtacccaattggagccacatatcctcgcctgatcgttgggggagtcgctcagacccatttctcagccaatgccctaaggagtgtggaattcctcgctagacatctccctccgccacggagccgctgtgcatcgtggattggccctcagcgctactaaactctggtaagtttgtcccctcacgtgtacgccatggcgtcagtttcctttttatgcatggtagaactcgtggtagagcctagagcctcgattgggcgtcgtcccaatgaagcgccgtcgtagggaggtatccccgttgtgtcggccgagcgagggatagaagatggcccttggccgagcgatctgaattggacggacaagattagaacctaggtatcggtttgatcaaatcaatctggggcattagatccagatcgtacgtgagcgggttgatctggacgattttaaatc

SEQ ID NO: 87459 - DNA, 436 bp, Zea Mays
gaatagaatagttagctaaatcatgtcttgtaaatctgatatgctaatattcgacctaacactcacaaatatttttcaatgttaacattctcacaaaccattaacatagtatttatcactaacaatcctttgattgacccgccagctgtacactaatcagcacaacacttaccaatcacaattttatgatgataaatactaattgttacaatattctaaccataattaatcatttaaccagttatcaccattagattaagtggatgataaaaaaggatgggatcccgtcccgcaaaaatccaaacggaggtggatcgatgcgatgatgagatatgcttctttcgtagttccatttttgaccatgtgcctgaacggtgtgagaaaacgtcaccgtctcgattcctattgatagtgacaaaactacgcgatatctaat

SEQ ID NO: 87460 - DNA, 291 bp, Zea Mays
ccaatgtccctgcacgggccccccattcgtgcctcataggggagatgaagaatcaaatgctgcattagattgaagaagccgggtggaaatatcttctcaagcttacgcagtaacacgggtgccaatctttccaagtccgcaaccacggttcgagataactcttttgcacaaagctgacggaagaaatagctcaactctgaaagcgctagccagacatgctcagggacatagcctcgaaccatcgtaggaagaatccgttcaatccatatgtggaagtcatgactcttcatc

SEQ ID NO: 87461 - DNA, 416 bp, Zea Mays
atttacagtgggcctttacaattattttattaattactatactaaatatgagccaagactaattaatctaacaattgttgttcaacgcttaatccacaactaatgatggtacctttggtttgccgattaacacatagggcaacccaacaacatccattctcccatgagcccctcttaacttcaacgccttctttgtcaaattgtatgaaaacttgttgtccttcatcacacaagcatgactgattgtcatgccgctttttctacacccctatatatcccatcagttggaactatgcaaaacacatccaaccaaatcactcccacacacataacatttcctaaatataccaaccgaattgcacctacacataacacatcattaatgctaatagtttagatcattggataaccctcct

SEQ ID NO: 87462 - DNA, 508 bp, Zea Mays
ttctaagttcatcttctctttcccaagtggcctcatcttccgaataatgactccattgaactttgcacatattcataacttgctccgactaattctgcgagatgttgccaaaattctgataggatactcagaatatgtcaagtcctcattaacgtcgtgttcttccatgggtaattgttcttccggtacacttaagcatttattgagttgtgacacatggaatacgtcatgctcatctaataaactgtcaggtaattccaactgatatgctacttctcctttcctttccaaaaatttgattggaccgatgtaacgaggagataatttgcctttaaccttaaatcttctcattcctctcattggtgaaaccttaagataaacgaagtctccaacctcaaaggttaattctcttcttctattgacagcatagcttttctgcctttactgtgctgttttcaaattctctctaacaatctgcacttgcttctctgcttcttgcagaaattct

SEQ ID NO: 87463 - DNA, 741 bp, Zea Mays
tgatgccacatattgaacatacatattagactcaacatcaatcaacattgagcctagtcatgtagcaacaaccgcaacaatggagaatgtacaaccctcaatgccaaagcttactacaatacaatccaaggcagtataactagcctcgcagcaacaacaaatgcatgagcacaatcaagccagcagggaggatgaatccgaagctcaagtagttaatagtttggtttcacccgccaaacacatactcccaattatgggggtacctagctttggaccacaaatagaaggcaaaagaaagagatctaaagaaaattatagcacataggcattcatggaccttatgtcaaaactagttggtccggtatcctaataacctttacccagaaagaccttcgacttaaggactacccacatagtgattctatggtaatcaactacaacatgatgttgcaacaactattttttaaaaaagcaaaaacttaactagcttgagctaatgggaaggatgactgtattggacaacatctaccttatttatatcttatttatagagtttacacattcaaaatgatccttaaatatttttatgaatcacttaacttaggaacataataatccatgttgatttttggacacgaatgaccatgatctcttcatgatgaggcttcgtttcgacgcaaactcttcgatgatgtcccttgccacctcaagattatccttagattttgaggctcaaacccg

SEQ ID NO: 87464 - DNA, 763 bp, Zea Mays
gtggtcttcgtcacggcggggatgatcgtcgaccgatgaacccggaattgctcactggaacccttcgggcccgtggagccgctcgtcgtcgtgggcagttccctctgcgcttccaaccccggtaagattcataccacgtacccaataggatccaagcgttggttagcacctgtcgttcaaaagttctaagcactgttgtgtgggatggccatcgccggccatggccccgtcgtggggagctatcggcgccgccgcacctgtctgcctgagttggggaggtgagggaataggcaagttatgccgtgggccgtccatccggttatggacggtggagattagatttgcggataccgcttcagagtcgtgatctagggcgttcatccagtattcaatggacaggatcatatcggcgataaccttctagctattaaaaaatctactccgcaggatctagatcatagggccgtgattgaaacccgccttcattaaaccctgaccacagatctcggatccaacggctgtagacacgtaccggcttgtttcactctagatctaatcccatccgttgaaagtagatctaacggctcagattcaccgataccccttcgtcgtgcgcttctttcaaaagagaccttatgttttactggaataaacccgccgtcccctcggggtctttactgagtcataggaattcttgcgcagaaaaccctgtgctttcctgtatttgaggcccaatccagaacagtattaaaccagagaattt

SEQ ID NO: 87465 - DNA, 430 bp, Zea Mays
caaaggctcttctcttccttggcgtgggttgtgtttgatcttgcgaatctcggcaagggcgcagaggttggagtcgtgtgttgcagagatcacgtacatccctggttggaggagcggcaacagccttcggtgtggaggagcggctgcgacttcagtgttacgacagcgtcaccaagccttcaccgacgactcgctctgtcttcaacacctagggatttcgcgaccgcgcgcggtctttcgacaaccatcacggttctgcgtcaaaccctcgtcgtcttcgatttctgggccgacgagctgtgttggctagggtgtctggtggcgtgtggtggcggtgattggatttcaggcggcgtgtggtggcagtagacttggggtatctcagctgttcgacacaaggcatcactggttttcttcaatccggttcgtc

SEQ ID NO: 87466 - DNA, 3314 bp, Zea Mays
ggacatgtgtttattaaacatatgcctattattgtcctgcgttagtgcttgacaagtacacaaaattggaactatcagctatgttctgagctacattagtccttgatgtgccagttttttagagcctgatttgttcatggccaaaatttgccaccaaaacttgccaacatctcacatttggcttgccaaatctttggcaaacattttttttctcaacttctccttgccaaaacttttggcatggcaaattccggtaacaaacaagcatgcacttaatcatctcaatcacccaatatatgttctgatatctcttatgaaaaacttgggcagggaactgatttttgatactgtgttttgatttcatgggaattcaggagatgtttggttcatttgttctactccatgatcagttaagaatgtgacataatcacatttgttttggcctggattgagcagaccgtaaaccatgtggtgtctgataacaacccagtagaaacccattaccggccaaaatatcctgcgccaggaaactatacaacttgtcgacccccttccaaattcatggtgcaaccgctcctttctcatgatcgtccaatactttgcttcatatcctttcaccaatggctggcagcaccttgctgccacatgaatcaacctctgctgccatggacgtgtctctcggtttcctggctatcaacgacttgtggagcccccctgtcacatgattgactgtggcacctcgtcgtcaacactcaataccctccaagcccacctgatttacttctggcctcactgtgagtgttgttgcccctgtccttgttgtctggattgcctgagttgtctagttgcagctaatgtgcaatgcaaggtcatcaagtcatctgactaatcacaattggttatgatttgtcaggcttatttgtgccatggtgatcagttgcactacgattactattagtcccgattagttgtgattaattcaatgggaagtagcaagctgccaaagaataaggggcaagtttctgctgatcccattacatttgcttccatccaaagttcaaacaaatactctattgtcttggtttgttccatcagtcgtttttcattatcccattttgaaccaaattaccttggtagccattaactaaagaagataatgtgattctaggagttacagtttcttgtggaagtgttcgttttgggacttggttttctgtgtatcactttactgcattctctggttgcttgctgctgatggtccaatgtgagaattaaaaatctgcaagaggagaaaggccatagtttcaactgtttctattacatttgttcccaaccaaacaaatactctgttatcttgattagtttccatccaggtgcttttcgttatgattaccatttgtgttgccattgtgaaccaaatactatctcagtagtaataatgaactaaaaaaaagaaatgtaattgtaggagttacagattctcatggaagtattgatggcaagactttgttttgtgtgtctcactttaccttcaccatgccaagttttactaatcgtaaataccacaggtcgcactccaatggatgtaagtacaactgctcaggagatatctaacactgatgttactgttttggaaggacacagttcagaggttagcagggtcctataggatgtaactatttttccctcttaaaactagtgaaatctattatattttcttactatttctttctctgtattcaggtttttgcttgtgcatggagcccatctggttctcttctagcttctgggtgtgtcctatattttcttactattattttctatattgcatatatatttgcatttataattttttgtgctcctgtagccatatgcttcggtacactaaacagttgcatgccatcatttccaaaattgtgatcagtggtcagatctttgatgcatcttggcttcttggacattaccgtgcattgcactgaaaacctaacctatggcaaacaatatttacaggagtatttcgtacagataatttttcatcatagccacatagtttagcgacctctttacttgtgttcttgtgtgaatgcataaaggaagcttgcattgggaggtgcttaataataattgaagtgttcaaaagagtgcatgtgagtgacaagtctctattcagaaccaggttcacccaaagtttaaaaccaaaagcgatgctcgcatagatggtgtccgctagaataaattataatatatctgggctaaatatgtcactaatatatttctctgcaaccttgaaactggaaatgtagcattccagaatcacactatttaggggtcggcagggtctttagtttagactggcatttccttttgactcattaacatgcattgatgcttctaatttctaaattgacaaactatagatcacataacatttaactatcttataaaaattgaaaagatccagctagcataattcatttaattgagacaatacttcttgctgtcagaagaataggaaaaatgtgattatctgacttttctcaaatttggtaattatagaagatgaatccatttgtaccttgattggagaggggtgagacaacgctatggcaggttcacatatttgtcctcggtggaggctggagacattttggagcacagtgaagaaacattggagctcgttgccattgtctagagggttgactgctagcattgcagttgggcacatgttctcagaaactcagccagaagtttagacagtggttgcagtcaggactgtcatccttgccaaaaggctaaaagctgcagattgatggctagtgggcaccaccttttttgataagtgggcacacttttcttgatcagttggagatgggatcttgccattcgcagggtggcttgcctattgtccctgctctgatgaggcgatgagctctccattatcaccaccacaaatgcacttagtgactcacagttacctgttgctactgccgatactcacccatcacccacgagccttctcattgtattttgttgctctggtgggattattcttgctagcgtgggacagatccaggaaggtgaatggacaagaggagtaacatgggttaggaatgtaggatggtaactgaagggagaaaaaaatgagtgtgctgttcctttgttttttatgtttcttgccattttcttctttcctttttccatggtttctagatgggagggaatcagaggggaagaagatgtggtgccaaactggtgcattacacgagatatgaaaattaatgtaaactttccacactaatatggctttcacaaaa

SEQ ID NO: 87467 - DNA, 842 bp, Zea Mays
taatataaaaacaacaaaacatactttcaaaaggtcgatctcttgctgcatacaccataccagaaaagcattgtgcagaatcgttaaacatgcaccaaagacaattaattagaaccctaggctgcaggaatacaagagcaattgcaggaaatagtaatattcaccaaaaagagggggaagtgttttaacaagagctgtataacacagtggtactgtggtataaatggttatacaagaagaatgcaaaaaaaatgtattacttccttaaacccagtgttctaaaaaatcaagcagtgaccgcactagtgcatcctgtggtacttgatggcgtatgtggccaagtaagtccgaccgtatgtccgtatggtaaataagcaaacaaaacaactaaagttgttatttcacaagctctggacagatgcatcagatatgctccaaaagtccaaaggacaacatttagacaaggcatacacacagatttcaaaatcatcttcaagtgttaggtgatatatgaaaccaatatcaaaaggatgaaaaaaaaaactcagcgaacttgcaaaattaacaccaacacataaagttctattttagatattatcagtttacacgatacctatacatctgtagcttagatttagaagaaccacgtgtcagcctacacattgcttttatttgctgtcaaaccacctatatgtagttaagtaggcaaaagactaatccatcaattgcagaaaagttgcagaggttcaaaatctcattgttgcttgcaaaggcatataaggctgaagtcactattagtcatggtgtagaaactgcagattttttttctcgtgaacaatgtg

SEQ ID NO: 87468 - DNA, 878 bp, Zea Mays
ggacaaaatcccctactgagaagaatcgttgccgcacggccttgtcgtgatagcgtcttagagtctgctggtaccgtgctgattggatcactgcatttagccgttcctcctcaagtacatcaatatcctctagtcggttggcctcagcttttgctatactgtcgaagatcaaccttggcgccccaaacttgagatcagcaggtagcactgcctccgacccatagaccatgaagaaaggggtgttcccatgcagggctcggctaggttgggttcttaggctccaaacaacataaggcaattcccttatccactttcctgcgaatttttcattcttatcgaagacttttttcctgagtgcttccaatatcattccgttggctcgctcaacctgcccgttggctcttggatgtgctacagatgcgtacttgatctgaatgctcttttgctcgcagaaatcgaagaattctgaactggtgaagttggatcctaagtcagtgatgatgctgtttggtatcccgaatctgaatattatgtcctgtatgaattccacggccttagcagaggttaaagaagcaatgggcttgaactctatccatttagtgaatttgtcaatcgccaccaatacatgagtatatcccccttgagctttcttgaaaggtccaatcatatcctgtccccagcatgcgaaaggccaggttactggtatggtctgcagctgctgtgctggcatgtgctgttgctttgacaagtattggcaagcttcacatctctgaactaattcggccgcatcgctcttcgccgttggccaatagaatcctgaccggaaaaccttctcgactagtgttctggatgctgcatgtatcccacattgccctgca

SEQ ID NO: 87469 - DNA, 579 bp, Zea Mays
gtgtttatactacatggtaatattttgaagaataacattgttttcttgttaggcttaacacgctcatgtagtatataactgttgaggcattgaccccaagatcgatagctccacctcctccctacatctttgaagattttttctctcgaatacgcaggaaagctacatatcattatattaagaaggaaaatgggtgatgtttgggaaaacctcgaaaaacaccatacaaaactcacaccttactagaaactttacatcagaaagagagaaaataactggacccttgacctactagacccagagttcactggatggaaggttggagcgccaggatgctagagagtcccctagctccagccctacaccaaagatggaactcatctttgatccctcccattgatgaccacactaatgctaggctggacaccgttgaaaatacaccgccacatgtgtttgagtgatctatgcttagacagaactattttgaggcaaaaccatgtaggcctgttaatcaatatgttcctgctgtttttttctcgatcgaatatgttcctgctgttatgctttgttgcttgccga

SEQ ID NO: 87470 - DNA, 881 bp, Zea Mays
gcgacggcgagctcgcggtcgcctccgtgtacttcatatacgtgattctttggactcaggcagccggaggcggaggcggaggcgacaccacccctgcgtggacccgcacattgtttaccataccagtggcgccggtgcctttcccacacgtagacgggtatctgaagcaccggctggagaggtggtgcaacttcagccatggatcgttgctcgcgctgttcagggccaggggcgtcttaatcctcgaccttaacaccaaggccatggaggaagtctccatccccgacttgcacaacaaggcgacgatcttcatggctgaatatggtgctaatcggaatcagacgtggctgccctacgagatggacgtggtggagttcttcatgctccaccttggtggaggtactgtctcagagattggatctccatagatgttactatttctttcatgctattatatttttagtctcttagctatttatttttagtctcttagctatttatttttagtctcatgatattatattattgttactttttttatgatgcaagtcggatacacgaacgtttaggtatttttttaagcaactccaaaggaacgtgtaaattaaatcaaaacagatattagtgaagaatagtggtttttcttactccaacagcctcctcattctttcaaaaaaaatagcgtcccgcatccacaacctcctctccctcatattttggtgcgttccgtccgtccccagcagttatgtaaatcagatccctaaatttacaactctatataaaacccaatttcatttctacatttaataacctcgttaggactccctaaataaacgttgatgctaaatccatcacgaaaaccatacttcggccaccgtttc

SEQ ID NO: 87471 - DNA, 579 bp, Zea Mays
caggccattagcagattagccgagagttcctagcctacatcgtgccccctctagtaggaaccgaaggtccatggctccagttgcacaccacagaaagccttcgttggcaacattttgaagaaccactaagacctccgaaatagatctatcaaacaaacccccaagccactaggataaagagattgttgattcctttctttatattcttagaagccaaacaagcaacgctactccaccaactcataaagcttctttcctcatgttgaggtagagaggaaagtcctaggccctgcaggattagaaaccacacttgtttggtaaacacgcaggagacaaataggtcaggctgtagggtgtgggaggcctcgctttgcaagccggtttgtagtacacagttccacaccttatttttcagcgccaaccaaataaatagtttgcatttgggaggagcccaagatctccaaaccctcttccaaggagaaaattggattgttcctacaaagaaaacctcgtaagtcaatttggtggagtaggacccattctcagagagattccagaggtattgatcagcgacccctt

SEQ ID NO: 87472 - DNA, 445 bp, Zea Mays
taattttctaccaccctccgtccctgttcatatcccttcaccacccggaccgacatttcattttccattctatttccatgaggccaggcgatgcaggccctcacaggcacacagcacaggcgtgcaatgcgctctcagcggcccgttggcgtgaacaagatgcaaccgttagataaggccaggatttgcgtgaaaacgacgaatcgcagacgatgacacgacagggcactacagccggccggcccggtcgtttccgttccgttatgttcctcgatctctccgtgccatgcgagtgtaaacacttgtactaactggtagtggtagtgagaggctttgcccccatgcagctccaagaagcatggtcacatgcatgctactctctctcaggcctacctgcaatatacagctgctctctcggctttgggagaacgaggcaactcacaac

SEQ ID NO: 87473 - DNA, 682 bp, Zea Mays
attaaaactatagctgcagccctaaacagcaagaatcctaattaaatttctatttagtttctacagtcaccatgtgcttggtactcccactattctgacattttatcttaaagtaaaactaaaaccacctacttaatcacctagatagattggtctacttcataaccatgcacacaatcatttcgtatgaacttgtagttctaacatcaacttcaccaattaaacacaagcatcatagacaacactcgtagaatttatcggctagtcatttgaaacattaacctactttcgtattactaattcaccacataccgcgactgcttcacaatcacaaacaccagcacctcgcaaacattaaaccaattcaaaatactagatatatgcatcaccacctaaatctcgccatacatataagctacatctattttacaatcgtgaacactctcacgtcgccttatcgcgcatgcaacaaacaagatcatcatcgactaatgtattgaaccaatctaagtatccaaccaataaaatgaatagtgaataggctcactacaactaaattgaactcgaatctcgcaggaccgacgatgatcaccggttcatccaattgattgaatatccgggaaacattgtgctggagtcatcctcaccataaaatcaaggattcctcacctcacaacatcac

SEQ ID NO: 87474 - DNA, 333 bp, Zea Mays
gcaagtgtggttgacttttgggaagagagaacacttgttgaagacgattgtggtgaggccttcattatcggagtcagacgagctaatgtctgaatcccactccttgctgatgtgggcttcacctttctccttactatagaacttgttcttctctaccttcttccctttattgtcctcttccgggtcatcgttatcattatatggacaattagctataaaatgaccagcctcaccacattttaagcatgtgtgcttcccacttggcttgttatcattgttctttagaccctttaagacttgcttgaatctttagatggcaagtgccatctcctc

SEQ ID NO: 87475 - DNA, 378 bp, Zea Mays
gaaaatagacgaggaggcccaccgacaaaaggatcaggtgctcaaggtggcagataagtggtacctctcgcacttcagggtagactgccaccagaagaccgtccaagaaagggagataaatgccgagtatatgttagccgtgctgcaacagctccccacgataggtgatgccaggtcagccgatgatattccatctattaaaatttcttttgataatcggattaaaagtattacggaggatatagagaggatgacacatgcattaggaaaaactcacatgcctgattttttatcacataaattaggcgctgaaacaattgcgccaaacacatcggcgacaaatgggttttcccagccatattctggtgtgtcgatgga

SEQ ID NO: 87476 - DNA, 651 bp, Zea Mays
gggacaaggcagcttcagcagcaaaaagtcctgtgaagccgaaaaaacggagaattattcaagtgacagatgtgatccatcagacaccgccaccagcgacggtgtcaaaaattgtctctgccgagactgccgaagccgaaggcgccgcagccgaagctactagagtggaaaccactgaagctgagaccggcaaagccaaagctaccggggtcgaagccaggacctccgaagagtcgaacctgaaaactacaattgaggttattgacaatatactcctgaaaatggctgaagaagaaattactgtagctgcggtgagcacggcaactgaaaaggggaaaaagcaaattgatgaaatttctgaagaagaagattttaactttcaagatctgcttggacaagagttacagacgctgagaaagaggagttgaaaaaatatgccatatcttgcggatataaatcaggggctatgctatttggtggggtgaacgaagggaaactaagatgccttcggaaccgcaccgaggccaaaattgttagaaccctttccaaaagcattggcttgccgaagctggaagcggacttgtgccgttatcaacgacaccacatcaccggaagcttgctttatgctaacttcaaggtaacaaatatttt

SEQ ID NO: 87477 - DNA, 712 bp, Zea Mays
gaccactgctgcaacgactcgaggaagaacggggcggcgagcgatgttctgagcaactcggttgcgtgccacgaactgacgttcatgggctcctctttatagacagctatggcaggggcagccatgcattcacggaggtgcggcgaactgtgcgagcacgcgccacccgtcagataggctgtgtgtgcatgcttgctattcttggcgatgagctgaggcaggctgcttcgacgtgggtagagccaagagggagggaatcacgatgctacgtcgtgtctgacagtagatacgcacatggtgtggcagcggagacgtcggcgttgaacgtggcgaggtgcacgagacacagataagggggacaacttgtgctgtagcaacgacgacagtatacgcggccatacggtacgctgcgcacacgtgctgctgatgacgagacgtgagctgctcagactttgtcgtggcgttgatggctatggcggaattcacggtggagtgctgagacggggaggacaacgaggagaggagagaatcccgctgctgcagtttggtttgtagctcactaaattgggtgttgctgagtgctactatttcaccaagtgaaaagagggattatgagcagtacgagggagtagcaagaaggacaacgactacttgatgccagatgtggactcttgtttgcagagcgattaaataaatagatgcatgagtaaat

SEQ ID NO: 87478 - DNA, 286 bp, Zea Mays
ggattggagaagggaggcgcagaggagaaggaactggaggaggagatacgagaatattgattgtatttctttctagtctccctttttcttaatacagagtcttatatccctcgcaacacacacccaacccctgaattacatattgacccactcagggcccatgatcctggtattggccttcagcacacttttgggccttgcttccttgccgtgtccagattccttctcctccacgcctccagccttggtttgcttcatctgttgagctggagtgctgacatctccc

SEQ ID NO: 87479 - DNA, 512 bp, Zea Mays
agaagaacccagggggttcggcgcaaacctcgtaagactcagcgaatagtgaacgtggacggctggttggtttaggacaagccgaggggctcgtttgcaaaaggtgtggccgaaagggtatggttaagtcctggccgcccgatcaagcacgagcggcgctgattagatcagcgaggttatgaatcagggcgcgctttcagccatccgatccgatgtgggtggttcggatcagccaacaaaggcggcgaagcggtacgcaacgctgaccgtccgatccgagattaacgctctagatttaatgagatccggatccagcgctaatcgtcaatcaaccgaccgacgaccacgatccaatcatgcgaaggggtacgcgaactctaatctcatccgttcaatatgaatcaacggccctggagtcgtcttcctccctcggtttcccagaatggcggcgccgcctagagcgcggcggcccatggccggagttctccctatcccgcgcagcggagcactga

SEQ ID NO: 87480 - DNA, 840 bp, Zea Mays
atttggagttcatatgaattttctatgaattaaatactcctagcatttattttcacattaaaaatccttttataattcaatttctcgggttttataatactccggactaggcctcaattcctggaaagtccaggggcctcggggtaacatttctaagacacggcgcagagctacaggtggatggcgagttattttatgataaatgcagggtctcctttgtaaaatgggcacggctgagggaaactccagatccaagccgttagatcaaaacagatggcccgaattagatttacccatccgcgaaccggtacgtcatcttagccgttcattatcgcgccaatggtctagatctaaccgagcgaatccgtatcacctgaattaatcacgaccgtccgatctggatcctacgaagtacacgatctcatccttcttccccctccgctcagccgtcaccacgacggcgctaactgcgcaacgatggcaatcgcgccggcaagcgacccagtcgagcagagactccaaaagaaagatgcgcaacacatttactagaacatgggaagcccgggggagggttgcataccgagggtaacgcggggcagaacgctgtccatggggtctgaggtccgcggcggatggaggagtccagtgacaaattgagtacggcccagacgcaatttctctcctccccaaggtcgcgcatccacaggaacgttctagcgatccactggaacagcgtcaaggagtggtggacgtctaccgcgaggtggacgatggcggcgacgctcgttctctctccctcagccttacgacgagtttagggtcaccggatttggacgcaac

SEQ ID NO: 87481 - DNA, 496 bp, Zea Mays
aagaagcataattaaaatccataatgtgaaacaatcatcgagattacaacttaacaaaaaattctaacatacccagaagtcgtgctaaactacagcttgcgcattctcatgttgtgcatttattggaagggcatattgatgccatcttgtgacagggacctccttaccatcctctatcaccaatacaggccatttcatacgacatatattgcccaacactttctttacttgtcttcgacgacctgtgctggtgaaactactatccacccaagccctaacagcacaagaacaattgtcaaattcaaaatataatcgtgtaatagtgtaagacataagaacgaagcaaggatactcttacccatcttcagaatctcccactaaggattctggcaaaacctcagtatctatattaaaattggtcgggagttcattttcttggttaatttcttcaacttctgttgcggctctgcattagatgcgcgtacctatattaaaa

SEQ ID NO: 87482 - DNA, 500 bp, Zea Mays
ttcaggggttatattgaatgaatctggacctttttgcaagaccctttctaaagttgtggactgtgggttagtttatgaagtccatggggttatgttgtaaatcaggttcgactgaaggggtttcgctcactcagagccgtttgatcaaaaaccgatggaccagatcaaacaggcgaaacggttcgccaggatctaatcctaaccctccaacccgatatctacggttcagatttgaaatgcccgcgatcacactagatccgtctgatcatgatcggacgcacccacgcactccacccattcagtattccccccgatcagatcacagccacctgtaggcacatcgacggccacaactccctcctcaacccacgacggcagtcggcgctcggtggtggtgcataccctccactaggcggtgcatcaccggagcgccacgaattggcgcatcccatgccccatacgtgaatccagatggtgattgtaacacccctggtgttact

SEQ ID NO: 87483 - DNA, 597 bp, Zea Mays
gtacgactgactcagccggacagtccgcccatggccataggcgtcagcctccacacaaagaaaggaaagagacgcaagggcagagccaacatgacgcacatggtcggctggtaaaagccggccctactttcgatcaattgctagccaaatatgctggtaagaaggccgttctacgtgatcggccaacaaagaaaccccggtcagccactaaaacaaaacgaccgagtaaaacggcccgaaagacgacgcaacaagcgttgcttattcatcctatcatgtcaggatgctttccacccacctactcatcgtcgatgtattgtcctgttcaaatatgaaatggtacgacgatgaacccatggtacatgcgtactccctttgtctattcaggttggggggcacctccattctattatttttgatccattgatcaaatggtcacgaccgagaaagatgcaatcctaaacgacctttatgcattggggctccattgaatgatcaccatattggattggaaaagccaatgactagcattaggcttagttcatatgcttttggttcgtcaacctccactaaagggcagaggggcatatgttgagc

SEQ ID NO: 87484 - DNA, 1076 bp, Zea Mays
ttgagttcttccataggtaattgttcttcaggtactcttaagcatttcttaagttgtgacacatgaaatacgtcatgcacatccaacaaactatcgggtagctctaactggtacgctacttcaccttttctttccaaaatcttgaacgggccaatgtagcgaggagatagtttacccttaatcttaaatcttttcatgcctctcatcggtgaaactttaaggtatatgaagtctcctacttcaaatatcaactctcttcttctattgtcagcatagcttttctgtctcgactgtgctgttttcaaattctctctaataatctgtacttgcttttctacttcttagagaatttttggaccaaatacttgactttctccggtctgattccaataaagcagtgttctacactttcgtccataaagtgcttcaacggtgccatttttagacttgcctagtaactattgttgtacgagaattctgcataatgcaaacttttatcctagcttctaccatgctttagagtgcaagatcttaacatatcttacaacacttggtttgttcttttattttgcccatctatttgcagatgataagatgaactaaagtttagtttggtatccatggactcaagtagtcttttccaaaagcgtgaggtaaaatgggttcctcgatctgatacgatcttcttcggtactccatgtagacaaacaatccttggcatgtataaatctgctaactgggctcctgagtaagttgtcttcaaagtgtgccactttagtcaacctgtccactataacccatattgaatcatagccatcttgagtatggggtagtccaactatgaaatccataccgatttcttcccatttccattccggtactttgagaggttgtagcaatcctgctggtctttggtgttcggctttaactcgttgacacatgtcacatagtgcaacatgagtagccacatctcttttcaaaccgtacgaccaatactttttatttagatcctggtacatcttataacttctagggtgaatagaataagccgaatcatgggcttcccttaaaataag

SEQ ID NO: 87485 - DNA, 735 bp, Zea Mays
cggattccacacacaggtgaagtgatctgttggaaaaaacaaccgacggcggcggctgaaaaactgtgtctaaaccatagttctgataccaattgttaggatcgtaggtggaaaaataggagacacggagtttaacgtggaaaaaactcttccaatgtggaggagaaaaaaaccatacaaaaacagatctattgtgggtacaagaggacctatttatataggtaaaagagatatagatagagtcacataatcttatccgacagttcagctcctcatgtagaggacacaccctaataagccaaactaattttgatgaagttcatattaacacactttttccgtgtgaacgcaatgcaatgcaaaaccagccaaccatggagtactcatccgttgttggagtacaggagttgtcgtgcttctgaatttggaacctctagaaccatcactgtcatgtttcctagacacaattttagggggccgaatctgatgagagtgtgatcatcgccgcgcgcgcgtgcaggtgcagctgagctgaaactcaaagtgtaaagaggccgtcccggggaagacgaatggcagacagccataaagcccgcaactaaccagcatcccatgaagcggatcgggcgggcgcgcatgaaaggaaagcgacgggggaccaaccgtgcggcaaccatgagtgctgcggacgtaaccgtccgtaaccgtagcaggggtagttagtttgttcccaac

SEQ ID NO: 87486 - DNA, 580 bp, Zea Mays
ttttgttgggaagtacaatgatcatgtggaatgtgatgtggtcccaatgcaagcatgtcaattgcttctaggcggaccttggtaatatgatcgtgatatccagatttttggaagaaccaacaaggtgtctttcttgtacaaaggagagtgaatctctttgcttcctttgacaccggaggaaattatgaaggatgatctaaagaagaaacaacgagagagtgaggaccacttgagagtgatccataaaaatagtaaggaagagtttccaaagccaaataaaactctacagcctccaatgaccaagacaccgagaaaagagggattagtcatgatgactaggaagggggatctaaagtaattgagtgaacctaatgccatattctttgtgctcttgtacaaggacacccttctttctactaataacttaccctatactttgccaagtattgtctttgatgcattacaggaatatgaggatgtgtttcctgatgaagtgtcactagggctaccacctaagagagggattgaacattaaatagaccttatgtctagcgcttccctcccaaatcgtgttgcctac

SEQ ID NO: 87487 - DNA, 534 bp, Zea Mays
tgctgtgtcttttgaacgcttgtttttcgtactctgttttacacttatactacctgactggatggctgtgcgccgaggtgcaggctcgcgcggtttgatctagacagatgcctgagagtttgacactttctgtcgcatgtgatttgcactaggagcaggatagcagatgaggtcaaacgaaacgatgatgcgcttgagatgggaaaatggctgctcgacacggttgagaacttgagatggcatacgagcaatcaagcaggggtcactaccacttccggctataaataagagataaataagagatgagaccattatctcatgagacagccatgcaatgtcgccaaggatttaggaacaaatagtttttttgtcattaacgacaacattgcgtcgtggtttagttggctatcacgtcagtctaacacattgaaggatctcctggctcaacatttttttcccttcccttaagtccgtgttaaagaaactgcatcatgcaacgctggaaattttgctaaacaaatgacggatttgcat

SEQ ID NO: 87488 - DNA, 390 bp, Zea Mays
ggttgtctcgtctgacagtgaaaggaacaagtgtccgtgtggaataggagccgtgtctgcattctctggagctctcttagccacacgaatccacgccaccgtcccctcaaggtgtcaacatgccatcagaccacgtcgacaggtagcggcgtgcggtgaaacggacacggtgacaccatcacctaattacatacagatacagttctacaaatttttttaattcacgtgtttagactgggacttcgccctcgagcttggaagtggcttatgtgttcattggaggtcttcggagcgcgggaattttttgaagaaacttatgatacccagtagattgaatggttgatgagtagaagaagtacgttaagctgagacacgtgtgtgcttgcagcg

SEQ ID NO: 87489 - DNA, 710 bp, Zea Mays
ctgcctggcacgcttgcacatcattcccaagtgcaatgggtggcctcctaatgccaaagcgagaccatatagggcattgaataatccctttcacattctccctctgactctggtcattcttcacataaaaccactcttgcatccaagagcctagccaccttttccaaaacgtgggcacagggtaactcgcctcagatcgaggcacgaagctgtaacaaccaaaattgttgtgatactgttcttttctggtcgccttcgtctgataagacaactcatgaatattgcaaaagcatcttgcatctggatccagtccttggctcctcatggcctagataaaacccccactgtaataagagcttcgggggtaatctgatgaagatatatctcaatgttttcaaaacatcgaccatcattttatgaagcgggaaatgaagcccagccttcatgaagctcctaaagactaccacttcatcgctttctggcaggggaactgtgtcctctcccccagccctcactatagatacatcatgaaagtatttccccttcatcgattcaatctgaccttgcttgatggtggatttcctgaaaacaacatggttcggcctccatggccggtcttcgacgtcttcatttgcactctctacgtcaaaactctcactatcgctggagttcttagacaacccggccaacatcttgttggtgattttctc

SEQ ID NO: 87490 - DNA, 1429 bp, Zea Mays
actgcagaataaaaaggatgcaaataaatgtagatgcatagaagttttccttaacagctttagatttgcttacctagccccttagggtcttcagtatatatgcttcatctctaggaccatgttgttaacagtacaagattcagagccctcccttctatcctgttgctgcatgtcttgtactggaaattttttatgaccagcagggacctgatcataaggaggtttgcctgggatgaaggaagtagatggcgaccacacgctcatgatagggttacttgaagcatttaaggatgaaggttgaaacagccttgccttgtgtggttggggctgaacgtactatggaacataaggtgaacaacatgaagatgtactaaacacctcctttggctaagagggttgagtagctggcaaagcaatctctttctacttgttgatagtgtggtgacaggttcttgttgtgtggcctttatcctcactacaaaacggcttccttggaggcacatggaacctgccaaccaagcttgttcctccacttcctcctctcgcagctggcaggcggaaaacgctctgaaagggctgctgctgagaacatgcttgctactggcctgactgcccgtgagactgggtcgtcttttctttgccctgtgctgggttgtgaatgctttggacatatctaggatggaatcttcctccaaagcccctgacggctttgttgttcttgtgcatttcttcccttctttagcagaaaacattatcagcccttatgtactcattcatcttttgcagcaacttctcaagggagtgcggaggtttcctagtgaagtaatgagctattgtgcctagcctaagtccattgatcatagcctaaatgatgatgtcatcttggactactggcgcctgagctcaaagatggagaaacctttgtatgaatgaatgaaggtattcatttgagtcttgcatgcactagaacagggcttgtgtagtggcaggctttgactgaaaaccctaaaagctggtaaggatcatgtcctttaactattgccatgaagtaattgttcttggctgaagtgatgagtaccaagtgtgggctacattttttaccgccatgactttgtcatgactgttgtgttgtcaccatagaaggatatggtagctttgtagctcatcaagaactgcttcaggtcagacaaaccatcatacataggcagtgttggagatctgtatagtggtggcctaggtgtggcttgcaattctggtgtgagtcgagaggttttgtcatataggaaatcttggaagttgtatgcctctggaggtgaattgccaaagttgtgattgtactggtttttgtatgattcaatgttgcgcatttctttggctgcttcatcaatcttcttctgcagcttggagagacaaagcattttttctttgc

SEQ ID NO: 87491 - DNA, 681 bp, Zea Mays
tggaggtgccgaagacacaaaaaggtctagcagcgacccccaagagaaaaaggatggcagtgtactagatgtgctggagacaataaaagcttcaagctctactccagggaaaattgccaaggcttcaaaagcgcagattgaaaccgagacaaagctgaccgaagccgaagctacaatgagctaggccgacgccgaagctgggccttcagagcccgccaaggagaaatccttggaaaccggagaaaaggcagcggaagaagaagctatagaacagattctgcctgaaaaatctgtcactcttattcccgaagcgccttccgaagttcttgattatattattcgacacgcttcgggaaaaagattatctaaagaagaaatttttgaagctaaacactacgcccgagaactgaagtacccgaaaggggccttagtgttcaatggcacagatgaagatgacttcttgtattgcctcccagacaacaaagaattatccgtctgccgggagatggccagaagtatggggttcccgaagcttgaagctggcctctgcgccatgacgaaggacgatcttgcggatagccttgcatataacagtctgaaggtacaaaaattgtatatttggaagtttatgaattttgaattattcttttgttcttatattaacccgttcattcttttcat

SEQ ID NO: 87492 - DNA, 323 bp, Zea Mays
ggaacctctaataaatgttcaaatatttaagtttatagacctaacactatctaatgagtaatcccatccctgaaccaactatatttgaacaagtgttataacaaggtagacatggttagagaatagtaaaccaactggcagagtgacctacaccaaacttaggaagcaccttattgtcttcacctttctattgaacatgtgtttactctgtttcatatgttgggtgtgttgttcttttgttattcctcaagcgtgatgaatgaattattgctttgcgtagacaacgaaagtctgtgattcttgagggagttacaggagaaatc

SEQ ID NO: 87493 - DNA, 526 bp, Zea Mays
atataattaaagcatacagaacacaacagctaacaaagagatcctacgaacatgacataaaacagtaaagaaccaggtagcagtgacactaattttcgagaaaaaacacaaacttaaatctgttcgaacacaacatgaaagcacaaactgacactgacacacctaaacttcacaattcaactactagcagtgacactataccacctggaacctgcaagtagataggtacttgtgtaattaaattgcagtcacaaggaagaagttattgaaaatcaattcatttttacctaagcatctgaaagctagcccataatcttagcctgcaacctcatgtagtaggtcttttgctcttctgtcaatgcaccaagatccatagccattatcctctcttcgtcactttgcttctgtaattcaatctcctctttcctcaccttgagaagtgccttttccatgttaactcggtcgacttcaagtgcaaacgctttattgaacctctcctcttttttcagatctttctcagcatcac

SEQ ID NO: 87494 - DNA, 359 bp, Zea Mays
atgaagtcctctctcttcgaaccactaatgtagattacatacatgtcacacacaaggaaacaaaaacgaccacaaggaacagctcaggcatcaagcctttgtgccttgccgaacaactcatgcagagccttgtcttcggtgaaacatcatagcctgccctcctcctacaccccaagcaaactaaagagacactaggatgaaaaccctcaaacacacacgcatttctatgcttccataaagtccaagcaaaaagaatgaccagagagttgaactctttccttgtctctttagacactctattgaccgtcgaacgccaccaatctaagaaaactatctcaccatgttggggcaatgaccta

SEQ ID NO: 87495 - DNA, 498 bp, Zea Mays
gtttgatgttgcggtgcatgcttacaccaaatccatgtttgcaatctcgatcacttctacaaaacacaagaaatctggatagaatgatcgctcctggacaattccgactaagatctagagtcgactctaatcggttttgtcaaaaggcatgttgtatgacaaaatatgattaggccactttaagactagacttgggttcacaacatttttggaggtctcgcgtttgcggtgattgtcgactatctatagcattaggttgctttagaacaatgagttgcatgcgaaccaagaagaggtcaattatggactccgtcgagctctggttagcacaccaccaaattcacctactattgattcttcacttgtgctattgtttttgagcctcacaagcacatttggaagactttggaaccattgaaatgcaagttctttctctagatggcaacacaaaagcgctactagacgatagaccacatggctcgtcatggcttgcatcac

SEQ ID NO: 87496 - DNA, 672 bp, Zea Mays
caaagaccgtcgaagcggtatttttcgacatggtgatacttggatatttttgcgggggcttttcactggtataatatatgactctgcctcgttaaaaacctcacccctcggaaggaaaagagcgtgggcatgagcaacattgtttgcagaattacataggcgtgtaggccctgagacttaaacaaaaaatttctggagattgtcgatgttccaggaatgctctaagtcttcgccggatgatgttgccagcctatacgcgcacgaggtctccaatcgacatgacaatgaatggacctttccatttcggctccagcttgccctatgattctgtgcgggtggttcggacgagcacgaggtctcctttgttgaattctcttgggacgactgcattgtcgcgccaggccttggtttgagcctgatatctgtcgagggcctgcagggcgaggacgcgatctccgtcgatgagatctttggaagttggttcatcgacatcggggactgctgatgtgtttgttctgggcgacccatgctttatctcttgcggcgtcatggcctcggatccatacaataggcggaaaggtgtgaatccggttgcccgacattctgtcgtgtttagggcccataccacttcaggtagctggtcggcccatttgccctttttgtcgtcgagaa

SEQ ID NO: 87497 - DNA, 773 bp, Zea Mays
ccatggagcacggagaatttgtactcgccggtgactgagaagggggaaaatgtcgttgcgacgagctcgggtggaattaggtttgttggggctatacggtcgcaaagggctaccgattcaccgagcacactcaatttggggagatgtggagaaggcagtacgaattttggcttctaccaagttcactggtgaaattgtgagtgcctcgccgtggtctatggcgctatttatagccacggaggtccggctaacgaacaacgtccgcggattgcattgttcacgcatggttaccacatagagaagaggcacagtaaggggaaaacgaggcatgggtgacaccacggcggaagtgaccgagccacaaagaccgcaggtgggatatctccggcacgcacgactgggttcgcgggatggtaccacgtccgaagttatctctctgcgatcgactcccttcaccaaatcactcgagcacatccggttcaacagtgcctcagatcttatccgcgttcttcagatatttacagtgttttgatcttcagcattttactgaatcgaccacctatcatccccactttctcatgattcttgttaagaacagggtaacctcccttaataaaatttgttctccaaacaacagtctttaagtttgttatagggttcatggatcaattctgtatagattctaagatttggtgctctcaaagtgactgcatttcactgggaccatacttttctgaatccagtgttcagaactgcccaattggcttctgaca

SEQ ID NO: 87498 - DNA, 349 bp, Zea Mays
cttggcaataattctgaaatagtttccgtgcacatcacattccctctagcatcatgaagctgaaaaagaaggatttcctatcactaactcaaagcaatatgactgtcagtgagtatagagataagtttagccaactgtcttgctatgctctagaagaagtggataccgatgaaaagcaccaagagcatttttctggaaggcttgattggacccctcaactatcagctatagagtcacaactttgctagtttcaataccttgctcaacaaggctatcagtctggagagcaagagaaaggagctgactgaccataaaaggaagtcccacactcaaggcagaccagcaggaa

SEQ ID NO: 87499 - DNA, 466 bp, Zea Mays
ttgcactctagtgcggggccgtgtccgagtggaggcgagccggccatgacgggctatcggctagaccataggttggcggcaatggcaggcgagctacaagctagcgacggtgtcctaacggctggcgaagacggttgggtgggcggctaggcggtaggccaacgatgatgaactgactgttggacgccgattgggcagcgggcacaacgctaggacgagcgctaagcgggggttggatgctacaaacgtgcggttgatgcctttctcattctgtgttttagtcgacataggtcgtggcctaggatgatgggctagatcttgtgggttagtcgatggtataatggtggtcaacccggtgtttatctaatttggtatcatgtaccttatattttttattttgtagtatatacaaaaggtaggtataaagagtttcaaaaattgaggtgggaccatagcccactttgcc

SEQ ID NO: 87500 - DNA, 542 bp, Zea Mays
caggaagggggaggggaggggcggccaagaaaggggaaaaagggggcagccacctaggattttttgtgggaggaaagaaacgacgcctctgatgacttctgacttagcatccaacggcccacaaccctttcccacatccacgcaccgaagatcaacttttggccaacatttttttggaatattacaccatatttcctaagtatactaatctattggatgaggactatcatgttcaagaaaactcaagcatacaggatttatcaagacctaccattctctttctagaaactacatgttttctactatagagtgatgcccatatttctctaaaccacgacgacacaattatggtgtgttcaattctaggtgttgttcttgctagacctactattcccgctgatcttacatcttcattggcatcaacaccaaactttattgcatcgtccattgaacctgctcttgatttgtctgacccttagatgtatgtgtgctctgacatgaccaacatgatgtaggcactgggattttctatggactctagt

SEQ ID NO: 87501 - DNA, 817 bp, Zea Mays
gggaactgcattaaaaatccagatggacatttggtggctttccaagttcttccccagggaaagtggaaactaaaatcttgttccagatcctcacatctaatctctcccacaatgactttcaccaaacctaaaaaactttttctaggtttcttggcaacatttttagcaaactgagaggcatagaaacctaatccatcagccgccataccaacaataggcatggtaggtttactttgtttaggccaaacacatttagcagtgacatgagtttcttttctacaaatctcgcaccaaagtggtttgaaacattccctagcatggtgaccttcatccccacatttctggcaaaaaactcggcgaccaagatctagatccataataacgggggggggggggggtcggatgattcatgttacctggatcaacgccctcgcccgacgatgcagtctgcagatcttgcttggtctccgttttcacctgggtgggtctcaaacgccagctaaggttccggtgtcttccccaaggaggtgagttttgacgttgtggcttagggatttggcgatcccatttcgcgttcttccctttcggatccatctcagtcgagtctttagggatttggattccaatccctaccctcggtcacggatccggagaagggggaggacgaatgggaaccgaaatccaaccaccacagaagctagatttcacagcggaaggcaatcgccaaagggatgagagaaaggcagcgaggtgaggaagagggcgacccccaattaggtcattgggaaaccctagttttccagactgcactaccgca

SEQ ID NO: 87502 - DNA, 755 bp, Zea Mays
aaataatacaaaagaaaagaaatatgttaaaaaaatccaaggtggaatttaaattccaaaggaaaatcctagaattgggaaaaagagaagaaaacactatacaaacagtataaaataaaaatataaatgaacaaaaattcagtttatgttgtcatgtaaatatagaaaattaacctgagtttgaacttcccacaaaaatagattcaaacttgaaatctaaatctgaaaagggagaaaacaaaacaaaaaagagaaaagcttgggaactcgactgggccgaatctggctggcccaactcggtttccctcccgcgcagcccatctccttcccttccccttttctttattcctggcgcttacatgtgggccccatctgtcattccattcatcagccgctcggtctcaccttgaccgccatgtgggccaacggcgcagaagtctcttctatcttccccactgaactcagtctgttgcctccgtcagaaatcccggtggctgttgaaacaaactgcccctagcaaaccggagctcgcccggttgactcggtagtcattccccacgatgggataggtatgcgccccctggctactttgctccggcagcttcggcgtgggctgttgcctgcgtcgcgcgtccgaacgaggcggacgggtcgtttctggcggtgggggattaaaaccccgatggatccgtgaacttcttcccttttctattcctcgctctcactagcaccgctctcgctggatccccatccta

SEQ ID NO: 87503 - DNA, 876 bp, Zea Mays
actatagaaactgaactattacaatagacgagttgatgattaaacaggcagtggtaacagtagcacaaaagttcatagctctatagcttagctccctccaaacgatcagacatttggaaacctaaaaataatccttcatagtaacttcagtatgtctgcctaaactgtaaagcacatactgcaactctgaaaagataaaaggaaaaacaaacatgagttacaagttctgaaccccgtgcattatagctctagttctgattcagattcgagttctgattttgaatctggttcggattacagatctgatataattgatttttaatctgatataggttctagtttaagttctgattatggttctgatttggattcttatgaccgataaaccatgctaaaagttccaacctatgtgcacgccgatttctcaagaattcaagaaatttcagacatttaatcatcctcatctgctctgcggtaagaaccacctgaccagctacaggatcaaatctcaaatcttaaagtgtcttttctgacttttatttaagcatgtctgtttacttgggtcttctttgggatgatcataggttgtggtgtggttataaaggagtgttctttcaatcagtacatttgtcctaactttgtgctttcaggaaatgtcctcaacaactgatccatctatctacaaagtagtaattgtggcaacataagcttcaggaaattgcataaagatggttctcatttcatcctttttaatagaccaccttagattatcatacttcttaaaaaactatgatacttggttgctaacagcaaaaatgcatgaatgtgaaacaattctctaccatcatcaggaagaattttgttaaaaagataatg

SEQ ID NO: 87504 - DNA, 597 bp, Zea Mays
atcgagtgttagatctataacaaggggtagggggacaattagtgtggctcaatctctacattaagtagaattccccaactccccatatcccaaaaccctaaccctagtttttctccacattcgagctaggagagcgaaaggaagggcctagttggcgttaccttattgtcctaagcatggacgatgataaagaaagggctgagttgtcatcatatgtgtgtgtaaggtcgtgtgtggccttagagcaacgtcacgaggtcgtttgatgacaacgtgcatgcaacgctgccacttcaccatgggtttctctatctcttgagttgaaaatggagaggagggagagagtcacatgggggaggaaaaagaagagagccacacatagaggagagagagaaatgaactaggaatttccatttatactcacgcttgagcgtaggaccgggtatttttttcactgaaaccgaaattttaaaaaccgaaccaaaatattggtgttacgatgttcggtgtcgatttcggttctgtgtcttatatatttcagtctacagtgtcagattcagtttttgccctatagaaaaccgaagtaccaaataatcg

SEQ ID NO: 87505 - DNA, 903 bp, Zea Mays
caactttggagctctgtagcttttaaattctagggttttttccctaggtcaccacatcaaatttgtagacctatcaaaggagaacaattttgcttaagagtgtaagcacagttgttatgaaaaatttgaagataatcacactcaaagttaggctgtcaggctgataaagtctgaatttcagactgacaatgcaaccacagagactttgggcatgaattcaggcatgaacaagcaagaatttgcttaggattgctatgacaatattgtagctggtgtgtagctctacaactttgctgtagagatttgggcaagttgctatagaaatctgagagaaatttggccctaaactatgattgtcacgcgactgaagaacaaatgccatggtacactgctctgagtggatcagaacgccagctcacctcgccatcgatgatcgtcgtcccgattcatgcgtggtataggatggacaacgccggggagggataactcgtatgtggcgccatctcccgagctcagccggagttattcaccggcggccaccgaatcagtcgtttccgccgcggtgtcctatgcaccatgatcctacctcactataccactcctctacgtgctaggcatgcactaaagaagttatccgtggctgcgaagtgatcgccggaccgccgcggctataaatagctcgtgatcaaggacgaggtatgaacatcacacacacagtgggttgaatcgaagccaaattcacgctgcctctgccccctcctctcaaattgattgtgcacggtaaaactagagtcccttacggccgtatagccccaagctccaccctcaatttcacccgagcacgccacgacgccgttttcccccaaatcggtcagccgcaccgccgagaacagcgcgtccgag

SEQ ID NO: 87506 - DNA, 377 bp, Zea Mays
cttcgtatgaaattacaacaatgtccttagttcctacacataaaaactacggaatctactaggggcatcatcgtctttttcttccgaagtcttggcgcgcacgtcagtaaatcctttcttcgtttcctcgtcatccgcttcgaactctgtaataagattcgtctacatacttaaactaaaggttcttttattccgcttttgatctgtattagtgatcttcggcaagcataaattgtttgctcctgaaacaaattataagatggttaagactagctaattttgaggacctttgcctcaccctcaacagagcccatggtcattggacacacagatcttgagttagaccattttgcctctaggttaagtggttcaaccaa

SEQ ID NO: 87507 - DNA, 492 bp, Zea Mays
tcgagttatcacccacagacagatggacaaactaagagattaaatcagtgtttagagggtttcctaaggtgcacgatgcattcatgtcctcgacaatggcataagtggcttcccgtggcagaatattggtataatactaccatacactcttccttgggtcgtttgccttttgaagttcagtatgggtatgttcctcgcacactaggaattgctaatctaaagctttgtactgttcccgatctggaaacatggatgcaagaaagagaattgatgtatgaattggttaagcagcaattagcacatgctcagcagcgaatgaagagccaggcagataaaaatcggtctgagcggagttttgaagttggtgatcgagtatatttgaagcttcaaccacatgttcaatcatcggtagctctgcgatctaaccagaaacttgcattcagatattatggaccctacactgttctccagaaagtgggacaggtcgcttac

SEQ ID NO: 87508 - DNA, 891 bp, Zea Mays
cgtgacggtgcactgcattgttgacttgtgtccgctgatttcctgatgagagccgaggtagaggcgaggggttggtcgtacgcctgagcccccaggtgaggggttgcccataccattgttgttgtaacaactttgtgatatgggtaaaagcctgcttatggggtgcctcagcgtctctgtgcggggtgaagtcgtgattccttgctgcgtttatcgaggtcagagccctgctcgggcgaggcggaagtctttccgaggcgttggttgagccatctcttgacgtgttccacagtcggcagagtcgccgctcgcgggattagtggtggagcaggtatccgaggccgagcttgggcgaggcagagaaatcacccaaggccgaactcagcctcaagcaagacagagattgcgcccgaggctgaaatcagcgtcgggctagacggaagtttgcgccccagggccagactcaacatcgggcgaggcggagatttgcacccgagggtcgatctgcttcacccgtcgtattagatgtcccattgggggatggcaggtggcatgtacatactgtagagggggtgtaatcatgctattgcgcccggatatgactgttgtcttgttagccactgtgctcctactgccacggcgtgggctaggtatgcacattaaatgcgattgttccccacctgttcttgggcgagacggatggagcggtggtgaagtcggacgaggcggagttctgcctgaggtgggagactctcggagagaggcctcgggttaggaggtatctcaattgcttccccttgggggttatgccttcacttctcctgagtgtgttttttggagggataatctgggtacccctaattatcacctccgacagtagcccccgagcct

SEQ ID NO: 87509 - DNA, 486 bp, Zea Mays
tagttgttgacacagtgataagtaaggcaaaaagtgcatggtaattagtcccgtatggtgtaaagcagacttgacgccggtcctgtagccatcccgttgctggcatccttcatggaggagagttggtgacgtcctttggtcgatgttatctaggccgaggccaggctcgggcgaggcagaggttcctcccgaggccttggtcgagcctaccttgagcatgcagtcgtacagggagggggttaacatagttttcagagtgacctcctactggattcacggggatttattgcaggggcagttggccaaagttgagtgggcgaggcggtgttttctccgaatccgaggccgactttgggcgaggcagaattccctcccgagggtgagaccatgctctaacttacgcatgtcccatctagagttgtttgagtacagcagacggcgtgggggcagtagccgctattcccgagcgtgcgtcgtcgtagttgg

SEQ ID NO: 87510 - DNA, 600 bp, Zea Mays
taaatatcctaaggactctttagcatattggttcggctgaaggggtaccctctcctatggactattggatcaacaatctgtggtgcagattagatcacgacttttatgaacctgctctcgccctcatccgtaggatcccagagccacagtgctgattagaagaagccaaccggtatccccccttccgatcccatcctcccgattctcaagcaacggttgggatttaaaacacctagatctaatcttgtgcgttcatcagagaatctatggttcatatcagatcttgccgaaccgttttcttagatctaattaggaccgttaatcctcagatctatggccaagcgctcctcttccacctatcgacttattggacggcgacgcccgtggcccgcgcggtcgcactcgctaacgtgccgcccaatccaaccctctggtgcatcgaactactcctagatcggctctactagacataatacggagcaaggcaaaattaacagaggttgtctcaccgattacgaatgccgctattatgctttccacgacactcatagcttggcagcggagacaaaactctagcgagcaggttcctccaactccgac

SEQ ID NO: 87511 - DNA, 1123 bp, Zea Mays
aatttctagaatttctttataacgtcaggggctattctacaaaatctgaggaccaaactgttagttccccaaaactgtgggggacggcaggttcattataataaagaggaggggttcatatgaaaaacaccacggccgaaggggtatcttgaagcttgggccctccgatctaaaatggaagatgcagattagatcgtggatgggacgaagcggtacgtgtctgaggccattagattcaagattgatggcctaaattttaagtgttggagaacgactcgaatctgatcgctggtagaccaatggtccggatctcaccactgaaccagcacaaccctatctaatccagaccgcacactcgagatccagcggccatagtgctttctcctacccacgtcggtcctaaacggtggtgccgccaagctccgatgaacggtgggacatggccggagccacccgagttgatgccctagaaccccattgtgaacgcgagtttgtgtagatcatagagtatgacatggcgaattaaaggggatggttcttactagcaatcgggataacaagggggcccaaaatagcgcttggcggctccacggggaagcttggcaatggtgaggaatccccaagactttgggtcgtcgacacgcgccatgccgctatgtacaggttcccagagacctaggggaacaccgacaccccacaagggaccctagctagaagtgaacgcatagggacaccgcggtggccatttccctctcatctcacctcccagtgctcggtaatggcatcttcacccatggcaagctacccctactagatcctatggccacggaaaggtgcgaccggacctatatatgctcctagggcaacaggttggaagggggcgtgcactacggagcgtggccgaagactctaggtttcggttgtgctggaacggacaagagggagatggaagatctgacaggtgcggcccataagtcagcatgagtaagagggcgacatgtggtgtgttgggcgactgacgaggcgggtccaccagtcagcatgaacacagttgggctcggcggggtgtgaagggaagtggggtctgttgggcccaagtgaaggtcagcccacattagtattt

SEQ ID NO: 87512 - DNA, 422 bp, Zea Mays
ttaagagcttgtgctcttaaacatggtggtagttgggataagagtttaccgtatgtggagttctcttacaataatagctaccaggttagcttgaagatgtccccatttgaggctttgtatggcagaaagtgcaggactccactttattaggatcaaactggtgagaggcagttctttggacctgaaatcatacaagaggcagaggaacaagtccatcaaataaaggagaatttgagaactgcacagtcaaggcaaaaaagctatgctgatacccgaagaagactgctagagtttaaggagggtgatcatgtatatttgaaggtgtcacgaatccggggtatgagaagattcaaagttaaagggaagttgtctcctcgcttcattggacacttcttaatcctaaagcgagtgggagaggttgc

SEQ ID NO: 87513 - DNA, 518 bp, Zea Mays
ttttcttccctgcttgcggcctgcgctgcgtactcgttctcgtagtagtaccaaaatgggactgtctctactcggatccggccatccgagtgctgtagcttgttaattttgctccgatccctgccctatacatgcgtgatgcgtactcattcttcgtatactgccgttgcccatttggtcagtttttgcacctactgcatgcgtgtacgcgacgcaaatgcaaggcgtccagctccgagcggcccactgcaattgcaacggcgcatatttttatgcggatgcaccactggttttaaaaacttgagttggctggctcgcactggttgggcagctaagcatcattttagtacttgccttgcttgcagcctggaaatgctcgtaaagtgtgaaaacacgtagttttttttttcttctatctggcaatgtgttccacacctacagcacaccgcttgttcacaactcatgaatcctgatcatggtttaattcactcgaatgggagttcattgttgtaattgtt

SEQ ID NO: 87514 - DNA, 416 bp, Zea Mays
cacaccgaacgacaggttcagtttagcttttgtgcgtttaatagaatattgaggcattacactagatggacattcatctcccccgaatgtcgtgatgttctaaaagcatacagataatatccccaaccacaatcatccagttgtggccattgtatgctattgtggtgatttatttgggaaatcttacacacattacagataggggttttatgcagtgagctttggacttagattaatgtagtggcatgaatactacatatttgtccttcaacatgaaggattagtctcaacatccagagagacacgcaacaacaagttacttcatggttacaattctgcaaacttatattgttattattaccaaatacacagtcaatcattaagatttagactgatatgcgcaacacattttttta

SEQ ID NO: 87515 - DNA, 445 bp, Zea Mays
tatgataaagtttgatttgatgtccataaatcagtggttagggaaatgtactccacacctttaaggacctttgccagagaatctttttcagactcatacacctttaaacattcagctcttatggtcttcctaccaatgaactcatatgaaggattcaaatatctcatgacaatgttaaaccaagtatgctcaaccatcctaaatggatactcatgaactattatcatcttagcaattaattttttaacttgctcatgattataatctttaggagaagtgataggagggaggccagatccagattcacctgccgttgatggagcaaagtttagaagagattgatccaacttctgtgccacatgcttcaaatacccatcacaaattttcatgtgccttgacaaatgagatgttgttgatccttgtatgtaagaatatagcttcttac

SEQ ID NO: 87516 - DNA, 272 bp, Zea Mays
ttttgtgtagatgctcacttgctaaaagctcatcaagaggtcccatctaagtcacatgtgagaaagcgcttggggtagacatccacattgcatatcttgtattgccttgtcatgtgcaaggtatatacattattacgctcctgatgataaatgaaaagatgcgtaccacaccttttcattattgggatccaatgtccttggatattatgggtgatgatgtcaaccttaagggccacaactagtgccttgatcttggtgacagctatgggagg

SEQ ID NO: 87517 - DNA, 407 bp, Zea Mays
caggagggtccaaatgcaagttcaggagttcggagaagcggcgccatgatggagtgccctcatcttgttgtatttggatgaaccacagctgggcgacgttgtcttggttgtaggaggccatccacatgcgttcctcgtcgatgatgcactgttgatggaagtaggactcacatcgattaaggaacacccatggatcagttttgccatcatactttgggaagtccaacttctggaaccgcggaggtcgatcctggtgatgatcgtcggtgtgctgtcccttcccgcccagggcagaggactcggttcggcggtcctgctggagttcggcgaccgaaagcttgagggattccaccgttgctgcaagggattggatgatggtgactaggttggatgtgttgggttgtttg

SEQ ID NO: 87518 - DNA, 505 bp, Zea Mays
ccacaactgaagaacatgacatcgacagtgaaagggagctgcgaggtgcattccttcgagcaataccacatcgtcctccaaccgctggcgtcgaggcggatgcaactgtagctttcgtgttctcttgcaacgccaacctgtctacaacatatgaagcacacgacgttcagtaagtggattttgcctcaaccttcaagtagataactgactgcaaatttaatgttgtatcttggatctggaaatccatcgagcataatcactagaccagattggcgtgtctgatcgagttccaggatctaaagcgttaggtgcatgtatttagtaggttttgatttgtgtattcagtagtttaaggatcctgtgccataacctctgatttgttgttagctatagcaaattatcaaagtgatttacaaccatgtatacccacttctccaggttaacactgaattatgaattcgtttcctctggtaccttgaagcatatgtgaaatcacttatcattt

SEQ ID NO: 87519 - DNA, 784 bp, Zea Mays
ggtagcattgccatccgacagccaagcatgagcaaggccgccgccggctatcaaccgctatgctccatagtaggtggagtcacctcccccactcgcaggcaatgaattcttcaacctgtcaatgggtttaggaagccataatgatgaaggctacacgttcgtcaacatgacctccctgaaatccaggaacaggggctagcacagtctgttgcactggtctgtatcctagtcccttggcgcgtgcggtggccatcgtcggtcgccgctcaaactcacggcgtgctcagtctccattgtcgcacacactcgagggggtggagtcccaaaatcgctcggtgtgccggtggagaccagcaagcaagccattactgggttgcgccttcagcaacctcatcacgcatgaggtggcaagccgcggcgaagagggcccatgaaagctctccatgtaagtcggtgttccccacacccgagtcgtcggccaaaagctccatggtgtttggggtagcagccgacagcctccgtcacgcgtttcttacccctcgagccagacgcacagcgaagctcagacggtttaggtcagccccgaaccttacgtctggaaggtagcatgagaacgaactcttccctcatagcagggttacatttgtctatgtcccagtccggtaaggttggccttcgtaaacccggtttatggtgccatctaagacccggcctagtcagagccgcccttatgaacacggtctcagctaaaacatgtatcccattgcaaaggaagagtcagtcc

SEQ ID NO: 87520 - DNA, 540 bp, Zea Mays
ggacgtgacacttcctggatgaaaactccgggtggtacctgagcttgactggatcctagtttcgacaacgcgtctgctgctgtgttgcgatctctttccacgtgatgaaattctagcccttcaaagctgtcttctaattttcggacggctgcacattacttgcccaaagaatcagtcgagcaatcccagtatttatttatctaacttaggaccaccagtgaatctccgtataccatcaacctcttaacgcccaatgatatggcaaagttcaatccgtggatcagagcttcatattctgctgcattatttgatgctaagaatgacaactgaagagcatatttgagttgctcacctccaggggcaatgaagaggattcctgcgcctgccccctacagttttagcgagccgtcgaaatacattcgccatacttctatagcctccgggttgtcaggtacttgttgctcggtccattctgatacaaagtcaaccagtgcttgagtctttattgctgtgcgaggccgaaactcgatgtcgtgagcc

SEQ ID NO: 87521 - DNA, 552 bp, Zea Mays
gcacgacccattccttgatagaaatacagcactgtagactcattttacaggtggagcaaaagaacatagaagcgtatcaaaggaaagtccacattattttttcggaatcgttgcaaggaggcacatttagggtgtgtggtgtagccaaaaaaaggagttaaaaaagcatctgtgctgtccagtacagatggaaggaaaaaggggaacaaaaagtacgcattacatccactgcaaaaactggaaacaaaaggcattctgccaacatagtcaggtaggaacatggaaaagcgaagggaaccatggaaatgatttgattagctgcgagaaaacgacaatggcaagaggtgtgcacctgcgaaggtagatgcgcagtcgtccaacaacgctgtgatcctggaaaaagcggggaccgcgacacccgcactgagcaacaaactgagaaaatcgaagtgtactttagaaaaggatctatttaccaagcgtcgtcgcagggcgctagggacctttctagataagccaccagccttatcgtttggtctttccttccttttt

SEQ ID NO: 87522 - DNA, 658 bp, Zea Mays
cgggcggacgtcgtcattggttgtgtccatgcatgcacccgcaatggcgcactattgccacacctatggtgtccggacctaacaaccatcgtggtgtaaaatgtgggcacggtcatgcctgtcctgtcgcacaagcacaaccattctctgtctctaccaaacccttgaccagctacatcatgggcgtcttggacatgtcatgtgcccaaagtcctttaggggtgccaaggtcctaggagcacggggtgtcacagtgccctcatactcagcgaggctggtggacgaaggaggccttcctagtggtcgctggctctggtgggagccctaggacatgtgttgcttttggacctcgtcggggacgaaggccacctgtgggttgtggcacgtgtcgcaactagatctcgtcaatagatcgactagggttcccgtagggtgggagcttggttgagtcgtacatggctggggggctacggtccacatgtaatgggtctctaggcacacatttttcttcttgtagttgagtcttcttgatatgatccaccatgacggcaggattctcagcccgtagtccgtggtttgtcgtttatattgtagtgcgggatacctatatgcatgggtgctaacactactagtcttgatgatctactggtctgttatg

SEQ ID NO: 87523 - DNA, 1371 bp, Zea Mays
gacgaccaagtcaatgccaagcaaccttgtgaggcggggcacgcgaccaagtccctaccaatcaaccttatgaagcggagcagacgaccatgtccctgccgagcaaccttgtgaggcggagcggatgaccaagtccctaccgagcaaccttgctaggaggggcgggcgaccaaatccatgccgagcaaccttgcaaggcagaacggatgaccaagtccctgccgagcaaccttaccagggactagcgtaagacaaggatggaccaacgatacgagcccatgttggtgggacaagacgggtcatcaccaaactagttccgagcctcgggtacagcgttggaaggtctctaacagatgttagacgacacctcgccacgtactgtctcaagcgaaccaccgctagcgaataggactagtcaatcccaatggaagggatctcagcatcagagtctctacagtgaccagaatatctaaaaggatgtaatggatacaccataccgggtgtatgcctacacacatcgacaagtgacatatgcccatgatgacaggcgaagctacgctacgtgttaccgtgccgtggggctgacccacgggacccaccgccactactacgaagatatcagcagtggactcactatagggacccatatgaagaatgagagagacaatgcgccatactaggggtacggctatgcacgaccctacggatagcacgacattgagggcacaacgtcaagccaaggcaatggatcgacctcataccaaggagaaagcaagtctcccctgtaatgtcctacccttgaactataaaagggcaggtcctctttattctgtagacacacttgttgtaacacgctcgaagcaatactacgatcaacactacactagagtagggtgagaacccgaaccagtataaaccccatgtcccaagtttatcgttcgagtcctagcgattcgccattgagagtgagtctacgctagcatccccaccgaacacaaatcttattgtcctgtggttttcgaaaccatgacagttggcgcgccaggtaggggagcactagtgtactaagcgacaccttccactccgatggcctagtcatgagcattcgtcggaggtgagaccttcgctccagggagccacatcacctttggcaccctcgacttcttcgtcatcgctgtcggcgagctcagcctcgtcgtccccgacatgcccgacatcatgggcacacaacctagacactccactaggaccaaggcagagaagcgatgcctaaaaaggcgtgtcaccgccctaaggtggcgcctcaataggcacactgggacaaaggtggttgaagcctcgtgctcgaccctagtggcagtcatcgatcgc

SEQ ID NO: 87524 - DNA, 391 bp, Zea Mays
tgggatctagtttgttttaagtgttgactttttagatgttgcctattcacccctctagaaaactatcaattggtataagaccttggctcctcatttgggtctaacaacacgaagatgttagacagagaatccctcaagagcgagaaggtcccctcgagagaagcataaagagaagatgtcatcgggagaaaagcacaaggagaatggtgaataatccatttacttaggttaaaaatccgccaggtcctacaagaggagagatgacacgaagattaagaaggtggtatactatgagtccaacgctttgacatcgccatcatccacaagtagaagcaaatccccctccaagcgtcgccaccaacaaaagacgattaaaaaattattatcgcac

SEQ ID NO: 87525 - DNA, 570 bp, Zea Mays
ccaggacagagtcccggggcaagctagagccaaagtgggaagggtcgtacatagtcaagacgaaggcattcccaagtgcttacaggctaacaacttcatccggcgaagacttagagcactcatggaacatcgataacctccgaaatttttttatttaagatccaaggcccaagcgcctttgtaattcctcaaacaatgtcattcaggcccgcactcttttcctcccgggggtgaggtttttaacgaggtggagccatttaatataccgccaaaaagcccccgcataaaatccagcaagcatcatggtcatgagtgtcgaaaaacaccgcatcgacggtcttcaacattcgacgtataaatagtcaccgcaagaggcaacctagactaccctcgcgtgcgataaatccgagcaaaagccacctaagggtgcagttggatatgcacaacaagtgcgcgacatcaccctaagggtgcgaagtctttactataagacacatatgagcaaaagccgcctaagggtgcagccagatatgcacaataagtgtgcgacatcaccctaagggtgcgaag

SEQ ID NO: 87526 - DNA, 572 bp, Zea Mays
tgaggtcgaaggatcataagccacgcttcacccgaggccccactcgggagttaccataactctgccttgcccgagcctgccctcagacagggtgtgttctcgagagaatcatcgtcccggtcgaggtcccctctcgccaaaatggcaatctccgcctcgcctaagcccgcctcgggtaaggaagacaaacccagggcaaaactcagccaaagtctgcaggggacaacaacattcaatgtgcatacgtaccccatgcaggtttacaagtgaacaggagcaacaagaccgcggtcctgtcaagcttcaccaactatgatgacgtgtgcggccactattcctgcatgtcatctgccaacccccgatgggacatacaatatgacaaagtacaggctggtccttgggcgcaaactccacctcgcccaaagtcgaccccggccttggcgcaaactccacctcacacgagattggccacagctaactgctgcccgcgaaccccacagaggccactccttcaactgtggcacacacgtcttcgaatcctgggacgggctcagtcacgaccttgggcggac

SEQ ID NO: 87527 - DNA, 284 bp, Zea Mays
ctttgagaatgaaatcttttattgatgacgtattttccaattacagagtacaacgttgctcttatagctcttgctaagggtaaaacttcctgagatgctctatattccatgaattccccacttttgtgccatccatttgagtaagccgatatgatcctggccgagtgacctccgataccatgaatggcccttcccatagcggtgacaatttgtgccgtccttctcccgctagaattcgacgaaggaccaagtctcccactacaaaggatcgatgtcgtatagcc

SEQ ID NO: 87528 - DNA, 662 bp, Zea Mays
caaagctggttttcaattttcttacacaatccaaggatttttcaaagcatctctccttggattcgcgaagctcctcaacatttttctccagtctagtgtttgaccattcacttatttcctgtttcacttttgcaagttcaaaattttcattggcttcggcaagttttttccgaaggtcttcaacttcggctttatgagcttcggattgagcgttaaattttgcttcatctttcttcactttgtccaccaatgaaagaagaattttatcttttttccatggcttcatttctcagcttgataacttctgaccgaaggttgccgagggctatctggcagctttcattttcagcattcttttgcgccctcaaagtgttgctaagaattaagccctgcaaaaagatagaatcagcacgagaattaaactgttgtacgcaaggctgttcgtgaggtcatcttttgacatggcagagaggctagcttcaagcttcgaaaatcccatatttttggccatctcccagcagacggatatttccttgttgtctgggagacaatataggaaatcatcttcgtctgtgccattatacaccaaggcccccttcggatatttcagttcccaagcgtagtgtttggcttccatgatttcttcttcaggtaactttttt

SEQ ID NO: 87529 - DNA, 307 bp, Zea Mays
tgcaacttctgggaaggctgctgctttggctgcttcaagcgagcccgcaccgaagaggaaaaagttgaaggtccttactcaccgatcgcgctacattgaatcgaccatagtgcctgaatttggcggtgagacttcttcagctattgaagccaaaggacctgctcttacgcagaggattgaagagccggctgcaatgctgaagactgacaaaattgaagaaccgagaatcgaagggacgaaaacattagaagttctaagcccttcggcaggagtggaggtgccgaagacacaaaaaggtctagcagca

SEQ ID NO: 87530 - DNA, 316 bp, Zea Mays
ggccgcgttacatcgaaccggccgtgatacctgaatttggcgaagggacctcctcggctgccaaaacaaaagaaactattcctcccatgtagaggactgaagagctggctataatgccgaaggtgcctacagtcaaggtagttgaaacgaaggttgataaggctgaaaagccagaaactgaagaaataatgaagatgtcagaagttttgagccctccattaaaggcaacagtaccgaaggtacaaatgggttctgttgtaactcttaagaggaggagaatggtaaatgtactggatgtgctagaaacaaccgaaac

SEQ ID NO: 87531 - DNA, 1300 bp, Zea Mays
tggaagtttacagtaacacatgataatttaattggaactatctggttctccagcctaaggtcccttgttagtcataccagtaatcatggttgaactcattttttatctgtaatctttgatttaacataatacagtttttcttttgtctaaaccttggttgatctgtacctaaaatgtgctgaactggagatcggttctatcttatttgttgctacaggcactaatatattgagcttcacggttcttttgactttccagtgaaattgataatttgttagttgaaatgcccttgactccttgcaaatgccctttacatcctactggcatgccagagttactggttaactgttcgagtgtaaaagcgcaggatggatcataagtataacttttgttgaagaaacgacatctaagaccaaagggaaaaactgaccataaacccacacacatctagatgtcactcttctaaaggatgcaaacccaccttaactgctctatacgcacgtggcacccaagtatcgaaacaaagtaacaaactgtgtgaaccaaagatgcagtatgcatagcctgtccctcacaaatccaggtatctggaacccatcccaacacagacacacgcaccaaagagtaagaatccaccaaccacacatggattctataccggatgaccgacggtaacacagttgttgcaaagaacaaacaccctaacgcagcaagcaccaacggagccgaccctaatgcagatgcagacgacatgagggggtctagcagagcaaacgtggacttacggagtcacagacaatgtctacggggtggcgggcagcaggagcagaccacacgctcccatgacgacggtgggtgcccaaaccaaagtggcgaacaacgacaaagacgggctggagaagctatcggttctaggacctaataaggcgaacatgaattgaggagagagggaagaaaatattaaaagggaggaaagtactcaccgtcgtgcagcacagagcgcggtgttgtttcagccatgcctgtcactggtgaggcatgggagcgagggagatgactactggtatggcgacgacagctacacggacacctgctcttcctttacaggttgcacgtggacctgcacggcgtcacagaccacataaacagcgtcatccgacgtcgaggcgatgacgaccgcgcatgggagctcgcgtcaatcaacggaacgcaagctggcgtacaccgtggacgtggccgatgtggggcccgcccggcacccggaggcggtcgcatctgcggaacggacccccgcggcctg

SEQ ID NO: 87532 - DNA, 807 bp, Zea Mays
tgtgatgacgatgctggaaatgatgtcatgcttccagttttagtggcgcttaacacctatggtgttacagctcaacccccctaaaaataaatctcgtcccgagatttaagaacaactaaaggcttaggttaagaggagaaaaatacgacagttttcacaaccacttctaacttcttcacacattaataggtcagtttacaacacttcactagttgactgaaaaggctatatttcaacatcgttgattttaactaaagtaagaaaatctggaaaattctctatgagataatctttagattcccatgtagcttcatcttcagaatgcttgttccattgtaccttataaaacttaacggttctccttcaagggatgcgacccttctgatctaacgctcgtattggatactctaaataaatcagatctggttgaagattgacctctaagacatccatagcttgttctggcactccaagacatttcttcagttgtgatacatggaacacattatgaactgcggacatattctctagcaacggaagacgataagctaataggccacaatgttgcatgattcagaagggaccaatataacgatgggcgagctttcctttgacaccaaagtgattaactcctttcattggtgataacttaagacaaacataatcaacaaccttaaacaccaagggtcaacactttctgtcagtgtaactcttctaacaagactgtgctatcttcaagttgtgttggataagttgaaccttttcttcagcttcatttaccgggttgggtccaaagaaacatctttc

SEQ ID NO: 87533 - DNA, 617 bp, Zea Mays
cggggggcgatccgtgtggtgctggctgtcgtgatgggtgctggagtcggtcgacgatctgaccttctccttcatgcccgccatgtcggtctgcatcttcgacatggcggtggtcagggactggagcatcgtcatcacctcggccatggtggcttgatcgcatcgcccatggttgacggtgcagacgttgccgtggacgaagaggaaggagatggaggcggcggttggaatggtggagaggctgaggatcgacgagaatgagataccaggttgtcaagggcagtgagcccgagggtaggaggacctcgactacgtagatcgtagccgctgcccgtgatggccggccgggttataccccctttccgccgttcttcgtcggtgggttattcccctgccgccggcttaggtagaagaagagagaggattagatggtaatatctttcttcgttccaagtgtttgattatagcatatttatagcctccgactcaaccaaaaggagtaacaaactccactaattaaggactaaccaaaatagctaaaagatctcctactttccctcctaacaaactccactaattaaggactaaccaaaatagctaaaagatctcctactttc

SEQ ID NO: 87534 - DNA, 1316 bp, Zea Mays
ggagaacaactttgtttaagggttcaagccatggtcttatgtgaaatttggagaaaaacccaatcaaagatggactgtcaggctgcctgaaatctgaaatacagattaacagtgttatgacatgaagtttgagcttgattttgatttggatccagtgactttttgtgagtacacattatagcaaagatatagatggattatagctctacacctttgctgcagaaagttgatatagattccacataaaaactgaagaaaatgaagctttaatatgcggtgtcaggttcatctgactgaaactcctgatggtacagtgccctaaccggatcagatcgaccgccgtagaaaagatctcaccgccggcgacctctttgccgggattggtgccacggtcgtgtgggtgttgctcaccttgaaaagatcttcaccgcccgtgcgctggcgatctctccggtgacccccgtggccctctctccctctttgcggccgagtggattacctcgccggtgaccgccgcctcccggccatgcgctgcgtggcttagcctttccaccgcaccaccgtgacaccttaaggctgtcccatcgtcgccggtgagcttgccacgccgttggccacgaactcacgcggccagtgcttcttcttcgcctccgaccgccgcgtgtctcgtccaaattcgcggccaccgcccatcctccctataaattgagcccgtgtccagctccgtgaggtagtcagctagctaaccaccgctaatcggccacaatcatccactcgtctgctcgaattcggagtttcccccaaatccgatttccgccaccgtgaaaccaagctcaccgtcgccagcacaactccggtcagctcccgtcctttgcttccttgttttagcattctcatgcatctgcgatgctccccgacccctttaattgaactagaccgccacccatcgccaggaacacggctatcttgtcgcgatgctcacggccaccatggccagagctccatagttgattaatagccaaattagtttggggaaaaggcttagggtcgattcaattcggtgtctgttgctcggagaactcagtcgttgctccgttcggccggtgtaagtgctcgccggagcgcggccgtgcgtgagcgacgtcgaggacgtgtcgggtgaagaaatagaacatcaggggcgtttctgcaaatcgtcagtgactgtgtataatagtgattggactcgttcgcagttagttaaaaccccaagggcctctgcgcaagtctgccagcgcgggcgcgcgcgcgggcgcctttctgccttagctgggccg

SEQ ID NO: 87535 - DNA, 380 bp, Zea Mays
tgaaaatcccaaccttgaccttgatcaatgcatcaggagtaagatgatgaagaaaaaattcaaactttttcaagggttcgaccaacatcttatgtaaggagaatcgtagcccagctttcatgaagcttcgaaaaaccactacctcatctttctcaggaagaggaacgatattctcaccactgattctcactatagatacatcatggaaatatctacccttcatagcctcaacatgacctttcttcatagttgatttaccgaagaccacgtgactcggcctcatcattatcactctcaatatcaaaatcctcgttgtcaccagaatcttcagacaacctagctaaaatctcatcagttatttttcaacattagtcctcttc

SEQ ID NO: 87536 - DNA, 488 bp, Zea Mays
acatgcattcagttgagctgattccttcttccaatcttccaagaagttggtccccttcatcctgaaaggttttcggctgagggcgtctgctactacgttggccttcccggggtggtagtggatctcaaggtcataatctttgatcatttctagccatcttcgctggcgaaggttgaggtctggctgagtgaagatatacttcaaactcttgtgatcagtgaagacatgacatttgttcccaatcaggtagtgcctccatatctttagggcatgtactatggctgccaattccaaatcgtgggttggataattctgctcatgcggcttgagtaagtgtgatgcataagcaatgactttctcattttgcatcaaaacacaccccaagccttgccttgaagcatcacagaagacgacgaaatcctgatgggtgtctggcagtgtcaaaacgggtgcggtcgtgagctttttctttatgacctggaaacttt

SEQ ID NO: 87537 - DNA, 334 bp, Zea Mays
gttagaattcaaaccacaaggagatggaggtgaactggtcactggtggagcaagaagtagcagtcgatagctcggcacccgacaacagtagggacactcggacagatgacaaaggagatgcttgagtggtgttacctgctggtggagtggccaagtggtggtgcgctaggcaacaacaggtagcttccgtcgagtgctggtcaatgagtcactggcagcgctggtctatgttgcctgggccttcgatccacccctgctcgcaggctcgcacccatggctcccactttcactcagtgtgattgtgtcatcatgccatgcggcctttgctgttcac

SEQ ID NO: 87538 - DNA, 461 bp, Zea Mays
ggagcttgtccctatcctaggcctgtcgaggtcaatatcggcaccgataccgaacaaattatgagcatcctccttcttgttaaatgtttggagcaagtactccttggtggttggatcaagatccatgaaggacctcaagtctactaatgtcctcagtgcatcaggctcctcgagggctgcacgataccagcacatgaacgatatcttggcgcaagaaacaatgaagacaaagggggaagaggattatggttgaagttcctcgacaaatttgaaaggagaaggcaaggacttaccaaccttgcacaattggagctcctgagttgtagactagctggccaccggtagcaaacaccaaaggagaaaggagatccaacttagagactcaatagaggggattagggttagggatgcatagattcgagatgggaaactgacaatgagagagatgggaggggtgaaag

SEQ ID NO: 87539 - DNA, 351 bp, Zea Mays
atttcttcacacatatgttgctcgtccatgttaaaagtttgatttgtgtgtatattaggtttgtcgcgaggatcgggtcctcagcttggacaagacaaggaagatattctctctgttggacgttttgggggtgggttaggacgaggaatatgttttggggatcgggacagcgacatggagcactccctggcttgattcgcctcgttgccatgcctacaaatgaaccatgcaaagagaatgtttatgcaaacttagtgcaacaatcttctagctcaacatcatttagtaattttaaggtttgtgagctcaataaatactcacatgtacttttgagtgtatgtttcgagcctg

SEQ ID NO: 87540 - DNA, 610 bp, Zea Mays
cgaaggcaacctcagcaccgaagcctccatagtaactggtatgacgaaaacgacaggacaaggcaccataccgaatggatgaatccatatgagcggaagcacaacttgggcccatgatgacgggaggaaaccatgtcatgtccgtcgagccacggggctgaaccatgggacccgccgcgcattaccacaaggacgttagccatgaacccaccgcagagatgggagtaaatgggcggcaccatactagaagcactacttcgtacgaccaggagaagggggcccaccacaacagtcgaaggactctttctctctttactctctctctctctctaaaagggacaacaatgcaaagtctgtcccttaagatataaaagggaaggctttccttttacacacatacacacaagttgtaacacattccattgcaataatatgatcaacactacattggactagagcttcttcttggaccagtataaaccccatgtcccaagttcttcgttcaagtcctagcgattcaccatttggagtgagtccatgctagtatccccaccaaacacaaatcttattgtcccctggtttccgaaaccacaacagttatcgcgctagg

SEQ ID NO: 87541 - DNA, 311 bp, Zea Mays
atccatatgttctgtgacctatattccctaattcctgatccttgttcctcgacatcgcgtcgtcacgcacagccgcaccagctcacgcgtcgcagttgcagctacagctattcccaaatagggcgctgttcccaaatcccaactctggaatctggttcagtcgccgctgcgctacttcagtatgcatggtatgcacctgtgagactatcacatggagtttaatcattgtttgcttgctttccgtagtgttatttttttctttcaagtggtctaattaatttaatgatgtatacaagattgttattttttct

SEQ ID NO: 87542 - DNA, 460 bp, Zea Mays
tcaggatacggagattctgctgttgcttgccaactggcgagaggtgttggagctgcaataggtaacgaaggaatggtctagctaactttggtatggcaaggatttttggtgataatcaagaaaatgctaataaaaagcgagttgttgggacatagtgagtggtacttaaatcacagtacttaaattaacctattgttggtaccaattcatcctcataactttcacaactttaacctgaggatgaaatggagggcgtcttcaccatgaagtttgatgtctatagttttggttttggtcgattctgttaattttatgaaatgaattttgaagttgaaaaacaagtatgcattttctcatcttttgcaacattcaatttcagctatggtagtaattatactctttgtttatagtatttatacagtaatttatgcttcacataggttgggcaacctgtgcaatc

SEQ ID NO: 87543 - DNA, 742 bp, Zea Mays
cagagctcggcaccctcagaggctgggtcatcctcaaaagcaccctcgagggccgggtcatcctcagcaccacccttgggggctgaagcatcctcaattgtgcccacaggaaccaggtgacccttacatgtaacattaggaaccaaggtgtttccatgaattaggccaccttcaaaggtttaagaagcatgggaaactatccgggttatttcttgcctgactagattactagctgagggggtgtcatctatgacctctgcaaggatggcagcactctcagtttcaggaagctccaataaaaaatcttcagggataatctcctccggtgcatgatcaatggcagacatcgtcaacctctaaagattaaccagccctgacagagcctgaattgagacatcatcgttgtttttgctacggcaattcttacgaatcaaagggaaaacttcctcttcatcctcgtcagacacatgtccaccgactctagtgccaccacagctctcaatatcatcctcgaggttggcactcgctgggccaccaccaaggactagtgcagtaaagtcagcccccagctccaagccagataaatgccgaagtcttccctttttttcttcccctcgacagacacggctgggtaacccgttcgacataatcatttgcgatgagcacctccagaactgcaagctccttcatccttgctgagggcgcgcccagctgcagcgcttgctgatttagtacgggcaga

SEQ ID NO: 87544 - DNA, 451 bp, Zea Mays
gcttttttttatttcctaattcttttctatcctcattcgaatgcacttttaaactctactgttcaaatttgaattctttggtgagtttcacacagaggttacatgttcaattaaaaatatcatattgaaaaattatatttatttgtctatattttacttatagtgcacatggctttcctttttcttccctattttcatggttttattttcaagttaaactttaaattctatggatccattgagatgctattaatggtatatttattttattaagcacaaatgcacatccaaataaaaactcagcatgatgcacagattaattatgtgttcattgttctatttatccacttttaactagtgttgagcacatgcaataattagtagaggccacaaaccattgagattatctctattctctttattacacttttgagtattacactggtgttct

SEQ ID NO: 87545 - DNA, 513 bp, Zea Mays
cccacagatacgtgtgaatacgcgccatgtgcacctaaactccatgggcaccgaagatagaggaagagatgatggtgcagtgcctacatgtgtataataaacctttgcctttcgaggaaaataaatataattgatgtcgagttatacgaacacgcacgtacgagcaccacacaaggtggaggcagtggcagatatccgattctgtcaggtaatgctagttgggctaaaaaactagattgagatgttgggttagtagtgtacagacagaaggcatgcatggtgtgtatgcgcgcgtttatagtggtggaccaaattaaagtgcatatggctgcttatcaagtcgtctcagtggagactggacatgcatgtttctcgtgcgcgtacgtgtttgaggaaaacccatgcatggtcctaacttttatctattaaacattcaaaggacttcatttcacatttaataaaatacaaagataggggtatatacttaaatcatttattaaaaaacaaatattt

SEQ ID NO: 87546 - DNA, 712 bp, Zea Mays
tagaggtctagatttcacggaggacgagcagggcacgatatggtttaagaaccggatttgtgttcctgagaccgacagtattcgtgaaaccatgttgaaggaagcacatgattcagcttattccatccatccgggtagtaccaagatgtaccaggacttgaagcagaagtattggtggtatggactaaaaagggatgttgctgcacatgtggcaaaatgtgatgtttgctagagggtaaaagccaagcatcaaagacctgttggattacttcacccgcttaaaatacccgagtgaaaatgggaagaaattggcatggatttcattgttggtctaccccgcactcctgcagggtatgactctatttgggtgattgtggatagactgacaaaagtggctcacttcattcctgtgaggactaattacacgggagccaaagctagcagaattgtatatggctcgggtagtttgtctacatggagtgcctaagaagatcgtgtcagaccggggatcacagtttacatctccgttttggcaaaagttgcacgagtacttggacacacagttgaatttcagttcggcctaccatcctcaaactgatgaggagaccgagaggaccaaccaagtactagaggatatgttaagagcttgtgctcttaaacatggtggtagttgggataagagtttaccttatatggagttctcttataataa

SEQ ID NO: 87547 - DNA, 539 bp, Zea Mays
ttgcatagttgatagctctgattggcctggtagctagaatcgaccattaattctttattataagataatgtacattctctttttatggccaatcgctaggatttgccttgcaggatgtcaacttacattggtattttttatggacggatgcataaactggcctcacgcgtcgactttatgtatgtgcaaaacacatgatcaattggatcattctttttgtttaaatcatacaaatctattctttgaggtcgatttcacaaaccagccaaacctcgtttttgacacttcaatgaagttgtgatctttgaagttctctccgaagaggtactttgcatcgtccaattcctagaatggtgcatagtcagttgccacatcgcacgagtctcatataggtactacctccacttcgtcatcattccattagacattgcatcgatgcatcattgatggtacacaatagttggcatgtatttagtcctagcctagcaaaaccgagtatggaccttgattgtacaccacaaagaaggatgtggtgttgg

SEQ ID NO: 87548 - DNA, 367 bp, Zea Mays
ccaagtgctggaggatatgttaagagcttgtgctcttaaacatggtggtagttgggataagagcttaccatatgcggagttctcttacaataatagctaccaggccagtttgaagatgtccctgtttgaggctttatatggcaaaaagtgtaggactccactgtattgggatcaaactggtgaacgacagttctttgggcctgaaattatacaagaggcagaagatcaagtgcgaatgataagggagaatttgagaactacacagtcaagacagaaaagttatgcggatacccggagaagactactagagtttaaggagggtgaccacgtgtatttgaaggtgtcaccaatccggggtatgcgaagt

SEQ ID NO: 87549 - DNA, 428 bp, Zea Mays
gtaggcgaagtttcgacaaaaattcaagaatatgcagaaaagagaaagaatggcgaatttaagcctcggagggagaatgacatactaactacagcactaggcaatcctaaacacactggacaggctcggggaatatcttctaagatttcttggagagaggcgtttccagagtatgcaaagtcatataggaaacacgagaagtcgaaaaggacccttgaagagactattgatgaaagggtacaaaaggctattaatgacgtgatgaagaaaatgaagaaaacataatgcatatcatgtgaactcaagccaggccacatgagtccacctctagtacctagcagcgtaggatctgtgcaagacttcgtatcgggcaccaagtaccctgtagacgatattgttgaggacaagccttgctttcttcatattcc

SEQ ID NO: 87550 - DNA, 584 bp, Zea Mays
ccactcatgtgtgcgcctctagcacagggtccgccttatcctttatattcctctgcagtgtgagcttctagcacagggttcaaatttctcacacattggtcccaaggtcaggtgtgttaagcatatcctgccaaaaacaagattcttgcctcaccagcagtcaggacgtgagtgggtgggtgtgggtcttttattctggaggggagtcatcactcagttgtattaatggcaaaacatgtcacccaacggattttcgtaaccaagaattgcttcatggtcattttagctcatttaaggaccaaagtgatagttgactcataataaaacaccaaatagaggaaaccaataagtacaggtatatacaacatggacaattacgttgctggcataatgttaaccagttgtgtctgcatgatatttcctgccaatttgtcaagtcaatttggtggtcgcctaagttctacatgcgtgcagtatatatctctgtcctttgttacacatatcaactgtcacatttacttgtgctatgcccatttcaccttttcttttagatctaactgatctatgtatcaaaatgaatcctg

SEQ ID NO: 87551 - DNA, 746 bp, Zea Mays
gttttaccagcgtgtgtacagtgtcaagcctgcccatgaagcagtgcggctccacggtggtggccttgctctggcgagcaatttgtagtcgtcctgtggcccctcgagctcgttgaattacccttgaaccctacttggttaccggtgatgctcccaaacatctttttggctttcgaacgacgctgcaggcgcaaggccacgccggtggctatttctccttccttcggttcgcggtggtgctctacgatggtggcgcttgacaatagagctatccttcatatgcgttggtccaaggggggtattggttggtacttatacgcatgggataaggatcgggggaaggcattggccgatgctcgcggcttcgtttgcaacaactgaagatggttacgatgattggcatcgagtttgttacgcacagtcggtaggagacgcttctgtgcagcgggacccacacgcagtgtctttggaggcgggcgcacgcgagaccagttgaacgtgacgtatccaaccgagccgtggagtccaagtcctggcgaaactccctgcatctaccttctaatatcgtcaggagatagaagataagcctaacccacgagacccatgcatcactggctcagctgctcaaagggaaaagaaaagggaaggttgaagaagtgggccggtgggtgtaatacttgaccgagaggaaaaataccgacctgagtgcaagtaagttttctcttctttctttttattttatttta

SEQ ID NO: 87552 - DNA, 433 bp, Zea Mays
gtgaggttcatgagccaggtccgggctggcccggtcaaggctacatgaaagtagcttgccattatggctgtgtttccaccagctgccatagtggcggtgacgtagacatgcaagaattccgatgggtttgtcgtaccgtcgtacttctccagtggtcccgaaagcaccgagaggtcctttcagcgaccccaggggtcccgaaggcagccccacatcggcggtggcggagcaccactatctcattcggggcatccgactgcctcgaaaacatggcaggggctggtatactaccactcatcaccgcccctgtcatcaccaacatgaagttgcatcatgtgctgattgatggtggggctgggctcaacgtcatcagccatgctgctttcaagcagctgcagatcctaggatcccgactaggaccctcttgcccgtt

SEQ ID NO: 87553 - DNA, 694 bp, Zea Mays
acctaaaaaaagtgccggacagagattttactatgccactttctcatgtgaaaagatgcctctgccagtcgttagctagctttcagtggtcagatcttgactagggtgcagcagaggaaagagcagtgcatgtcctcgcatttttttgaccgcgcgcccgtactacgcgcgcaggaccgatatttttattattagtagtatgttagtattattcacacgacggttggctggtgcagctacctgctactgctgcccgtggatcagacggccactgatgaattggaggatggacctcttctggctcctgcctttcgcagtgctagttactgcaccgctccctagctcgctgctagcctctgcttagatcgaccaaacgcaaagtactccctaggtttagcttgtaccgtacctaggttcaactaacactgcaataaaaaagaaatcatagaatacatatttgggagagctctaaacccttttgggccgtgctgagccgggtaaaatactgttttatcctacaaataatatttttgacggagtcaagttggaaatatagagtgtgatatgaggtggaacagcgagcctgttgggggatatataaccttagagccaataaaaccaggcttagatcttattgtttttctaaacactttctcaagatttattaaatctgaagtcacaattaagtaccagg

SEQ ID NO: 87554 - DNA, 391 bp, Zea Mays
gaacaaacgtgttcccggtgatctagggcagcttaactcaatcgaattggtcgaggagcatcaggagaacctaaggatgctgaaacaagagagcagggatcacgaacagacctggattgcactgaccacggtgagggctctatcgcggtggcggaaaacagaattggggagaaagagaaattggagagctgtggtggctaatcggaggcaggagcgggtgctctggcttggtgataacttagcacagcagaccgtgccgtcaatttataggggtgctaagcggtggctagtgaatttggtttggcgtggtggcagccggagaggaagaggggcactggcgcacatgattggtggctgcaaccgtggcaacctcactggcgatctctggaca

SEQ ID NO: 87555 - DNA, 710 bp, Zea Mays
cttgatgcgtaggtaataactcagttgtcttgcatcaaaacacaacctagtccagtgcccaaagcatcacaatacacatcaaacaatttggcgttgttaggctgcgatagtacgggtgcggttgccagatgctgcctcaaggtgtgaaaggcatcttcacatttctgaccctaatcaaacttcactcccttcttcaacaactcggccattggcttagcaattttggagaagtctggaatgaattgtcgatagtaccctgccagtcccagaaaactccgaatctgtcgaatggtggtaggaggcttccaatccatcacctcttgcactttctcaggatcaactgctattccttcctgagaaattgtatgacccaagaacttgatctcccttagccagaaataacatttggagaatttggcatacactgatcatgcctgatatagaaggagcccatcaccatatgtctgtagatggtaaagaggccaacctgcttgaggccattagagttgtgtcggagttccctgacgtgtttcttgaggagttactaggcatgccactcgagcgtaaagttgagtttgtcatagccctcaaacttggcctatagagggcttatagagtgtctggaccagaattggtggaactcaagaagcagatagacgagctattggagaaaggctacatcagaccatgtacttcaccttgggccgctc

SEQ ID NO: 87556 - DNA, 564 bp, Zea Mays
aacttattacatgacttagagccagcagacaaaagacaagcagatctaaagaacatttctagaaatacatctgaagagggaatctagcatcacaaagctaaaggacggccatactaagtcatatcactagaaaaagacaccgatcaagcaacaacacaactagctaactagccgagtcgaaaccaacatatcatgctgggaggaaacatggtttctaatgagcaacgcctcccgcccacaccattattgcatgatacgtctgtccacaggcgcccagccaaaatctctcttgaagatctctttagcaattcttcggattagcgaacttccttcctccagtttcctttgtgttgaatttttctgaagaatagtccaggagtccaaccaaaaacaacacataaggaaaacgttagaggcattgacagggttttttctattgaaacagcaatcatttctgattcttcaaagagtccaaagaatagcaccgcaaccaattgtaattaaattcctttcattctttttgaaaccacatagccattctccaaacatctcatttgagttatt

SEQ ID NO: 87557 - DNA, 586 bp, Zea Mays
ccacattctcctttccctttctatagacaaatttgaattgcagacccattagttttaccatggccttcctctacaagtaagactgcagttgttgctcacccaaaaaagtaagagactaatggtatatcataatagtgaagtgtggtctttgcaaataaggtctccacctatccactgccatgattaatgctaagaattcctttccatatattggcatctatctatttttcacccccaaacccttactcaaaaaaccagggcttattctcatgcatcaatatagcccccatgcctttatcatggccattagtctccaccacaaaagccacattaaacatgggcagagcttacattggagtgtgagtcatgggctgcttgagactatcagaggccttctacgcctcttctattcaatgtcagaccttctttccctgaagcaacagtgttaagggtttagccagggtcccataatgcatggcaaagtttctatagtacccagtcaatcccaagaaccctctcaactaagttatggaagtgggcacaggccatttcagcattgcttcaatcttggatgggtcagtagcaa

SEQ ID NO: 87558 - DNA, 303 bp, Zea Mays
tgcaaatcgaaattatgcccaaaaactctagacactgcgaggtcaggctgggtagtatgagaaaagagggagaggaaggtacaatagagcgagtcgtttgaaagccaccgatcaaacaaaaaagaagtggatctaccatccctgacatagatgagtatggtctctgaagtgatcaataacataattgtagacacgacccaagtacgtgggggaggaggggtgggaaccaagtccggatcgttaccctcgaagcaccagtctctccaagggacataggggccatggagggctttgtcagcgaac

SEQ ID NO: 87559 - DNA, 368 bp, Zea Mays
aaaatatccagtgcggggtgaatccggtcactggccggaccgaccgtcgtgtcccaccgtggtcaatcgcgttggcatcaccagagttcgccgttatccgaccacgctacgtgcctcaaagccttaccacatcgcaatagaccgctctagatagcttgttcatcacctaagacattgcctcggtaaaagccacaatagcacttgcgccagtgacttcccctctttccggacgccaccacccttccttcaaattggacgccatcgcagtagaactctataaattgctgcccccatgagttccactaggtatttacgcatccaacgcaccagcccttgcctcggatcatcaaccaaaacccctcaatttc

SEQ ID NO: 87560 - DNA, 841 bp, Zea Mays
cgagaagtaagttcaatatttttcaacgattagttgatactacctatcgacatcgtcatgatttttgttgtatggcggatcgatgccttgtcgtcgtagtctcggggaattttcggaaatgtgctggtgttttactgatggggtgaatgtacttctgatgtcttagaataactgcatgtcgaacgagtatccgaaaatggtgacaattgggtatgttggtaattagaaaatagtcacgacgttagccaatagccaagcttatgccgaaatttaaaatatgggcaatttgagttgaaattatgcttatctaggcatgaggattaataataataattggaagaatagtcgttcatattggtcattccaattaagaatgattttgcgtgtgaggtgaggtggtgacatgcccaagtagtcactgcttccctatgtttataagccgagtcaatacccattaggcgttcattaattttcacgtcgcgcatagtgtatggttgtactcgtgacaaggaggtgtaggtcttactcaattagaagtttggttggatgtgataagtagattggaagtgcgggtttgttaagcactgtgttgttggacgtgtatgtcgaagtacgttgtagtagtaattgcgttaacttgaataagagtctcaagtgcatgtcgtgctatggttgtatttgaggtaataaattataagagttgcgcgatatgaggtttgaacgatgtagttaatatggattggactgtagagaggtggtgacatgccgaagtagtcattgctttctctgcggttaagtcgagatcatgtgtgatgacgctatttacgtggtgaatgcgttt

SEQ ID NO: 87561 - DNA, 400 bp, Zea Mays
ggtcagccaagaattcgtgggagaggcagaagtaaatgagagagagagtgtgagggggtatataaaggatcccccaaaagctggcagccgttgggagaaaagaagtaaaaaccggttgaaccgattttcagaccggttgaaccggtttctaccagggggatcccggtccactgagctactcagccgaagactcgaccggtttcaaaaccggctgagtaaggaaaaatttcggctaaaccggttttcaaaaaaatatctgcagtgacttttctgacagctctgactgtcagacaggtcagagcagagatggcaggggaacagtcccaaaaccggttgaaccggtttttcagggctgaaaccaagttttgagtattttgaacagaacaaaagtggagtcttt

SEQ ID NO: 87562 - DNA, 637 bp, Zea Mays
tacaatatttaatgtgtataaatttctatgttgcaggatctcgtgtggccttttccattattattttggagtataagctattatcatgccatctatattactctagtaagtttttcttattttgttcctttgttttttttctaaatgtggacatttacaatattctctgtatgcttgaaaagaaatggcttaaaacaattgaacttgtacatgtcttttggtattaaattatctatggactatagttattagcacttaataatttcgcctaggctgtcagtaattcctgggtccgccactggaggtaacaacacatgccacgtgaccaagtacgactttggtggaatagtagaattgtggaaacgagttctttaggtggactccaactattatcaccacatatttcaaacttcaccctataaactgtataaaactgtattttgcacgatcatatacacgatatgttggacacatatttaggttccctttgatagagctcttctaaaggctccatcaacgactcctcaaaatatttaccaaaggctccatcaacggctcctcaaaatatttaccaaacgacgagctcctatgctgacttctctataaaaacaagatgtccgaaaaaccgagcgaagcc

SEQ ID NO: 87563 - DNA, 735 bp, Zea Mays
gcaatagctacaaggatgagaaatggagaagcataccgtgcagtagacaatgacggtgatagagggcaggtggtggagtggatgctggcagcttcttgttgcatacagactggccataaaatgaaagcacaatcataagaaatgctctaatgtatgcacaacaacaatataatgaaaacataatgagacattcattttttttcattgatgtgctggcatggcaaatacaacagagagctaaaacatgtattttcttgatgaaaaattacataaactaaacaaagatgggaagtaaatatcacgtttattcttgctttccaaatgacactccatttagattttagacatttcgtaataaacttgatcttgtaatgcggcgttgcacgtaggcaaaacagcacagcactctaagtagcaagcgaccaaacgcatgttacgctggaaacaggcaatgtgtgaatcactcaaacggtcaaacccacaaatttcggcccagcgctcatcgccttcaagttcaatcctacaattggatatacgagaaacgtccacccctttccgccccttctgtggtgctggtgaggccccgcacgaagagaagaagaaaaattcatccctgttctcccgtctcagccaagcggaatgaacgcacgacagaatggaaacacactgcacacacgcacccgcgcggcggcgcgcacatagagacacactatgacactagcggtttcaagattc

SEQ ID NO: 87564 - DNA, 600 bp, Zea Mays
atggtccgagattatactcagactgtctgaccgtactcaatgccaaactatcatacattgcaggcggtggcagcggttgtcctggatatgagttcatcgacataccataatatgactgggactaagaaggtctgttttgccgatgttttggcgcaactattttagtgcccaatttatgtgatggaaaattaggcatatgaactttttctatttcatcctcgatcttatcgaggaactccaccataagttcaatccgatcatgaaaagaattcctaatagattgaatgtcatggaatgacatagcattacttatagagggtggttatagcgaggctgtcagggaagcaagctctacttctctctcttggacgatcttctggtggcgatctatcctaaagtgcgagaggtaccaactcctttcctccttgtgcttctaagcttgtcgttactggaactcctcatgtagcttttcatagtcttcaaattccttcttctcatcgactgagatatcatttatagacatccttatgttgttgtttggggaaatgtcattgagatctttagaatcggtcattgtagcttgattttaatagatctaaa

SEQ ID NO: 87565 - DNA, 493 bp, Zea Mays
tatatggcagaaaatgcaaaactctactgtattgggatcaaactggtgaaaggcagttctttggaccagaaattatacaagaggcagaagaacaagtccggcaaataagggagaattcgagaactgcgcagtcaaggcagaaaagatatgctgatacccagagaagactactagagtttaaggagggtgatcacgtatatttgaaggtgtcaccgatccggggtatgaggagatttaaaggcaaagggaagttgtcccctcgctttattggacccttcttgatcctgaagcgagtgggagaggttgcctatcaactagaattactcgatcatcttgcggatgtacacaatgtcttccacgtgtctcaactgaagaagtgtcttaggtacccgaagaacagctatctatggaggactgtaacaccacaaaatcatattttggatgaattagggaactttatctcgaaatttaaataaatatgtttagaaacaag

SEQ ID NO: 87566 - DNA, 703 bp, Zea Mays
gatgctgctccagctgctccaagcgagcccgcgccgaagtggaaaaaggtgaaggtccttactcaccgaccgcgatatattgaaccgaccgtagtggccgaatttggcggcgagacctcttcggctactaaagccgaagaacctgcggttacgcagaaaactgaaaagccgactgtaatgccgaaggcatcaccagccaaatcaggtgagccaaaggccattaatagtgaagaggcagaggtcgaaaaaagaaaaatattagaagttataagcccttcggcagaggtgacagtgccgaaggcgcaaaaggatcttacaacgacccccaagaggaaaaggatggtcaacgtgctggatgtactggagaaaataaagacttcaagctctactccagggaaaacagccgaagcttcgaaaacacaaattgaaacaaaacaaactgaagccgaagctgcacaaagtcatgccgagaccgaagctgggccttcagagcccggtaaggagaaatccttggaaatcggagaagaagaagcggaaaaagaatccgcagaacaaattctgtctgaaaaaactgccattcctattcccgaagcatcttccgaagctctcgattatattgttcgacaagcttcgggcaaaaggctatctgaagaggaaaagcgagaagctcaatattatgcccagaaattaaaatatccaaagg

SEQ ID NO: 87567 - DNA, 359 bp, Zea Mays
gtccggacactcgataggctctcttggaaattggggcggtgcctgagataagctctatggcaaattcaactttcctttcaaatggcatgtctggtaactctttagggaacacgtcgaggaattccgacacaattctaatatcctcaaatggattggcctccttgtcatctgctgataaatggtgataggctccttcttctagttcaggcaagtacagtttagttactacttcctttccggatggggactccaacttgattgttctcttgtcgcaactgacggtggcttggtttctgtgtagccaattcatccctaggatgacatctaacccttgagtacccattactactaggttagcg

SEQ ID NO: 87568 - DNA, 554 bp, Zea Mays
ttcaagctcaaaaataggcgtcactaattcctggcagattctggatgtcttcttgttatgaagattcccatgaactcctagtatttttgacatggtaccatctggtttggaaatcttatcttcttagctttccaacggtatctagaacttcgaaaatggagtccatatgtggcctggacgtctgttttagtgagacccactcctgaagttcgaaccagatccacgaataaactggacttccactcctcttaagcttgggaatctatgatcaattggaccttaaccatatagttgacatccatgtactcatcattcttcccttcttggttttgagtcgtactcgactcaaagtcattggtgcctacataaggggttgatgtagtgcttgatgtcgtccaaccttgcttcccttcttaaagttggcactattgttgtaaaacatataaagaaggacaagtgaaactggacatgatatggttagctttaatacaacccactaattgatcatattgtttcatgacaaaaggagatttcatactcgaacaaatatatac

SEQ ID NO: 87569 - DNA, 454 bp, Zea Mays
cacggatatggctgcttcaaacatacaagtgcataagaattctcaaagctactagacacctttaccaacattatccatatcattttgctatgatgtatggcactacagctctgcatggtttgaaggataagacataagtgcaaagcactacggtgatatggcttccacttcacaaaaggagcaccatagaatttccacaaatatggtttcatcctgcaaagctagctaagaacaccagagtccaaagcatttcatctcatctagctccaccactaaaactcaatgacatcaaaataaatacacctcctcaccacctcaccagtaacaccaaaatgagcacatatgaatttggtcacctgaagtcctgaacaacccgtgtatgacattttaaggatgtaaaccaatactgccaacaacagactgtcaactatatattatttttttaagaaaaaag

SEQ ID NO: 87570 - DNA, 345 bp, Zea Mays
cagaactgaatctaataacttacaaggaagtgaaacatgatgtgattgaaagaacaaactgaaacaggattcatcactgatagcaataactgaaacaggattcatcactaaactgaaacaggattcatgtttcactaaacatagaacaggattcatccccctgagtactaaagcatggcagcagcaccagccaccagaactgaacttgtaatgacaaaaaggaactaacaacacaaacccagcaaaaaacaatgcaaaaggtcgaaagcttctcccatttgccaactattttgatatggcgagttggcgacccactattagttttcccagcatttatacacccac

SEQ ID NO: 87571 - DNA, 1052 bp, Zea Mays
aagatatgcccagagtcaagctgatctttaccaggtttctgaattcttggacagcgctcagaccctgaactcttccttgaatgcctcactcgattcagagaagatggctcaagagttagattttcctggctgcttctgttctgcccctttgcttcgatgctcagtgctcttcttgcctgtaggagaggcgaacgcttattgattctcgtgacaatctggatagattatatcgtgatgctagcaattccctcactgaattggagaggagccatcgctttactatgtcggaactggaccatcatagggatgagttgcggacttcccagactgaagtgtcatgacctggtaagctactgtcttcgaaggattctgtcatcaaggagttgtgcgcctcgaagaaacttgtcatgcaagagttggaggttgctcgtcacaacattaaggccttagagggtgagcgtgttgttatgaaagcgatgtgtgacaaagcaatggacaaggtcgtccgtgccgggcgaatcatgatgagaagacctggtgttgcggtgcctaaagacatcgttgctgatgttctcgctgcatctgctagtgtgagcgaaccttcttcctctggtaatccttctggcaaggttccctgcaaaaatgctcctgcatagtgatttgtttggatgagaaaatacttttcattgagttagtattcttagcgagatagtgtatcatggatttcatgtgcgtgtgatcacgctatgcttgaaccgattgttccgttagcagggcgccaagatcaccctctaatatgtgagaatgttgtattactttgaggtgtccctgacttgagctgactgttttgttagtagggtatagtaatcacccctagtcatgtaagcatgagcatgtcgcaccgacttaaggcgtatccaacttaagccgattgctccgttagtagggtatagtgatcacgctaagtcgtgtaagcgtgagcatgtcgcaccgacttaaggcgtttctgacttaagccgattgctccattagtagggtatagtgatcaccct

SEQ ID NO: 87572 - DNA, 407 bp, Zea Mays
cgcagaaagtatcggcattcttgtgacccccagctttttacagcccaaatgaaaacgctaaggcgaactatggcattcggagtcagtttatgcatatatacctcataacgttgcaatatcttcgtaatcatcctgtacataggtaaccgaggtcctaccttgaaaaaactcttttaaacgacaacttcgtttttcttcggctttggggttgtctcctcaccaggaaggcgcatgttgaccttgctgctaaagtagtcatgcttcttcattgtttgcatgtcttttttccttcagagtagagtgaccaatatcaatatagcttggcttcgacggtctgtccttaggcagctcttggacaggctttgttgatgacgaagccttcatggctttggagattgacacagtat

SEQ ID NO: 87573 - DNA, 372 bp, Zea Mays
ggctatcttagagacatcttcagctcgaatcttcagctaatggtaacctgatctcatatccactttcgaaaataccttggctcctctcatttgatcaaacagatcttcaaatcgaggtaatgggtacttgttcttaatggtcacttcatttagatctctatagttgatacacatccttctagatccatcctttttctccacaaaaagtatggggctccccacggcggcaaactaagccggataaagcctttctctagaagttctgctatttgcttctttagctcacctagatccttaacatccatcctataaggccttttagaaataggtgtggtgccaggttttaactcaatggagaattctatatctcgg

SEQ ID NO: 87574 - DNA, 635 bp, Zea Mays
cccttgccaagataggcatgctagggcaactaaacaggtgcttggacatgagcagaagcgatcctccacgtgttcgaccacgactgacactcgggagagcgctctgactgcgccgcacatgccacgagctccggtcggctcgaccgcacgcccaaccccatgaccgtactcgagccctcacctataagaagccccagtcctcggccttgccctctcgcacaccccataccttttaccagcgactggacgatagtaatcactagagcaccgagcgtggtgttgtccgcaagcttgctgacgcatcaaccagctcagaccagccactccagcctaaccccttccagtctaactccccgaccagcttctctagaggctagcgaagtttcccagccactcagatcgaacgatacctcaccagagaagccataacacctcgctggacttgtcccttccaccggttccctcggttcatgtaatctaaccatccattcgttgattccttgcacacacacactccctgccacttagtgaacctccctgtgcgatctgattgagctctaccgccatggaatggctggtgcagacatcaccgacaagctccactgcctagatccgtggccagaccagctccgggc

SEQ ID NO: 87575 - DNA, 392 bp, Zea Mays
gacaacatttggatcaaagtttgagcaatagagtaccaagttgatgagatgaagatatagcagtggattgaagatctgtaaacgaacggctgtgattagaataaaccataccagttcagggtcctagtatcagtcattgaccgtagatctgatggtctcggacgtgtgtggttatgagacatagatctcgtgatatgcggctctggatgcgtaccgattcggcatgtccaagttataatcgtggccgtagatcggtgaactaatggtcgagggtgtagttcatttaaatacacgtgcgtgggcggtggggatcttatgtgggtttggatctcgtgtgccaccgccttctgtccttctatgcggcaccagtccatccaatccttgtgggccac

SEQ ID NO: 87576 - DNA, 1081 bp, Zea Mays
tattatctattttctaaaaatccagaaccaatgttttaggctattttaaatactccaaaattccctacttgacctaaaaatcatgaatctatttttattaaatactatggaaaattaggaatctaagaaaattgcttcgacatttttaggatttttctacaattttctacagatttccaaagatttacagaaaaagaaaagagaaaagcatgaacagtgctgggctcaattcgaccgcagcggcccaagcccaggcggaaagcgcgtgcgcccgcgcccatgccgactttgcacggagacccttgcctttctgaacaactggaagcgggttccttcactgtttcctcaggtcgctgacaacttacaagaagaccctcgagcttctaattcttcgcacgatgggatccccgacggtaaacagtgctcggccgatctccgacgagcctattccggccggatgctgccacggctggagctcccgtgcgacagagaccaaattagacccctaccacacacctccccccaatcaatttcattatcgggactttgaatcaaccagtctacggtgacagggcggatgggcatagggatgaacgcgttccgaccaaacgacggcgtggaagaccaaattgaggctagggaaaggttcacgagttcaccagaggttagttacacactttgatttgggcaaaataagaatcaaagagtgggtcgacagagggggatgtcacgacggcgttctacagagcgggggcgtgttccggggaaatgcttcagccaaacttcaattggtcgatactgagagcaataggaggctacaaacgatctagaacagggagtaattgggaagttactaacccgaagagcactgaccacggtggagtccttcacggcggagttaagaacatggaggagggatttgtggacagcgtgagttctttggtgagaatcgagtcgattgctcagacgctgaggtgcgggatgtgttgaagaagtagaatccgagctcaatttataggccgatggccggagttggatgaggattgcggattctaggtcgcgctggcgagcttaccgcgcg

SEQ ID NO: 87577 - DNA, 369 bp, Zea Mays
gggataagttgtctactatggttcttctacctactcctcgttctgcctcccgccaaaaaaaaggacgtccatatagggaccatgatagagatgttggattccctcacgaatcctaaccaactagctagatcaaaaacacaaacacagattgtgtaccttattaaattcgacatcgtcacattcgtcggtaaagttcttcgctagggcagtgacggttggggaagcgagacttgataccgacggtgaacttcccattgttgctgacagcctccccctctagatcggtctaaggttttaggtggggaaacaagatggtagctactacgaacctctcgtgctagctcagtcgtcgacccccacctctctatt

SEQ ID NO: 87578 - DNA, 560 bp, Zea Mays
aaaaaaagcatacaggcctaccatctataggtcaactggtcgagcgtagtagtagttggtggcggtggtggtgggtgacgacgacggctacagtggcgtatgcttaccacattaccaactgggtccgcggtggcgcttgattgcttgcttgctttctttctttctttaattgtcgccaccggccgcgttggtgcggtcgattgacatttgaatctgtctcgacgcgagttctaccccccaaaaaaatagagaatcgtttctcctgccatgcacgaggatgggaccttgatattcttttcagctagctacgtggttctccggcgctattattccaaaggaattattaaaactttgtagaagcaggtaaacgaggtcgccacctggttcttctgcatcctgagaaacaggagcggagagatattatttcttcttagaactctgtcagcaagtacatttgttggaacggagccgcttccagagctgtgtgaggaagcagtgaagcacacgtataaactgacaagacgcaacgcaataccgagccggcggcaaacctgcgcatg

SEQ ID NO: 87579 - DNA, 749 bp, Zea Mays
gctcagccttcgaagtaccttcaagttatcattcatgtaaagcttaagatatgtttgtacttgtttaacacttagcaaggaataaaatgataaatatggaagcacgaagatgagtaacatactttactctttattgtttccttttcacctttaccagtactcatatatttacatcttgcgacctctctcttgagttatccttcacagaagggatagttgaaggtagaggcttatgttttaataacatgtgttgccttgctttataatcatgtagcaatcaaaagcaagtgaccaacattggcgcccacttccagtgaactcacgaccacaacaaactacacaatgtcgctgaagaagtcgacgggaactggtgccgtcctcatgcccttggatcccaaccaaggggaagaggcactctttcgggaggcaaggaaccaaaagaggaaggccatcaacactgatcctcgagataacaaactcgatcgggagatcaacaacctcgaagctattcaccaacaagtagagaagcacaaggaaaagatgcttcgactctctaagctctagaagaaaattgatgatgcaactgaggaaatgcgcaacatcgagagctgagctgaaatcacctagtaaaggtgaaaatgctccattatgtagggcctgtctatgtatagtttgggccctggggatgtcaggtcccgtggctccggcgagatcgccgtcgtgtccagttctgcgagctggggaagaat

SEQ ID NO: 87580 - DNA, 694 bp, Zea Mays
gaacggtgcacgaatcaacacgtgaccacgtgtgaaacagcgcgacatgcgagaaaagctaaacagacgtcacatttacattaaacaaatattagttgaaaacatcttagttggcactaaccacattaatttgcatctatatcaccatttaaaaactataccttaattttaattagaatgtcattcaaataaacctcggataaacgattaactatacaattaacgaaaacatgaccaaataatattactaacacgtagtcgaggttattacgaagtcgctacgaatgaaacgagtcgagacggactcgcaacacaacgtatatattgaataactagtgtttcttggatttacattacgtggcatgatttgattggtcgaaagctaaccatatgatggaccacatgggtcttagccacaagagtatcaagggaaggtgggatcaggtgtgggagccattttgcacctgtgttgcatgcctgcagatctcgcttgtgtgagggctgtgcatgcaagtgccggccgtagggattgtggatcgtgtggaaaaagaaatacatgcatgtgggaaattatggaggcgtgatgcatgcaagtggggcccaccattggttatctccttcctgttacccacgcacgtatgaatgcagttagacggaaataggatcgcggcctcgcggggcatggctggccgtc

SEQ ID NO: 87581 - DNA, 618 bp, Zea Mays
gctcaagatgatgtcatgcttaaattttagttgcgcttaacacctagggtgttatagtacccacttgcgcggcaacgtggccggacggccatcgccgtggtggtcactgtccttcgcaaatgtgccatgccgtgaccatttcaccacgtcgctgtaaccatggcatgcctggagttactgccttaagccattgtgccggcgggcgccatgatgcattcatccactgaaatatcccaccaccgtcgtgaccgtcttcatctcaaattggcgaagcacgtagccggttcctttaaattgagcactaccctcgctctgcctctctattacgcgctcataccacccgcagttagcctctgtcgtgcaccatagtccacagtcactggatttccctaaaatcgggtcactcgcgccaccgtgaggcatcctgccgtgatcagccatttccaggtatgttcatccccctctgttccatgttttagcatccttgactgttaacgttgctcgtcggcccaaccgattgagcgctaccgcatttgggcatcgagaacatcatctcgccgccgtggaacacctccgagcgcgcactcacgtcgacccactcttccacccctgttctgt

SEQ ID NO: 87582 - DNA, 541 bp, Zea Mays
cagctagcaatagtcctggtactaaatctgaatttaaaaagcataatgtgccaaaggttaaggaagacatatcatcgtccaacactaattcacaaccgagaagcccactcagattatcaatttggcacaacaagaggctagaaaaaaaacccggtgcacaaaaagtcgaagaagagaggcatgacatgggtccctaatgggagttctcaagatcaaggtaaggatgatgctttaggaagaggtggatagaagacaaacaaaaggaagaaagcaagtacatgacgtttgggtgaaaggtttgccccaactcatcaaagctattagtctttgcatcatccatattcttcagttgtgtcgtatatgttgtcccaaggtatgtttggttatcgttcatgtcatcattttgctccatatgcgtctttatattatgtaggagtgcaactgaattattatgcatatggatggttgcaatatgctacagcttatatgaagccaaagtattttagttgatggtacttgtgattcttgctatagtttgctt

SEQ ID NO: 87583 - DNA, 397 bp, Zea Mays
gtaatctactactagtagcagcagcagtctcctgttaccacttgtgctctgttttgtttttgctgcgtggcttaaaaacttgcctgttcaagattgccatgttctctctgaatgtcccgggacacaataggtctgattggttacctgcaccatcatatcctggaccaccgtgtgcgttgactctatctgagattttgtttggttgcttgcacgaggagcacgcagcctgtctgagcggatgcaataacattgcattttatcatcatttgttgcatctgctcgtacgcctagaaccggcgtatctcgccggtctggctcgcacgagcctggcttcccacacactgggaaccaatcaagcgaaatgcaactggtctcggctcttttctttcagcaggag

SEQ ID NO: 87584 - DNA, 788 bp, Zea Mays
ctggaccgctgaaccaagcacgcgtgtgtttaatagagacgagacacacggcatgcaggacagacgacgtcgtgacgcggttggtttaatggctaggcggtaaacatatggaagtggcgcggaattatagggattagattccacatgcaaacgtgcttactctgttacgtggacgcggaatttatggatcttgcatggggtataatggcggcagttaaagacattatcgaataagatgttgaaagatatggcataaaatagatacgctataaatgttgcatatatagtatataccgtttggcgtaaaatattgtgtcattgtgcgtaagtagtgtgttagggatattggtattacatgtacattgctataatatctgtacggtttcggaaataatgaaaataccctagaaacgtggatgcggttacttgtttagtatagtatccgtgatttcctttcattcgaaaaaacaccccaagactgcatagctagttggcggtggagatggccggctctggacaatcaccaacgatggtaggagatggcgttcgtcttgattcagagatagagggagtagttgatggtaacttactggttacaccacctcctgctctactggggcctataatcgacgagatgagcataggggaggaaggagaacatagggttcgacctccgatgtccaatattagctccagggagatggatacgcctcaaatactgcattcagatgtaagtccaattgttgtatttgattcttgattgattagattgttatgatcatattctg

SEQ ID NO: 87585 - DNA, 572 bp, Zea Mays
tttattttccttgttttttctaatgaccacagtctcaattctattaggtcctcagtattgatattcatcattattgcatactcaccaacctataaatcattccaaaatgttaccattcttgatccgtgctgatttcccatggaattatggcctctgaaccataaactagctggtaggtcaagttcttggttgcctcatgacaagacatcatgtaagcccataatgcttctaccaacttgtcatgccattatttcaggtagtcattgatcttacgcttgatcaacttggttaagtttttatttgatgcctcggtctttccattggcctgagcataatatggtgatgactaaccaagatgactccaaattatttagcaaactttccaaattcttctgatatgaacactatctgttgaggccacagacccatgtgcctaattggtagaacaagcggtatgccccatacctgtggtgtgttgggtttctaaacctagcctaagtagtgacctctgggttacttgaccttgacctagcactacacaccactggcatggaccaaaggtagccgaagac

SEQ ID NO: 87586 - DNA, 276 bp, Zea Mays
attggacaattggtagctggactaaattgaaaaggtcaagctttgtatgttttgagcaaacaattatttgtcaaatgatatgcaagcttaatgactaaaagttgtattaagggttctactgggggcttagtgaagagcagttgtgtgggtgtgtggcctgcttgcacttgtgctgctgtccttttgcgcgctgctgtttccacgcgcagattgcgtgctgctgtttccacgcgcaaaaggaagctgcattcctgtgcgtagcagatttggtggtct

SEQ ID NO: 87587 - DNA, 576 bp, Zea Mays
gtgctagtggaagaaaatgggagtatttagagaatttgtcaacaattaccatcatgcaattcagttgactagaaatagggagtctagaaattaaatccatgctcataatttgccaggcatggtcaggtttgggtagaggtagcagaagcccgggtcctacacacgctctggttttgcttgttgacaggtgtagcaagagcgaacaaattctttgacatattgcttcatgctaggccatgcaaacagcaacttaacttgacgataagtcctcaggaaggcacaatatccaccaatagcaatgtcatgtagagctgaaaccaccatacattgtatagttttgttagtccctaaccagatacgccctttgaaccggataatcccttaagttagtgagtagttgtcaatgctaccacaagtggctagaactgccaacaccttttcagccaaagggtcctactcgtagccttgtgttacttggttcaaccaacatggaatcaataagaaaaccgatattgcatggagttgtgtagaataaccatcgtcagccacgtttggtcaacgagacaaagcgtctgc

SEQ ID NO: 87588 - DNA, 475 bp, Zea Mays
gattttttctttcatcatatcagatctttgatctatctagttggttttaattcaactcttcggctgcgtttattgttgctagatctgagtagtttcatttaagttcgtagttgaacaggtgaattgcggttgaaccagccggtggctccttcctaggaagccacaactggccgacccctccctcgacctataaaaggaaggggttgacccttagatgaacagaagcacacacacacggacggaccccggaccagaagacatccagatggaccgacaaacaggaggaggacgcaccgacgaggacctagaggatgtagctccaccgccaagccaagacttagctaagactccactctgaaaccattagctccacttccaccccgataagacttgggagcctctcctccctctctcattcgcctgtaacccctactacgagctttgatcataaatggtgccggtagcgcaagtagct

SEQ ID NO: 87589 - DNA, 401 bp, Zea Mays
gtataacaatacataagaacataaactcatatttcatgcaaaaagtaggaggacggttgtacggtatggcaatgacaggccaacatgaatacgacgcaacagacatattaaaaggtgtgaaaccatcagttgccaagccgatatgaacgtttcttgcatcattggcaaaatctggatcaaagttgtcaagagccttccatgcatcaccatctgacgggtgcaccattaacccatcttgtctgtccgtacaatctttatgccacctcatgtgcatagcggtcatcctcgagagaaacaaacgtttcactctaggagtgagaggcatgtaccgaagctatttgtgtgcaacctttgtcaccaccttctccccttcttcatttaaaagctccacgtacctcgac

SEQ ID NO: 87590 - DNA, 707 bp, Zea Mays
gttgaacttctcttttgaagtactaggttccatacctcgatgccactatggtaagtgatatcttttggatgggatctgaattagactaggttttaggagcactaatgagcctctgattcaggagcccattagggatgcctatatactgaggggtggaggtgtagcaagaatttaactctagtttgcccaccatcagtcgtgcactcctctccttgtctcatcgcagatcgcagactagtagcccggtgtgtaacgcttcttccctatacatgtggatacctcaaaggtgctgcatctaaagcactagggcgaaccgcacgaggacatgaaggacgtcagcaacacacgacactgctcgacatgttcgtctaaatcaagacggtttctgctgcatctgcgcgaagacatgaaggacatcagcaacatacgacactgctcgacgcgttcgtctacatcaagatggtttttgctgcatctaagtgtctactggtaatcctgtgatctgtaactgcaatagttcttgttctttatggagtccataaattttgttttgcgctagtgtaacctccccataatcctacaatggtattatggccatagttgtcaagttttaggttcggggtgtgttcgtatagtgatatacgacttttctggatgatctatgaacatgttttgttgttcttgctgcaatggtcatttgacgaaat

SEQ ID NO: 87591 - DNA, 541 bp, Zea Mays
aaagcttgaagcttttattgtctctaacacatctagtacactagccatcctttttctcatggggtcgctgctagacctttttgtgtcttcggcacctccactcctgccaaagggcttagaacttctaatgttttcgtccctccgattctcggttcttcaattttgtcagtcttcggcattgcagccgactcttcaatcctctatgtaagagcaggtcctttggcttcaatagctgaagaagtctcaccaccaaattcaggcactatggccggttcaatgtagagcggtcggtgagtaaggaccttcaactttttcctcttcggtgtgggctcgcttgaagcagctgaagcagcagccttcccagaagttgcaccctttcttttctgcccccgcggcgagtagcgatagtcagggtacacaaatccaatagcatcaaaaaccctattcagtcttttctttttttggctcccaaaggccgcagatagtgcattgtcttcagacttggagtatgctccaagtagttcatcactagtattttcaa

SEQ ID NO: 87592 - DNA, 382 bp, Zea Mays
ggttctcggctagatggataagggagcgggagcggctgggttatataggggcggggcgattcaatcggccgagaatctcggcaatttagttgaggagcccccggattccggtgatcacgcacgatcgttatgagctcaccgagcagagcgtgcacggaaagggggaatcaacaggattccgtgcaggtcgttggggaggaagacgacgctgtccacgcgggtccacccgtcatcgccacagcacgaagtagcccacgcgcaacagaaccatgtgcggctgccacctcgggcccgcgtgtcggcgcacaggtgacaagctgggccgtgcgcgcggagaaaaccagaagatgggccacaggggaaaagaaatcggcccaatgag

SEQ ID NO: 87593 - DNA, 482 bp, Zea Mays
aaggtaatcttcggtcgaagtagcgtgcaaagaagcttcgtctatacactcgcgtagcgaaggtgcaagccgaaggtcgctagccttggcgtggagaaagcttaaaccctaaattatgtgtgtgagctttgtgggcatgttagtaaggtgcaagccgaagcgtgcaaagaagttttgtctattcgaaggagaagaagttcaagacttgtgcaacatgatagaaagaagaaaggcaatgatgcccttgtaatttttgtaaaattatctgtgtgagctttgtgggcatgtacaacttccctgtaaataggttaacagtgccatgcataaattcacttttcgacggtcttaagtttcgtctagcttagccttcgaagtaccttccagttattcctcgtgtaaagccgaaggtatgcttgtaaatttatattgtgtgcaaaagtatggaaagaaaaacgctaaggcacataagatgagtaaaatgc

SEQ ID NO: 87594 - DNA, 324 bp, Zea Mays
cccttatcttatttattcagatatgttgggtccaaatcgtcatttgctgaagttgagagcatcggcattggttgttgctatatcttgttggctgtttgcatgccttacgcgtagactctttcatcctcatgtcacatatggtccaatgtttcaaagggacattgagaggcaggcaaatcttagatttatctatgaatctgatgatatccaatgtgtggagctgcttagaatgtctaaggtccctttctttgagctttgtggtttgtttcggtctcgacacttgctaagggatagtattcacagttctgtagaacaactagttgc

SEQ ID NO: 87595 - DNA, 522 bp, Zea Mays
gcatacctatcctttgcttatcttaaaacagtgtaacaaacatgatctattctaaaataaattaagtagatcttatctagtctaatctggttacaccaatttaattctgatcccatctaatttggtcagatctaatctaatggacaaacatgttagataatactggtaaaataagattggatcctactcttataaatatgttttaatccaagttggactgagattccaatttagactagaccacgtacaacaacctgaccttatgcaactaccacaagcaccagatagttgcctaacccctctgttttaaccgatagagattctgacccacctacaccatataattcctcctacctcaaaagattctaacatatatcaataatatattctaccctggtatatctgcctaatctaaactagtctaatctggttatatccaatctaatctagaccctacctaatctaatatggtctaacctatgttacaagtattaactaaaccatattcctataaatgggttt

SEQ ID NO: 87596 - DNA, 614 bp, Zea Mays
aacaaactggagtagagataaaaacaaaatcactggcgagattgtaaatacttgtgtatgtgtggctccccctaaatatgtgcatgagttttgtgatcttcatattgacttgatatgtcaattatgcaacatatttggagaaagtgaatagccaacacattacacaataattgagggatgcaacaatattatataagatatgatgatgtaaaaatgacatactctaacaatttcatcattgcatagcataaaatatatgatggaactagctattacaataatgatcatcaccacataatattgttcatggccctaagccatcatcacaagcatcaccacaagcatagacaaatgctagagttattacagaccatagtgttcattacataaataaaagtgttaagcccctgtgggctaccaagccatcaatccttctccccctttttggcaacgagcaccaaaaaacaggagaagagaaacaaccacaaatcaccaggaaggggatggatcgaagaatcgcgatgctagattgactgcaaagttttcttccccagggttagctaggggaggggtgcttccaaaaggatcctggggggtaggataggatgaagatg

SEQ ID NO: 87597 - DNA, 734 bp, Zea Mays
tttcaagaaaattcagccaatgaaggatagagcgtacccagtttatttgtatagtggtgtcactgattctacccgggttaccaacaagaggattcctgctgtggatttggtgagccgactcgagatgattcttagaggcagagtgtcgaatattggtgctcctattgcatattctgcctggaatctgccaccttccaagactttttttagttttgtgtccaatcctcctgctagcgacagtggcctgggtcttagagtgcgaccctctcccgaagaagtcgaggctctggttgcttcacttggtgatctccccaatgatgaaaggcaagttcactttgagatgcctataaacccaagtgatgcagagataagtgctatgctggacatgttggctgaggattcatctgatttcgtccctgctgaaaccatagctattgcaactgtccccgagcctgaaaagaccttgattgctcaaaaatctgatggtgctcgcccaaagcgccttcgcccggccagtcacccaactgctcctgccgaggggaagaagaagagaaagaggaggcttcgacgagtgtcatgtttgaatcaggatgtcggcccttctgctcctgctgctgaagaagtgctagtggaacttttttctggagctgatcccaatgggtgtgaccctgctgatgctgaccccaatgggtgtgaccttgatgatgctgatcccaatgcgtgcaatccggccg

SEQ ID NO: 87598 - DNA, 507 bp, Zea Mays
ataagtgaccaacactatctacttgcttatctccttctttgtcgtagattgtgttcctgcatatcgggagtcttcatcgcctaaccgcccgagttatcgccaaatgccaagcccttcgggtgtttgcaactgcatcatccgacgcatccggtcttcaacgacacttaacttggaccttactcttcatcagcttgggtcgggctcacctgagttgactatattttgctggtccatcagacagggcgactgagtaggaagcccatcaggtggcccatgacatgttttagtgcccattaggtcccgtgggatatctatcccccacatccacccactcaaatcttttgaaacttggagggattactccttggggaaaattctcctccacttccacccagttcatcggccagattttcagatcgaggtaactctccattttcactcttttgccctgatatatgtttctaggcatccttttgtgaatctgtttgaggagaaggctagttggtg

SEQ ID NO: 87599 - DNA, 662 bp, Zea Mays
aacgctaacttttgattggcacgtggagttaccgacgattgcacatacggttgcaacttcaggtatactgaatcaccaacttggaacaccctttccgaacgatgtttgtctgcctggcgcttcatgcgctcttgagctcggcccagatgctgttgtatcatatgagataccacctctctgtcctgtaaccaagactgcaaatctgttactgaaatagatgctccaggttgcaaaccaaaatgtcttggtggatgaccatacaaaatctcaaagggtgagttgcctatggttgaatgaaaattggtgttataccaaaattctgtaactgccaaccattgactccatttgcgaggacaggcatgcacaaaatagcaaagatatgtttcgatgcactggttaacccgctctgtttgtccgtcggactgagaatggtaggctgaactcatgcacaattgtgtttctgttagcgtgaacaattgttgtcagaaagaactagtaaagactctatcgcggtctgaaactatagtggctggcattccatgcaacttgtagacattgtctagaaacaacttggccaccttggatgctgaaaacggatgtgctaaaggtagaaaataattgtactttgagaatctgtccaccaccactaatatgcagtccat

SEQ ID NO: 87600 - DNA, 408 bp, Zea Mays
cggtaaggacaatttccgcaaggagaagaccccacacgacaccggcgacataagcagcgcgaagaaggagcatcgagaacactctgacaagcaccagagtggcaaccacacccggcgcaaaggaaatgaagtggccacagccgcacacccgcccaatccaccaaccaataatggtggtggccacttccataagttgatggacacgtcatgccaaaatcatggtttcctaatccttcattagcccaccatctcagcgttgacgcttaattgctcgggggcctcaccccctgtttcaagctatccagactcagaggactccccagccaacatgccaagaatggcctctatctcagaatcattgttaggttgttgaatcaagatatgagtttgcttctcttcatcaggtaa

SEQ ID NO: 87601 - DNA, 275 bp, Zea Mays
cagagtacaatgttgcttcgagagcttttgaggccttgctaagggtaaaactttctaagatgctctatgttccatgagttccccacttctgtaccatccatttgagtaagccggtatgatcctggccgagtgacctctgatacaatgaatggcccttcccatagtggtgacaacttctgtcgtccttcccccgttagaattcggcgaaggaccaagtctcccactgcaaaggatcggtgtcgtacgactttatcatgatagcgcctcaaggtctg

SEQ ID NO: 87602 - DNA, 324 bp, Zea Mays
agagtatcaaggttgtgtccgagttcccagatgtgtttccaaaggacttaccaggtatgccaccagagcggaaagttgagttcgccatagagcttcttcctggaaccacccccatctttaagatagcttatagagtatctggaccagagttggttgagcttaagaagcagattgatgagctgttagagaaaggttacatcccgccaagcacctcgccttgggccgcccctgtcctatttatggagaagaaagatggcaccaaaaggatatgtgttgattatcgcgctctgaatgaggtcaccatcaagaataagtaccccttgc

SEQ ID NO: 87603 - DNA, 1079 bp, Zea Mays
cacatttaggatttcacggtgttacatttctcgctgaggtcgggtggggcgagcctacctccacgatcggtcccctcggaaaaggcctcttcttggacggatccgcgatgtgatgtaggatgccttctcgatccgcaatgcaggagagggatccaaagtggaaaacctccccggcgttgaagatgatcggagtgttgaagatgatagccatgtggtctttgggaatcaacgtcacacccctacctagcgcgccagcagtcggtgtttatgactcaactgcgcaccacgaggttccccatgtgatgcttttgagcaggaagacatcattgattgggactcgatggtacgtgcagatgcacgacagatcacacaagagtttataaaggttcgggccgctagaatgcgtaacaccctacttcctattgaggctgagtatttgagtatgagtgatgtataaaggttgcagaggcggtggagtgtgagttctcctaatgacgtagtggtggcgtggttgctgtgagaggactagtgggctatgcggtagtgttgtgatgtgacgagctaagagtagtcattcataggggtacccctatgccttatatagatgaccataaggttatccctttacatgtcgtgatcactctctaattctacctgaaccctccttttatcgtggcatgcaatcctgcttatctggagttcaattgcctttcatctaagctatctccaggtatctagcacttcaggtacgctcaacctccttgcccgaggcttcagcacatgattcggttgtctggtcttcgcctctccgggttgacctcatctagcttggttgcgacatgagggcatgtcttgctaggcaagtcgtcgggaggtctatcaagcggcccatggagcgtttctacgctcccgcccgaggtcagcctcgggcgagtcacgactgcatctcccacccaaggttagcatcgggcgagtcgtgactgcttctcctgcccagagatggctttggacgagtcatgactatttctcctgtccgaagttggcctcgagcaagacaaaatggtgtttcccattcgagg

SEQ ID NO: 87604 - DNA, 298 bp, Zea Mays
tttgaacaaaaaagatgtggtgaagtgcatcctttgtggcaaaattgtttatgcatgtgttagaaggttgaagcagcaccttgttggtggtcatggtgatgttgctaagtgcccgaaggcaacatcgacaatcagcaaagagatgagtgattatttgaagaagaatgctagagagaagcctattgagttggatcatgataaagagggtgataaagacgatgacgttgaagtacttggagaaggagaaagtagagcatcccattcaattgttcagcccagttccataacaacccaaaag

SEQ ID NO: 87605 - DNA, 305 bp, Zea Mays
ggtatcggtccgttctggccgcacgatccgaaatcaggggcagggattagatccaggtgagttaccctccgcgcacatccctagccgtcgaatctagatttcacggccctggtttaaaataagcgtgccctgatcgcatccgtccgaaaccagtcgaacggcccagatggcttcagcgaaaggggaagctcaattctaatcatcaccgtccaactctcatccgacggcgcaagtacatcatcctccctcggccgatcctaaccgttgattcctggatgaacggccgagagccgtcttccccaatc

SEQ ID NO: 87606 - DNA, 275 bp, Zea Mays
ctttggtattatattgaagaaagaacacccaagtataacttgtatatcgtcatctactatcataagacaatggaggttgtctcccacatttgcatatgatgttggttcaaataagtccatatgtaagggctctaacggtctcgatgttgacatgaaacctctagttcgatgagtgttgacaacttgcttactagcttaacatgcactacaaattttatccttctcaaacacaatatcttttaaacctctaaccatctctttattcaatagctttt

SEQ ID NO: 87607 - DNA, 759 bp, Zea Mays
gagcactacgttggcaaaaacaaacggcgcaaattgttaatcatatataggaatgtggccatttgtacacaaatgatcgataaaatgaatagtcaaaattagatgaaggtggatattctggggcgaggaggagaaggaaaataaggaagggcgagtagtgtgtagtagcaactttggagatatgtataactcatctgatatgacattgacaataatgtttgatcaaaaaaacttcacatagaaaaaatagcagtgcaggttgcgaaaaaaatctggggcacggcttctatcgcagtaaagaccattgttgtaggccacaaagcttgagagcaaaagtgttagggagtacaacatggaaagggttttaacaaacaactataattagttaataaattcactacattatgtaccttgttgaatggaggacacccaaaaaatagtactacctctcttttttatttgacgctggctaatgcaattttacactaaaaacgtcaactaaaaacggagggagtatgtttttatacagagttggccagatggctattgttgtgattattcatcattattctatataaatatagggatgtaagaatgcatgagaaaaacacaactatgcaattttctattatgaacagttgtaacaataagaaacaaatataagagtagatgaatatatatgtgaaaaaattataggtacacatattttcaccaaaacaaaaaaagaacatttcatttaacacatatctaatatttgga

SEQ ID NO: 87608 - DNA, 496 bp, Zea Mays
atcagttcatcttcttttttttgtataattgcccaaaattttgttgcacatggtctcaatcatttctagccactcttggcaaagatctttgaattgtttctcaaacttgaagcgatagggcaaccgaacaagttcattcttcttccttgttccctttagcttcggcatactccattcactcaacgttggagataccctgttggccaggtattcctgcactagatctctagtgctgatctgttcagccaccaccctgaattctactacagcttgttggcatggtgaccccgacgtcatgcggcacaagggcctagtcagtccgaagcttaaactcagtgggctcatgaccatcgtcttcaacatcaccctcttcttctcatctaccttgatatagaaccactcacttttctagccggttggccacttggtatgatagctgagcaccgaagcctacatatccttgcgatacgcgaagttataacaaccgaaattttca

SEQ ID NO: 87609 - DNA, 465 bp, Zea Mays
tttccaagatggtatgggaaggggttgcaaagggcctgctgccttcaaatgactagctttgattctctggcaggtgtcacactcggatatgtacttggcaatttcccttttcattctagtccaccaatataaggatctgagatcatggtacatcttgttgctaccagggtgcatggagaatttggataggtgagcttcatccagtatcttctttctgagcttagggtccttgggaacgaccaatcgatctccaaaccatagaattcccttgttgtcctgtcggaaacacttgtatttttctgccttttgcttgatcatatctttgataacctgaacacccttatcctcaacctgtgccctgactatctgttcttgcaatgtgggctccaccgagatataacttaggtcacccgaagaaataacttccaggttcagcttgcacaactcatcacacagggtggtgac

SEQ ID NO: 87610 - DNA, 614 bp, Zea Mays
gccgagtgatgcctaaaactttgctttcctgagtagtgacttggaactttagaaatagtgtccgacctagaaaaccccatttatactcgtgtcgacgtgcttttttgctttctgagccctaacttcactttttcccttcgaaccactcctctacttccctgagatttcgatcctgctcgctccgccggaaagatcacgatggcgccaaagcggaagaggcagaacaccgttgctgcaatcatcccgcccatcgaccccaatagccagtttccattcgctggtaaccatatgtctatcatttctgaatccgacctccttcatctcgttgaagttagggttttgcttccaaaagagctttgctcttggtggatttgctgcggtgtcaccgtttcgacagaggatacccatgaatctgtcgtttacgtttcttttctcattcgtgggcttgctcttcccatctcccccttttttcgtggtctccttgatttctacgagttgaacttgatgcatctgaaccttaattccattctgcaaatttccatttttgtacatctgtgtgaggcctttctcaggattctcccccactttggtctctggaaatatctttatcattg

SEQ ID NO: 87611 - DNA, 1154 bp, Zea Mays
caaaagatgacacaagatatatcctcgaggttcgattgtttatcggcaatatacgtccttgttgtagcaagtctacgctaggtggttcacatactaattggcatcacacatcaagcctacaatcatgccccataagaaccatattaataggcactccaacactctactatttcactgtagttactctttgcaaatctcccatagggaaagagaacaagagctccttataatgatgatcggagccggcaacaatctctaatagcttctcaacaatgccattaacttttgggttgtctaaaagatgacaaccaccaatagtaacaagagtagaaccagcccaatccgctcaactagtgccacgagacacaacagctatatactatgaactaggagctctacaatctcacccaaaagatgaactacgagatgcacgtgaatggagtgtatttatctatccctatgaggtgttctcaagtgtaataggtgaagggatgccagccaaggctagctaatgggtctatttatagatccaattcaaaatccaatcgttacctcatgaagggcttaaaatgggggcagcatacatgtctggtgcactgcgagcttctacaccaaacacgtctagtgccttcccaatggctatatttcaagcgaatataaactagtcattaattatgtcaggtatttggtgcgataattggatgtgccactcgacattctagtgtgtgttgggtccaagtgtatattttacatggtctctaagtgccctatttgatagactatagagctgaaaagcatgtttgacatgctctctaagtgacatgtatagtggaccatctagtactacaccgaacacatgtactgcataacatcagactccactatgctaggataaaattttgcaatgtatatcggttgactttgtatccgatgcacatgtcctattcatcaccggacttgttcggtgcttttagaaaatttgcaactaaagcattttctcttctcctcttaaatgtgctagctcttacatgtccactaaacatattagagcatacttagcattttaaagtgttttcaataaatatattttcttgctctcatgtgtctcacttaggcctatatgcaatacatatgattttaacacctagcggcac

SEQ ID NO: 87612 - DNA, 696 bp, Zea Mays
cactaattgacctaattatgtccaattggcatttaaggccaaaatatgtattcctctcaagtgcacatgtttagggggacaatctatattatagaactttataaatcttaactaacatatctttttatcatgtatgtctctttcaattgctacttgttcaaaattcatattctttcttgtaccaaggtttaatgtgtagaacttgtatcactgggcctcacaagtcataagtgcattgatttacaagtattcatcacttgtatacacaaatttgggggaagcaattctctacattttaaatctttgagactaatgtattttcaagtctatattgtgtttagccttaaattgaaaggtaaatggagttttgagcaaaggaaaaccttccattgtatatccgttcgatatcaatcacccttgctcaaactcaattcttaaattccatatctatattgagaaaggccatacaaacttactcagtttttggtgcttaatgccaaaggggagaaagtatttggcaaagcaaaagaactgcaccaccaccttgtcttcaaaacttttagtcttccaaaattggtacttttttatttgataaaaccctctagaagagctaagaggagaaaaatgttttcataccaaaagcgaaaatttattcagggagagcatttatttggccaaaagaaaacatttgagaaa

SEQ ID NO: 87613 - DNA, 1032 bp, Zea Mays
gccatggtgaaggttacttgccaggcagatgaccaagcgctagtggcattcggctacaccagaagcaacggcaaatacagcgtggtcctcaagggactgccgattagtagcagcagcagcagcaactacggggctgctgactcgtgtaaggtcgagctacacggagcgccaggaggatcggactgcaacgtgccgatcgagctaaacctgtcagggctcagcgtctactcccgatcaagcgaggaggtggtcttcaaagcgaaccagataatggcgttcgcgtccaagaacgcgtttggctgttcatcgaaaccacagacgcagtcgtcatcaccggttcatccctactacagctccccaccactcatccctcaccagtacccctcgcctccggtgccggcggctacccacaggtctccaccaccgttgccgttgccgttgccgttgccttatcagtattcagcaccaccaccagcagcacctgctgctaaccagcttccatccccagcgtaccagtacatttcgccaccgccttaccagcagcagcagtccatgcttcccaatagctaccagactccaccacctccacagggcacggagtctccagtactacaaccccgcaagtatctaccacctccatactactactacaactctccaccagcaccacaacaccaccagcacagctacgtacctccaccaccgctagcttaccagtaccctccacctccactcatccacaagtcgccgcttcttccatcgtcgtcaccagcggctccataccactacaactctccacctacctaccagtatccaccacctccgtatagctaccaaccttcgccgccacctgccggcctgtactctccaccattattgcctccaaatgctccggaacacctgcatccaaatgtcccccatgcgaaatctccacagccgcctctccacaccccaccacctccgaacggtgccgtgccgtcgccgtcgccgacgacaccacctctgcgctactacacatccccgccgccgacg

SEQ ID NO: 87614 - DNA, 370 bp, Zea Mays
cagggagatagtactggtgtctaacaacacttggatagcagcaatacagcagcaaacagcccagccagcatttggataagtttaccacctcctcatcacttctatgtgtgtgcatgggtgccaagtaccccccttcagtaacaaatctccttagatgccaaacaccagaagcccctcgagtagatagtggctacagatatttttttctcagatatttctggagcagcactgaactgctactacttgactgcatactctacttcttcccctttgatctcccagttttccatagcaacagtgggagcacacataaaggaatctgtccaccaaacaaccctctaccaacttgtcataaggattatggctttat

SEQ ID NO: 87615 - DNA, 424 bp, Zea Mays
aaacttgtaaacaataactatccaacttcttttgtctgacaacacatcaaactaaccaggacttaaatagttgcacataataagcattttgcacctgacatatatgatcatggatggaatgtctgttttaacctcttttatgaaatgtctttttagcttctggactcttgaaatctattataattcattcgtggtcctatttttggctttgtacagattggcacacatgtgtccattgcagaggacgttctgattatcagtgcctgtgctgtccattttactcggtttgctctgcctgccttggaaaactagaatttgtgcaactgagaaagcaaaataagggattctgcagcagctgcttgaacctggctattgcgattgagaaggatgatcctcatgtggtaactgcatgcatatacccaac

SEQ ID NO: 87616 - DNA, 789 bp, Zea Mays
cacaaatgaaattccattttccatttgcatctctatcctcacttttcctatggttgcagtgtaaaggagagagagagggaaagtgactattaccacactgtaaacgcatgatgtgtgcagtgtactgctccctatggttgaagccactgccttgttccgttccaaaaaaactactacgtgttaggtactcacacgtggtcaggtgcgcccaaatactcagaggcaaagacaggaaaagtggtcaggtgggccaaacacacagaggcaaagacagggagcacgagagagcgataagacaataggtaggaactatagcttctcgttatatgtgtctcatccagctataggaagggggtatttatagccccgttcagggttaggtggcccaaagtacggtcctaccctcggctaccaactatatccagtgaatatttcatataacagggtaattctaggaccgtgcgcgcaacaggcggtgcacaccaattaacacacccacaagctacactgataggtgggcctccaaatgcgtcttctggtgaatcgatgatgtgtagatcgaggcgcaaccttcaatgccaccctcggagccatcgcgcctcggcacccttcactcaacttggacgagtcagtggcggtaaggaccatggggagaagtagtggtaaaggccttggttgctaccggtcgctctagagccttcacccgacgttatttcttgttgaggtcgcttgctggatcgaagctcccttcgcttatggacctatgtaactggttagcagaaaacgaaa

SEQ ID NO: 87617 - DNA, 325 bp, Zea Mays
ttccgaactgtgaagtgaaaccctaccacatccatcattccgaggaacttgtggcggtccccacgggccacgtccctcctgcttaacattcccccctcaaaaacctggtagtggtagtacctcacttgcagccaacaaagtgtccaaggtaaatcacacgtcaagacaaaagccttggtttctgaacagagacaagtaaagccaaggcacacggaaaaacgaacaaagcggcagctagccttctagctcaattcgatgcaatccatagcatggcatggcatggcatggcaggaccattctcctctcccgcctccgacggtccgac

SEQ ID NO: 87618 - DNA, 506 bp, Zea Mays
caaaaacatgcatcacaattgtataataaacatttatggtttaaatttttttcacatagcaaaagaccaaaagtgtagcgcatcagtttctatatttctgagaaagaccaaacatcacagtcttacaatctcatacagtcatataaattgcaatcataaccaagcagaaagcacacatccacatgtattactaacacaatagtacacaatacacattctccagtagcaaggtaataattagcacctggtaccggcagcaaggtaataatcacttaatcagcaagacagtagcaaggcagcaacaaaaaaaaacaaataaagcaatactataccagcttgaactaagttgtagatgttccagggatggtgttgcttcttgttcctgttactgttcttcttgttgttgttgcttcttgttttcctttgcctttaccaccaaattcttcttttagttctacaatgagatgaagcattgcctggttaatatttgttgatatgcaatgaac

SEQ ID NO: 87619 - DNA, 1067 bp, Zea Mays
caggcgtcaggcgtcttcaactaaccgcgaaaccaccggagctgctcctcacgatggctgtggcagctccgatcactccgggctcgccctccccataaaacctagaacgtggggtgcccccttggtccgctacctcgtgaaccgtcgatagccacctgggttcagggttttccactccggtcaggcaaggggcggggcaggttttcggccgccgccgcaaatccgcgttggtagtcgaaatctagtgcaattgtgactgctcggtggtagtctaggtcataaccaagccttcgggggagttaattggacagcgaaccaccgcagggttgggaattgctcgccgaccattcaagttcgccgcgaattcgtctggtaccgcgggcgagcagctccgccctacattcgcaggtaacccttgtcccgtttaattcctagcgctgtgcgcttcgttttgtagccatcaatttaggtctcagtccttggcgcggcgatttgggtgctcgccggatcagccaacgccgccgtcagaaggggatcgcggcgcgtttcagaaccggggaaggagacaacatagtgaccatagatttctcctcggacggtttagattaggttccgggtgccgattgggtgggaatgcctagaactgtccgatcaggatcgaggggcccgagtcgttatctgcgtaattagatctgagccatgcatcgcggatccgagggcggatatcgcgtatcggttcagggcagcgagtatctaatcggcaccgtatagttttgatccaacggcccgtagtgcaccgtaccccttcgcgggtacgttttacgaaatagaccttatgatttgagagaatacaacccgccgtccagtgaggtgttcactgagtctagggaatcttctgcgctaaccccctggtctttttgaaaattgacgcccagttcagagatgattaaaaatagagaaataatattagaaattcatttttaatacaaaaacaattgctagaacttggaaaattcatatctaattcattttaaatccaaattgacccattccaatttctaaaattt

SEQ ID NO: 87620 - DNA, 791 bp, Zea Mays
agctagcaatgtttttgcttcaaaaatctcgggaccagttgggttctctatccagctagagactcgcacgtctagctatcttccagaacaaggaggaagagagttgttatgattctccatagtaaaccacttgtaccgtcatcccttgatactgtccttcaataggatatccaagtattcagtttttctacctcggagagttctaaactgactcccccgaccacgtgatgctatccattcgccatgcctggtttgcaatgatacaaatacccccacaaaccaaaatgtggtgtagtcccaaggaaggcttcactgagatgaacgaaaatagcgatttgaagaatggaattgggtctgagagaggtaaaattggtagaataataatccaggaggccacagaagaagggagaaataggaagacctaaaccacagatcaaaaaagggtaaagataattgactcatgagtatcttcactagggacaaaaacaccctcccatgtatttttgtgaatggatatacgtgctgtgaacatccgaatatgtcattttctgatgaaaaataaataaaatgatatcacttgtggtctaaaagaaataactttagccgacacaagttatgattatagatgagcaaacgggccgcccggccggtctaggcacgacccaattaggcacggcacggtcaggcccacgggcctaccgggtcgggcctgcatagtcctacatgccttactaggggcccaggcacgacccttcgtaccgtttttcgggccgggccagcccgaagcccgg

SEQ ID NO: 87621 - DNA, 1227 bp, Zea Mays
gtaccacaccacgcacatgcaacgcaatgcaaaaggccggctactctgcatggctattcggcttgcagttgcttagctatggctagctacagtagcgtcgtccggagttgactgcgtgagcaatgaacgggcagaacgagcaagtgcggcagcgccaagcaccaagcagcattgcctcgtccgacctcggaccatgcgccgcgcctgctatagtgctaggcccttctcctagtagtcctagcagctagctgtagcctgtaggtgtagcttctcctccatcaatgatgttggggttgctgtgcatgtagccgccgatgacacgcatgatgttgcagttgcatgtagttctccggcatggtcctattggacgtgaaagcaggtgtaggcgtgtagctgacctcgccgtgtaggcgcgcatctcaccgcgtgctccagggagacgtcgttgagctacctgagctcccttggcgaccatgggccgtggtgggctggtggctggaaggtcttgttgcaggtcacggtgaaatagggccgaaggggcgcatctgtcgggccggggcacccaggcagcgacacggtgagcccatatctcaccacgcactactatttctatttcgctggccataatgccctggatctctttctggtggaacatctgtatgaaactgtgagacagtgctctctttctcgtgatcaatcagctccagaagcacaaccccgaagctgtacacatcactcttgtcgctcagacggtggctgacaaagctctcagcccagagttccctggatgagcacaatgaaatcgttcctgtccatggacttgacgccgctccgaaatccgacaccttcgcgttgtgttcctcatccagtggcgatcttcagtctaagatccagtgggaccggtgatccgcttccgtcgactgcgccatgaaggaactcgaagagggtgccgttggaaacgtactcgtacaccagcatcggcacatctacgtccaagatgatgatctcgttcacgaactcctctctgcttgctgtcgtcgtccttcagcttggacttctttatggcgacctgtttgccgtcgtccggtgtccaacaaggttcctctgtagaccattctatggccgccgcatccaagaacgttgtccgtggctttctttatctcctcctccgagagagagtataaggagggccgggcaaaaaacccgtaatccgaaacccgaacccgg

SEQ ID NO: 87622 - DNA, 334 bp, Zea Mays
tcccagaatgtagtattctccccattccccacctctgtaaccacagccatagcaaaaagagcatgtgccatacgaggcacatgaaccggtagcccttcccagggccgagcatgatcagttttctgcaaccataaccagcgagtacgtaatgcccagcccataaattggaggttgaggatcccaagccctccataccgcagcggccgatgtaccttctcccaagagacaagacaattacccccattagcattctgacgaccggtccacaagaaaccacgctgaagcttatcaataactcttattccccgcttaggaatgtccaaagccaccataa

SEQ ID NO: 87623 - DNA, 583 bp, Zea Mays
agaaaatctccataccttgttaattaatgctcatgcttcgtctccagcaatttctcggtcacccttagtccagatctgagcaataaacttattgcccatgcttcttgcttcggccgggatgtcgactaaatctgatgatgaaaggccgaaggttggtttgttaacggtcttgaggtggttgcatccagccttggcaaaagtagcagctattccacgggcagcgactagtgcgcaaaagtcgtcgtagtcgattatgactttgtcatgatcttcaatctctttctcaatccttctgattgcccctcggatatcttcgacagaatggctggcttcctcagatgtagctccaatagaattgaaaatatctttcagtcgagcagagcattgcgttgcaaaaccaaagcatctatcccgaagagctttaagtgtttcactaagcttaaaacttttatcagcttcggccttgattttcatatttaaggtttcggactcatgactaaatcgtcttgtattttcttccaaaattatttttgtttccttcaattctttactcaacttttcaattcgtatatcctgatttgaa

SEQ ID NO: 87624 - DNA, 490 bp, Zea Mays
agctatcatgatcccaatgctacagaccattcttttttgtcagaaattcttgtgggactgagtaggactaagtagggctgctgatgggttgggttataatggggttttatgggtgggtattgatatgtgtgctatttgggttggtggttatgggtttaagagctaaatggggcaagttgatgtgggtttgcttataattgagttggaatgaattcttaggaacaccccatctccttcatttaatagaggaattcccacgatgaatcggggatagggtccccattgccatctctaatcatgatttcaagttggatcatatatgtacctaggttatgtcaaggtggagccatgaggatcttcttcgcaccttattgctttttactaggtacgtgcccatgcgttgcgatgacatattgtatggaaacaaataacttatatcatcaacctcaacatctcacaaattcacactaatggtgatagcaatgtcgac

SEQ ID NO: 87625 - DNA, 657 bp, Zea Mays
ttccaggaattaaacaagttttagatttaattttatactagaaaagtattttctatattcatttattcaattccttcaagttctggcctgctcgcactatttttgagaagtgcagggtcaattctgtaaaaattaggacctttctgtaattactttataactaggttggatggcgggttcatttcgcagatttccagggactctttagaaagaaggccagggccgaaggggtatatgttattcctaaccgttcgatccacaatcgatgatccggattagatcaaagctccgtgaaacggtacgcagggatagccatcagattagatctcgacggcctgggtttaatgttacctacatcgatcacaagcgccatatctagatcggacgaaccagattggttcagccgaaccggtacggggtggactaatcctagccacccactccaagatctacggccaagatccaattgcccgaatggatagtacccgctttaatcgcgtccgcccattagatcgaacggccccgggcattcttccacatcacgaccccctccctccagagcggtggcgcgttcacgtcacccgacggtggcctcgccggagagcacggtgacatgattctgtgccctaagctacgattcaactggtaatacacgat

SEQ ID NO: 87626 - DNA, 346 bp, Zea Mays
aaaatatttaaagcagataacatttggtcatatactggattttgctgtgatagcatatagtattgtgtggcagattggtcttccagaatgcagctgatgtatacctggtttttgtgcaatacaacattgtattgtgttccaatttgtgcttcgcatgatgcattactaaacttcacttgatggttcccatgttattttgcctaatgaaattatatgtgccttatacctgtccgaggaggaacttgcatcttatattgctcttaaactttcctatccatagcagactcttcaaaagctggttggatcagttcatcagtttgtgtgtttctttatgaagtcagcaaac

SEQ ID NO: 87627 - DNA, 1463 bp, Zea Mays
tggggaatagcagtcgttgaacctatgcatgctttatcgtagttggtgaaagccgacggggccgcattccagtcgctcttgttcgcatgtgaaactacgtgtgttaggtacgcgcattgaatgctcatgtccccctggggcttttgtctgatgcctagctcggggttatcttccttgcccgagacgggcttcgacaaggcagaaacagtggttccacggagaggggacctcagccgggacgagaatttccctgagtacgtaccttgtccgagggcaagctcgggtgaggcagagttatgagttcccgtcgagaggggtctcaggcgaatcgtggtttactctttcttgtcctcggggaatgagttcgacgtttgtcttagggttaagcgtgttttaggggcgtaatctagttacccctaattacgatacccgacagaaaggttcactccggaaggactagccttcggttagtcctaagacatcgagcccggggtcatacgagacggagacaaaagggggtcaagagggtcgagaagaaggcacatgactaacccatcataaataaccgaccacattaattgcgcttggcaccgagccacaaagggacagtcggaccaccttccactcatgacctatcgagcctagacttgagtgcgttggccatcaacaagacccgtaacacgacaagatgcgtcgagacccaggctacgacagctaggggtcggtgtggcacatggacgataatgttgatgtctgagctctccgcccgccataaagagcgtgaccagggaagcctagacgaccgaggcataaacggacaaacgcaactttaacaagatagaacactctattttaccacagcgcagcaactcctccttaaagaatctacaggtagccgactccccatggccaatacaaggggaggttggataggatggacatgggagacagacacaaacataagcacatgcacatgcacacagacaacgaaaccaggagacatattggccggagccaaggagcgatccaccacgacatctaagtcttagtagaaggcaccagtcctgtagtctttatgtctagccacacataagagacttaggagctcatccctctctcgcccgttagtaacccccactacaagcatttgagcaacaaggtgcagttaacacgagccaccgaagactggatgtagggatgttccgcctgaatcagtataaattttgcgtctaccgagcacaccatctagaccatggaacacacacagataaatttacttatcgaaactggttcaaaacagtgacaaatggttagttcaagtatcaaaatatcttattaactactttctgtgtgccttttttctggaagcatttttctttgcactcagaagcgattgaattcaacttacccctttttatattgatgtaggagaccaaaatattgacgatacaatgtgtttcaac

SEQ ID NO: 87628 - DNA, 389 bp, Zea Mays
gaatgggatgttctgaataagttaagtctggttccaaggcaacatccaccacatcgatggttcgaccaggaatccgaaggcacttcttcaattgagatacatggaacacattatgcactacatacaatgtttctggtagttggagttgatatgccactggtccgtattgttcaagaataagaaacgagtcaatataccagggtgtcagttgcccttttaccctgaaacggttcacacccttcattggtgacagcttcaagtatacatgatcattagcttgaaagaccaaaggttggcgtcgcttatccgcataattcttttgccgagcttgtgcctctttcaagttgtgtatgatccgttggactttttcttccgtctctttaaccatg

SEQ ID NO: 87629 - DNA, 560 bp, Zea Mays
cgctgactagactggggacactattttgcggaagatcagggtctaatctataaatttcaggtcctaaccgtgaggtttcttcactggataagaactgcgggttgatttctattaatctgagggactctttagcaaatcggccaccgaaggggtatcggtgcacactggccgtccgatcaaccatttgcggccacgattagattccggtgcaaacacgaatcaatatctaattctacgcgtaggatcacgatccaacgacccacgacaaaagggcgaaaaggggtgtcggccagctccaatttggaccgcccattcacggatcacgggtctgcctgccgtcttccttccaacaccgaacccagcggtgcaccactgaccactgcagcggagcttaccagcgagccccccaattctcgcacaaccgcgaccctacgcatcgtagtatgggttctatcccaaatcaagggttcggtggatgtaggggagggattattacctccaatggccaggtggaagaatcgggccatggcaagggtgcgtctcggcggcgatgaagcgca

SEQ ID NO: 87630 - DNA, 290 bp, Zea Mays
ggccgcggtgctcggcggcacgtcggtgttcggcgccaagactatcgccttcctcgggctgtacctcgtggcgatcgggcgcggcggggtgcagtcgtcgctggcgccgttcggcgcggagcagttcgacgacgacaacccggcggaccgggagagcaaggcgtctttcttcagctggttctacctctgcgtcgacttcggcatgatcgtctccggcctcatcatcgtgtgggtccaggacaacgtcagctggggcctcggcttcggcatctccacggcctgcctcgcgc

SEQ ID NO: 87631 - DNA, 598 bp, Zea Mays
gttcaggatcccacggagacttggggcactttgggttaatgggagagaacgtagtgtggatgaatgtaggatgcatgaagtacactagatttagagaggttcggaccgttggagcgtaataccctacgtcctcttggttactagttgtattgctcgtaagtagaaaatggtaagtgttcgtttgtacgtttggacgtgtgtgatcagttatcccttagaagggatcccctcttccttttatagtccaagagataggggttacatgatgtgtgagttggcttagcaccagacgtctcctattgttgctattgaaggtgtaatcgtccatccatagctttttggcagcgtcggctccacatcgtgggtggtcgttgtctcccgtacgtcgtggatggaggatgttgtctctagacgtgacggtcgttgtccatgtgtgcacccgcaatggtgcactattgacacacctaggacgatcgagcctaacaccctacatggtgtgggatgtgggcacgatcatgcttatcttgtcacacaggcacaatcacactctaactccaccaactccttgactatccatgcttggtagcaaggacacatg

SEQ ID NO: 87632 - DNA, 299 bp, Zea Mays
gaaaactgcatgccgtagtacagggtcggctacagatggaaattgagtgcatgcgtccagctatcacctacacccaatacttcgaacccaagataatgatcaccatatataccctgtgatttgaagagataaaaggttcctggattgcgatggtagacccacatgccataatttgagaataatctcatttcatatgtattttcattgtagtctgcatgtttctcccttttttgaggaaaaaatgaaggtacaaatctgaccacaaaactaaggtcagtcctttttcccactaatatttt

SEQ ID NO: 87633 - DNA, 792 bp, Zea Mays
cccgcccatcccaacctcatgcacaagcaaccgtgaagcttccacaggcaatagtgaaacgtaatctgtgcttgttgttcatctgttcaaaagtcctacagtaagttctcgtctaatttgtgttagtcttgtttagttccgttgtctctgttctctcaatggttcagtacaatcttgtttatttcattgttaggtttagttcaatggtgtacatgtcaatttaattgttctaattttagtgtactgagttcgaggtaatatataccaaacactggtattttgaatacatgtttggttcttgttaggctatatcagttagggtcttgttcagctagggtgtagttcttacattttgcatcaaagcatcgtaattttagctctaattttaacggatagagcacagagctgggcttgaatagaaaagcacatctgacccagttaatgttataggccaatgagctccatatagattagatcagtattcttccttgccaatggttctactcactccaataatgtcattatgttattgttagcagaacataataagacaataataggtttgcatcactagacaataatatgtgattggacggagggtatttttgtttgactactattaagacaatttttgtggtagttgtgatgccaaacaaaataaacacagcttgccatagaagccaggcatgatgacaattagcaaggaagcacctcgtttagtattattaattatagatgaccggtccatattttgaaactgttcttggacaacttcataagctttagtttgtt

SEQ ID NO: 87634 - DNA, 539 bp, Zea Mays
agttacaagaacagccttcggaatatggtataaatttattgtgacaaggagcagccatcaagtgatggcatgtctgcactttggtgaacaccacttctgccgaacatgcagcaagctttcaacgagtgctccactccaagctgtatacctgaccaatttctaatttctacaacactggccggaggtttagttattcccgtcaggtttcatttgtcatacaaattctctatcattcatcaaacaagacagtatgcactatgcaggtgcgtgccagagctgagctaaattcccccaaatccgtgtcctaaatgcctctaactgttctgcaatcaactaaacagtaaagaaccgttgaaagtatcagtgtcaacagttttttttccttctttgcccggatactcggatagcactctttacaggttgcaggccagtatgcgataattctgactcagcttcctatgttgttgtcgctgtggccgctaaactttgggtttattgctgcccgtaaaagaatcacttgcaataaaacaacctgatca

SEQ ID NO: 87635 - DNA, 1132 bp, Zea Mays
ctccaaagcctgcgattagatcctgtaactgcctgaccaagtgcaagtgacagctcattacagagcaagaaacaaggccaacggattacacgcacattccacagcttaggtggcagctcaagaagctcaacctcacgatcactaacaatgtcttcctcctggaacttgcttattatctcattccaaacaagtgcaaaccgttgtgcttccacttgatttgactcaatctttctaaaggatctgctgaaaccataccttagttgtaatcgctgtcagaatttgtgaaaacggctgggcaagaagctctcattcacctgttgctcctctggcatgatgttgaatgacatggcacttgcaaagaactggaacctaagtcgcagctgtttcatgtccttgatctctcccaaatgtgcaaaaatcccacaaatgcacccgacaaagaagaaaatatagcataccaaatctggatatccatgaggtagatcaacaccactggtaaccagagcataaacaccgcaaaacgattgctttggccaaataactcatgccaagtgtactggattccattcatcgtgtatatctcttttgtggggtttacaagtggcctgatttggagaaaatagctgaaggcaaacttcacggcgagcaaaagcacccaaaagatggagtacttgacattgtcaaatgttccctcacgtaggtcagggcataattgatcttccaatttgtcttctccaatttgtttcgcacccaaggcacaatgaagagcacgatggcaaggacctcagggataacaaacgctgcaactgcatcgaggaagctcctcatctgtgaatcagctgctgacgaccactgcccattgtctgtcctctggttctagaccctcttgtataggacagcgaacgcaacaacccaagcagctgcaacaacgaccttgagcaccatgcacacagcaagcattcggccatccctaaatgtgtggcggaactgtgtgccgatgtccagtagagactggaggaactggagcgcagcccaggtgatgaaaacggtgaggacgcgcacctgtgtgtcagtgtgtccttggactctaagccacgggatgagagcagatcatcccacggccacttggcgc

SEQ ID NO: 87636 - DNA, 399 bp, Zea Mays
cgggaagaggcagtgtcgtgcatctaagcggcattgttgggcaggttcttgacagcaggtttgagcttcactttaacatacatattacattgcatccctattgtgtagtgtactttgctcaattcagttcataccatctagggtttggtattcatatacatactttgttatcctagattgttgttactttatctgttcaagttctagactgagcatcatatttgaataaactagtacttacctattatagttgtcgctttgtaagtttctagtaaattggaccaatttagcctacgcgacagagtcgtgcagtgtccaccactgctgtagcgcggcagtgccaggtgtcagacgacactgtcgcttgtaattctgatagattttgaagctcaattttta

SEQ ID NO: 87637 - DNA, 483 bp, Zea Mays
attttgggtgatggtggggatgtgcggtatctgttcaccgagtttccagtcgttcgttgcaagattttaatttttcagtcgtggagtgtgttgtcaagctccaagtatctgttatcttgttctactattactcctaacctgattcctgatcacccacgaccgcgatatagtgcttatcctatatatttagtgcaaactttctcttttaatatatagattatgaccttgccataagatgttttgatgtattctcgtgcttcccaattttatattgttaaatgtatctgttttgcttacatatttacttatcgttttcccattgtacgatttattccctgcatttccctatcctccatttggtactcgattacttgttagaaggtgcaaatcaactcctcgattgttgcgagatcaatacagtttaatcattaatgatgatcttttattacacattattcagtatggatagttttcacatatttc

SEQ ID NO: 87638 - DNA, 850 bp, Zea Mays
tagcgacaactaaaaagtaactggggagtagttgacatcttcttcagatccaaatccaagatgcgatggaattgaacactcactggccgccccaccaccaccgcccacgtacggagggaacacagagtgccctccacttataaacgaagctatgaacatcgctatacgtgtatattccgaattaatcctctcggtctgcaaccttttcccttatgctcgaattgaatcttggcaagaatgacaactctgtgtctccaccaatggcatgcgaacgttctatacgtgtatatactccgttaccccgactggctggcactactctattctgtctctttaaccctgctagatgagatgtgccttttcaattagtttaccgctatactcaaccttcggtgttcttagctatacaagtgaggtataactggaaagtacatttagaaaagattgactgcacgtttggatatctgtgatgcgtatatatgtttttaatgaagtctaatgtcgtactccctccgtccacatggtttgtctctttttttagttttgtaccctaattacattcctatactatcatgacaattctagaaatataaatactcaaaataaattgctcaaaaaataatagtgagaaataaagcaagggtttagaagtctcctcacgttttttaaggacttaaagagttgacgctctccactaatcctcgtatgggtatagcttccccttgatccacacaaggaccaaacactctctatgtgctagtttttttatcgctttagtatggtaaaccgctcactaccgtgtacatgtcctgagtcacaacctcttcagatgatcattacactctgattg

SEQ ID NO: 87639 - DNA, 438 bp, Zea Mays
gaaattttcagttacttcgctaagtttcttttctaattcttgaacttcctatcaatgcagttctgcttgagcagacagcttagcttcgttggattttagcctttcgaccaaagagagaagaatcttatccttttcaagagcttcattcctcaaagttataacctccgatcgaaggtttccaattgtcattggtagctttcgtcctctgcatctttttgagcttttagagccttactaagaatcagaccctgccagacaaagaatgaacaaataataacagtaagaattaccacaaaaatagttcaccataacaaaaattaccaaatgcgaagccaaaatgtacaaaccttcaagttgttgtaggcgaggctatccgcaagctgatccttcgtcattgcagacagaccaagctcaagctttggataccccatgttatcc

SEQ ID NO: 87640 - DNA, 304 bp, Zea Mays
cacacgtgtgccacgtcggctagccgttttgattaaagttcaaaaaagtactagaatccagtctataattaaaggacaatgtttggcttattcatctcctcactctcaaattctctatcttccttcatattctagccctccactctatattttaatatggatcccatttagagtccgaacttttaaaccaccactaatttgatcaatgaccaatctctaaaactttgtgacacccctatcggtgtaggggaggccttcttcaatggtatttctctcgtacattgttgtcgggaggccaatttcc

SEQ ID NO: 87641 - DNA, 420 bp, Zea Mays
gagggctgtaacaccccaggtgttacttagggtcttcactcaagtctacacaagtcaaggccatcatcacatgtggtttaacttgagcaaagtacaccaaacatggaaatcaagatcctaagtaagtacaactcatcttagaggtcatgccttggcatatcatgcacatataatgggaagaattgcccaaaccctaatgcaaaccccctttggacaattggagcactataagtaagtatgaccaaaaggctatgaaaaccacatgatcatgacttaggccaattataaaagttgtagtacatttcataccctacaaatgatagtaagaaagtgacccaaataagatttcagaaaaaccccaaaaggttcaccaaaggaaggaacctaagagaaaaatcagaatttttctaagtccaaaac

SEQ ID NO: 87642 - DNA, 348 bp, Zea Mays
atataagggagttcacggatttgtacctgacagtacctgacattacgctttgtggtagtggtgttgctcgctgtgcacgcgctccaacttcctcagtatctcctctaccttgacactacgtcgcttcaagcgtcttcgactcctctgctctcgttccccttccctcgcaaactctagactgcggtatgtctccagcaacacatgtgactatggactatagttcataacaacagtcagtagtcattaccctcgtcctcgaatagcgaaggagactcggtccacaatcagtttggcgaggcccacggctaagcgatcaccctggagcgtgagcatgaggctgatgttgac

SEQ ID NO: 87643 - DNA, 507 bp, Zea Mays
ggagacttcatctcaggcatgtccgatcaattcataactccaatgctaatgatgaaagggccagcaatgttcagcatagccatcacagttctcagttctcgagcatgcaacagacttctttcagaccgccagctctgagaggcagaggaggaaggagtttcagtggaggaaggttcgaaaatcaacccagaaagtgatactgcctttcttgtggcgaggacaagggccacacaataaggacatgccaggtcacaattcaaaagcaaaaggaaattgctgaagtcgaggtgcggcagagtcagccgaagcaggtcctccacactactttgtgttgttctccatacatcccagaatacgtaggaaatcaacaacctacggcttctgttgctttagcaagccattcccgagcttcctagcctcagttgccaccaccaccgctggtccacaatcagcagccagaaggccgcaatcatactcagcaacagcgcgaccttcgggaggagtttg

SEQ ID NO: 87644 - DNA, 460 bp, Zea Mays
attttgtatcttaaatttacaatcgtacgttcggctcaatagaatgaattagagcgaaggtgcagtaagaagagattgcaagaatgagtcgtttagccctacaaaaggtactttatgcagggcactgttcacctgtttatagggtatcgtactatggcgaaaccgcctagattattctagtttaagtgccttagtatcacctcaagggcaatgacccacacttaagacagaataaactgtcaattcctcggatctagtcctattgaagccacttaccaagtatcgggtaccatttgctcacacgaaggtgaggcacagagaaatacaataaagcataataccacaaattgaaataagtacttagagttattacatcatcatcggagtttgaaaatagtaaacattgttcttgttgttgcggaatttagctaacaataaataaagagtgaggtgaagcctg

SEQ ID NO: 87645 - DNA, 376 bp, Zea Mays
agtctgtctaatcttgcgtcgatccattctgccagcggttcctcccctagcccacaaagggatggccttgcaaaataatgagcccaaagtctttcgcgaggccttctaaccttctagtggacccagggatatctgtcccccacaagcccccaaactttgagtcgattttgaaacaatcggcccaaagattttaggtccagcttgcagttttgattttagatcgtggatgctttgaaagtgcacctgtcaagttgttgcttctgaactctgatcaatccggtaaaaacaaacttctgttatcctgcttcagctctttcaacggtcttcactttctatttcagaaattagtgctcggttaccagcttatgctttagag

SEQ ID NO: 87646 - DNA, 1001 bp, Zea Mays
gagacgacgacgacgacaacaacaataacgaacgaacaatctagctagctagcactctagcagtagcaccttgcatctgctgccacgcaagcaagctcgaaacgacatggatcaagccggagagcaggcatggcaagcacaagcacaagctaagcccaacgggagcgggaaaggagggtggtccagctcacagcctcacacacacacacggatgacgacaaggagaaggggatctccaaatctcactctgtgagtagtctgactgtcacttgacatgactgtccagaccattcattcattcattcatggactgttaagctgtcgagatcacaaaaagtcgaccagggaggaccacgaacgaggagtccgatcgatcgactgactgactgattgagctgccgcatgcccagcaggccggcccaggcccagctgccaggcctggattagattggacacgacacacgatcgacaaaagtgcgtgggggccggggatggatggacatggaccccgacctatatgcatatatgcttgctggatgctagctgaatagcatagtacaaatgctcatggattggatccacaggttcacagatctactactggtaggtatcatctatactacgtacgcatgcagaggccgggctgggctgggctgtttgtatccggctgattggttgctcggttggccacatccagaaccgccagatgcattgaccgtcgatgagcacttgattggtaaactgcatgtcacggttcgaatttgtatacgcgggtgcagctcaggattaggtcaccgtgcattcggctgcatcagcgggaaagtgagatgcgcgcgttcgaaccgatgcaggccctcgtgagccaggaggctaggctgccgccaaccaatcacgcgatatgtgttgtgtgcagctgcagctgtttgttgctcgtcgatctccagtcagagaacacaaacaggtacggtacggcgtaaagaaagaggatgcagagaaacggc

SEQ ID NO: 87647 - DNA, 360 bp, Zea Mays
attctctaaaaaaccaacacgaattttattttaggacggaaggaacatatcaaagcagattttttacctctatgacagtttttataggaatagattatttttctaatctggcggagatgatattaagactttcaaagcgtttgaggaggtaccacaactcagaagctggattggatcatccgatccaggttcatccacacggccaaacccgattgcttccatccatgcagaacttgggaagccattgttccatgcgactatgcctttggcggtttggcctctgcctcagctggtcagtccagccctcaggacaactgagcagagaggccgatggcgtggagcccggccagcggccaggcc

SEQ ID NO: 87648 - DNA, 346 bp, Zea Mays
attgacttgtctacccttccatagaaaagctttcctcaacttgtcgatagccttgatgaaccattttggtaccttcatgttaatgagcgcatagataggaatggaagacataacaaaccggacccaagtagttctccctgccatgttcataagggctgctttccagcctggcagcttatttccaatcttctctatccatggcagaagcgctgatctgggaagctttctgttggagataggcagtctcaaatacgtacatggaaaatcagctttaatacaagatagagccaactctgcaacctctgcctgctcgcgatcacattgaataggaatgacacaacttttc

SEQ ID NO: 87649 - DNA, 401 bp, Zea Mays
attcatgattatatcgagagtatatttattaatgtgacgagtagtttagaaaatgctagtgcgtggaggatgaattattaatacatgagtgtcggagttcatatattagtggttacgctacgattgtcgaagtgtctcgagtgcacgccacaatttggttgtatgcgaggcagggttatgcacacgatgagttttggtaaaaatccatcggtgtcactggtgttaagttgaggtttaattacgcatggaaagtaataatgagtttaatacttagaactcttagtcgatagtaaaaattgttttggtttatatagacaggtggtgacatgcccaagtagttgccgctttctctatatttataagtctagtcgagacgatgtgtattgtgcgtttaataaatt

SEQ ID NO: 87650 - DNA, 489 bp, Zea Mays
gattggaacctaagttgcataactcattttgtggtagaattgataagacttagtcaaaaccttagttgcacataagaacacttggctatctgcatagcttttgattaaggaaaaaatagagaccatagactaaagcgaaaatagattttctaattcacctctctatcagacgtcattattcctttcagttggtatgagagccaatggctcaagtgaaacatttggcctaatcattattgagtccacaattttataagaggacatatggatacctctaggctataggtcacctcacttcaacgacactaagggagtgtttgacctcactccaaagcaaagctccaaggaagaggtgaccaaagccagccaaacatcctaactctagatttgctaaccccatagaggtttgcgagttgcagtataatttttttagagtacctccattgttgcttcgaaatctttaaaaaagcaacctagacatgaagtttt

SEQ ID NO: 87651 - DNA, 1568 bp, Zea Mays
ggagtgtcgaatgtcacaagcaagtagacatggccgagggtgttttcccgctcggtaaggatgatgccaaagaaaggagtgtctgactcctatagcttggcgacaaagatcctgagtgcatcaacagttcgggggaaggtaacattgatactgctccccccgtccatcagcaccttcttaactcggttgtctttgattattgagttagcaagtagggggtacttaccgggtgaccaaagctaagccattggtagacctgactaaaggcgatcggtgtctttgaccacctgaagggtgccgatggtccggttgtggccaccagcacttgccggtacgttaaattttattgcctcttgttcttctaggacccatggcccctaaagatgaagttgacctccttatcaacttgagggaaggtccctcctctgcccccagctatcgaagctgttgaccctaggcctgtcgagtcgacgaaggaggaagcgactggaatggtcggtcatgaccgactgaattcttgaagtcactgtagttacatagggtgtggcgcatctccttgtggtagggacacaagccatcaaggatttcatccaacatccacaggttgccatggggagtgcctcgcgcccgcgtcggcggtggcccgtggcacagacttcatcaccaggcctcttgtcccaacgcttgtcctgcagtggattctcatccttcttttggggtgcgggtcaagatggctcaataaggtcatgggctttctcgacggtggttatgtacatgtcggctttccggaagagctgttcggctgtcgtgggggcctcctcacagatggcccgcacgaagacctcatcacgagatccccagtagaagtcctcgatcaccaccaagtcagagatgtcggggatatgattcctcatggtttggaaattcttgaggaatgagcggagggacccatcgttcttgcttttgacggacttgaggtcccatggttgtgcaggcttgtatgagagtgattgaaagttagagatgagcttatcgtaaaagtcagcccagcggtcaatgcagtggtgggggagatggcgaagccattgaagtatatcctgtcctagcatgattgggaaatacactatcataacatcctctgtggcccatgtgtcttaggctgatgttgagtaaacaaccagctagcccctagggttgtgtttggactcgtacttgtcgacattggagaccttaaagttgggaggccactggactggtcgtagtcagggggagaaggcgaacaccctaaacacgacctgagctgttggtcgggctcctagagcaccatcgcaatgttagtcatgtggcggcgatggttgtcacagaccctgaagccgttcgcatgcaagccagcgtgcaaacaagtgtatcgctgagtctgcggttgatacaggctggtccttgaccccccgccacggggagccatggttttggttcgagtcttcacaacgcctcatcttttcttcgtgttgtcgggcacgtgaagagtcgatgtcactccacgtgtcgcatcggtcgttgagacaatg

SEQ ID NO: 87652 - DNA, 1162 bp, Zea Mays
cttcccggctaggttagaaataaaccttcgtaaataatttaccttgccgagaaacttctgcacttcaaccttacaggtcggaggtcccacattccgaatagacttgattcggtcatggtctatctctataccatgttcatgaatgataaatcctaaaaacttaccagccgacactccaaaagcacatttacgtgggttcattttcaaaccataccgacgcattttatcaaaggctttgcgcaaattagctacatgagaactaaactcagtcgatttgactacaatatcatcaatgtagacttccatagtgtttcccaacagctcgtgaaagatcaaattcatagccctctgataagtagcaccaacattttttagaccaaatgtcatgacaacccactcaaataaaccaatgaagcctggacatataaaggtcgttttagacgcatcttctccggccatgaaaatctgattatatccagcattaccatcaagaaagctaataattctattccctgatgcactattgattaatttgtcggctatgggcatgggatattcatctttaggagttgctctatttaagttgcgaaaatcaatacatactctaagcttacctgatccttctccatcggcacaatgttggagacccactctgcgtatctgcaaggtctaataaaattggcttctagcagccggtgaatttcgtccttgattcgtgggagaaggtctggacgaaatgttctagctttctgtttgaaaggtctgaaaccggacttattgggcagccgatgctctacgatgtcacggcttaatcccggtatctcagtgtaatttcaagcaaaacaatccgaatattctctcaatagaccgatcatttcatttctaggatcggtctccagggtcttgttcacaaaagtcggccttggagttttaccatctcctatgtcgatctcctccaaaggattagccaacgtaaacccctgtcctaatttatcgagatctctgaattcctctatcatgtctcccacagaggaattagatgatctttgtgtgatggcggactctccggtctcggggaccagatcatccatggtactgactttatgcggtggtagatgttcggtcttaaagacgaactgttttgtgaaagtccaagctgtcc

SEQ ID NO: 87653 - DNA, 1242 bp, Zea Mays
ctttttccaggaccaccactacctcctccagcgctgccgccaccaccatgttgatgccaacaatagttgaccccaccaaagctggtagaagaacgaggcgacggggtcctagagataggagtggagggcttggtgcgctgagatggcccaccaggaccgaagctatagagccatcacgatgatagaaggaagctatagagagctcttcaaggatgaggtcgttccgggccgtctaggaggggtatataatggaccacatgatccaagtctttaggttgtcgtagcactcattaaggccgcaaagaaggttgagtacgagggtacagttggagatcggctcgtcgaggtctcggagagcacctaacataccctttatctggcaacagtacttggtgacggagaggtcgcctagacgaagatctagtagccatcgtcgaggtggagaacacgagcttcacggatgccgaggaattgctccgcgatggcaacctaggcctagcgagcaccgctggggtggacctaaagaggcttgagtgagggcacaacccccaactcatttacctgatacaaatagtagagctcagattttcaccataaggtcccctactcaacctaactcggatgcccccactaacattttggtgctcatctttgcaagtatgctcgtactcccaatttgtcttgggtccacccctactgtaccgccacagtcgcgaacgatgtcctatagctcgaaagtgatagtgtcgaggttccatacaggaccacactgtccatacgacactaggaaggcactgttaggaatccatcagtgaggacgtggttttcaagggcatagcgctgcaaggtgaggaggacaaggtcgcgccagcgagcgtagttggaggacgctgggtcaaggtcaaccatgactagcaaccagatgttctggatactagccacctgagcatgaaagttggcgatgacaaaggtttcgtaagtgacgggggcctcgacatcgtcggagtcgaagggcgggtagtcgacagcgacccccaagctaacgctcagtctccgcgagctggcaggcaagagcatccatagaggtggcccgctcatgctcccgcgtggtggcaacggtggacttggtcacgacaagagcagcgataagggtagaatggacaatagacacctcaccatgagaagcgcaacagacaaagacacacagaaggggaggccagtcaggcccacagcgaccatgca

SEQ ID NO: 87654 - DNA, 633 bp, Zea Mays
tcaactagtggcccgatccagggacggtcgaggcaacacatcactgactcccctccccaggaccgacacaatgaacgccgacaagaagacacatgtggagtctccgcgcttactccgcgtctccatgccatccagtggccccctaacttcaaagtctccaacgtgcctaagcaggacccagggggctggttggccatctacacgactaccgcttgggccgccggggcaacagaagacgtgatgacagcatatttgcccatcgtccttaggcaagatgcactgcagtggctacgacatctgccacgacactgcatcgactattggagtgacttcagtcagtgtttcattgccaacttctagtccctctctgacaagccggcgcagccatgggacctcaaatccatcaggtgccaaggcgatgaaacacttcggtcatacctcaagaggtttcagaccatgagaaatcgcatcctcgaagtcaccgaggcagcagagattgaagatttctatcggggatccaatgactcggccttcgtccgagccatactgcagaaagcgccaaccacctctaaataactgtttcgagaggcagacctctacatcaccactgacgagcgggcccaggacctcatc

SEQ ID NO: 87655 - DNA, 420 bp, Zea Mays
aagttgatgacctcgccggtcttgagagctcgatgaatcagatgggtggcgcgaaggaggtgggagttgaagggcactcatcaccgcaggctggctacgatgaagaccctgcggcggcgtctgctccggcaggttgaagagatgctctagggattttaggatttggttgtaactttttgtgatactgaaaagtcggttgttgtgcaggttccgacgtccgggcctgcgtaaccaagccctaatgatgttgatactaatgacgttttgatggctgtgaatgtaacgtctcttagtggaaatgtgtctaaggggtctgaacttgggttgtggtcttcggatgaagaggaattttggaatcctttctcgtgggttgaggaatcttctgaggaggacttagattactttgctgcattggatttg

SEQ ID NO: 87656 - DNA, 1579 bp, Zea Mays
ctcgcgcgcgacgcttgtaacccctactacgagcacacccctggtgcgagataatacaagccgcattcccccttgtgttccatcttgcgccaacttatctaggcaggggcacgcagcgataaattcactggtcggctcggttgagggacccccgggtccgatacgccgacaacgctctctgactagcgggtcatagggactgaggatcatttcatcgacagggatatatgggtgtaagaaaatgaacgggaatgagaaaattaagcggaaactcataatttaatacaaacggacataatattgatggctaactaatgattgacttgtgaggcaacaacatgaaacaaatagatacaaagggacaacaatccattgttatttgttcgcttgtggtgtacatatagctatgatgggtgttgtttgagcctttaggccaccaaagaatatgaagttttagctaatgcactgatgcatattgggttgacccagtatttctctaatacgaaatacataagggttcaatttggataaaaacgggccgaaaaaaatggatgcgatagactcactcccgtcttatttccggattttttccgcaaattcgaaagcggactagaaaatggtatgggtcaggacatgagttttcaaccctagtggagtagaatggtgcgatggctaggacacatcttgacatgataggaggcgcttcgggtaggagacgtaccgattaggatgaatagatgaacgtggcatagcgcgtatgaaggatttgagaggaagaagaaaggggggacgagcgacatacgtacagcagccacagccgaaaaaggcattcttttggtctgctccccacaaataaagaggagccagagagagaagaggccggtgtgtggggtgcggctatatatcttcttctttacagctccaaagtcctaatgccgtgtggtttagcgaaggcgctgacgggagatggagacggatggggctcctgcgcgagtgcgcgacaggtaggtagcaagctttcctcacgagaaacggaatccctccctcctggcacgccgcctggacccggttagcggaatcgctcgtgtagccgcagcagcagttgtcgattggagtcattggacaatggctagctataaaaaggctaacacatcatcacatagtaaccctcccaaagctgactgcaaaagatggcatcctccatctatggcaattaaacaaacacgtagcagcagcttttatatactatactcctagtagtatatctatctctatctacgaaaacgtaccagcagcgaccactgctccgctccgagtccgagcacgtaaatttcacgcgaaaaaggcgaaaccgcctactttccctcaagagtcaagatctactactagttgccactacctcactccctccatgtgcctacgaggctacgaggcaccggcgcgtcaccggatcgccttcgggtttccttgcatatcaaactgattagtgattaccctgaccccagtggcaccgctgcaaccaaccgcgccgccagcggacccgtccttttgcatgtactactactagtactgtactctg

SEQ ID NO: 87657 - DNA, 586 bp, Zea Mays
cgtggccacccttccctatgatggtcgtgctgccttatccgatgatcgatatagtcctgttcctagcagttttgcgccctctcctgacacctactgacctccacacaatctcgtggctacgcccccttctggcttagtgtaaatccaacatagtctcctagtgggaccatgagtgtggatggagttagatgaagctactatttttgtttcatcatgtattaaatcttggtgagagtatattttaagggattttctaggtgatgtcattttattttatctagtttgataaaaaagaaactcaacatagccaagtggtatcaaaagtaacaaatgttttcaaatagattttaaatcaaaatttaaagtaaatttaaccatcaatatgactttgtataaatccaacatagtctcgtggctacgcccccttctggcttagtgtaaatccaacatagtctcctagtgggaccacaatatgattgctttgtttcctaaataggaagacacaaagcgagcgatcacacgaatggaacacaattggtgttgtcgctagaccatggaccggtgtggactaaagagtgaagatgac

SEQ ID NO: 87658 - DNA, 405 bp, Zea Mays
atccaagtgaggccccaactcctttcataggatctaggtgcaaggtccgttggtgaccgtcctaatacacccaagtttcgactcatatagttgttggccctgttcgatcgggttcgatggatcattgcctctctctgtgataaaccatgagtccgacgttccctaggactcgaacttgatttagaagtgcccttggcgctcgtgcactagggtactggctcctacggtgcctacttaataatcgcccctttctctagggttttgggagcgatcacgaacccttcacgggctgaccttcgaactccaaatttttacgggatagtatgggccgcctcgtggtcatatgtcgatgagggttcactgatctttctcggcaggctagagatattatcaactattgaaaac

SEQ ID NO: 87659 - DNA, 367 bp, Zea Mays
gtcgggcttcggttccttctggacaaattgctggtcgaagttctaaaaaccttcgaaatttaccttcatcaacttactctcgaagctatcatcaaagtggggatctttatatgggccatgaggagccagagactggaaccagatgcaagatgcttttgcaacattcatgagttgtcttatgagacgaaggctaccggaaaggagcaatatcacaacaactttggttgttatagtttcgtggctcagtccgaggcgaactacccagttctcacatttcagaagaggtgaccaggctcctggatgcaggaatggttttacctgaagaatgacctaagttaaagggatgatgtgagagggattattcaac

SEQ ID NO: 87660 - DNA, 275 bp, Zea Mays
cggcggagtcgctccagctacagctcacgtcgtggccctgttccgaccgcccttcacagatgggtcgcgatgctctccagcatatttcactctagcggccaagtacctatatcagctcatgagacggacgctactgccccggatgggttatagggaggctaccactcacatccagctctggctacttggtgccctgatctcctattcagagttcgatgtggttgatttccttatatgtgagatcgaggacacggtattggatggtcttcgtgccc

SEQ ID NO: 87661 - DNA, 580 bp, Zea Mays
ttgcgggggatttttgcttgtatattacatggctccgcctcattaaaaacctcaccccctgggaggaaaagagtgcgggcctgaaataataatgttgagttacaagggcgtgattgccctgagggttcaaacaaaaaatttgcgaagattgtctacattccatgaatgctccaggtcttcgccagattgagttgttagtctgtatgcgctgggagacgacttcgttttgacgatatatggtccttcacactttggctccagcttaccctgtgactatgtctgggttgtgcggatgagtacgaggtccccttcgttgaattctcttgggacgactgtgtggtcgcgccaggctttcatttgggcttgatatttgttgagggcctgcagggcgaagacgcggtctccgtcgatgaggtctttggaggttggctcgtctacgtcgggtgctgctgaagcgcttgtccgcggggacccgtgtttgatttcctgcggggtcatggcctccgatccgtatagcacgcgaaagggagtaaatccggtcgcccgacactcggtcgtgttcagtgcccagactgcttcg

SEQ ID NO: 87662 - DNA, 773 bp, Zea Mays
taatttgttatttttaatgtggcctatgaatatgtgatttcgattgtgttttgaatatgaagcgggctaatgggccggcccggtactaacgtgttgtcgggtaatcgggtcgcgacgccacgtgtatgaactggccatgccgtggttgggcctagacctaggcacatcgagcggctcgacccagcacaattaagtaaacagacttaacgtgctcgtgcctgtcgtgcggggtccaaaccgagctcgggttgggtcgggtcgtgccgtctgtttgaccatctatatctacgtgtgctagaccctacaaatcaaacggagttaatgcaaaagaaagagaaaggagaaaggtgaaaagaaagaggaaattttggctctgagacactggacagaagtggaattgatcagtcaacacagttaaaaacaaagttcatgcatgaaaatgagttcattttcaaacttgaggcctacacttcgctgacccgttatccaaaagaacacacaggtcactgttgtaccatcgttttagtggcatgcatttgaaaacaaaaactcgtcatcgcgtcacggcctaagggcatgtacagcggcatttaattagccgtctctaagagctaacattaaagagaataatcctacatggacagcaattagagaagagagagtgcagtcgtcgtttcatgaggcgacggctttgtcccgtgctccaagaaccaagcgacggacgaagcaaccgttgtagagcgagtcggcagcaacagcggattagctacgca

SEQ ID NO: 87663 - DNA, 426 bp, Zea Mays
ggactcctgacgtaagcctctaacatggggcctatcaacattaagtgcagacgcgatgcatgcttgcccgtgtcagtggcaggtggcatgcactcgcattaaatgcacatggcatgccgagtccgcaacacatgggttacactgttaccggcgcgttaccaatgcatgaccattgactcgatgcgtcgcttgggcgcccctcattatgactcctactgttccccttgcgttaccgaggtggggtggaacatgtggagaggactcgacgacaccgtccctacacccctatgcatggcaatgccgcaacctacgccaaggcctacgcctgtgttctgattagacggtgcaagagagcaagatgctaggagcctgcacgacgaccaagaggatatactcgcccagacgatctagcaccatcaactctac

SEQ ID NO: 87664 - DNA, 387 bp, Zea Mays
gtcgtcctcttgtttcccaggaaggtaaccatgcatgtttgcatgagacacggggttgctccctaccaattacacttatcaataaacattaaccgttggattgatgctgggctgaaagaagaaacttcactgccagcgtcatcattaacaactagttgtttcaagtatatactatctatctatgcatggtgatgggtcagagagcaaggaggggcgtgcaggtcagcttgcatctggtatgtctcgtattcttaatcagacgaagtcgcataattgataattcgtccaacacaaagtcagaaacattgccctccgacaaagtcgtcctgcacgcctatatggcgcggcattgacatttttttatgaggacttgaatttggatgatct

SEQ ID NO: 87665 - DNA, 626 bp, Zea Mays
taatgatgcacgcccgggaataacggacactgcccccacgccgtctattgtgttcaaacaactctggatgggacgtgcatacttcagagcatggtctcaccctcgggagggaactccacctcgcccaaagtcggtctcaacctcggagaaaactccacctcccatgaactcggtttcggcaaactgccccggcaacaactcctgaatctcgcaggaggccactccgacaactataataacccctccttgtatgactacatgccccgagctccgtctcatccgagtctgacctcggcctagataacatcgaccaaaggacgtcaccaactcctccgcgaaggctgccggcaatgggatggctacaggaccgacgtcaagtctactttacgccatacgggacgaattatcatgcgcttttcaccatacttaccactgtttcaaccactacgactcagacaacacctccattagacaggcacgggtacgcgtctgagccccagatcctggtctcgactctctatttggtcaagacgcaaatacagggaccggacgtccacctcctggttcaagtcaacagcaaatacgaaggtcataccgacgatcataccggctacagggactcagac

SEQ ID NO: 87666 - DNA, 374 bp, Zea Mays
ccctagggtttgcagattaggctaccgtcatggaacctgccgcggagctatgtgcctagaacctgtccgcgtccgttgctgcagcccgtgacacaatgaatgcttctgctaccgcttgtatagttgctggtgattactgcgccacattttccttaggtaacgatgtggtttctacgcttgatgttcttgaatccgctgtggcggcggaaaaaagtgctatgcgttcttatcaacaggcgagtgcagccgtcgtttgtgctaaggagacattggccaaatactgtgaggtttgtattctcaaacttttactgagccaggcaacgcttgagatatgtttggcatgtgatttgttgcagccctgtgatggaattgta

SEQ ID NO: 87667 - DNA, 575 bp, Zea Mays
cgggtcttctggtctcaccgtccttgtgtgtgcgtcaatgtccatcttctcatgttctatccgacctcctcctattataggccaaggtgggggtcgactaccggcaggttccctaggaaggagctacagtgtcgtggtaaaatggggcgttctatcttggtaaagctgcgtttgtccgtatgtgcctcagtcgtctaggcttacctagtcgcactctttatggagggcgatgtgggtggcgaagagctccagcatcatcattaccatctctgtggcacgccgaccctaccttcgtagtctgggtctcggcgtggctcgtcgtgttgtgggtcctataggtggaaaatgcacttaggcctaggctagataggtcatgagtgggtcgtaggcctaggggaccgtaggtcatgagtggaaggtggactgactctccctctgcagctcggtgccaggtgtagttaatgtggccggctacttacagcgggccagtcttgggtcaggcgtggaatccactcgagtggcttcctcttgatccacttgacccccctttcggttccacctcgcccaaccccgga

SEQ ID NO: 87668 - DNA, 597 bp, Zea Mays
acactaggacgaccgccgtgttaccctactcaccgtgtgtcgtgagcttcgcaccgcaccagacggtaatactccctccccgcgtctcgcttttcgcctggcatcgagtagaagggcattaattggattttggggtattgggggccgagtttcggtgagctccgatgatccgccgccgtgtccgtcgcaggcgcctccatggggtgcgatgaagccaatgcgtgaatccggaaccattgatccctacggtgacgatcctaattagaagcgggataacgtttcaggatattaattcgcaaccttcgcaaaccgatccgacggctcgggtgagagtaatacgtggctagatcttaagcgtgtattttggattcaacgggtacgatagcgtaccggttcgctagagtagtaatctaatctacacggttgaaccgagatcagacggccgagatcaaaccatacctcttcgcctcggcgtatttactaaagagaccctgagaaataaggaaatcaacccgcggtactacgactgtgtagtctgagtctgggttattttgcgccagaacccctgtgctctctggaaaatgaggcccagtccag

SEQ ID NO: 87669 - DNA, 666 bp, Zea Mays
atgatggagagaggtgtgcaattcactcgtattccaacaattgtcaccggctaaatatgggccaccatgataggccaagagggtcgagcgaggcctagcgctaggccttggctagtcgtggcctcagcttgggcgtcgccaaggccctaggggcgcatgcgatgtggggtgacgattgatgccccactggtctcctcccacttgggagaatttggaatatatggaaacttgagataattctggattagtttggaataaataaaatagagattggtttagaaaataagattgagtttgtttaggaattaggattggtttgcatggaaatgagtccatatctataaggacaccttggaaatcaagtcctatatggaatataaatataaggactccatggaaatcaagtccatatctataaggactccttgtacaaggtgcaggagcactttgtcaatgttgactcctgcttgagcaacatgtcatggaccaacgaggatgtcgacgtcgctgatatggccaaggaaaagctagagcgcgaggctaccaccacaaagctcgaggcagagactaagcatgccatggagactgttagacgtgccttcctcaggaaaaggcaacgagatcaacatcctcgggcatccctaagatcatggaagaatctcgaag

SEQ ID NO: 87670 - DNA, 676 bp, Zea Mays
aatacgtctgggtattcgcacactactttgatattttccaagggcttttcttccaagtgattgatcactgttttccctttttcatctgttgacttgtctatgttaacttggattctttcaccttgaggacttgtcaacataattgttccattggcacactgtatcactccatcacaacttttcaaccagttgcatccaagaatcacatcaatactgttggatcctaggaccactgggtcgactgaaaaatctattccttgaatcttgatattaacatgggggcatgagtgtgtggccttcatgtcacctcccggtgaactaatgtgtaatatcttcttaagaggataattaggtatattgtgtttttccacaaatgactcagttataaacgaatgcgatgctccagagtcaaataaaactgatgcaggtatggagttaacaaggaacataccatacactatgtcgacatcctcaggcactgactttgcggtgacgtgattgacccttcctctgctctggttctgcggagtcttgttctgagcagatccacgagcgggggtgttctggtcattcctttgagtatttctcctttggggtgtctgttggttgcgtcttgggcagttgttggcatagtggcctagctcaccgcacttgaaacatccattgggttggacag

SEQ ID NO: 87671 - DNA, 424 bp, Zea Mays
agtgtttgggttcattcatatctctcactctctatttcacttctaccactttctatttcactcctctcgatctccttttacgccaccaaaccactcttgccacgccttccttacgctttgacattgagatgattgaagatgaggtactcgatgtgttgcataaaactatgatggatgcagcagtgaagcttgccttcggatcttcaacgagagggagaaggactacatcaaccacgatcatgaatcctctcacaatcggctaatgcgagactaatttaaagacttatgtgtctacccttcgctcttctttcatcataggtactctatgtggaggagtctctttcttcaaatcttgaagaggttcggtaagtattcctcctatttcactcttagaattgatgcactcaaccacaactgtttctcc

SEQ ID NO: 87672 - DNA, 712 bp, Zea Mays
aaagaagcggatattgtaaagccatgaaagctgggtgtaaagcagatattcgtttaagttctctgctctgtgtttcaataattatgtcacgcttaaatgtgtcaagagagaagtcaccaacaactaacattgcgagttcttccaccgatggtaaattatactgtacagaatcaccttctttggctccaattagtctgatgatgagttcttcgtttttattattagctagacgttctcttgccattctgaattttttaactaatggattgtgaagatcaagcatttttattagatcattcactatagtcggatctaaatccatatgtgattcttcactgcctttgatacattgtattctgttttgcacctcatttgcagtatcatagatatatagctgtataaacttcggaggagaaccatctggaggtaacagagacccaatacgatgatgaacttgaccacatattttgaatagcggcgggccacacccatcatttactgatttatcaatttgagcacccattgatgtgaaagcaaatagacaattgtattgtctaatgctcttaatgaatttctttgatatatgatcgccgtcaaattttgcaagagtagctagaggttcgggtcttggtttgtacggaggaatactaattttgccacctttgcagcaattgttataaacaatagatccatcacgctgttttgatctaat

SEQ ID NO: 87673 - DNA, 745 bp, Zea Mays
atcttttctcttcggcattccccatccaccttatgtcaaaaaagttttgctggccaaatactcttgtaccaagtcccgagtgcttatgtgcttggctacaactttgaattctacttcagctaactggcagggggagccgagttgcatattgcacaatggccttgtcatgccgaagcttaacttcaagagactcatcaccatgctcatgagcttctcccttttcttctcgtgagcctttacataaaaccactcgctggtccagccagtaggccacttggtacgatacccaatcataggagccttcgtgtctttttggtacacaaagttgtagcatccgaagttttcatgcagaccatctgctcttgccttagtctggtagcagagttcatggactctacagaatccttagacgttgacactttttccttgactctgcaaagcccagatgtacacgttgatctgactatgacatttggagtcagctaatgatgataaatttcaaactttttcaaaacttcgctaataatctcgtataaagggagccaatgccctgcccgaaagaagcttttgaaaactattacttcatcatcctttggctctggaatcacttcatctccaacaaatcttatctgttcatcgtcatttttccaaaatacccaagcttcttcattagaactaagtattctgctttcacagtggatttcccaaattcaacatgactgggcttgcttggactcaagatgcc

SEQ ID NO: 87674 - DNA, 498 bp, Zea Mays
catcccctttggataaataaatgtctagttgatcgattagaggtcttatatgagcgttatcgcagcccaataattattggaggcgagtagcgttcatgagtcagtcctcgctaaaattgaagaacaatccgataacatgcacatgagtgttttaggtccttcagtagcaaatgcaagtcttatggagtttatgccatgtgttaatgtctctatgttagagcccctaaaatgtactattttaggtgacttgggtgttaactaatttaagttgatcaatggttaagaaacactgattaatctgctccaacccatgtttttgagttgcgatgtctaaaatggttcgctaagtcttatgcggtgattagccaactcatgttaagtaggagtcaattgcgtaagtgattgtgatatatatgttgtgtctcggattgcgataataataggcaagccgaaatgtaggttaattagcgggctatgtcgttgctctagttagccgaa

SEQ ID NO: 87675 - DNA, 476 bp, Zea Mays
ttcatagtctgggtattcaaaatttaacgcgtccattactcgatttagccttcattttggccgggtgccgaaggcagcagtcattaactggtcttccttcttggtgtagttgccaaggatttcgttgcacatagtttcaatcatttctaaccactcttggcatggcttcttgaattcttgcactagatccctagtgctgacttcggccgctaccactatgaactctactttggctacttggcatggggagccaagttgcatatggcacaagggccttgtcattcagaagctcaatttcagtggactcatgaccatagtcatcagcttctccctccttttctcgtctgccttcatgtaaaaccattcacttttccagctagtcggccacttagtacggaagctaagaaccggagccttcgtatcctttcgatatgcaaaattgtagcaaccaaaattctcgtgaaggccatctgctc

SEQ ID NO: 87676 - DNA, 415 bp, Zea Mays
atcaggcctgccaatatctggtttaccgggagaaaacttaaatagttttaaacctggtgattaatattgcgatgctaataggtcttgcaaagttttggtccatttgtttcaagtttcaactttgaagaatggtaagtcgttcaatacaagcataccatacaagtgatatataataattaatctacctagccgctgaatgtttcatacatgggcacttaaaaagcgaaagtatgggagcttaaaaatgctataccgcaaagcattagatacagagcgcatgacattctggagaccccaaatggtagtagaatatgattgatgtgaaaagttattctggagatcctaaatggtatattgccagtttgaaaaaaaaatctacaaatgatatcagagcgaaaagtttttgtagtttgat

SEQ ID NO: 87677 - DNA, 966 bp, Zea Mays
ggaaaaagaaaggtggaatcagacatggtggggtgaatgaaggatgctccgagggtaaggctgagatgccgccggtgacaaagaggaggaaagtggaagcaagagcaaaggggccgtcgagggcacctaggatgacggaggtgtccgacgggtttgctaaggagctggacgagacacacgctgagctgggagaggtcatatcttcgcccgctttgcggaaagcatttgctcggatgctgaaagtgatggggtgagtggtgtagggatgatcgcattcttatggctttcggcgaggacgattctacgtcttttcaggcttggtatctctgagtttttccttatgggaggaatgttggcgttgttgtaacagttgtgatagacagggaccgtcgggagtcttaaaagaagcggaaggctccgctgcagctggagaaccgatgtccagagatgtgaggactgcggctgcctctgtggtgatgcctccgcccgtggctttggttactgtggctatggggatgcccctgcctggcagggctagacaggatacgatgccgatgggtactgaggtgggcgtagctggcggagtggtcccttatgtttctatcggggactacctgctcgagggcgtcaatgaattcgacgcccacaccggtttggcggccagtgataagtgcttgtgcatgtctgcgtgctcattttgagtttccttgtgtttactaatgaggtttttgggagcaggttcgaggtctggcgatctggttatggcctaggcgaagcctgtggttggggcggtcaccgatccatgggtgcaattctgcgttaatgttgatagaggtggggtggtcgccaaagcgtctacctctcgcagcgtcatggtggctattgagaagcagctgcgctatgtgagttttatcagatgcaattctgtttggggcaaattactgctttttttgatcaagtggtgtc

SEQ ID NO: 87678 - DNA, 583 bp, Zea Mays
cttttggagggggacactagacatgtcgagaagggtgtgaagtgtgttcctaagatggttaggttttggacatcacacttatttctaaggaggggctctcacaggctcctaaccactccatttttcacaggaggggtggataaaggtttctctgagagttttaggccactacactcaccaaccttaccaagagacactcccatgattagctataaagcctaaccctagtccaccaattcctctgttgaactaactgatcatcatgcccaactggggctcactacacgacacccagctcaagattgatcgaaggtatgtgttttcttcctcaatctgactcttgtcgtgtctgcaagattcaagagcagactgcaaaccctcacaaagtgcacactatgcatgtgcagatgcactcgatgagctagccttctcaagcaaggctatcctagcgtttctctccgctagcttagtctgcaagccaggataagtctgacacgcacccaacaagctagacctagactgaagctcatcatgctcatctagcagggtagcgtacttggtctctaaagtggtgatgttcgac

SEQ ID NO: 87679 - DNA, 505 bp, Zea Mays
ggcgatgaccggcgccgggactaagactaaaccaaatccatgaccaggggagcatttcccccaacataattgcactaaggatcaaggagtgtgctttggccacggtggccgtgaacatcatggcaacgccgtcgtgttcctagcgattggcgggctcctagttcaattcagtggctcggcaagcatcgtagacttaagggaaagcttgaacgagggagagaaggagatgaactgaccggagtaaggctggccgcggtgaggtagagtttcgggtggcggagaatggatttgggggaaatcttaaattcgagctctcggaggcacggttgctaacgattgctggtggctggatagaggatgactttgcggagctagcgggggcttcaatttatagagctctacggcggtgactgtgaatttggacgttgatgtgcggcggtcagaagtgaggaatgctggtgcagtgaacacgtgttcaccggcgtggcagtaactccggtggtcg

SEQ ID NO: 87680 - DNA, 379 bp, Zea Mays
ctcgcccatcgtgggcgccgcccttctccccaatcctcatcctcgtactaccgccgccaagagcagcacaagcacccgtcgcatcaccgtcttcaatgaattcctccgtctactcgcctaccccgacttcacttgatagcccgccagacgcatctcgatgcttctgctccctggttcttagggcctgtggatgagactgtgtccctgccgtccaaaaatcagctggccctcatgctcatagcgttcatggatccaggaaaaggagacgccggtgatacttcaaccaccagagagcgtcggatggggaccaccatcgtacgggtccgctgggaccgctgctagcctactagggcagcaacgaattgacaggtatgattgc

SEQ ID NO: 87681 - DNA, 412 bp, Zea Mays
cggatatcttcttgatccattcctaggcgtaattcaacaatagataactgagatttattgccaattccctttaaccatagccatggtcggtgttaccacactctcatgttctgatttaaatatgctatgtaagttgtcccatttatgtgcttctgttagatctatttacaaggatgaattaacttccgtctttaggacgatccaacttagctaatattgtcatttatcgcccagatcacaagttagagtttactcatctttcaccttgaccttgccgaatgaggggggggcaaagttatggtggcatgccacaaccatgtgtgtgagtacaaacaaattctatacataatctgaggttatgttgggctaattattagctgtatctaataaacaagttaatttttagccagtt

SEQ ID NO: 87682 - DNA, 1131 bp, Zea Mays
caagagtcaatcataattcatgagaatgttaatgggtctttaggataaaagtatgttggcatgtgtctatatatttaaagtcgtgcagacagcgaggaaatcacaatagatgagttatatctaggccttttcttctcgtcgcgtacatggtgctagcacaccagtgtcatggtatttgattgacatatgtgtagataacatatggagctgatgttgttattgctacggtattgatcgacaacaaatatgaggagtatggataaacatgtcgctattgccggtatgcaaggacgtacgactactttcactatattgttatgctctttttttcactgtgatgcgtaacaattcatgattctctactcctgcggcaaggacgtacgatcactttcactgtgttgttaagctcttttttatgtggtgcataacaattcatgactatctacatgtatgttaacttgattgagtatggtagctagtgtgtaatatgctcgctttcttacactttctttgcacttgttgcacggcccctcgccaacttcaactagctcgcttattccttgcgacaaatcacttccaatccaagtaaaccaatcgctcacggatcattagctttcagctagatctactagatgccaacactactgaactcctctatgcactagcactatgattagtgtggtggtgtctggtgtcaaggtgaggagagggagagagctccttttgcaggatgtgccccaccttcgcatctgttctcgctcgctagtagttcgtcctccgtgacactgtggcaccgaagatgatgcatacagtacatggcaacacttctctataccctgttcctttttagtgcacatgcccactcacacactcacactagctgattatgctatgaagaaaagaagcctacctggggcgagccattgcccgatctgactgacccaaatgatgatcggatcagacggcaaccggatcgacacttttccagcaagaaaatgaagagccgtgcagacagcgaggaaatcgcggcagctggcctactgcagccgcagtcctctcctccccatcagtcagtctagctgcgatgcgattgatgaacaaaaagtgtgatcgcggcaaacttgccgtgcg

SEQ ID NO: 87683 - DNA, 332 bp, Zea Mays
ctttgatcagtataaaacttagtgcctcataaagcatttagtagttgcatttgcatgaggacttgaccgcgcttcagatttagagagttaaaatattttctaaagtgtgtttaaaaaagctaagttttggggttggcgggccgttcggcctaggaggcaggaccgtccgcgatccatccagaggggtctgaagttgcacatgtctctgtgtacttatgcggactgtccggccaaagtcggtggaccgtccgcaagtgccaaaatggatttgggcagggactgtgtgtttttgggcatttgaactacggaccgtccaaggcattggcccggac

SEQ ID NO: 87684 - DNA, 711 bp, Zea Mays
ttctaacatttatttatgcattaaaaactaatttctgatattaattcctgattctcaatactactggattgggcctcaaatactaggaagcgcaggggctctggcgcaagaaaccagagacacagtaaatagcgcccccaggacggcgggttggtttcctgaaaactgaggggcctaaatgcaaaacgcgcgcagcgaaggggtatcgggtgttatgagccattggattagaacccaagggctaggattagatctcccataaaatgaatcggtatgcaactagggccattggatctaacttcaacagtctggattttatttgaccgagatcggcacgaatccatccgatctcacgtcaacggctgggattcaaacatgaaggggggtagctaccaattaatcagagccatccgtttacgatcctatggccaacgttcctttccctgcttttccccctcccagcttggccagacggcggcgccgcccaccaaatcacggggccatcgccggagtagtgcccgcactaatcccgccgccctccagcaattcacttgcgctacactgacataagaccatgggaaacacgatggaggtgaagaataccgggaatcgggcgcgcagacgggttgttctcgcgttggggcggcttagcggtgttgaagacactccgacgagcaattgccggagtcatggtgccctcctgctcccccg

SEQ ID NO: 87685 - DNA, 611 bp, Zea Mays
cctaccctcaccaataccatctacatcgagtgggccatggtgatgagggtacggctccaggttcgccacatgtgggaagcagttcggtatggcgatgtcgactatcacgaggatcgacgggcgctggatgccctcattgctgcagtctcgcccgagatgcaattttcgctttcctagaagcggactgctaaggaggcctgggacaccatcgctgcgacccgcatcggcagcgactgtgctcgcaagactacactgcaggcatttcgcaaggagtgggagaacctggccttcaatccaggtgaggatgttgatgactttgctctccgcctcaacactctgttgaagaagatggtgcagttcagcgatgacacctacaatgaggagagagctgttgagaagatttttcgttgcatccccgagaagtacaagcagattgctcgctcgatcgagtctctgctagacatctccacgatgacaatcgaagaggcgataggtcatctcaaggtggtcgacggcgacgaaccacaggctccctctgggcctatcactatcggtgggaagcttcatctcactcgggagtagtgggaggcctgccagggtgacaagaagaa

SEQ ID NO: 87686 - DNA, 556 bp, Zea Mays
gttggtttggttaactgatgtacgagtctaatgtcatacgtgtgctttgcggcaagacctgattaagaaaaggatatgtccacattgaacacgaataatagcaggaaattggtgcctcctgacccattggaaagggcattggaaaggagcagtaaagaagacgagatcgagtcggtgacccaaggatgcaatagccacggtgatgatgtattactaagtgataatggtattattagacttggtgacggaaggatggaatagccacgtttgaactaacagtgataatgtattactgtaccaatttatgattattttaacggacaatgatgttacaacccgtagtgatacatcaattattgttgttaatttgtgcctaccaaccgcagtgatagatagtgtattattaccgctgacagttcatggctacaaccggtagtggtagtatatatctgtcaccgtaggtccaagataaaggttatattaaaattatatagagtataaaagatgtaaagttttaatttgaaatgttttttgtatatatgtccaaatattcaac

SEQ ID NO: 87687 - DNA, 643 bp, Zea Mays
caaaaacttgagagcaaaaattcaactaattcttttgtcctaagactcatgcattcaaaatgggaaacatgttaaaccctagaacaaccctaattaggctatttgagtagaaaggaagaaattggtaaaaagaccatgaaaaacatggaatcatagcttaggccaattataaaagttgaaatacactaattaagctacaataattgttataaaagtttggccaaaataattgattaaaatccctaaaagggccatccaagtggaagctctctagggaaaatctgaaatttagatttctaaatttcagccctcacctagaacttgagcatgttcaccttgatccctagctgaaatccttaagtcccaattgacaaaattgttctaaactaacccctctgcaacgtgtgtgaagatggcatcgagattcatgccctagacacgtcaaatctgggatttcctctcggagttcagcagtgagacaaaccaaacttcatcactccatatctttggatcctatcagcaaaacccataagcctccacacacaaatgacaaaggaatgtcgggggaagagatctctcaacgggatcatggccataatcacgaagatttggagccaatccgcgcttgaacttgacctctctc

SEQ ID NO: 87688 - DNA, 355 bp, Zea Mays
ctttgttgtctgggagacagtataggaaatcatcttcgtccgtgccattgaacactaaggcccccttcggatattttagttcccaggcatagtgtttggcctctaaaatttcttcttcggacaatcttttccccaaagcatgtcgaataatatagtcaatatcttcggacggtgctttgggagcaagagattcagctttttccgtcacatcccgctccgctgccatgccggcattgggagattcttgctcagccttatcctcaattgcggcaggctttgtctcagtaggcactaaaggcccagcttcggcttcagcctgggccgtagcagcttcggcaactttcttcgcgggggc

SEQ ID NO: 87689 - DNA, 402 bp, Zea Mays
ggcttgggtgtgtcatgtcgagacaaacaaatggtgcagtttttatgtgttgtgattactttgcagtataaccgggtgagtcatcaatggagtaactaacaatctgaatggcctgactgttacttgaagctgcaaattgatgatcatcgatgtgacaattacttgtaattgctagattgatgaccatcaatgtgattgttacctataattgttgatttatgatcatcaaagcacattagatggcgtccagatttagtgaatcgagctcctcctgtgcctataagggacagacacgtcttctgctcagagcaccaagtcaccaccacaaataacctgcttagaagacctccctcctatcccctctatgttttgctgctggctttgcttatgcatctctatttt

SEQ ID NO: 87690 - DNA, 282 bp, Zea Mays
atttaaactccttgcccttctccaacaatgaggtcataggcttagcaatcttggagaacccttcaatgaatcgccggtaatagcctatgagtcccaggaaaccccgaacatcgagactgtacttggtatcttccaaccaactatcgatgttactttagccgaatccgcagaaattcctcctttggagatgatatgcccgaggaaatgtacttcatcaagccagaactcacacttggtaaatttggcatagagctgattatctcgtagcttctatagcaccat

SEQ ID NO: 87691 - DNA, 608 bp, Zea Mays
ggggggggttcttgtcgttggatgtgggatggatgcctcagatttaatatgtgtatatgagtatggtacctgtttgagcaccagatacgttgccttagtgaaaaacacttcttccttttgtattgataaacgaagccaaaaaatggcttccctagctttggcttgtgtttttttgcaaaaaaaccttcccaccgtatgcatggaaatcacgatccccgatcttgcaaacctcgtttcctatcatcacacataaatcctttacgacctcctcataaaggtgccccggtgaccggtgagacgaccgcacctagttatgtcgtccttgacgactcccattggatgttgttgttgctgatgctgttgtgagtaatggttcaagtgaatagcaggaggcaaccaagaacatgtgccctagcaacggcgccatggcaatcatccatctcataggtggttgaagcaaaacatgggctgctgcctgccactgcaactacgagaagcatcacatttttccgtccccctgtcacgctcacacaagaggaatgggcaacaactagcttgaaggtacacctccatttgtagtatatgttgacacaaatatcctattagac

SEQ ID NO: 87692 - DNA, 547 bp, Zea Mays
gtggaatctaaaatagggctagaaatataccagatgtaattctcaaacacaaaggggaggaaggatccgacaagaacgtggctatagagggagcgataatgtggtagacaaagtaacatgtgggggatctacgagagggaggcaacgcctcaccttgacaaactgcagatgtgcctcctttgttcgccagctctaggcacaccgaagaagcccgacggtgcggctatggaggtggaggggatggggattcctagcgaagtagaaggggagggggtggggatgacactatggccagcgccagcgtggtggttcaccctcggattcggccgaggcgggcacagttgttgcgtcgtggagggggaggggagattagggatcccgacgaatcacgactcaaggagtaaaggctagctatctactaactttcagatccaaggaccagggaggagaatggctcgtacctgttgagagcgtcaagtcagcatgtcatcgtcgtgatcgtcgtagcgcggccgatgccctcttcgccatggatagcgccgccccg

SEQ ID NO: 87693 - DNA, 347 bp, Zea Mays
cctatgcaaaatttgaactacctagctgtgcaactaaagaattgctaggtgtattgatgtatctactgccaaagagttatgaatccaaggttctagtcctatcaactagcctatcaactaaactagaaaggtaaaccacacaactaagatacaaaatataaatacaaaagctaaagactgtgcaaactctaatttgaggatgccagtacttttaatggggtatcaagaagcatgcaaccttctccctagtccttgttggagccccttgtaaggataccctcacaagggctaaccctcgagccttccccatgcgcaagcggtaattgagatggcctctcctagacatc

SEQ ID NO: 87694 - DNA, 387 bp, Zea Mays
gagaaagatacttctttaggcctgatatggtgaaagaggccgaagaaaaggttcagaaaataattcataatatgaagaaagcccaagctcgtcaaaagggttatgcagacaaacggcgaatgcccttgtattttcttgaaggagactatgtctacatgaaggtttcaccaatgaagggagtatcgcgtttcggggttaaagggaagcttgcgcccaggtacattggcccattacctgtacttaagcaatgtggaccagtggcatatcaactgcagctccccgaaactttgtctgctatacataatgtgttccatgtgtcacaattgaagaagtgtcttcgggttcccgatcaaaccattaaagtaacagatgttgtccttgaaccgg

SEQ ID NO: 87695 - DNA, 332 bp, Zea Mays
atttaagcatgggttggctggcccccttcttgtaaagctggccctcaatgagtgcgaagtcccggctttggtgcttgaggcgcttggcctcgttgatgtcgcttggatggtaatatccctgcaggaacagggtgattggtgctcgccaatcttcggtcatgatgaggttgactatgcggtggccttcggtgtcgttggttatttgtaggccctctgggctgcggacggctggcgtgccgatgacatggtagaacacgtcggagggcaaggcctcgcctctggcggctgctttggccaatgcgtcggcctcctcgttcttggctcggtccacg

SEQ ID NO: 87696 - DNA, 1107 bp, Zea Mays
ccaatacaacattatggactaactagattgcaaagtgaatcaatgcaggactatgagatcaaaatacagaagaaagataagatatatagcctaaacttagtgaaaaaatggatcctaagtgaaactgtgtcttcaactatttcaacacttagataagtttcaaatgaccctaaggacacaatgaatatggttggaacccttaataaagttagaattagaatttagggttctaggggtaaagtctcaggcaaatagagcaatatgagttggagaaatcaaaatcatggagaactatgacttagaaggtttgactggactaagaacaactttttataattcctagaagtgctcaaaacacaagtgtaacaaagatcaagaagttatgttcaaattagactaagtatacagctctacgtagcaccagaccaattatgcagagagaacttttctgaggacttcgggcagctagctcatcggaccagtcttgcgtgcatcaaatggtgcaccgcagaatggatgaattcaagcaagtagcagctggcacatcggacctgctagacttcaatagctacatttctagactcaacggttgggctgacatggcactgggtctggtgggccaccggactagtaatgtgcaacctgacaagttagaacagtcattgacaggatagtttgacaggggtcgggtgcaccaccggactggtactattggaggtctgtgctcccacagacagagtagtttttagcatttaagtccaactgctatatggtttcttgggggctataaatacaccccatctagcccattccatacacaagaactgagcaataactcctataagttagagcaacactcctaaagtaatcaagcctcccaagtgctacaaaagagataattgagcaagtgatagtcatttgagatagtgtcttgtgtgagtgcaaatagaggatagtgtgtgctactttcttgtgctcttgagtctttggagttttgactccattgattgtagagttagcaagagcctccaaatttgtggagagccttgtggagacttcggtctctccgattaagaaaagagagatggctcaaacttgatctttgga

SEQ ID NO: 87697 - DNA, 643 bp, Zea Mays
tcccagtatgccatcgatcaggtcaacactgatttgaagaagaaaaaatgtttatgagaggcctcaatgaccggctgcagcggaaaatggccacctgtatcgatctcacttacagcagggctatcagcacgacactagcagtcgaagccaaatatgcaggcccaggaaaatccaagggctatggaggtgacaggcccaaccaggggcctgggaagagataaaggttggtgatccgaccttttaatcataatcgttcttcaccacattcaccctcctaccctttcaaacaacctatctttatccgtcctgccactacccccacctcaacaaatcagctgagtgcccctagtactcatttccctgccatcccaagctcctcaacaggctgctttaattgtggaaagttcggacattttatcaaggactgcacgtatcccaagcagaacagatcaaataaacagcagagttctaggagttccactcaaggcaagggaaacccgacgaataatacggcgggcaaaaatatgaagaaaactgggcagatttattctatgcaagtggccacgacaccggaaggacaaccggtcatgatgggtacgtttctcatggccaatcatcctgcagttatcttttttattctggc

SEQ ID NO: 87698 - DNA, 451 bp, Zea Mays
cccatcaatctcccccccggcgtatgctttcaaagacagaacatattcgtgtcgttgataattcctagacacccggggaataaaatgggcatgtacatggagcctttgattgatgaattggtccgtgcttgggataaaggggtatggacgtacgaccgagctacgaagacaaacttcaaaatgcatgtttggtaccagtactccatgcatgacttaccagcgtatgggctattctgcgcctggtgtgttcacggtaagttcccatgcctagtttgcaaggaagctcttaggttcatttggttgaagaagggtggcaaatattcgtcgttcgataaacatcgacaatttctccctcctgacaatgcattccgactagacatcaagaactttacgaaaggtgtcgtagtgacagaccgcccacctgcaatgatgactggtgccgaagttcgtc

SEQ ID NO: 87699 - DNA, 766 bp, Zea Mays
aaatatagtctatgtgaggtgctctaattatttcaagtgtatgcacaagagaaggggttctaagggtagggttaagggagaaaagtaaaataaggggggggatttggaggttagggtttcaaaccttagatgggattttgggatgttacaaacctaccccacttaaaggaatctcggccttgagatttagactggatttgagaaaagataaggttattccctcctcaaggagtcatcactctcccaggtagcttcctcttctccttctcttctccactgaacttttcagagcttcacctctgaggtgcgggtctttctgactgtggaatcaagaatctccactggcttctcatggtactgaaggtctttctgaatctgcattgtctcttcttcgaggtgactttctggtgcttgcaggcatttgcggagctgggatacgtgaaacacattgtggatgtcggacatggattctggtgattccagacggtatgctgcgggtcctaccctgccaataatgggatagggacctacgaaacgcggggctagcttcccttttacttggaacctcctgacaccacgcattggagaaaccttgaggtagacgaagtctccttcctcaaatcggagttccctccgcctgttgtctgcataactcttctgccgactctgagcttcaagtaaccttctgcggatcagtgcaactttctcttccgcctctttgacaaaggcaggtccttctagtgctttttcccctatgttggaccac

SEQ ID NO: 87700 - DNA, 546 bp, Zea Mays
cgacatactccaattacactcactttgctctgccatatggaatggctacctggtcccaaatatacgtgtatgtaggtcgacgatgaggaggaacaccatggaaccacgggtgaggagggaacacatgtggacgacccacgagtatctgaaaccacatctagagttggaggaggtacacacaaccaccgatagaggacgaggatgaggtccaccgacacgcctcacaaagctggcagtatagaaaagacagcaccacggagtcctaactaaactaatatgttgtgtcccagtcgatgaggcaaggaatgtgcatccacgacgtgtagtccccagttgtgtctaggaataggacgcatgcaaacaagtggaggatccatgctcaacagtaggactgaactgtgtcctcgtcagcatattgtggacacactccgaaggactgtctcaaccaactaatacggaccccgacagtacggtctgcaccaccctcgttaaggatagctgggaggtccctaccaaggaaagcctcaactctagccctccaatcac

SEQ ID NO: 87701 - DNA, 588 bp, Zea Mays
tcggagtcccgtccgagctaacagttgacaacgacaaatagttcgacagctagaacttccgggaattctgcagttccatcggcaccaagccagtcttcgcctccgtttaacacccacaatccaacgacgtcgtcgaacgtgccaacggcaagattttcagtgccattaagaaaaggctccttgacgacaaaaagggcaaatgggcagaccaattacccaaagtcatatgggtgctgaatacaatagaatgtcgagcaaccgggttcacacctttctgcctgatgtatggatctgaagcaatgacaccgcaagatttaaagcacgggccccccgaacaaaccaatcagccgtccttgacgtcaacgaaccaacctccaaagatctcattgacggtgaccgtgtcctcgccctgcaggccctaaacaagtatcaggtccagactaaggcatggcgtgacaataatgtcgtcccaagagaattcaatgaaggggacctagtactcgtgaggaccaccaggacagagtcccggggcaagctagagccaaagtgggaagggtcgtacatagtcaagacaaaggcatccccaag

SEQ ID NO: 87702 - DNA, 509 bp, Zea Mays
gcgcggtatcacataagttcggatgtagctctataactactaaatactgtaatgtcaactaaagaagctacaaccgtagtcagaaaaatccagccgaacagcttatttattgcctacatccgctcgtacattttttttttggccattggaaggggaaaaaacgaaatgacgctgggggttctagacgacaagagcgctgtaccctggaagcttcgttcttctgttgccgttgcagcacgagcggcatcccgatgtgacttgtccggattgaccctccctcccacgtttccaccagcatgcatgcgccatgcggccacgcgctgctgtgtgcctgtgtgccaatgatgagtgagtgggtgtgggtcccatcccggcagagagctttcgttaggtcgacgtcaagtcaaatggcaccatgcttgctatttgcatctgtacaatggaaggggcatggaaactgcggcaagatccatcttgtcgtgtttgcacacatgccctgaccgatcgtg

SEQ ID NO: 87703 - DNA, 610 bp, Zea Mays
cttagaaccacaaggatcaccacacacttaggtgtatctttctatctttacaagtgaatgagaattagaagaggaggaagaaagcacaatcaagaaaaccaaaccaaaagaacaataagaaaacacaatgtcacactctcttgagtctctccaaagcactaacactaatgacatgtaaacacaattacggcacttggagaggactttcatgcttttagtgtggatggagtgaaatcttgctctttgcaatgaatgtggaagttgtaatgcttgggtgccattgaagggggtggttagggttgtacttatgtccaccaaccacctcctaactattgcttcaattctaccaaacacggatgatccacgctcctggtccgaacggtccgcccctgcaagatcaatggctcgatcgcaacgttcagttataatggctatatcacggttataatcgcattaaatgagtctgcatggacgatataattcattttaccgaacccgacactgttgggtttgtctgatttacaacgggcggatggcccacgcatgaggccggacggttcgtgtatggtgtcaaatggtacttgtctttctttcggacagtctgcagtag

SEQ ID NO: 87704 - DNA, 795 bp, Zea Mays
gtctaaggttgggctgtcagtcatcattggagactgaattttgaccaacagtgaaatcagatgaactttgcgatcgaatcgcggggatttagtggatgtttgcacaagatccttgtaataaagttgtagttggtacattggacaacaactttgatacaggcagggtgagtgagttgccacacaaaaattgaagaacaaggccctgcaagttgcttggacagagggactgacgaagatagccatggtacagtgaccagaaagatctctggtgtcgtgaggctgacgtcggtcatcttccaccgcaattcgcactcgcctaggagatttgtgctgcgggagtgatagataacaccgggtcaaggtgaaaatatccggggaggggtgaacccactcactggacggaccgaccatcgtgtcccgccgcggtcagtcacgttggcatcaccggagctcaccatttctccaaccgtgacacgcaacgatctctactccgtgtcataagggtcgtggcaagcgaccggttatcatccctggagtaattccctcccgcacgccacggtgagtcgaccaccgtaaaatatcctagccgcggtaaccttgatctcaatccaaaattcgtgataagcttggccggagtctataaattggaagcaccccctgttccgcctactcgttacgaactcattgaaccactcctcgcccccgatcgtccatcgtagcgccctaatttggaatttcccccaaatccattcttcgtgccgccgtgagcaccccctccgtcgacccactatcctg

SEQ ID NO: 87705 - DNA, 386 bp, Zea Mays
cttcaagctattataagcaaggttgtctgcaagttcatccttcgacatcgcagataagccaagctctagcttcgggaatcccatattctttgccatttcccgacaaacagatatctccttgttgtctggtaggcaatatagaaagtcatcttcgtcagcgccgctgtataccaaggatcctgggggatacttcagatccttggcatattgcctagcttcgccaatttgctcatctattagttttttccctgcaacgtgatgcgctataaattctaattcctcagaagatgcatcaagagcagggaattcagatccttcggtagccttctcgttttctaacggtaacggtactttcccgacatctgaaggtctcgattcagttttct

SEQ ID NO: 87706 - DNA, 307 bp, Zea Mays
ggccaaaggaaagctttgacgaagagcttattgatcttcccatgtagcgagatcaggcgggaggccagaccattccaccaggacctgctgaaccagctagttgcccttggataatccttgagtctggagtactcggacaggaacgcggagctccggcaaggatggtggaagcgaggaagaagccacccctttgaaacctgcagcaagttttagttgtgatacatgcactacagggtgtatacgacagttatcaggaagttgcaagcggtaggctacagctcccacacgatcagtgaccagatatggt

SEQ ID NO: 87707 - DNA, 300 bp, Zea Mays
gagtataacttcagatggtatatatggaatattgctcccaagatcttgtatcctatctaagttcttaaaacctgaccccttttggacgcctctccgcgcttcatgggttattttcctatcgcgagccgatgcgcgttagattccttgctccggcctcgcgcgtcatcgacgcacaccgcgtctgattctcttctctgcctcacgtggtgggacccaacgacatgagcgaactgcttacggcttctcgttttttgcactctttctcacgcggccaccgctatctccattctcctcctttcg

SEQ ID NO: 87708 - DNA, 591 bp, Zea Mays
gtttgctgcaacaaagcataacatgggaagattattgagcaacaaaaaaatgctaagttatctgcttcagaaagaaaatatcattaaatagtttagtgaatcagcctaaattgttcacagcctgagagggttgaatgaccggaagaattttacactgcagggttcttcatgcatcgaaagattcagtaagcagtatgcaatgcaaatagatatatcgtggcaatcatgtcttcaagatattttacaaagacgtggatatggcctacctatgaacatttggttctattgcaatgctacagactcagggttaatcgaggaaccttgaaaaaaacatttagctgacataatagtcatctagatgagaaaaggatgacatttgataaggatgcatcaggctgaaaattccgaactaactttataggtaagcaattcaaactctagcaaccttattcaacattatcaagtttcaaagctttcacaataataatttcctggaaaaaggtaaacaacctaatcaaccagaacagaaaaggcatagtttaccatgttgcaaagtagtgtacttttaagatcaatatcaacgacacaaat

SEQ ID NO: 87709 - DNA, 921 bp, Zea Mays
accttgtaacacttaatatttttacctcagctagtgcgatgagctcactcaaccttgatgtgtcgtcctcctcttccccatgtaatcctgcctctacgagagcgataagctcactcaatctagatgtgtcgtcgtcctcctccatcagctccaccgtcgccatttttcctaaacatatcttgcatgtgcctcatctgccatatagtttacgccacatccaatctctgcaaatataatgagaaaaataagttagcaaagtcaggataaataaattgtactaacaaaattatagtatcatttttctcactcacttcccttgagacgatcagcaagattatccaacatctgtttctcggctctagccgcctcccattcccttgcatcctgtgctctcttctcatctgccgccttcaacctcctctgctctgcacgcttcgggctgtcaaaaaaggcagattttgcgtacctacgcatgtcgcatatgcgattgttaatgtacgaatcgacgagttgagatccacaacgcatcttctgtcccattagtctcttggactctattgtgcgcatcacctctcctttgtcgtcataactttcccaactgcatttcctcgtctcctacaaaaaaatagtaagtacgggtctaacattatagtaaataccaacctcatcgtaatctaccatatgtccaaaaaaatatccaacaccaagctcgaaaggaactaatccatacttagctttaataccacatttgcagagtactggatcaaacttcaactcttccgcccactgattttttttttcttttcctttacctctacctctggccaatgggacaaaggaccatacaaccactctctgaaacgacacttacgccacccgtatggctgcaggagaataaattagtaatttattgtaaaaaat

SEQ ID NO: 87710 - DNA, 370 bp, Zea Mays
cggaatcttagagtctcagtacactcactcggagtcggaggcgagtcgccgaacaacctaagctctggtgctcgttctccggctaatcctatcctccccgtctctacatcgacctcacaggcgacgactaaactgatgctctggatctgaccggcctaggtaatcagtcgtaaccctaaccctaactgaggtgagatgtctggatctggctcttcatggacgatatgcgcctgatctgctcttctctgggtatttatttcttggaacatgctcgctgttatttgattattgcatctggtacctcctgtcattgcttaatgtgattgtgcctaatctgctcttctctgtgatgaactcatgaccttgctat

SEQ ID NO: 87711 - DNA, 396 bp, Zea Mays
caccgacttaagctgattgctccgttagtagggtatagtagattagtggtcaccataagtcgagtaagcatgctgatttcaagtccaataaaatcgaagtcagctgaaagtcaagagtctgaatgcctttgaaaacaaaagctttattgatgatgaggtcccccgattacagagtacaatgtttcttcgagaattttttaggcctcgctagggatagaactttctgatatgctctatgttccatgggttccccacttctgtgccatccatttgagtaagccggtatgatcctagccgagtgacctctgatacaatgaatggaccttcccatagtggtgacaacttgtgacatccttcccccgttagaattcggtgaaggaccaagtctcccactgc

SEQ ID NO: 87712 - DNA, 1417 bp, Zea Mays
aaggcgaagaggccaacacgcgtgaagcctaccgaaccctgaagatggattatgataagaagctaaagaagctcgcccccataaagaaaatccaaaagaagaccaagagccaaggatgctagaatgagcggaagaagaaagcccctccagctccacctatctccaggatagagaatctgtccaacgtcgaggatatgtccctagctagccttgatgaccttctcaaggaatttggggacaccttagaaaaggagtttggaagtaccttagaaagcgctcgcgtgtagtgtgacttgtggtaactgtatgcttgtaatgaactggtgtaatgaataaaataacttggttgaaaaaatttttggcatatgcatagtagtaactctctctcccctggcagatggctttggataaaaccacgcctaccgcctctgggattggagcagggtttcccctaggagctgaaggaggagccggtggagaagggagtgagacccacctccacgcacctccggagctgccattagatttagcccaagttctagccaatcaaacccaactcattgaggacctcactagaagtctggagaatcaacgcccgaatggtggaagaccacaagacaggatgggagattttctgagactcaagcctcccacattcgctagatccagcaatcccctcgatgctgatgactggctgcacacgataaaaaggaatttagaagccatcggatgcctagagaatcagcgtgttcaattggctgctcatcaacttttcgggatggccctagcatggtgggataccttcagcactgccgtcagagatgctacctggacagagtttgaaactgctttccgagagcaccatgtgccccaagggaacgttcagcttaaggaagatgaatttcaggaactaactcaaggtggaagatctgttagtgagtacgtgcacaaattgacagagttggctcgctacgcgcctgatgacatcagcacagaggccaagaaaatggcccactttttgaaagggctcagaccagaactcaagaccatcctagccagccaagatttcctcagcttctcgcacaactcaaacaaagccatacaagtggaaagggcaagggaagaagaaaaaggtcacctcaagaggaaattccaagtccttcgagctcagcagcaagaccggcaccagaaagctcgttcctttgggtttccacccaagggaccaagcttcaatagaccagctggacccactctgtcatgtttcagtcagcagagtcagagctccttccaggctccctcggttgcaagcaaccaaccgccagcaaatgcctgttggcactgtggagaccccagtcacttcaagaacaattgtccccagttgaaggcatcaggacctgcttactccaactcggtgaat

SEQ ID NO: 87713 - DNA, 463 bp, Zea Mays
caatggcaaagccgaagcctttgaggaagttttgaatggtcgtggagatgtctgcgccttctcatgtgccaggggaattgcggctatcttggagaaggcaagatgcgaacacgtgaagattctagcccaagccaaagttgctttctctattgatgatacgaaggatccctcggccgaagcaagcttagttggcggaaaattctttactgacatttgggaaaatggcggccgagggatagcccatgagataataaaaaagagcgaaaaagatactcacgatacaagagaagcagcgaaggcagctgagaaagctgcggaactcaaaagacggataggtattggctaattgtttttaactttatgttttatttttgtgacttcaaacttatttacgttttgcatcgcagctgaactgtctcctcctccagagccctttgagtcaatgtccgacccagaagcagag

SEQ ID NO: 87714 - DNA, 759 bp, Zea Mays
gtaataccctacgtcctatgagtttatgtggatgtattgctcggtgttcttggttacagagagttctcaagcgagaagatgactagaggtgtctacgcctgcccgtgtggactgatatttgtaggggatcctcctccgccttattcctgacgaaagagcagttacatgccacgcccgcagtgaacattcccagtccactcttctctaacagagtagtaccgacatgcgtggaggtcaacgagtcttcagggagctcgcacgtcctttgcatgcccttaacatggctctagaatcttcacgcccacacaaacacctgcttctggtttcaccttactgatgtcccctgaaggcccatgtctctgtcccatagggggcctctctggcggcccatagaatacatttgtgtcatggtggcgtaggggatatctatctcccacactatgtgcgcctatagaggagaagtggagctcgctacgcaatcacagacggtccgactgcctatcatggatagtccacactcccgtagagaggaccccaaggtcctacatgccacacacataccctagtgtttgtttagtgtttggcccaaaatgcgccagtagttcccttatggagtgcagaaatgtctaaccatattgcatggcgtcttagtagtttcacacttggttgaacacatccttgcaaagacatctaaagaggttatttataacatttgcattctatttgtcatattgtatctcatgactaactatgttgttg

SEQ ID NO: 87715 - DNA, 359 bp, Zea Mays
ttgggtcctagctcttcagacaagagagggcgtactcggtcgagcctggccactacatgccccttggactctaggcgggataacatctggcccttgaattgttctagctgcccagccatcttgccgaagccatggatgcagtggctcaacattagctccatgacatcaccctctcaaagtcggcaacagacatgatggattgcattttcttgaagcagtccaccgccatcctcttcgtctcctactaggcctaggagcttgaattagggcccagggccaccacactgttaccggcatggttgacagtccactcgccacacgctttaacaacttgacctcgcgtgcagagaatacaacct

SEQ ID NO: 87716 - DNA, 355 bp, Zea Mays
ctttcatctttttgcccacggccttcggcacgggtttagccgaagcggccaaggcagcagcttttctcttcttcccctgtccccgcagcgggtagtggtagtcggggtagacgaagccgatggcatcaaaaactctgtttattctcttttttccccgaccaccgaaggctgtagatagtgcattatcctctgccttagaataagctccaagcagctcatcacttgtaacttcgatgcattttagccagtcatcgtttggttcatcaaatttatccccatatctgaatgtatacttcagctggaccaattcaccttcgctagactcggtgatggtctccttcggcatttcccagct

SEQ ID NO: 87717 - DNA, 1374 bp, Zea Mays
cacgcctgagtctcctaactactactagctatttatggaggtcaaataaactaaataacctgatgcatgcacaagtccgaattatgatgtcacgtccatggggactttgggacgagaggaggcggtgggccaggcggacatctgcagtgcagcgttcagcgctgtacaggcatgtcatgactcatgagtgagaacttgatatgtactcctagctagttgttgccatttttcttgaattgtactgcctgttcgtgcacccgtgctggaaaaaggagctagcctcagatcgacccgatgtaacagacacgtgggggcgcgtttggttccctgcatcctactcgtaggcaggcaggggatccgaccctcgattcttcaagggctctggcattagcatggagcatatcgtacccaacggtcgatatcgaccccatcgattgttacagactacctgtcacaacgtattatctccttgattcacgtcattttgactaattgaagttcaataaatcatagacctaccatttagatagaggaggatgtttggattcattcataccctcaccctccaatttgcttgtctttcttttatattggagtctctcactctatttgaatatgcatcttcaccgacttgctcaacgatcaatatccacaaagttccgagatccctgccggtgtaggtcacgtctacttcgatgatctttctcctgtacatcgtgttgggaggatgtttctgaccttccccgttttctgagtctgcaacctctacttccatactggtctcctcctctctatcctccgaccatgtgtggatgctcctcctaataaaaactctaccaccgacaatcctccttccaacactaaggctcctaccacatatgctccttcttctcaacctttcaattatccatatccttctccatacgcggatgggtatccatatggtgatcctccatatggatcattggtgctcctccttcgttcgctcccccgtttggtgcacctccctcatttggtgctcgtcctgtggggatggatatcccctgggaccctgcgaccaggattcctatgtaggtcgttaaagggccttcatgggtcggacagggtaaaccacgcaggctgatcagtaagacgtggcccaagggagaagcaggaattcaaacgtgcagactcgaagcatcacaaccaacctccatgcatacaggggtataaaccccgcggaggatcacacgctgtcttatgggcggggagtcggggacagttctgtggttgtaggcttcaagatagcagcgagcttaattgtataaccctaaccctctcaagtgcataaggcagggtagggaccccccacaaaacgattagatatttgtcggc

SEQ ID NO: 87718 - DNA, 540 bp, Zea Mays
cgctgagcaagacaggcacttcgacgaagtgacgagctattataggacttacaccgacacctaattgtcgtagtcgatggcaaggatggagctaaaggagggcatgcaaggtcctcatccactctagctctagtggatgaataagaccttgtcgctatcggaagatcctctaccagtcgaggttttgtattgttcaaccatagaaagagaaggaccatgcacaaccaaggtagcttcctcatcatttggtgcgtcctccatcaaaacaggctttgtatagccctcaaccatagaatgagaaagaccgtcttcgatggtggtaagaaagatggggtcctcaaaagtactttgcggtttgcgcaaccaatgcagcttcctcatcatctgatgcatcctccaccacaacaagatcctcgacatatgtgacaacctaaagcaacgtggaggtctctgaaggcacttcaatggtctgcttggtggacatcatttggcgagaatcaacttcaaatgcccctacgaccacctcattagtggtaaggt

SEQ ID NO: 87719 - DNA, 278 bp, Zea Mays
aacaaacaatgcccaactgagaaaactgggtctgtactccctggccctgcagctgtccggtgcctccctctatgcatctctgtagtttgcatattaatagtactaactgcttgaactatggttgtgatttgccatgtgcttctgaattttggatagatttttctttagttcaaggtttgtggagatggtcattgtgctccaggatcctacaacgtgacatcacatcaactgtaaaggaggtaaccaatttttctagactgtattgggattgtttttgt

SEQ ID NO: 87720 - DNA, 737 bp, Zea Mays
tgattgaggaatgtattcctaaggaatcggtctaagggaagagtcctcattctctggggtggttcggagctaggtagacccttagcctagtcccgcatcgtaagcctacaccttccaccaccctagaatagctgacttagtatcttttggatcaagtacttagggatccaaactccattcagattcaaggggccagtttcaaaactaggctcgacaaggttaagtgcgtgattcagaggattgattacaacaaagtaaaggccctaagggaacattgctgatctttgatcctggaccagatttagggacggtccctatccttatggtagcctcaaacatccatagcgaccagagctccaggaaaagggaaaaaagagaagatggttgataaccacaattggaggcgttcacatcaggaacaacctggtaggggtccggtcccataaacctggtctgataatatacgatccacagtacggtaaggtcacttgcataaccctagtctctggagccctctatggtctagcccggtaagagccaaccttataaacctggaccttttcaggacctctacgcaatatctcgcacatccagaaaatgagtatgggttttgctcccagtccagtcccgatgaatcggatccatcatcatatctttgcctaaggtatgctttctctttctgtacccctctcgagattattagcttcaattttatcaagaaatctggattatttaac

SEQ ID NO: 87721 - DNA, 761 bp, Zea Mays
caaacttggacggaggcaacccggaacggccggtcgacatgaggaatgtccacggcggtgttctcgggtaacgacgcggcattccctaagctacggcgcggtagcgttcaattgtgcaagaccgggagcatcactagcagtaaggaatgctaaaacatgaacccaggaggcatgaactgacctgagaatcgctggccacggcgtgatgcctcacggcggcgacgacgaccgatttggggaaatcccaaattcttgggctacggtggatggattgaggtgaggagtggtgcactgggcgcgtaacaagagggtggaatatggagggcactcaatttatagaggtcggctacaggtgctatgagtttttggacgaagatgggttcacgacagtgaagggtgagtcaccgaagctcgtcaaccgtggcactcaatggggtaagggctcagggcagtaattggtcgtccaccacgacttactgtgatgtggtacgatggcgtatggcatggcacaatcgtggaaaacgacggtaatgaaggcgacggtcgcgcggccacgtcgcgggcaagtggatatgcgagaacggctgaatccactccccctctgatcttttcatcctcgtggtaacatcccttctgaatcaagcatgaatcacggcggccagcccgaatcaccgcgcccgatcaccggcagtgagatgcacttcatctctgatcttattcagacattgtacatgatgaatgctcctttgaaagcacctaac

SEQ ID NO: 87722 - DNA, 1934 bp, Zea Mays
gtgtgctggtttcgaaacttcttcctattttgtgaggcatagagaccgccctaagatgagtgatcgtaagcatgtttatactagatcgagtagacgtgagcatgttgcaccgccttaagtcactgccgactcaagctgattgctccgttagtagggtatagtggtcaccctaagttaagtaagcgtgagcatgtcgcaccgtcttaagccactgccgacttaagccgattgctccgttagtagggtatagtggtcaccctaagttaagtaaacgtgagcatgttgcaccgtcttaagtcactgccgacttaagccgattgctctgttagtagggtatagtggtcaccctaagttaagtaagcatgagcatgttgcaccgtattaagtcactgccgacttaagtcgattgctccgttagtagggtatagtggtcaccctaagttaagtaagcgtgagcatgttgcaccgtcttaagtcattgccgacctaagccgattgctccgttagtagggtatagtggtcaccctaagttaagtaagcgtgagcatgttgcaccgtcttaagttactgccgacttaagccgattgctccgttagtagggtatagtgatcaccctgagtaagcatgcaaattgataataaatagttcgagtgcctttgagaatgaaatctttttattgatgatgtattttccgattacagaatacaatgctgccccgatagcttttgaaatctagctaggggtaaaacttcctgagatgctctatattccatgaatttcctatttccgtgccatccatttgagtaagccaatatgatcctagccgagagtgacttctgctaccatgaacggcccttcccatagtggcgataatttgtgtcgtccttcccccgttagaatttggcgaaggaccaagtctcccactgcgaaggatcgatgtcgtatggccttatcatgatagcgcctcagggtttgctggtacctagctaactgaattactctattcaatcgttcttcctccaatatatcaatatcctccagtctagtagcttctgcctcagctatgttttcaaagatcagccttggtgccccaaacctgagatcagcaggtagtactgcctccaaaccatagaccatgaagaagggagtgtttccatgcaaagctcggctaggttgagttcttaagctccaaaccacatacggtaactctctgatccacttccctgcgaacttttcattcttgtcgaagaccttcttcctaagtgcttccaatatcattccattagccctttctacctgaccgttggctcttgggtgtgctactgatgcatatttgaactggatgcttctttgttcgtagaagtcaaagaattcagagctagtgaaattggatcccaagttagttataatgctatttggtattccaaacctgaatattatatcttgtatgaattccactgccttcgctgaggtcagagaagcaataggtttgcactctatccatttagtgaatttgtcaatggcaaccaacacgtgagtgtatcctccttgagctttcttgaagggtccaatcatgtccagtccccagcacgcaaatgtccatgttacgggtatggttggcaattgctgtgctggtaaatgctgctgttttgataagtattggcaagcttcacacctctggactaactcggctgcatcactctttgttgttggctagtagaaatcagacctgaagaccttcccaactagagtcctggatgctacgtgtatcctgcattgcccggcgtggatctcatctagtagttgcttcccagtggccgaaagaatgcacttcatgaggactcctgttgcgccccttctgtacagtgcttccccaatgagagtgtagtgagctgactgccttgcgatgcgttctgctgcagttttgtcatccg

SEQ ID NO: 87723 - DNA, 491 bp, Zea Mays
atctctgcgccacacatgggtggctctaatcatgactttcactattcccgctatagatacatgggatggagacatgcagaggggacaagatgacatcgtacttctactcccctatgcaagccgacgagacagtctacactgtagcctacacaagagccttcgcccacacgccaataaaacaaggcggaggcaagtctggccaaagagctcgcacgatgatcaagagaagatatctgcccaccacaggagaagaccttggtccaccagctctttctgtggctccacgccccatattattgtattcctaggcccacttgtcggggtctagatcccttgtccatgctccccttaggctataaaagggagggcacatgcattgtaaaggggaggacacacgaagacacacgagactgcactcgagcccatccaaggactcaaagagcgagacaagctcgcttgaactacctctgagacatctccatccagtcaca

SEQ ID NO: 87724 - DNA, 622 bp, Zea Mays
tgggtcctagcttaattggatgcgttagggagtatcaagggcacctaaggatactgaaacgaggaaccagagaacatgaacggacctgtagcatgctggccacggcgaggtcacttcgcgtggtgttctagaccgatttgggggaagtgagcaatttgggggctctggttaacaattgaaggcacgagttgatggattgggtgcttgactaccttgcggaaccgatggcatgctcaatttataggatcctcgagtggtgtcccgtgaatttgagatggcacggtgacggtcggagagtgaggagagcactatcgcaagagattggtggctttcaccgtggctagctcaccggcgatcaccggacatgtgtaatatgagctactacgacgtggtaagacaccaaggcacgtggcgcatggtcgatagatggctacctccggtgagttcatccgaatcggccgtgactcaggcgggcacggcggccgaagcggaacagtggcctgagttcatccacgatgcgatatttcttacccttaagagttatctgcaccccacagagcatgaattgcaacggcgatgaggatcacggcgtgggatcaccggcggcgaggggatctaaacc

SEQ ID NO: 87725 - DNA, 1030 bp, Zea Mays
tgcgggttattttctataaagcatggggactcttttgcaaactcaccagggcgaaagggtatcgagttcactaagccatccgatcacgatcagaccaccaggattagatctccaccaaacatgaaatagtacgcgatggtcgttttccgatcatggatcaacggaccaaaaccacccacgccaacactcgatcccgaccactagatccgatccaactcccacgatttaatctggccaaagggtaagttgtttctaatcgtggccgcccaactagatccaacggtcaccagcccttcttctttcttacggtggctaggacggcggcgcctcccaagaaccatggcggtccatcgctggtgaaaatcattaacggcctaggcatcctaacaactacgtcctagatggtattacacgtaatagaaacaaatacaagcagagggggaaggtccataccgcgaattacgcagtgtcgcgccctacccacaggagtgcacggatctgcggcggcgttgtcactccggtgagcaattaagccgccactaatgatgctccaagcacaacccggcaaccgcgagattccttgaaccccgaccaagctccatcgcccacgaaaccgcccgaacgtcgatcaatcctggataccatggtggcggcgggtttctcttcctcgtggttcaggacgatgatgtccacgattcaaggtggcgcgccggtgctttcggaggtcggatagacgggagagagccgacaggggtctactatttatggctagcctagcgcaaccacccgcgaatgtggagccgcgctttccgagcgacacatgctgacccgctcgccgacgcgaggaagtggacgagaacgacgctgactttgtgcgtcccacgcggaagtgatagaacaagttgcgtccaccgttattttaattaacccctctcaattataggcatgctcttgttatgatgaacatatggcacacaaaaacaaggagatcaactatatactcattgtatacaattttggggtattacag

SEQ ID NO: 87726 - DNA, 409 bp, Zea Mays
gcatgtcgcaccgccctaagtcattgccgactcaggccgattgctccgttagcagggcatagtggtcaccctaagttaagtaagcgtgagcatgtcgcaccgccctaagtcattgccgactcaggccaattgctccgttagcagggcatagtggtcaccccgggttaagtaagtgtgagcatgtcgtaccgccctaagtcattgccgactcaggctgattgctccgttagcatggcatagtgatcaccccgagttaagtaagcatgcaggttgacggtgaataattcaagtgcttttgaagtctttttattgatgatatatttcccagtttacagagtacattgtcgtcccaatagcttttgagatctagctaggggtaaaacttcctgagatgttctatgttccatga

SEQ ID NO: 87727 - DNA, 302 bp, Zea Mays
ggatcttttgagcacctctgtcatgcttgtcagttaggtcgccatgttaggctcccattcctcacctcctcttctagagcagcagacacttttgatctgatacaatgttatgcatggacatcccctgtaatcagcatttctggctataagtattatttactcattctcgatgacttctcgcattatatgtggacttttcctttacgtcagaagtccgacacttatcccaccctgtctcacttcttcgcttgggtctccactcagtttggtcgcaccatccggagcatccagtgtgacaacgg

SEQ ID NO: 87728 - DNA, 814 bp, Zea Mays
ggtgggcgcaaggacgctccggcgagtacttgcaccggctgatctacctaaggattgatgccctacttcggttgaaaccgaattcaagtcctatccagtgttttccccaaattaatttcaagattactgtcctacagctctctgcccacggtaaccgtgagccgcgaggacattcgctcgcgttcatggctacccaaggtggtttagcgcaattggacagattcacgagcaataagggacttaacagaggctagaacactaagcgattgggtatgttctaacctgaggagcactggccacggagaggcggctgttacggtgttcttgagcgaacttggggggaaatccgaaattagcgctcaccagagggggatttgggatgtaggtgggtgtggtagctgctgggatacatggcgaagccgaagggaggctcaatttatggactccgggggcggtggctcacaatttgctcacggcgagctggcggccggaggggagagagtttactggtgtgtgcgataggtggcgaacgtcgtggcaaggccttaggtaatagaaggacggtgtatggtaatcaactgtgacgtggtaagatgaccgacggcgtggcgtaacagcaaagaacggcggcacgccggtgatggccgtgcggacacgtcgccggtaagtggaggagtgaccggacggccactgtgctacaagtttatccacggtgagatcttttcagagtgagcaaaatccacgcggccgcggcaccaatcccggcaaagaggtcaccggcggtgaggttgccgcgctggcggcttgatcctta

SEQ ID NO: 87729 - DNA, 910 bp, Zea Mays
cgcgatcagttctaacgtgtgcgatctcgatccaacggctcatgctttgactctccctagatctaatcgtgaccgttgaataagatccaacggtccgagcggcttctcattcctcccgatggccagagacgagggagaagtggccagcgacggcgcgccatggccggacccctccccctcccccacacacagctacacaaactcgaatcccacgggtgctacacgatgagaaggcgaaggtgaacaccaagggaaggtcttaccaaggaattggagggcgcagagacctggcgtcgaagaagggcagcacagtgggggaagacggagcttcggcgacaattccgaacactacgatgacccccgagcccacccagatgctaatatacgatccctgagcttcggcggaccaccacgacccaacacagaggccggagcaatgctggggatccaattcaacggcggcggcggaggcttttccccgcacaaatggcggcggttttagggacgcgatttcggtagagcgagggccatgtacccgcctatttatacccggggcaatatcttcgcacggaattttcgccaggatccaacggatagagccaagatcagtcggcctcccggagattttgttgcgcttcccacggagtcgcgtggggttgtttggaggggacgattctgactgtgagggcccgcatgacagaggagagtggacgcacggctgtggtcaagagaggctgacacctggtcccagtcgtcagcgcgagtaaaacggttgaggcagaggcccacatactggtgactgcgcgcgcgtggacaactagccgagcgggcccgcccagtcagctccttgacgcgtgggtccaaggggggaatgggccgaagcaaggggatttggcccagttggttcatt

SEQ ID NO: 87730 - DNA, 671 bp, Zea Mays
aagccagaaaagtcatatgtcttaaccactagactactagtgatgataatttgtgatagaaatacgaagatcttgtagagacctgttgtatcctctctactcctgatgatttcttcgtatgagagcagtattatctgttgttgaagatggatcctaggcggataccaatattgtttcgttcttgccaagcagttatcatcatttacttcatcaaaagctagttaaatggtgattttcccagataaaatgaatttttggccttgtctattctattccaaagcttctctttttgccgaacaacgaagagatcgaaataatgctttatagaacaaattggtatataatatgaggagaaatgtttgccctgctggcagcatcacaaataattaactattgttattagttctctctcaaaagtataatacctaaaaaatattgcataaatcgataccccaatttcagagcggtatgagtaatttgggtaaaccatgggcagtgataaaaacgagctggactatacatctctgtgtataaaaatctttgcttggcagcattggcctgatgccatgcactttactaccaatataagcacacacatttttcctatgtgcctcaaagcacaatacaaccagtgaatgtccttgtgagcgctagaccctaatggtcatttc

SEQ ID NO: 87731 - DNA, 453 bp, Zea Mays
gtcatgattcatctcatcctctagtcataatcacctgttcaatttccttcctggacatataaaccaaatgtgtatatagtggttatacaagagggggtagctaaatatatatgtaagatattgtttggttcaggtaatgtatgtaacataaatgacaacggtaatgattcgcactcgagtatcggtggtaatagatttgaataagtcgaagacatcaatttatatctgattacggttagatttaaacaaacattatttaatgttactcattaaatatgtgaaccaaacggacacataatattgataacgattggacaagctaaagcgacgtggttgaacctaagggtgtgtcaaagtcagcattctgctatcatcagtggtagggagtataataaccctgctgcgtgctggtcgcgatcatggaaggcaatagactttttcttcttcttcttc

SEQ ID NO: 87732 - DNA, 307 bp, Zea Mays
cgcccttttctccccgtgggtactgttccattagggaaaggaccgcgggttagattcaggattaccccagggggttttctgcactgtcagagactcagtgcaataggaaaccgaggacctgcttgtaaggaacccaggaagaaaataccagggaccccagagcaaagtagattttccttttcatttcaaatttcaattctttaaatcagcagtaaatcagttaaatgcataacttgagaaatactcatccaaaattagtcaaaccaattttgctggattccaaacattatgaactgtcagacaaaaa

SEQ ID NO: 87733 - DNA, 715 bp, Zea Mays
caaaacttgggaagaacatatacaccatttgagacaagttcttcagattctacaaagagagcagtggtatattaagctcactaagtgctcatttgctaagcaacagatagcttatcttggacatgttattagccccaatggagtggctaccgacccaacaaaagtggtagttgtctcgtcttggccaacaccagctaactgcaaggaacttagaggattcctcggccttgcggggtattataggaagtttgttaagaattttggagtgattgctcgaccacttacagatctactgaaaaaaggggtagtgttcctttggacacagatccatgaaacaaccttccagacattgaagcagtcactggtatcagctcctgttttagctcttccgaattttgccaaaccgtttgcaattgaaactgatgcctccagtaagggtattggagctgtgttgttacaagaccatcaccccttggcatatgtgagcaaagcacttggtgtcaaaaatcagggattatccacttatgaaaaggagtatctcgccatactcatggctgttgataagtggcgacagtaccttcaacatggtgaattcttcatatattcagaccatagaagcttgtctcaccttactgaacaacgacttaccacaccgtggcagcaacgggtgttctccaagttaattgggctgcagtacaaagtggtgtacaagaag

SEQ ID NO: 87734 - DNA, 534 bp, Zea Mays
cctaagggtgcaaccggacaagcacaacaagtgcaaaatacgaagtctttactaaaagacgaatccgcgccaaagccgcctaatggtgcagccggacatacattacgagtgcgccacacgaagtctttacggcaagtcatccaagcaaaagcccacacattgtcgcggcaagcgaagtccccatctcatttcacaacaaacaatgtcatagtttacatgcacacagcagagggccatcggccacattgcacaaataaatgcctaccacattttgctgccctccctcttaatcgcgagccaggggagggcagcgtcttcgctcactaccgcgatacaagagcgagggcaacatacacgctacattggctcagccttcgggataaggcccacctcacgaaattaaacaacatcatcttcaattcctcaccctcaaaaagattttgcagatccccctccccaatacacgtcccggacgacgaggacaacaaatctcgttggccactccgatctacccgtagacgggttcgttccatc

SEQ ID NO: 87735 - DNA, 982 bp, Zea Mays
taagaggtgtatttaggagtgactctagaaaataccttcctctcctttgtcatcggacaagtgtgacgcttgttggggaagaggggtgacttattgaaggtgatagtggtgagtccctcctcctccttgttggaggagcagtccaaatcccactccttgccaatgtgtgtctcgcccttctttttctcgtagaatttcttcttttcaaccttcttccccttctcgtccttctcctgatcattatcattatctggtcagtttgctataaaatgaccagacttatcgcacttgaagtagacacatttagcatttgatttgttgtcgttgtagctcttgcaccccctttattgcggtcttcaagcgcttgataccaagcgtcatttcctcatcattgaggtcggaagcctcgacttgcttccccttgcttggaagtgactccttctcatttgttgctttgaaagcaacgactttgtagctcggtgggtgggggtgctcccattggtgacatcatcgatgtacttggtgtccttaaccattatttgatggctaccaaatttgccaagtaccttctcgggcaccatctttgtgtacctaggattctcacagatcaaggagacaagtgtaggatctaaaatagtaaatgaccttagcattaggtgcatgactttgtgattcgaccatcttgtgctcccatagttctgcacttagttcaccagggactttaacttgttgtacatctcttgtggtccttctcccttcttcatggcgaacctcccaagctcaccttcaatgagctccatcttagtgattttggtcatggtgttgccctcatttgttgtcctcagtgtgtcccatctttcttttgcattctccaagccattaactttgttatattcatccatgtataaagatactagcaagacaatattagcttgggaatttctatgaaccatctcttatgcttctgcaatattaaaatttt

SEQ ID NO: 87736 - DNA, 1453 bp, Zea Mays
atcaggtgtaggcttgtagcaacactagcttgcacatatatgtatatatgctacaaatgtataactcataaactctaaaaaaatgcaggttcacaactcagactacaaagtcattccagttctctctgttctaacaaattatggaacacataattatgcacaagaattgcttacgcaagatgatgcatttagccttccaagtacacaagattctccagcaatatcgtttggtatatattctccacgtgcaccaatcaaaaaactggagtaagcacgtcctatctaatattaactgcaactatttattggcatctgtgttatacaacctgatcatatttatcttttagcgacgcgacaaactcgcatattcccacatgctacgcgatactgaggtgactttgatacaacaacaaatttagcttcttcgtattttacggaatacataactgtgtgatattgctgctaagacagagattggaacctattctccctttatacatgttaaaaaaaagcttccatcatctgactgtttatatcagcttgatcacaggatcatgaactctgcacgtcaacatgacaaggacagactgccctcgccaccctaagtatgtccttatgcaacaagcagccctaaaaaggagtatacaaattaaaaagataatggacaatgtttttcattcatttttttatgcatacacatacaaacacaaatttgaactccaacttaaaattcatactgatattgtaaaacatgtgcaggatcaggactagccaacttcgcatactctaatctgattctatataatctggtgaccatggcagttatattatatcgtaagttgcaccgaggtatattgttctatacatcttaacaccaatatagtatacataatattcatgatagctgctcttcaacatcactcaaattcacatagaacacaaacaaacaaaaatgcaaaaactactttattctcccttgtaaatatcatacaacaacaccatttacagtattgattaaacattataaacacaattgatgtttccttgtcttcacaggcttgcaaaggtcgtccacgttgctagaacgagtttgcttttgtgtatagaggaccaaactgataaaggccatccaatttcgtatatgtttctaccacccatatcagtaagctctatcttatgtttaatggagactatgtgtcttatcgtgtaagtttgctctacaactaaactgtaacggtgatagtcatcatggtagactcatcttaggtttgtactgtgatgtatactataatatttatctgcttcacaaccaatattgtcactttaaacaggtatttaccatgctaatatccaacacattaatgttctatgaacaattcaatgtactatttaccacgcgcgcctatgggcgcgcccaatacactagtgtattacagatggaaacagattctct

SEQ ID NO: 87737 - DNA, 388 bp, Zea Mays
cccctgaggtgggcctggggggccactgtcggtaccctaaatcaagggtaccctcttctacagtatgaagacgctgtacacgtacgacgtctccaggtcacgctgagaacagcacccgaccccaccacatgggcaggtctaagggcaccacgtggcaaggaaagataatacatcctaggatgcatcattgggtccggacctccacagagggacaccagacccctgtacgtacaagtccggatctcccaagaaggcatgcctggtccctcgggtgggccccaggtccctccgagtaaggtccgagccttggcaaggtcccgggacggggaggaccccggcatgagtaagggttcggtgctggcacgtgtccaggccttgccctacgctc

SEQ ID NO: 87738 - DNA, 556 bp, Zea Mays
catacaacttcgcactcttcacaattgtaattcctttatgaatttccattagcttagtccaaatctcatgagcggttgtgagattgtttaagcgggttgaactcatttatgtctagagcatcaaagaacacattcatggcttgatcattggttagaacattctcattgccaataggtgatggttcatcttgcttgaatacaacaaacccatctctaacaataggccaaatctttcctcccatagctttaagatgcattgacattcttattttccaatagtcataattgttcccatcaaaatgtggtggcttcccaatgtgcacattgttgttactagccatttttcccaactctgggatggttaaatccacaaacaatggagtccaaacctctaataccacttgtagaatctaggacaccggctagaggggggtgaatagacggttttaactaaaatcaaagacactagagaaatttaatcaaaacaacaagagatataaatttcctagctttgataggctaacaaaatatgatgagcaatttatgtcaatactac

SEQ ID NO: 87739 - DNA, 627 bp, Zea Mays
gagagtgatgttctccaaaagctcacaaagcaatgtattattattcgtgtacacatgttcagagccagagagcgtctaggcaatgatgcatgaggctcgacggaagtcatgcaggcccactagtaggtgtttgctggggaggagagagagaaagagatgatgttgggtcaccagatggacatggtgtgcgtggtcagtcaatcctctcccaatagtcaattgtgcgctactagctgcatgcagctaacccaagactggctggctggctatagggtgatttgttttgcgaggagggccatatcattactacctcggcaacgcgacaaaaagtgcgctactacttgccggtttgcgcggctagcatggccatttgactatcggatcgatgagcaatctttgacccatcagtgattcggcgggaaaacttttctaccacgctatgccaaatggcaagatctacgccatctaagtgtgggcaccacaggaaaaaaaaatgaaaacaaacactccattggatacgaactcaatcttcccggtccaggcaattgtgaatttgtgatctttactttaactaggttgggctgcctgcttatatgtcgagcaaggtcgtatgacctattgggctcg

SEQ ID NO: 87740 - DNA, 646 bp, Zea Mays
tgatgtttacaagtttctaggtgttttcatatttattctatactctaaaatagcttttagagggcttaaatgcaaggtctagggactaagttgtaattaccagggacccataagtaatattgttttacccacacttggactacgggttgattgtggagtcctggggctttttagcaaaataatcgcggtcgaaggggtatgcttctatcagatctgttggatcagaaatcggcggaccagattggatatgacctttaaacgaatgggtatgcatcactgcccatcagatcgaagatcgacggttatgatttaatgaagcaagatatattctggatcgaacgatcaaagatccatggtgttagtttacctacgcggagggatatgcccgagtctgttctgcgcccatacaagatctgatggcttacgactcttctcccttaccagacgtaggccacagtggcgcacaggcctatgggtggagctctcgctagcgacagccatctcggcttgccgacactctattctccaaacctgatatacctacacatagagggggacaaggtgtacaagatgggagggcttatacctatgattgagcagcatatagcccgagcgtcaacacccagcggctctacggcggactccc

SEQ ID NO: 87741 - DNA, 366 bp, Zea Mays
gttttcttcatattcttgcccgctgcattgtttgtcgtatttcccttgccttggctagagttccccgggttctgctgattattggagttgttccgcttcagatatggacagtctttaatgaagtgtctagacttcccacaattgaagcatccagtagatgaactcaggagtgcagggaaacgagtaccaggggcactcggctgatttgttgaggtgggggcagtggcagggcggataaagataggttgtttaaaggggtaggagggtggatgtggtgaagaacagttttggttaaaaggtcgaatcaccatcctttatcgcttctcaggcccctgattgggcctgtcacctcccaagccctttgac

SEQ ID NO: 87742 - DNA, 323 bp, Zea Mays
cgccgttgggtggagcggacgcagatgcccataccgccggcaccgagcgccaccaaacacctgtggggtcgcgcagtacctgggcccatcgcagcagtgacacaaggccttccatggggatgaggagtgggtgggtcaagcggtgtcacgtgtcaagacgcggacagagcaggaggccggcaaacacgggcgtgagcccgaaggcgttgtggttttaataacttagattttacatcgatgcgatgcaacacatatttggaggcaaagtatttcagttgtagtgtaggagaagataagactagttgtgtgcaagccaaaaattt

SEQ ID NO: 87743 - DNA, 1073 bp, Zea Mays
tgagaatttcttcaaaagcttcgacctcttcgccgatccattgaataactccttcgggatcgcctcagataaatttttgctctgatgagaatgcacccacctttgcaaaactatcttttagtttcctcgcacaatccatggatacttcgtagcatttttctatggaatcccaaagttctttaatatttctttgcacccttgctatttccatttcacttatttctttttttttcccttcgcaacttcgaaatcttcattcatttcagcaagtttcttctttaaacctttaacctcggctttgtcagcttcggcttgtgcttttaactaagcttcactggttttcagtctatccactaaggaaagcagtattttgtctttttcaagtgcttcattccttagtgtaataacctctgatcgaagatttccaagcgctagctgccagctttcatcttcggcttttttctgggcccttaatgccttgctcagaattaaaccctacaaaaataaaggatgagcacatactgaaaaggaaataaactacaaaaataatctgctttctaacaagttaaagtgttcccaccttcagactgttataggcaaggctatccgcgatttggtcctttgtcattgcagacaaacctaactcaagcttcgggtatcctatattgtgtgccatctcctgacagacatgaatttctttattgtcaggcagacaataaaggaagtcatcttcatcatccccgccatataccaaggatcctcgagggtattgcaaatccctagcgtaatgttgcgctacgacaatttgatcttttgataactctttccctgaagcatgacacactataaattccaattcctcagtagatgctccaggggtaggggactcagattcttcggtagccctctctttttctaacagtaacggagccttcgcgacatccaaaggtcttgtttcagcacccttttcaacaacctccgaaggtcttgcttcaacgggaaccgagggcccagcctctgctacaatctgtgttatgccagcttcagcagattccttcgtatttttgccttcc

SEQ ID NO: 87744 - DNA, 498 bp, Zea Mays
taagatacatgtatgttaatgatatgcaaatttagtaaacacgatgtatggtgaagcaatattaaggcagtgggtaaactagggtttctttatcgtacgatgctcttagtgttttatacttaccttgtctaggtttttattgtaattaagattttggtcatcccccaaagttttagtgggcacttagggaggtctggttgtaggggtgtgtgtaacattatttccttccactaattcccctttttattttctatttatgcctttaaggtgggtttgaactaccatagtaatttaaacttttccaaaatttttgtaaaaattacagtgagttaacattggttactgtagtctatactataaatttgaggttaagaataattaggataaactctaggcaaaaataacaaaagtgagggtagagggtcactttgtactacaactctgatttaggtgggggttctgcactaaaagttatttttgctgggatttgtgggtaat

SEQ ID NO: 87745 - DNA, 323 bp, Zea Mays
gttcctggccgccgcgtttgctgcggtggagggagacgaccacgcgggagccgtcgatctacgaatgaacggctctgattgatgcggtcctaccggtgcgcatcagcctttggatctgaatccgtgggttaggaatggtccgagcttcataaaatctagggctttgattgataatccaacggtccctgtggcgtacgggttcggcagagataggattaaatcgtgaccgtccaaggctaatcggacagctgcgatagtacgataccccttcactgatctctgttacaaataaaccctcggattactatgaaatcaacccgcag

SEQ ID NO: 87746 - DNA, 286 bp, Zea Mays
agaacttctgctctattaccctgatccactcattggcttcaagaggatcttcagctttaacaaagagtgggggacgcgtttcagtgaagtccgggtatgaagtttcacgcggtccttggggaggagcccttctgccttgctgctggaattggttacccgccatctcgcttaaaaagcaggtattatcggcagtcgtgttgaccaaggcagcgatagcctcggccagcgttggtggtacatgcggtggatttggagtatcttcccgaccacgggaagtacccgcatc

SEQ ID NO: 87747 - DNA, 653 bp, Zea Mays
gaagctgctccacgcggacacctgctgctctcctggctccattgaggtgatgatactgtaggcctcatccagcctgccagcccgaccgagaatgtcaacagcgcaggcgtgaagatctggtgttggctggaccccatggttcctcttcatgctatggaatagctccatgccgcggtcgaccatgccggagtggctgcaggctgctagtgcggcgatgaaggtgacctcgttcggcttagcctcgttgctcatcaccattcggtcgaacagagcgatggcctcatcaccgagcccatgcatgccgtaggccatgatgagaacgttccaggtgatgacgttcctcttcggcagccggtcgaacacggccctcgacagcgccaggcagccgcacttggcgtacatgtccaccagcgcgctcccgacggcgatgtccgagtccaaggcgtggcgcatcgcatagccatggatctccttccccttcgctggcgccgccagcatcgcgcagccagggagcagggtcatgagtgtgacgttgttcggcaccaccggctcttcatctgtcccagcgatgccgtcttctgttgtggcatcagtgaatctcccttgctgctgcatctcccggaccaactggaacgcgtcgtggatgtggccct

SEQ ID NO: 87748 - DNA, 505 bp, Zea Mays
ggtcacggagaatcgaaacgactgtaataggtccagtcgtcctcttctctcattcctttgggacaccccacatccagctctgaggagcctcagggggtgctttgggcaaaaatggtggaaggctgcgaccggtggcaaggacccgtagccgtagatgtataggtagaactactggatgtgtcgacccttattggacgagcacaatcataactggacgtaccccttgggttgagcccctcagagatgatagccgcgcaaccgatctatgccgctttcgttggggtgtccgtcaccagtcgtatacaaaacaatttagccgagaaaaaaatggcaccaggggcaaaagtggggggcatcttgcggtattcctcgcacaaagccacaaaagcggtcatatgttgaactccattagggttgaggtggtgtagtcggatcttgtaatagtgaagaagccccaccaggaacgggcaccacgaagccccactcgtggaaatgcatgaacgaa

SEQ ID NO: 87749 - DNA, 625 bp, Zea Mays
ctaggacatccgacttaggtggaatgaaagggataacaacccgtctttcacatgactgcggtgagctaggcagctagagtggagaagaaagaggtgaataaataggttgataaacaaccctccagtaccgtttgactttactagaggattcctccacaaatttctttcttttagactcctgatgaagccaaatcttgttatcgcccaaaatagcctgactgaccacctcattatatctttcagccaaactggttgccatcaagcactggatcttcttgttaaggcgacacaggaagtagaactttttcttctcattgatattgacaaaatccatgacgtactgagataggcgagtgaacctctcaaaatattccattacactctcttcttccccttgcttgaaacctaagaactcattgaatttgatttctatcaaggctttcagaatataacgcgtctggaataactcacggaattcggcccaagaaatttgatgtcattctggctatagagctaggtattcagcccaccaggctccagcttgaccctaaagttgtgctgcgcactgatttttctgaacatcatcacaacggatgagtcccaatttctattcaatggttcgaag

SEQ ID NO: 87750 - DNA, 1184 bp, Zea Mays
aactttggagctcaattgtgaataatatagcgaggttaaggccatggtcacaatgacaaagttgaaggttatatataagagaacaactttgctaaagacaagttggtatgttattgattggaaaagggagtaaatgtggctcaaagaagctctgtcaggcatctttggaaagggatttagagtgaacagtaactgaacacgacctgcttcatccccatcgtcgccggtgatctcgcgccgtgattcgagcttgccgtggagatgtgtgctgggattggagtagatattgctggaggtgaaaagatcggcgggtggaagaacttgggcacggagtcggccgaacaccagtgaccacttgccccgacgtcatggcaaagttaccgccgtcatgatccgtcggtcacccttgtcaagccacacatatccttgcttcaccccgtcttagcgagggtggcggacggtgaaacaagtccccaagtcactgagctaaatgtgcgccatggtgaacgaacctagtgagaatatctcgtcgcctccatggatactctcatcctgaatttgcgaagcacgcaatcgatctctttaaattgagtgttccccttgctccgcctctctgttatgtgtctagctgactctcaaccccctttcgtcgtttaccgtagcccaagttcactagattttcccgaaaccaatcatcagtgccgtcgtgtggagctttgccgcggtcagcgctcctctggttagttcatgtccctctagctcatgttttggaacctctctagcccctagttgcttacaaaatcagacgtttgaactctaccgtagcgaaactttgagaacgtcgtctcgtcgctgcagaacgtagcctcagactgcctccacgtcgaccggctctcccgtgcttcctccgtcagaattcgcgtgtgtatcgcacctctggtgagccgatgatactcgccttgcccccaatttaagtgctaccacattctgttgcccggaacaggctcgccgatgtattggctccgccgttgtcgcggacggacacgagcatgggacaaactaaccaatttaacctaatggttatgctcgggtggtcttcgggatggtacccgtgtactcgctgccaccggaacaggtcaccaacggtgagtccaggtgacttcggccaagtgctcaaccgaagt

SEQ ID NO: 87751 - DNA, 459 bp, Zea Mays
ttgcttgcgcgcagtgcgtcgacgggactccgtctacgttcgcctacccttcgtctacccctagacgactctcgtctaccctcgtctacccccgtctaccccccgtctaaccccgtgcgcgttcgtgtcgttcgccatcgcccgcgcgtcgcgcaataaatcgtcgcgtgctgtccgcgcgcgttgtgcgtgctgttcacacgtgtcgtcgtgcgttttacgcacgctaatgattcatctcacctagaatagctcacgctaattaaatatatatatttaagcaacggttattcgaacaacacactaatcgggactaattagtaattttactcggcatgtgattattttctgataatatgattaagctgaattaaatattataattcatattcgcttagtatacctgtgatatccctcgaccgtagtatcagtcgtctcggttccgttctcgcgtagtcg

SEQ ID NO: 87752 - DNA, 884 bp, Zea Mays
gcaaaagctgcctaagggtgcagctggatatgcacaataagtgtgcgacatcaccctaagggtgcaaagtctttaccataagaaaaatccgagcaaaagtcgcctaagggtgcagccgaacatgcataaatgcgtgacatcaccctaatggtgcaaagtctattacgatcaccttaaaggtgtgaagtctctactatctgacacggtcgaacaaaaaccacctaagggcacagccaggtatgcatcataagtgtccaacatcgctgtggaaagcgaggtccccatcccatttacgtgccacgccagcacgattacaagtcgggacaacctcacaacaagcgcagcatgcggtgtcatcatagtttacatacacacaacaaggggctcgccggccacattgcataaataatacaaatcacatcttgttgccctccctctctattgcgatccgggggagggcaacgttttcactcactaccgcaacacgagagcgagggcagcaaacatgctacatcggctcagccttcggaataaggcctgcctctcgaaagttaaacaacatcatcttcaactcctcgccctcaaaaagattccacagatccccctccccaatacatgtcctggacgtcgaggagagcaaatctcgttggccgtcccgatctagtcgaagacaggatcgttccatccccatccgtcgacgcctcccacttcgtgacatctcaccaacattgtgcttcgacaccacctttcgctggcggtgctcctcggctatcaccccagctaggggagtagacccttcgcgcacttcaggctgcaacaaagacttcaccgcggccacatccaatgcagcaaaataatctaaatcttcatcagaagactcctca

SEQ ID NO: 87753 - DNA, 347 bp, Zea Mays
aagcccatttccctttcacccatctatcagcttcttcgtccccaaccgccaccctgctctgcgcggacaactgtcgtccactcccccacgaccaccgctctccacgcttcacctgggcttcaaaacagggaccctgaactccgcgcacacccttgcccctcactcgcaccactcccatgcccatttttctttgctccacacgctcgcaaccccgccactgtgaaagtcgttccaccatcaccattgcgactatgccgcccttctcacgtcggtgagctccgcctgagcaagacactccgggaacccaccctagattcccctctcccctttctccctgccctgtccct

SEQ ID NO: 87754 - DNA, 455 bp, Zea Mays
caacatcctcgagagcctgatcaaaatttgctatggataattcttgcaaaccaacaagagcagacagagctggagaaggaatatcgctactccccccactgactctataacgtcgactgttcttccgaatcaatgggacttcttcttcttcttcttcgtcctcatcaacaatacagaccataaacggcgcagagtcacacccattgggatcagctctggcggggtcacacccattgggttcagcatcatcagggtcacatccattgggttcaactctggcagggtcgcacccattgggaccaactctggcgccattgggtttagctctagtaaagagttccgccggtactccttcagcgataggagcagaagggccagcaccttggtccaaacacgacactcgtcgaagccgtctctttttctttttcttcccctcggcaggcgcagttggacga

SEQ ID NO: 87755 - DNA, 564 bp, Zea Mays
aattggataggtcagagcgtatcaagagcacatcagagtactgaaacgagggaacagagggcatgaacggacctatagtccgctggccacggcgagctcacacagtacgatgttctggactgatttggcggaagtctcaaattggggagatgtaggggatgattagaggtgagagttggttcactggatgcacaactacctagcggagctgatggcacgctcaatttataggattcatgagcggtggcggctaatttgaagaagacgcgtagtggcccgagagggggaagagcactggcgcaaaggattcatggcgttcatcagcgcaatggatcaaagattgtactcctaagtgtaccacgattactactgcatagtaacaagccacggcgtggcacaatcgaggtcaccggagtttccacggcaatactggcagtccgccacgtcgcaacggctataggcgcggtgataagcctcccccgtgaccacatctgctccccgcgagatcttttacctccccgtggatatccactgggtgccaggcacgaatcacggcgatcgacg

SEQ ID NO: 87756 - DNA, 353 bp, Zea Mays
cttatctatagactttagccagtcatctgcttgtagtgggtccgcggagttggagaaggttggtggtttatgactcataaactccctgtgcttatccctgggtggagctgctggtggtggtggaggtagtggtggttgctgctgttgctccctccgctcctggcgcatctcatccctctcttggcacatctcctgacgctcctatcgcatctacgcgtgcatatctgccatagtgtcagccatctgttgcattatctgcatctgggctgcaattgctggatcagcaccgactggtggaggatttgaaggattcatctctgcttgttgttgttgtctaagtaccctccagttat

SEQ ID NO: 87757 - DNA, 413 bp, Zea Mays
cgtggagtcaaaagatttcaagcaaaagggaagctagctccgcgattcgtcggcccctatcctataatcagtagaactgagccagtagcttaccacctttagttgctagaatccatatcaaacatccacaatgtatttcatgtatcccagctccggaaatgcttgaaagtacaagagggtcacatcacagaagagttagtctagattcagaaagatctgcagtaccgagaaaagcgagtgaagattcttgattcagccgttcgaaagacccaaaactcggaggtatggctctgtaaagtctagtggagtagagaaggagaagaggaggctacctgggagagtgaggactcattgagaagggagtacccttaccttttctcaagcccagcctaaatcttgagggcgagattctt

SEQ ID NO: 87758 - DNA, 800 bp, Zea Mays
gcaaagttcgaaaaatatggataaaatggatttaaaatcgtgagcaaggtcaaccatgcaattgtcccataaaactgtgtattctaccctcaaactattgaaaatgctaaataatcccttgagacggttttgaaagtggttttactgatgtgttatttttagaaatctatattatggggggtggatatccttgggtggccataactcgactatgatccgtgggtcgctcgagagaccttgttgggtcgggtggctaggcatcacaagttataagtcggatacgaccagacataggcggaaccgtggttacatgggcgtcaaggcgcgtggaccgaatcttgtgcatacatagggcacgatgtgctcctaaggactcgtcgacttccacatgggacgaagttggtttgggttggcaacggatgtgggacgtggtgcgtgggacttagctctcccatctgcataaggcagaagaaccacccctaagaaaaagataaggcatctcagtaggcatagtcatcttctacctccataactctctgtaattataaccaccaagcaaaacaacctcgcaaacacatagggtgttgggtcgtagtgcgagctgcaccggcacacgcccagactcaaggaccatgattcatccgcgtgccaagccagactgttgttgcgtcggtcggacacagattcgcatcagtgccttcgcctcggttatccgacatagtggctccgtgtaacacccaatttgtaaaaaaaataataaataaataaaaataaaagagtacatctcaacctatgtattt

SEQ ID NO: 87759 - DNA, 556 bp, Zea Mays
ctgctgcgcgggtaaatgctgttgttttgacaagaactggcatgcctcgcacttatggactaactcggcagcatcactcttggtggttggccagtaaaacccggatctgaaagcttttcccactagagtccttgatgcagcatgcacaccacactgccctgcatgaatattatctaacagatgtctcccggtagctgagtggatgcacttcatgaggacccctcatgcgcctcttctgtacagcaagccccctatgatggtatagtgggctgactgtcttgcaatgcattctgttgcagccttgtcatccggttcctctttgttctttacgtacctgatgatcgactctctccagtcattgggatctacctctggctgactcagggcgttgcactcttccacctgatccgtggcgatgcttggttgctgtatttcttggacgaagatcccaggtggaacttgggcccgactggaccccagctttgataatgcatcaactgctgcattgtgatccctttccatgtgatggaactccaattcttcaaacttgtcttcc

SEQ ID NO: 87760 - DNA, 854 bp, Zea Mays
taaaaatctgagatctgggtcatgcaaattggtctgtcagacgctctgatagtacagtaaactgaataagatctcaggttcagcccccctcaccgccagtgatctcacacccggattcgcgccggcatcgcgattcacgcctagttaaacgcagataacaatccttgggtgaaaatctggcgctgaggatgagcttgggacactgtttcgccctggtcgccgtacccactcgccttatggccggtccagataacctcgccggagttggccgcctgccactcaggtgccacgtgcctaggtgctctaccacatcgcagtgaattgccttagcatgtccgttcatcgccggtggtcatgccacggtgaaagccacaaatcacttgcgccagtgacctcccttctctccggccgccagtgtgcctttccaaaattgggtgccaccgcccttggacactataaattggtgccccagcctgctccgctaagtaattgtgcacccagtgaaccagccctcacctccaatcgtccctcacagctccccaatttgggatttcccccaattctattctctgcgccgccgtgagtgagctcaccatggccagctttctgcaggtccgttcacaccctcctcgctcttgtttcagcactcttgtgttctcttgatgcttctcgacccagccaattgagctagaacacgtaggatcaccgggaacaccttgaattgtcctcgattggcgccatcaccgtgaacagaaagatttcaagctcgaatcatgcaattagttgagggattagtgtcaccaagagtggaattaggtgtaagccgaaataggggtccagtctttgtgttttcc

SEQ ID NO: 87761 - DNA, 306 bp, Zea Mays
ccttgatggggtactcagcataagtcaagtcctcttgaacactaaggtcttccattggtaacttttcttcaggcaccctgaggcatttcttcagctgagatacatgaaagacatcgtgaacatccgcgagatgatccggtaactccaattgatatgcaacttctcccactcgctttaagattaagaagggtccaataaagcgaggggacaactttcctttgactttgaatcttctcataccccggagtggtgacactttcagatagacataatctccctccttaaactcaagcagtctcctccggg

SEQ ID NO: 87762 - DNA, 584 bp, Zea Mays
aaaggatcaacttgcggacagccttgctttcaatagcttgaaggtttgcaaattttggcttcgtgttttagttctttccaaactgttatccactagttcttgcatttgttgcttacttttttgctctattttgcagggtctaatcctgagtaaagctttgaaggcccaaaaggacgccgaagacgagagttgccaaatggcacttagtaatctctgatcggaggttataactttgaggaatgaagctctcggtaaagaaaagattttgctgtctctggtcaaaaagctaaagtctagtgaagccaagatatcagctcaagccgaagctcacgaggccgaagtacaaggtctaaagagaaaggttgctgaagcaaccgaaaaatttgaagttgaattggtgaagcatgatatatgcgaaatggaaagagcaagagcgcaaaagaatgcaaatgagcttcgggctgccaaagaaaaatgttatgagacatccatggagtgcacaaaaaatcttaagagtaactttgttaaagttggagccttctcctccgagcaaaaagcttttgaagagattctcagtgacagag

SEQ ID NO: 87763 - DNA, 446 bp, Zea Mays
gaagcttatagatattctgagatgactaggggcttcagaggaaggcttcactcaaggcatgttagaacaacacacaatcctagtcaaagtgaggacagaaacaatagtaaccaagggcaccagcacatttcccaatcaacaggggcgcaacagaactcctttagactactagccccaagaggcagagggggacgtagcttcataggaagattcaactctcaaccaagaagactattttgcttattctgtggagaggataaggggcacataacaagagcctgccaagtcacaatacagaaacagaaggagatagctgaggccaaagcatggcagaatcaaccaaagcaagttctaaatactgcttcgtgttattccccatacattccagagtatgtgggcaaccaacagccattctcacaacctacaatttcattggcttcggcaag

SEQ ID NO: 87764 - DNA, 528 bp, Zea Mays
ggattcttgcccataggtttggaatattttttgggcagaggaggccctggattgcaaccaggactcgaggggccaggaacgaatcccatgcgagcgatgagaagacgtgctgcggcggcgaaagcgagaagacaaggtgtcgatgagcggggatcgcgacgacgacatcctccccaccgccggcaacctccactacgctgtcaagcttctatccagttggtctctctcttttgttagctagggttcttgagttgagtcatttctcggtcctagtgttcatggtagtggacttgtggcggtggctccagatccactgacggacttgcagagaaatctgatgtgtgatatactttttttgtttgtttcgcaagcaggcacacaccatgatgagatctagcaaggaatgatttggctagcagttggtatgcttgcatgattggtcagatagagtacaccatgattcctgaaaacatgctgtagtgtgatttaggctgctcgagggggcgagggactcaaatttctgcaggc

SEQ ID NO: 87765 - DNA, 383 bp, Zea Mays
tctccttaatcatgccatgcacctcaaggtaagaagaactcacaaaccctaaataatcctaagtgggccatttaagcacataaagggaattggagagaagacttgggaaaaatacaaaattttgatatgaaccaaataacaaagttttagtgcactaaataacctacaaaatatagtcagaaagtttggccatttgaattttccaaaatccccaaattagcccatgaactcaggccctatgggaaaattcagaaatcagaaatctgaatttcagaaccctttcccaagttcagatgtgttccctgtcttccagagctcgaatccataaagtccaaatatcaaagtggtgccaaatttccttgaacatgctctggtaaagtttg

SEQ ID NO: 87766 - DNA, 877 bp, Zea Mays
cctgaatccctgttgttgggtcttcttttgaggagggcaaaatcttgctcctggtagcattgccttgaaattttctttagccatcactatggttctaggctacgacattccagactccaaggttctcttatgccgctttgatacagtgtagggtttgttgttgttctcctgagtcaaacaatcactgacgaaatcattgaaagatgtacaagacgagatttccatactcttcatcatctttgggcttatgcccctcttgaaactagcaaatattttggcctccgtgtacacatagtcaagcgcgtagcgagacaagctgttgaaagcatgtagatactctatcactaactgggtgtcctaagttaatctcatgaattccgacaccttcattgccattagaccaggcggaatataactccctcagaagctgtagtgaactattgccaagcgatgggtgcattttcagggtaggcggtgtggtaatgagaccattacattcctgcgggtccctataactgatgtgttgcatactcgatcttaagatctcccataagtctcaacaaatgaaacttctgctccatagtcttaatccactcatcttcctctaagggttctgctaccccttgaatataggcggtctagtgcccatgaaatccttgaaaatgctatactgaatgactccatatgcgtcctgaggctgcccatggctagtgttgtcaacaatgttgtgaagctttacttccatgttttgctgcaagttctccatattcctttgagctcccataaattgcgcaaaacattgctcagacgtgtatggtggaggtggaggaagaggtacttcttgattacccttctggttatcaccaccagatgtccc

SEQ ID NO: 87767 - DNA, 503 bp, Zea Mays
gtcgactctgatcaaaccatggtctgcacactcctggatgtaatggaatctaatctcaatgtgcttactcctgtcatgtaaaactggattcttgatcagatcgtagttttattatctaccaacagcagaggtggaacaccctctttcccaagcagctcctccatcagccttgctagccaaacaccttgagttgctgccatggaagcagcaatgtactctgctacacatgaagacagagccactacccttagcttggttgactagtaaaccatgctgctggtgctcttgtggtcttcaacatctccagctatatcgctgtcaatgtatccaataagctccggcctctgttttcctctccctgcgccatacctgacgtccagttcacagttccagccacatgccgcaagatgtgtttcactgcaactaagtgttcttctctgggtgcctccataaaatgactcacatataccagagtaagcaagatcgggccaggtgtttaccag

SEQ ID NO: 87768 - DNA, 695 bp, Zea Mays
aacagctaaaatccatgacaacaatgacaacagatcatgcatacaaaaagacaaggctttccagtcaagtattagaaaagtagagattgagttgtacatttggtaacttctcgatgaatatagcagcattagcgagctatatcgctctcttgatatcttcaagtgttggcttttctatttcatatgcaatgttttccctgattgtagttgagaatagcactggttcttggttgacaagaccattttttcctctcatccatccaagcttcattcttctaatgtcgaccccgtcaatcaagacttctccagcatgtgggtcatagaacctttccaccaaactgatcacggtcgatttcccactgcgctgtcaccaaccagggccattgttgttccacttggtacttgcaacgagaattcaggcctggtgggatagttgaagtacatgtccttcagttgaacatcacccttgacatcctccaatatgatacctgtgttatcatctatgtcaatatctggcttgcgttcaattatcttgaacattctatgtgctgctccttggccttctgcgaaagctgtcactgatcgtgttgcctggcctaaggacctacagaaaagaagtatttataaccgaaataagtagatataaccaatggtctgaaagaatagatacagaatgttttgtctgaaagatgcat

SEQ ID NO: 87769 - DNA, 329 bp, Zea Mays
tacaagtatccatcaccaccatcgccttctcatggtgaggcacaaccaccacgtggccacaggaaacttccaccaccatctagatcgatgtattcaaccatagcaccctcaccggcaaattacaatgttgtctcaccatctgagcaaggtcccaagatcaaagatcatggcgccccggggaatgcacctatgtcgtcgggtcaagaaggagcatcgccgccatggtatttttgatgcgaagatcaagataaatgcttgccaattgcagttctactctccacaagagatcaaaagcccaaaagctactttagagggagttccttttttct

SEQ ID NO: 87770 - DNA, 417 bp, Zea Mays
cgacaaactagctaattagttacaacacgcgtcgcgaccaagtaatattactagcactaaattgatgttgatacgaagatgacgcgactgaaacgaatcaaaatggatttatgacgcataacccattgaataatcgacaatttgcagactataaacagcataatatacacgatctgctaaacacacatcgctattacactaggcaggtatggaatcaagatatttaatttggtattactcacgttatcgtaattttataaaagtatgacttaaaactatagattggttttgactatattttaaaacaaatggacaaattagcaattaattaaatgcataacacatgtgtcgtgacataatgatatttcttaacgtgtgcccgacatccttactaagttaatgcagcccaaacaaaat

SEQ ID NO: 87771 - DNA, 712 bp, Zea Mays
gctggatatggtgtgtgttttgggagctgggggcgagagggttttaaatagaggaaggcaaggaggcagaccggtgtgcttagcatgacatgaaagggcttctgatttgtaacggctggaggagaaatggaaacacattgtactaattcccctgattaaaggataaaatgtagcagcttttgaaactagcctccaacttttagaaagaagtgctataacaagaagttttaacaaaaagaatatatcccacgtacaaccaaacgctgcaaactcatacgtaaatacttaacaagttgccatatagtgttgctcttaattttcagaatttttttaatgcaggcctagtgtttggataaaataatgtgtgaagggggagtgaattagataattttaaaactagtagtcagttgaccgtacattattgtcgtggtttctatgtatcatattaatagactttgttttaataagatacgaaaaatatgtgttttttattagttaggtgagtgtgaatgtgaagccaataactaagttttaaagctcatttatgcataattttaatttgttctctactactctataagtatgtaccgtaggcgtccacaggtacaccatatgcctccacctctgtgatcctcgcccctgcctccagcgtggtggccgacgcccctccttgatcatgtcgcgatgacaggtgacgtactatgccctcgcc

SEQ ID NO: 87772 - DNA, 652 bp, Zea Mays
gaaggtttgttggtgtttttaactattggattccaattagtagttttttatacacccaaaatttttatggcattagcagaacatgggtacattgagttttagctattaggtgagtttagagaagatttggggtgagaggaagttaggcaaggaagactcttattctgggtggtggatcttgattcatttgaagatctatttctactcatatccttcattgtcgaggttgaccttctcttccttcttgggtgttgtcatctgtgttagggacatgaagctaggacagatttgcaagtaacccaaatagataggtagtgtagctagcttaggagatggctctgagttaaataagattagtcagaatctgatttggttgtttgcttctagattagttggataggttatgtaacctattatgtaggtcaagttgttgttcatggccgagttggtctatggccccaaagttaggttaaaacaggtttataggagtagggtctaatctttttcaccagtattaactaacatgattaagtaacccacatattatatgtagatatgatctagattagattggtatggctagtttggactagataagatctaattaattttggattagatcatggttgctacactaggatgagataagcaa

SEQ ID NO: 87773 - DNA, 323 bp, Zea Mays
ttctggtgccatctttcttctccacaaataggacaggggcggcccaaggcgaggtgcttggccggatgtaacctttctctgacagctcattgatctgcttcttaaattcaaccaactctggtcctgatactctgtaagctctcttaaagatgggggcggtgccaggaagaagctctatggcaaattcaactttccgctccggtggcatacctggtaagtcctttggaaacacatctggaaactcagacacaaccttgatactctcaattgggtctgcttcactgctatcgacagccatctgataacaacttcctttctttggt

SEQ ID NO: 87774 - DNA, 296 bp, Zea Mays
agtctaagctaagcactgccctgggtaagggtaagcgatacatgacttacacattaaaacatacattttccatcagcgtacaaatagcacaggaattttcaataacaagcctcattgttccaacttacacattaaaccatacatgttccatcagcatacacacttccaatacaacactacaatttcaaagccttttgcccttccttggagtgagtttattagcaattgccctcttcatatgtcttggtggagtgacatgacttgttccttcctgatgtgtcacagttatttcctgt

SEQ ID NO: 87775 - DNA, 342 bp, Zea Mays
gaaaatatatgtagcatatactattcgcggtccaatgcaacaatacctaggaaaaggcacttcactagtgattcaggttggcgcattttatggacagcccaacccaactctagaaaaaggatcacgaactctggtgatgcaaactttgcaacgaattcgtagaagctaagaattttgaaaagctagacaattgcattccttaactttgactcgcttatacacatcagccttcagctagcacaaactaactctgaatgcatatttgccatatcctaaactggtccattgttagcgatagacactcagccaaatatggaagttatgcaagaacgttaagcagga

SEQ ID NO: 87776 - DNA, 568 bp, Zea Mays
cacagggttagtcctcacaaattcgctgctttgtttatgcatgcgatggccggtacccatcctaatttgcaatgcttctcttgcagaccaaaaaatacgcagcctctttagattgcccagtctttgagacaactgatggccatcacattttgcatggtgaagacgaagtagacccatctaatcttccgggacctctaaccagccaatacctgtgctacagggaacacgtgcgtacaaccatgtttgttcagccattacttcaacaaaaaacaatatggtgttagtgatgcttatgtcgacacaggtggtagatctataatgtcattcccttcagcgcttgccgcatccaataggcgacgccggcgcagtagagtacatcacatggtacctgacgagccattgtcaaccatgcttcctttggaaaggtcatatgtagatgctctaaaaggtgtgtattatgcccaacattcctggtaacattctccctgctttgctttggtgctaccctttctcttcttcctgtgtagatgcctaccctgagaggtcatactacggtggacctgaacac

SEQ ID NO: 87777 - DNA, 636 bp, Zea Mays
ataaaagtaaaaaatacattgaacttggaagctttctggttgagcccctgtattgctttagtaaatatgtctcgattcaggcatagtgttattgactgtgtgagcttcggactcctctcttgtgtcacactgttgttgcgcttgacgatgcccttctggctgctgattgtgaatcaaggttggtgccataggtggtggtggtggtagctgagcccatgcagcttgagaatgacttgccgaagcaactgatgttgtgggtttctggttgcccacatactcaaggatacatggcgaacagcatgaagtagtgtgcaggacctgattcggctgattctattgtgcttgggcttccgttatctctttttgatgttggatcaggacttggcatgtccttgttgtatgtcccttatcctccccacagaataaacagaacaacctcctggttgggagctaaaccttcctctgaagcttcttcctcctctgccccttagagttggtggcctgtaagagctttgttgcatccctaaagattgggagctttgttggttgccttgagtgtggtttgccctgtcatcacttgagcagggattatcgattgttctgaacatgtctagggtggagccttcatctgaagcc

SEQ ID NO: 87778 - DNA, 332 bp, Zea Mays
atggtcggttttcattaaagctcacatctcgagaaatacgcatgcgacgagaagatgaatcataacaccgatagcctttatgttcagggctgtatccaagaaaaacacactcaacagattgagcagtcaatttagtacgttcacgaggtgataatagtacataacacgtacatccaaaaactcgaaggtggtcatatcgtggaggagttccgaaaagaacttcaccaggtgttttgccagagagtttggatgatggttgtctagtgatgaggtaaaccgcagtagaaactgcttcaccccaaaaatgagaagggacaaaagaagatatcaac

SEQ ID NO: 87779 - DNA, 674 bp, Zea Mays
gcgcaatcgacccaattccaccgaagaactcagataggccataaatctcctcctcactgttcttagcgccgccgtgaaggacctcttcgtgggcagcccttctcgggtcagtactcgcccaattgtctcttgttctagcatttctttagcttcctattgctctcgatgccgtccaattgaattttaccagagccccaccaccagaacacccgttgttccatagaacgccgccgtatacaccctctatgtcgacccgcttccctaccctcgttcggcctaatttcaatcgtgtgccttttccctggtgaacccgtgaagcttccccaagcttcaattttagcgtcaatccctttagttgtctagaacatgatctctagggccattccgccgccgtgaccttgaaccagctccgtttagggtcaaatcattccaattaaatgagggcttttactcggaccgacgtatgcttgatgtttatgagcttattaccctttgtctgggtcgccaccaccgtgaaaccatggctccggccaggtgttcggcttaattccatcgtgggccgagctctgtaaagaaatagaactagaagggtgtttttgtagatgtcagtgactctaggaatagtccgtgggacgcttttctagttatttaaaacatcagggccttttcgcaag

SEQ ID NO: 87780 - DNA, 726 bp, Zea Mays
aggccataagggctactactactattaataaggatgttgtagaagcatccgaaaaattagttaggtctgagaagacgactagaatgagcatgcatcatgattgtcgcattatagttgtctcttgtgcatcaacatgcttctctcacctttattctaataataagaaattgtgaataatatgatgtattgccaccttgtgaactagaagaactgccttacctcgtgtcagattggtgaaccttgttaggttgtgttatgtgcttcccttgtcttgctatctaggtgatattgtaattgttcaaccctttttgcaaaaaaaggtgttgtctgtcttgctcataaaaagacacccccactttaaacaaccttgagtttagcgagtgaaacctcaaaaaatatatttatgcttgtgttagtgttttctaacccttgtgtgttttacccataaagttacacttgcacagcttatagaaccccacagcttgaccgctagaccaacccaagtctccttctgcacatgttacatcaaaaaaaatgttgtttggtgtctagttgtgcaacccctatcaaggccatgtttctttccataaacccttgcccctacaacttcatagcatttctgctaatcatcctagctgatcctgtttgatgacctctcttttcacctagatctagtaaacctttacctttgtgaatcatgttgtggctttatcatccgaatctccg

SEQ ID NO: 87781 - DNA, 516 bp, Zea Mays
acacaattcacatgctccaacaagagcaaggcagagaagcgatgcctaaaaaggcgcaccactaccttgaagcggcgcctcaacaggcgtgctgacaccaacaagaaaaaggcggtggaagcctcgtcttcaattttggtggccgtcatcagtcaccaaccgacatccgtccttgacttgctccaggacgattcgaggcacggctcgatcggggctaactctgatgctgatgaagtgtcgaaaagggcctgcttcatagcaacgccaccacgaaatgtcaatggcgggggagacaaagaggccccaaacaagagaagtaccagtgctagcgccaagccgagatggccactatgcagcaagccgagatcgatcagtagttccccctcgggacgaaaagctatggtctacaaacgacctcatcttggagcaggcgggcacaaccttctcaatccacaaggacacgtgtccccatgaatgaccatatcgaaggcatccgcgatgcacggcacatcctta

SEQ ID NO: 87782 - DNA, 1091 bp, Zea Mays
ccgacagctcgtaccagaatgacttccttcatggagcggtttctgagacggactactgctctcagccttcagggttcaaggaccatgctcgtcctggctttgtctgtcgccggaatatctctctatggtatgaaacaggcataacgagcctagaacagtcgctttgctgctcacttcctgactctggggttcattgaggccaagtctaatgcctccttgtttgcctaccgcaatggaactgatacaatgtgcttgctcctctacatctactcctcccaactcgagttttatatgaaggatctaggccctcttcatcactttctcgagatgcatgttcaacgtcatggcgtagtctgttcctatcttagtgacaatacatggtagatgttcttgctcaggtcggcatgtccgactacaagccttgcatcatgcccgttgacactcaacctaaggttgctatagaggatcccaacaaccaccgcaacttggttggcgcactccagtacctgatgtttaccagttggacatatcttgtgcagtttaacagatttgtcttcacatgcatgatcctcaggcaccccatcctactgctccgaagcacatcctctagtacattcaaggcacccttgacctaggacttgttcttttggctatcttcgtaatctgacttggtggtgtattcatatgctaattaggctggttgtccagatacacgcagttctacttccggatatgtagtattccttggtgacaacctcgtttagcgatcctccaagcaacaagctaccatgtctcttttcagcactaaagtagaataccatgatgtggccaatactatcgtcgaggctacttggctgtgctagctatccttgagctccagtcgcgccccaccaccatgcaatccttgtctactatcacaacattagcacgatttacatcttcaccaacctcattcagcactagtacaccaagaacattgagattgatctacacttcgttcgtgtgtgtggctataggtgacatcaaggttctacatgttcccacaacatcacagtttgctgatatcttcaccaaagggctttcaagttcgg

SEQ ID NO: 87783 - DNA, 955 bp, Zea Mays
agaagctatatatgggtacagaaatgttgtatttgtgttatgactatggctggtataatgcatgcagtttctgattcgaaatatgttgttataacttaaaataccttaagctctttgttgtgaattggatccctaggcccctagggccacgagtcagagaaaatatagcgaagagcttacccaggtaaatccactcccagatgacccttgcgcaccgagccagggggtcaggcgagacagaggcaggtggacgggtcggacgaatcgctagggaaccactcgagtgggttccacgcatcctcttgccatatgtaccacgcacgttgcattaacgacgtatgatagcaaaacgcgacacgggtaaaagctagtctggtcccactcatgacccatgggccctagtcctaagccccactcatgatctagaggtcctagacctgagtcctctgcctatgaagccccacaagacgacgaaaggagatcaatggttaggctacaaagactgaaagttagcatgagaagaagcggataggaagagtaatgatgatgctcggacttccgtcgctagcacgctcccccaacagtcccaaaaacacaatagaagacccacatgggaatggatatcgacgtatgtcaaggtcttactgggggtgaaccgctctattttaccttatgtagcgctctcttcttggagaagctatctgtaaccgcccctccttgatctataaaaggggagggtcggtctcaaaggagaaggtccccgatgagagagaaaaacacaagggacatatgacctctagttagattagggacacctctagtcgaacaacacagagacatgattcttccctctctctctcacttgtaacccctactacaagtaattaggtgccagtagcgcgagtcatcaaaggctgaaagtagggacgttctgccagaactagtatgactcttg

SEQ ID NO: 87784 - DNA, 790 bp, Zea Mays
cggttccataaatataggtgtggcgatagtaatttgttgaaccccatgtaaatttaacctcgtcagatatataaggtgggttagggacccctacaaaacgattgaattctccgataggcataactatagcatagttctcatcaactttgtaatcgcaaactcaagggcaatcccatcttaggagcacacatgatatagggtattacacatcttggtagcccgatcatatatagatctttgagtcccgtcgtgctctgcacgaaccatcgagataattgtcgatctcgccaaccacaaaagtgttacatggtacatcctatagcgtcttgccgatgctaaacaccgatatccctagacatggcataagtaggagggaactccaagatgaaccacccatgtgtcttctcccaaggatgccacctcacagaaaggctcaaattgtccctctacaagatccaactaccactggttcggttaggacagaagtgatgggacattagggctagatgtgccaacaatgattagccttcaaagtataggagatgacttgcaactcataggctggagatgactcactccatcaattttctatgtaatccagctaccttctccctcatctatataagggggacatggcctcccacaaagggaaatccaatctttcactcagccaagattttagtagagacacaagcattagagcctaggctctgccttgtaacatggtcgaacatcaacaaagactttagcaccatactcgacgtaggggactccccgaactagtctaaat

SEQ ID NO: 87785 - DNA, 806 bp, Zea Mays
ttctctaggaattaaacaagttctaggattatttttacactagaaattcattttccttactcaattatttaattcccccgagttctggactgtacacattattatactaaagatcaggggttattttataaaaaaccagggcctcagcgtaaggatctttaaaccactcgggacggcggttgatattaagaaaacagaggggtccttaagtaagaatggcatggcgaaggggtatcgtgaattctaagccatccgatcagaatcctgtggtctagattagattcaggcttaaagagaaccggagcgtaatatgggccgcccgatcaagatccaacgcactagaccagaccccgaaccggtacgccatcctaaccattagatcgagatccgatggcccaaggtttatgaggtccgccgaccattaaatttagatgtagggtccagatttacttaaccaaaacggtactctatgtttaatcggaaccgtacgctacgcaatcgacggcaaggagcccttcttccccagaggaccaacctggcgacagcatagggcccgccacggcagcaacctcgccggcgaacggtgctccagcgatctggtgcccaacgacacgcactgataggtgctacgcgacacagaggaaacggaaaatcattctaccaagaccttaccgtcaaagatgttgcagagaagctggtccccgatgagcagccgctcgattggaagttcagagcttcgttgaggaattgcagaagccacggtcaccccaccaccacaccactgccagcgcaggcgtcgcccacga

SEQ ID NO: 87786 - DNA, 625 bp, Zea Mays
gccgagtatcatagatgcatactgtgctcgatcaactttttgccagaacaattgtgcattcaactgaatgccatgaacgaggcaggtaagtagtaagcccataactatagtggctagctagtttcttcatatacaatagcatgcgcaacgggacactatagctggtgaaaaagggtagatgtagaagaatgttgcctgctttcagagatgcttccagaaatgcatattgtgataagattgaaattaaatggcaaaacatttttcctatctaggaatgggatgcacggggaataggagaatagagctatcgagttcaacttggttttaccggttgggacacccaagcaagtcgtgagtgatcacaacacaacagcatgctcaaaagaggctctcgtatagaaccagcaaccagaaacaacactataagcaataatgataaacacgacctaccagcagccaccaagtattgcttgttgctagcctaactactagtctgggttaaagtgggttttatagtttggcctttactttgttaggggatagcacgaaagacgacaagggtctctcacagaaaacgggtaagagatgaaggtaatacaacaataaattcataactaaaataata

SEQ ID NO: 87787 - DNA, 503 bp, Zea Mays
cggtttaaactcgctagaggacaatgcgcgactacgcgcgcgatcctcacgacacgcgagaaaaactaaacagacgccacgcttacattaaacgaatattagtcgaaaacatctaagtcggcactaaccacataaccaagtattatcgcttgcatcgatagacttaacgcttagttctgattggcttactattcggttagtcatcatttaattacgtaaactaattaacgtgagcaattctaggcgaaatattaatcagcacgagcaattctaggtggagtggtttactaaagcgtgacgagacacgcaatgcctgagggcgatgtgcacactgcgcgctagatagcgcacacgatcacaaggatggacagcacgctcgacgcgtgcgaaagacacgcgaacaaacaatgggtgcgatagcgaaactatggacacgcagggcgggtggacacggctagatgagtttcgcctcgatgggctcacctcagacgacggcgaacgac

SEQ ID NO: 87788 - DNA, 393 bp, Zea Mays
ggctttctctgatccagcaattttgtgcatggtaggtggatacatcaaggtcaaaggtcaagttggatgtgatgaagccctggattgcccaagcggggtcactgagctacttgggtttgacgtatgtttctgatccatgcaggggtagttacatttttattgtttgatatgataatctaaaggcaagagcaagtatacatttcaataagcaagttaagtattagaggataaacttgttgtatttggtattttaggaatgatctcgttgacgtacttgtgcttttctatgtcttgctaaatttggagaaaattgttaagccatcatcgtaaatgaatttgcatgtgttacctatggaatctcaatgatgattttggttagggcctcagatctac

SEQ ID NO: 87789 - DNA, 489 bp, Zea Mays
cggaatagcacaataagtgcgcaaaatcgaagtcttctccaaaagactctccgtgcaaaaagtcgcctacgggtgcagccggaatagcacaataagtgcgcaaaatcgaagtcttctccaaaagactctctgtgcaaaagttgcctatgggtgcagccggaatagcacaataagtgcgcaaaattgaagtcttctccaatagactccccgtgtaaaagtcacctacgggtgcagccagactagcgcaataagtgcgcaaaatcgaagtcttctccaaaagactccccgagcaaaagtcgcctacgggtgcagccgggctagcataacaagcgcgcaaaatcgaagtattttccaaaaggttcggatcaacgaaggctcgcagtttcatataagttacggttacatacatacagcgagggcatcacactttacattggctcaaccttcgggatgatacccatctccctgtagttgaacaacattatcctc

SEQ ID NO: 87790 - DNA, 758 bp, Zea Mays
gtcgccgcggaactccgcccaaatctgtgctccgtcgtggaccgcggtccctatgtagcgatcgacggtaagacaagtcctatcgatttcgccttgctgtcctgtgcgtataacaccggtttttcacggggatttttgcgctagtgtgggtgatgaccatcctccggcggggcaccaccgctggtcgtgttcgcgtcgccgctctggaagtcgtggggtagaagaaggcgtctccactgtggatctcgaagctaagggccgagattaactcacgtagaaacgaactccggccttcggatcggtgatgaatggctcagattagaaatagaatgtccctttgtcgattgcatctgagtcgtcgatcgcatgatgtgcgatcgagatagtatttggtcgtggaagcctcggggccatcagatctcgatccgatggtctgtatcacgtgcgggttcgacttaatgtcgatctaatcctggccttcgatattggatcggacggctcaggtttgatcataccccttcgccttgacatttattctaaagatccccttggcttttctcaagtcaacccgccacccgagtcagtgttaagatcattacagagaagacctcggatttacaaaatgaaccccgaactcatgttaaaatgtgcctgcagtacacttattcgctggaattaataaaatagacctagaaaatgatttcttgtgtaaaggaaatactaaatgcttacaaaattcataacttctacgttttaac

SEQ ID NO: 87791 - DNA, 619 bp, Zea Mays
gaagaaactaatcctctcatgtttctgaaaaaactgaccaagaaatgtgtccctcatacaagcatgcatatgatacatgtctaactggaagtctagaatgaaaattagtatgatgaggtatgcattactactaacaagggaataatagcagctaggcttcatagtaaattatcacattacaacagttttggacaatgcacgtaaaacatcacattagtaccgtcatcgcatattcaaaatttgtataggtgtataacagatgtgatttggatttctctacatactacgtgtgcatccatgctgtcagaatttaacattcaaacacacagccaaaatatttctcatagaccatttatcacattcgagttcccctagtggtacattgaaccgaattttctccattattttgatgcagtaaatggacaaataatggttgcagagcttaacttcaatctttctcagtcatgtggccttattatgttgtcaatactaaaagattatggatgtgtttggtatgaggtcaaagtatggcatgcttgaggtgttaatcttaatacaaaaaaacattcagtggtgttacactgcccaaattatctctcatatatgctggtataaaggt

SEQ ID NO: 87792 - DNA, 314 bp, Zea Mays
cgggaagggcctatagtgtggtaatcgaagagttagtcaatatcccggtggtgcgagaatttttggatgtgttttcagaagagttgccaggtttgccgctagaacatgatgtggaattctctattgaactgaaatctagtacaactcctgtttctcggagatcatatagaatgcccccaaatgaactggcagagttgaagactcaattgcaagatttgttagaaaagggttttatttgacccagttccttaccatagggttgtcctgcaatttttgtgaaaaataaagatcaaaccctaaggatgtgtgttgac

SEQ ID NO: 87793 - DNA, 546 bp, Zea Mays
ggcgacggtggcgacggcaaagccagtggcataatgctgctggtttagatattagtatagatagcagtagtagtagtagtaagtagcagtaagtagtagtagattagagtagtattagtatagcgtagtgtaactagtagagtagtgtaatgtaatgactaggggtggaagaggccgactcataaagagtcggtttcaagtttgtgacgaactccccttatgaataaaaaatgcagttctttgcttatccattgttgcatgcttttatttgcacattaccagctcgttggcattttagaggtaatgcctgagtgacgattgtgatctccgcttttccgagttatgatctagcattttctgtgcctgacttatcgagccaactcatatttatgctgacgtatccccttgagttccgaacgctatctcttgcttttttcctctgtcgcttctctgttttctgagttcttgagcctgcccacttcgcttgagacactgcgatggcccacaagaggaagagacagagtgctgctgctccaatcattccgc

SEQ ID NO: 87794 - DNA, 488 bp, Zea Mays
cgaggatatatgcatgtcgcgatgtgcatggccctagcgcgcgtgtgcatgcatgcattcatggatcgatgacgagcaatggcagtgagagagccgtgtcgtcgtcgatgatggatggatcgatcgaggagtgacgcgtcaactttttatatgcatgcgtgttagctccagctttacgcgtgttttggcgtctctcgcgtggtgtatgtgcatgtagcgctcgtgctctcccgcgccaatggactactctagtctagcaggtctagcacgacgacgctatacaaaataatccccatgtggccgttgcaaggcgccttattatcttccaagaacactttctttacttgccttcgatgacctgtaccggtgaaactactatccacccaaaccctaacagcaccaagcacaattatcaaattcaaaatgtaatcgtgtaatagtgtaagacataagaacaaagcaaggatactcttacccatctccagttg

SEQ ID NO: 87795 - DNA, 391 bp, Zea Mays
ctggcggggagccgtaagtatagaaaagaagctgtagcaaattttccttgtcggtggcctagctgcatatcaagttatcaacgatgtcgtccaacgtccatgtccgcgagaccgcgaacagcagcccggagccggaggccaggatcctcctccatcctcagcggcggcgacgctcgtgctcctgatcgatgtgcatgcacatggcgcatgcgatgagactggatctcggacgagtcaaagggcatctgggagtgctgcgactgtacagggaggcaacatcgatccggacatccggtattttttgttagctaaccaactgtagtgtatatagataggtcatgtgatgagcacaagatctgatcgatctagccatctcgacacctatagctgc

SEQ ID NO: 87796 - DNA, 1633 bp, Zea Mays
ggaacgctcaccaaatcacctgatacacatcgagaaagagggtgggggaagtcctcatccattaagaatcctgacgacagcacggtgatgaccttgactggcgcttccattttagatagtgcgagcggcccagaggagtggtggtcaggatcattgatgccagaatactaatgcattggcccctagcgagccatcagaggttgaatttggtggtgcataaagacgtgcaccagtctcgcgctggtgagaccttgctacttcagcgtcttgagcgtcgtcagaagaggttccaccttgcccctcagactcggccttgcgccccacgattctagttgcccattgacaccggctcccgatcgatgaaacatggggcgttgtcggccgtattcctgacatagaaccactcgctctcataccacacggaggtagggagcgggatcttgaagtacccaaccttccagtcagattggagttggaagttgatcgaaccgacatacagttagtcgccacaacccaaggtcaccctaccactgaataagtactatcacaacttctagtggaggtcaatccctaggatcgcctcgcacggggtgatgaagcacaccatgtgcaagacagagttaggatggagcttctaaatctccatcccatagaagaatagcagcccctgcacgaaggggtgcagaggaagcccaaactcgcgctcctagaaaggcacgagcatgaccacctcatcatactgagggagcgggatgtcgccttccttcttcaatgtccactgtgagatccccttgggggaggaaccctttgttctctaggccaaggaggcgactatgttggatcgagcaagcgtggaacgatgccattggcatgaagctactaggacagatgcaacaaggcgagaaccaaagaaagaaggcaacgaacacacgggtgagaaggcacggttagtggaaccgactctaaatgcctccttgtcctttttatgcgtagaaatagggacacgaagcggcacctaaagggtgggcccccacggacaacacaggggatccgccacgtcggtattcccctagctaagggcgctgcaaggaagaatatacattttgtagggcttacgccactttagacgatacaatggggagtgcacggggagaaaaggtgtcagcgagggacagggcggttaaccacaccatcacgccaaccatacatgataaggtgagtaggttgtttcgcatcccattgagccgcccacgctgaacaacgccacaatgatttttttaccacatcaccaccacaactccctcgtacccgataaaaaccaaaaattcactccaactccccacgtacagcgaggggtgggctgagcaagttccctgtgagtcataaatcagatgacctacccataggtcatttgctcgttcccatggccaaggtcgtacctcacattctcctgcagcaacccgactggcggggtggccacggagcccctcttcggtcgaccaaactgaacggagggccaatacgagagagaataaggaaggactaaatgagatgcccccagtgggtcgagccccacagtgggactgctcaccaaaactaaaggtcagatctcatttggacaacccgtttgcag

SEQ ID NO: 87797 - DNA, 426 bp, Zea Mays
cctccaaaagaactttgttctttgcggatttgccgtggagttactgttccgatagaagacactcatgagtccgtcgtctatgttccctttcttatccgtggtctcactcttcccgtttctcgtttcttccgcggtctccttgacttttacaatctgaacttgacccacttgaaccctaattttatcttgcaagtttccatttttattcatctgtgtgaggcctatctcgggattcttccccatttcggcctttggaagtatctgtatcattgtcgggccgggatggctgggggacaacaccaacttgttggcggcgccagtctggaactacgtcgcaggaggaagtcagagtacctcgatatccctctgaaggatagcatcaaggggtggcgactcgagtggttcatcgtagagaatcactgcaag

SEQ ID NO: 87798 - DNA, 606 bp, Zea Mays
ctctgaaataggggaaacccccgatgaaagagcgctccgaaaacgccacaactcccgccattgtgatcatcgtcgtgcctaggaacgagagcgagaacaagctgaactggacaccaggctccaacgcgagaacccgcttctccctcggaacctattccctgactttgcccgagcactaaatacgttgagtgaggtcggaggggtcctggctcaaatcgccaatggcctaccgtgcaccctagacgcggagggctatcgactggtactcacccaagcgtcgaagcaccttctcccccttgctcatccatcgaatgatctacgccacaccatcaatagtcggggagacgcacagagcaacataaacacttcgtgtgatcactgacatgaggaagagatgaggcgacgagaagagtacgaatgggatcatggtgcgccggcacacagccatgacaccaggaccgagtcagcagtagcctccaccaatagtctggccccgggtcaatcgaggcgacacgacacccgacatcactcgcctccctgggaccaccgacatgatcatcaccgagaggaccgagggacgtgtggagtctccgcccttacccccag

SEQ ID NO: 87799 - DNA, 430 bp, Zea Mays
tggcatggtgaccccgacgacatgcggcacaagggcctagtcagtccgaagcttaaactcagtgggctcaggaccatcgtctttaacttctccctcttcttctcatcggccttgatatagaaccattcacttttccagctggttggccacttggtgtgatagctaagcaccggggccttcatatccttgcggtatgcgaagttgtaatagccaaagttttcatgcagcccgtcttctctggccttcgtctggtaatacagctcatgcactcggcagaaagcttcggcattcgggtccatttcttggcttcgaagagcccagatgaagacactaaacctaacgatagcgttagggatcaactgatgaagatagatctcataattatccaaaacttccccaatcatctcgttcaagggaaatcgcaaccccg

SEQ ID NO: 87800 - DNA, 481 bp, Zea Mays
aaaaaagttcctctggacgcctcagtaccaaatcagacaatgttaatcagtgaagacctcacccaagatagagaggctaagctattatcctgcctatatcgcaacaaggacgtcttcacttggtcggcctaaacctcgtcggcatcagccgctcaatcatcgagcatggtctaagcatagacccttcggtccggcccaaaaaacagaaactccgtaaaatgttagacgagaagaccgaagcagccaaggccaaagtacacagactgctcgaagctaagtttatcgaaccagtcgagtacccccctataatatcccaaaaaaatgttgaccaaaagttggttttcggtgcgtggatgagggaaagggttgtgggctgttggatgcaaagtcagaagtcatctaaggcgtcgtttctttctcccacaaaaccctaggtggccacccctttttcccttttccgcttcttggccgccacaccccc

SEQ ID NO: 87801 - DNA, 484 bp, Zea Mays
  misc_feature (413)..(484): n is a, c, g, or t
ctgtattgctatgaactgcaaaaaatgtcttatcctgtgtgtcatgatagtcttgactaggttgtgttatgtgcttctcttgtcttgctatctaggtggtattgcaattgtttaaccctttttgccaaaaaaaagtgttgcttgttttgcccataaaagaccccccactttaaacaacccagtggttagcaagtgaaacccttaaaaaatcaaatcacgtgcttgtgttggtattttctgacccttgagtgttttacccttgaatttacacttgcacagcttatagaccaccacaacttgaccgctagaccaacccaagtctccttgtgcacttgtacatcaaattattgttgtttggtgtctagttgcgcaatccctatcaaggccatgttcttacgaatctctagatccannnnnnnnnnnnnnnnnnnnnnnnnnnnnnnnnnnnnnnnnnnnnnnnnnnnnnnnnnnnnnnnnnnnnnnn

SEQ ID NO: 87802 - DNA, 665 bp, Zea Mays
atagtggatacattttttctcgaaccaccagaggcggggtatcaaggacaactctcatcacattcatcatccgacgtttcttctgagcgttgcaccccctggcgccaaaggatccttgattacctctgcttcggcaattctctcaacatttttcttttgtggctgtaataagcttgttagctctaatcctagaggacttagcttcgtgaaaggcaggggttcagtcattacctctagaatttctatcacgccaatggaagttgtcaaagggtctctgatgaatactttagcggagaaggtctctcttcttctccgcggctagaaggcgtaaacttccttttctttagcgccgaaggctctggtgtcaacttcggattctttgtcaaccttttcttcttgtccttctcaacagatcttcgcgcttgccttttcaagatactcacaacccttttcctttccaatccctagcttcttcgtcaagtctttcatagtcaggatactcgaagcccagggcatccatcacccgattcagccttcgtttctcgcgtgtaccgaaggcaacggtcatcagctagtcctctttcttagtgtaatttctgaggatttcgttacacattgtttcgatgacctctaaccattcagcacaaggtttgtcaaagcttttc

SEQ ID NO: 87803 - DNA, 524 bp, Zea Mays
atcacaaaatattatataagttttgaaatcaaactgggtgccattatcgactgttaaagttttggggactccaagacgataagatgatgcttaccacaagaatttttggatcattgacaaagttattgtagctagagatctagcctcaatctatttggtgaagtattctactaccaccatatcatatttaagattccccaatgctggtggcattggtcatcgtgtcccatctttgcagcggtcatgatggttgtattagctaggtgaatgacgaaggttgcttttgatctctgtcacatctttgataattgtcacaccttcgaacaagatcttttgccacatttggccaataggacccttgtcaaataacttagtcgagtagtgccttggcctaatgttggaaccacagatgcctaagtagatttgtttcatgagttcgtacccctcagatcaatgtaaagattttgaacaatggtgcatagatgtcttccttgcatagctccccttctatgagcttgtatggc

SEQ ID NO: 87804 - DNA, 458 bp, Zea Mays
gcttttgtaacagtggatgggctttactgctatgtcgtaatgccttacggtctgaagaacgccttgccaacatttgtgcgggcgatgagtaagactttcggggacctgatcagggaaagagtagaggcatacgtcgatgacatcatagtcaagactaagagaaggtcgacccaagtggaatacttaaccctagtcttcgacaagctgcgggcaacccgcacgaagctgaacccggacaagtgcatctttggtgtctccgcaggaaagttgctgggattcctgttttcacaccggggcattgaagcaaactcagagaagatcaaggcgatcgaggcgatgaggcctccggcccgtatcaaggacgtccagaagcttacggggtcattagccgcccttagccgcttcatttcgaggcaggctgagagggcactacctttcttcaagctgttgcagaagtc

SEQ ID NO: 87805 - DNA, 889 bp, Zea Mays
ccggaggggaggacaggatgtatgggatgacgataggcgagaatgggagattggatccacgagtgcttccatgccctgccgccttcagacctgctggacccagaatgtgcaatacaagtatgtagatgagtggatctttctaaaagtattatttttcaaatcaatccttccgtcctctctaaagattttcagaaagattatacaaactctatttattgcgttgatttttttacatcaataatttaggccgtctttgaaagcaaagcatttcaaaaccatagtttcagaatactatgattttaaaatgtcatgacagatctttctcatgtgtcccatccgctcgaaaggaaaaaaaaagtgagcggtatcatacgtccctcgatgatccagtttatagagattgatgagttacaaacgggtaatccgggtgaagccctggttcctttcgcaggagccaagcacggggttaactggtaaccgttctcatacttcatggtgccaactcatttactgcctccattcgattggggccaatggtatgctgcctctctccacgataaaccatgagtcaagcgtctcctaaaactcaaacgcgatctaggaacgtccttagcgctcgtgcactagggtcctagctgctagtgtgcccacttcccctcgctctattgtctcaggagcgaccgcgattcccattgggccaaccttcgaagccattgatgcttaccgggacacgctccttatcaggcggccaagcagtagcggatcagtcgttcttggttcgtttcctcgtccgctttcttaacaccaagccccttttcctacacagccatcgcttttccgaaatttttataaacactatccgtataattggttccatgcatctgccaag

SEQ ID NO: 87806 - DNA, 347 bp, Zea Mays
cttactcgcataatatgcaaaggcttgaatgccttcgtgggatggtttgagtcgaaacggtgaatgaatatgctgattgaataaagcgccgatgcacttgaaccattgtagtttttgctaagctcattaagccattagagcttgattatgaatgaaggcatcaacaaacagaacataattaactatttgtttagagagtgccagtgaatttcttgatgttaaagaattcaattcagcttcatcatatagtttaaatgtcaaaacaaaaggaattaatcctcacaggaaagttgtccagataacccctaaactaattttgtgttcttttttgcctctctagatgtttc

SEQ ID NO: 87807 - DNA, 1104 bp, Zea Mays
gagatcttatgcagaccaaagttgctgatttgcttaacattcaaaaaaattattggaaacaaagggtgtctatcaagtggattacttgaggggatatttgctcaagattttttcatgcacatgcaatgataaagcacaggcgaaatacagttgtctcgctgactgatgataatgggacaattcactcggagcatgatcacaaagcagattttttgtggactgctttcaagaatcggatggggtcttctgacttcataggaattgattttgacttggtcaatctattaacttcgcatgatggtctccaatggttagactcccccttcactaagcaagagattgatagcattattaaatcgctaccttcggacaaatcgtcaggtcctgatggttttaataccaattttgttaaaaaatgctgacatatcattgcacaagatttctatgacttatgcgacaagttttaccaagacgatgtttgcttaaaaagcgttaatgggtccttcatcatcctggtgccaaagaaggataatccacaaaaggtgggagattacaggtcgatattgctgctaaacaatagtatgaaaattctcacgaagctccttgcaaatcgtctacagacaaagatgccattgttagttcacaaaaatcggtatggcttcataaaagggagaatgatccaagactacttggcttgggcttacgaatacatccatttgtgccactcctctaaaaaggaaatcattgtccttaaacttgattttgagaaggctttcgacactttagagcatgagctaattttacaagtcctgattcataaaggatttggacccaaaaggcttaactggattagaaatatccttcaatctggcacttcctcggttttactcaatggagtcccagggaaaacatttcattgtaaaagaggggtcagacaaggagacccactttcaccatttttgtttgtcttggcggcagatcttcttcagagtattattaataaagccaggcatctaaacctgcttcagctacctctgccagacagatgtggacaggactttccaattgctcaatatgctgatgacactcttttgataatggaag

SEQ ID NO: 87808 - DNA, 380 bp, Zea Mays
ctgaccgaccaagtcccgcaaagtaactctacgaggcagagaagtgaaaggcccacgacaggagccagcacacctgtgggccccaacgccatgctctcctgtcacgcgcgcggaaggagcacactcgtactcaactgacgtggaggcaaggcagacactgttaccccatgccagccatgataaggcatgtcgccaccaaacactgtcttagatgacaccacgacaagccagagggatgacagaagatccctgataaacgggacagggcgtcgccacatatgaccctcggtgtcctctgactctacccatgggtcccaccggacatcgctacaggaaacctcagcgccggaattgctacaccgccataccgggcgtacgac

SEQ ID NO: 87809 - DNA, 729 bp, Zea Mays
ctcaaattctccgtgttttttttggtatttgcagattggaacatgagaggaaaagaactttaactcatggaaggaaaagatcatttttaatgcactaaacaaaagcattttatgctagtttagacagaatgcatcatcctccagtagatggttagacttatattctggcataatgtgcactaaacaagtgcctctatgacaatcgtgacttatgcatttttcaaatgatttttacaacatttcttgttatgttttacgctataattacctcaaatcacattttgttgcgtttcacaccaatttatgatacttcttgatgcgttttacgccaatcttatgatacttcttaatgtgttttatggcaacttcttaatcgtgtgatttttatgcctgaaatagtgggatcctttggttgttataacgttatcagtagtttacgctaagttatacacacttttacgcttttttgtgttcgtttttatgcaacatcgtgtgaagcgagatacacggcaactacctcaaatcgtaagcatgatttatgttgactgtaactgtcataaaaaatcatctcgttgaccattgtaacaatatttacgctatatctggcataattgacgctaaaacttgaggattttacgctcaaacatgggttgcccacacagtgtcctgtatgcaaatttttcgcatgcacaacaattttcagatctaaaaccgcacctgccataaaaa

SEQ ID NO: 87810 - DNA, 617 bp, Zea Mays
tatgtagcatatggattttcctctaagattttcctttgcaagccattaaattcacctctcatatttgatgcaccatcatatccttgtcctcttatcttcgaaattgataagttgtatttgtcaagaagagcaagcaaagatacctttagtgactcggatgtggtatcaatgacatgttgtagtgcaagaaatcgttccacaacctttccttgattattgacatacctacaataacaatatggaacaattttagatgcatacaaaataatgaaaaaggaaatacattaagaagtaagtactaacctcaacattaatgccatttgctcttttacggatatatcacgagactcatcaattagtatggagaaatgcttatcaccaagttctcccatgatcacatcagtgacctcttccgcacaacatcttgcaagatctttttgaatttttggagaaatcatttgacaattcaaaccaccacggttgaaagaatgtctcactaattcattatgttctttgtaccaatctatcatctctagaaaattacccttatttagagaggacgaggattcatcatgcccacgaaaagccatcccttgtcctataagaaacctcaagca

SEQ ID NO: 87811 - DNA, 1082 bp, Zea Mays
aaaataatatgacgacatggaactcccaatctttcaaatagtttgcatgagcaactcccaaatttattttatgtgcaccaataaacaactctttctctcatggacccatcatcaattgtaacaatctttgcactctcctgttgtgtaatatctacaacagagcaatggtctctagctgctatcacttcttgttgaaatagtttgaacaaattatgcgtgtagcaaatgcttccttgtttctccattggccatggtgtactaattagtggtgtgctatgaatactaatatgatccgcttttaactcttcatgacgttggcactccaaagttgtatcaaatctaagccaaaactcaacaaaactcaatttccgatggatgaaacgattgaagaatgaatttgagctttcagatcttgaagtagttcttaggactcctgctagaggtatatccataaaatatgctaggatccatgactcacgaatttgatacctatgtgccaaccattcattcctctccagactataaacaatcatgatagcattccatcgattctcaaattcttccggggtttctgaaccccatacacaaccattcaaatcattccaaaaatccttgttattgtttgttggatggccaactttctcagacatcttctccataatgtgccacatgcaaaatctatgagttgtatttggaaaaacagttctaattgctgatttcatactagcatcttcatcggtaatgataagtttaggagcttttccatccattgccaacagaaaagtttggaacaaccattcataagactcaatcttctcatttactatgaaagcacctccaaaaaagacactttgcatatgatgattcacgcctgtaaaaggtgcaaatatcatattgtattgattcgtactatatgttgcatcaaaagataccaaatcaccaaaatgagagtagttttttctgcttgtagcatcagcccaaaatatgtaaaccaacttgccatgctcatccacaacaaaatcatagaaaaatgcagcatttgcctctttcttccgctccatctgtgcaacaaataattgtgc

SEQ ID NO: 87812 - DNA, 383 bp, Zea Mays
ccaatacattccaatcaatatagaattgacggaacgattgaggtgaatactatagtatccaaacaagaccttggaacaagctccgtactacgctcagcatgcatcagctcagcgtccgaagactcggacaaaacaacagctatctgctgtccagtttatgactgacgaaactggagaacgagacatagctatccagtgagcagacaggttacatttgacacacagaaccttgtaggttgcgaagtcacatagacaatgcaatagtatgagccgggaagtctctggcgtacctcgtattgccattcgttgtgcagtgcccgtccatgtttttgctaattgtaaaaccacaggaaaacccacaaaaaaaggagatcaccattcac

SEQ ID NO: 87813 - DNA, 666 bp, Zea Mays
ccggaagggtgcacctgcgactagggcagggaagggacgccattctggggcctcgcccttcgcttttggaaacctctattctccctcgcccaccttggggtatcttccatccatccatcgaccctggggctggggctggggctcggggtcccctcccctcctccctcacccccggccggtcatacatgcagctgtgctgcggcagactcgcccgcacagtctctgcacagcgctatgactctgggagtgcaaggacctgctgctggccttttctttcgcttctgcatgctgctaggtgctagctactactccactgtccactgccttcttctttgcacgcccatccccttgccattcaatgtctcgggctcgatcgatcgcacagtagtcacgctcacgcaggcagaggcagtttttactggtactgtgctcagctgcgaggcagccgcaggagctcggctcagctagctctctcgcacgtgaaatgttattggagagttcttctagttctaggtgggttgcatggggtcaccaccaccggaagggcggcagaggcagcagctgtgtgggcagtggcagagttactgcaccggcagttgttaccgtttcactgttacattggccctgcagctggccggccatgcatcacttgtgtctgtgtccttg

SEQ ID NO: 87814 - DNA, 339 bp, Zea Mays
acctttttcattacatcaaatgttaatacaatgggtaggcgatgatgtagaacaagtacatgctgatgtatcggcctgtatcgctatggccgatgcccctgtgctctggacttatgagaccgctacatgtctcacaggagtagattttctgattatcagttcataagtatagataagaagggtttcattcctgtaatgctagagccgatggagaatcggctaaatcctaaataaagtttaaatgatgagtacacacaaaattcatgagtccttggtcacggacagtttggcttctgaggccggatagtctggtctttcataaagcagttcggtctttaa

SEQ ID NO: 87815 - DNA, 822 bp, Zea Mays
gattccatatatggcgaagtggttctaaaaataaaaaaatatgttcaaatgttgaatcatttgtctcccaaaaatctcccagacggaaccaaacactatcttagtacctcatggggcttgtacctaaaatagttgtcacttttcagttaaagaaagctttattgatttcaggtaataattaaatcaaaattaaacaatcactctaagatcatttcttgaccactacatagttagggtgcagaaaaacgataattattaaagaataacactactaagtgatgcacctctatcaatgtcagtttcaaaagtaattggataggcacaacaataattggattcagatatgtggcactaagcatttgatctttaattcttggagcacatcaacatgaggacatgtctaacatcaagtcagtgaaaacaacaaatcaaccaagtaacaatgaagaacataaaggcagtaacaacagggtgtcaagatcatcaagtcagggaacaaggcatggtagtaacagtaggggtgtcaagaaaaacaagtaacatgtatcaacaacataacaacaagtgattgtactccaagaaaccatcatttctgttcattgtcatcaaagttttttgttccaacaatttaaggcaacaatcatagatatcaggaaaatactatttcatcacataattgtgtgccaaaaggatgtttagaagattacataaaccatcatagttcatgatgccactatccccacacatcacatggtatgaccaagccatatgacatacaaaatcagcaggtgtattagaaccacctaaattagcaccatattg

SEQ ID NO: 87816 - DNA, 1219 bp, Zea Mays
tgcaatagtctgttgctaattgaaaaacattttatattttattacttgattcaagattttagcatcttcttcgcagtgcatatacagacggcctaatgagtgtaaggaacgccataaacttctcacggataaaagttgtggcgacggtgctgacagcgctgatgactcaggctcatctcaacactatccttctgcattgcctgggattccaaaggttaattccattattctttcatctatttcacttctcagcttgtatatggaaatgattttttttggaagattacgattctagattttcggtcaagtggcttctatctgctgcatctttcccaaaaatattatggcgattatagaaaggaaatgaatttttttcttcaacaatgcaacacactctgatctaaattataagatgttttggctctagatacattgctttttattacgtatatagacatagtgtagaaagatagatgagaaacaccacatacccttatgtgtgtgtggggtgaccatatatatagggccaatatggcttcgagtacaatgcaagccaacatggcttggagtacaatctctaacactcgcccgcagtgcacgggagaatcatggacacatactagattaaaactcagtaaacaactgaacaagcaagcccttggtcatgatatcggtgaaatagtgagaggacaacacgtggagcacctaaacttgtcccaatgtgacctcatggatgaagtctatgtcaatcaatatgctttgtgcggtgatgatgcactagattgaccatcatatatacaacactcacattatcacaatacacaatggtcgtcgaaagaatggagatgtgaagtttctatattagttgccttaactagtatgggtgatggtacgataatctgctttggcactggagcgggagagtcgtctggcgttttgagggccaagagacgagattatcaccaaggtagtcacaataaccggaggtaaaatgtcggggatcaggacaaccagctgagtttgcatttgtgtaagcagtcaaggtctagatcgggccaatgacgatgtgaaggccataggacaacatgcccttgatgtaccagaggatacacttaatcaacacaagacggggctcatagggatcattcatatagaaacaaacctgttgtacaacatacgccaagtcgagccgagtaagtgtaagatactacaaagcgac

SEQ ID NO: 87817 - DNA, 446 bp, Zea Mays
aacatctagaaaggaaaggaggtggcctcctacgaggttggtatgagcaaaacttgcaagaggtcgctcgatcgagaggactcaccccataaggggcagtggcaagggtcgaaggcccttttcagtggcacttagcattggatccagtaagtgggttcccttgttgctactttattctttcttccctacataggctacatcattgtatttattttcttagtcatgtgacattggtccctacaatgggtagccaggactgggcatcatccactggccctacttagcaatggtcatagggtcctactataggcggtggtgaccagatgccccatcgccaagcatcgtgaggcctggtcaagccgggttcgagtaagcccctgaggtctaggtgatgacaaggcatgcccaatctccaccctatccatcgacgtcgtcttcaaccccaa

SEQ ID NO: 87818 - DNA, 777 bp, Zea Mays
cctcaaggatagcatcaaggggtggcgcctcgagtggttcattgtggagaaccactacaagtccctaccccgtcggtcggggaggcagccagatgtccgtactccaagctgggtagaatctccgaccccctcagagataacggaggccaaagtactgcttgtcgaggtctgcttgctgaaagacagaggtctgactgctgaagctgtggtcgctgatttcgtcttcaagaatatttagccttgaaggatagggcgtacccagcttatctgtacagtggcatcaatgactctactcgggttacaaacaagagaatccccactgatgatctggtgagccaactggatatgatcctgagggacagagtgtcaaatgctggtgctcctgttgcctattctgcctggaacctgccaccacataggtcattttccgagtttgtgtctaatcctcctgctcatgatgatagcctgggtcttagagtgcgaccctcttctgaggatattgaggccctgattgccccacttcagagccttcctgaggatgagaggtagactcactttgagatgtctactagcactgacgacacggagatatatgttgtgcttagtttactggctagggaatcgtccgactcaacccatgccgagccaatggctatcacagatgggcaagaacttggtgaggtggtgaaggctcggaagcctaaaggtgctcgcccaaagcgtccacgccgagttagccgcccgactgcacctgttggggaaaagaagaagaggcgg

SEQ ID NO: 87819 - DNA, 621 bp, Zea Mays
ttgatttgcctcctaatcgacacactcagaggatatatagacaacctcagccacagctagcagagatgaatcctcctaatcctccaccaggcggtgttgatccactgattgcagctcagatgagggtgatgcagcaaatggcggacaccatggctgatatgcgtgcccagatgcagcaagaacgccaggagatgcgttaggaaagagaagagatacgccaagagttgcgccaggagagagaagaagtacgccaggagagaagggcgcagcaacagcgcaacagcaatttcagcaacagcagcagcaacaacaagtaccattgcctccaccaccaccactagttccacctcgtgataagcaccaggagtttatgagtcataagccaccgaccttcgccagttcgccagatccacttgatgcagatgattggttgaagtcaattgagaagatgctcaacatcgcccaatgctcagactgggagaaagttctttatgcctcaggttgtctgacaggtcctgctgctgactggtgggattcttatactgctgcccacgatgcttctgacactattacttgggcagagttcagtacacagttcaggaactaccatattccagctgg

SEQ ID NO: 87820 - DNA, 1064 bp, Zea Mays
acgcggtcgtggagctggagatgtcagcggagtgcttgcagaaggccgttccgtctttcgacatctggaccgtgcaatctatgatgtcggcggcatctttgatcgcctgctggtaggcaagatctgtgctgccgggaaacacgccgctcgcgccattgtgggtgatgatcagcggcctggtgtcctctaaatttgtgcaagggaataagcactcagcagcggcgatgatgataatgaacctacaaatggcatcgtgatggtacaaacaattcatagttgagcttacttccaggaggcggtagaggattgcccttggaatgagccaagcaagctggaaaaaaaatcatccacatgttttagaaaaaaaaaaacattcgggttttagctccttccaattccaacattgagcagtccttaccaacagctcctgatgcggtggacgggaagtccgtgagcacaccgtccacagagaagtctggattgtccatgaactgcaagtactcttcactgggatcgtagctgtagttgtagctcaagacgatatcattggcaaatccggatgcatacacctccagcccgagggcatgagcatctttgaccagactggtggatggcgccaggtactgatcctttttcagcggccagatgtatgtcttgggcacaagaatcccagccgcgaatgccttgatggatttcagatctttcaggagttccccatatgtcttcttggtcgaaggctcctcgacgttttcattgaggaaccggaagatgagctttgtcttggctttcttgagcttcccagccaagcttttcaggaattcaacctccggggaggagatgtaagagaggctatcttttggcagttctaatatataatcttcgctacttaatttgtgctccaaaaagaacgaattgtactgcaaaagtgaacacgttggggcaaaagaagaagaagagggaaggctcgtgaactgactggaatcacatttacctgtacattaagccatatttgaggggggtggagttcaacaacatcatcaagcgtgtacatccccaaggagtca

SEQ ID NO: 87821 - DNA, 502 bp, Zea Mays
gaaggttttgatcttgcataaaatagaaataggttcttcatagcagcaactaactcatcaagacgaacatcatagtagtcaccatagaactttttcatgtagaattcagcaagcttcttcttatacctaggatcaagaaagcatgctagtgcaagactcaaactagaacaactccaatatttctcaaacttgtcactcatagatattgccattgttctaattgtcaaatcttcatccacacaccattcatcaagcagttcctttatttcacagaaacctctatataatagatttgcagttggatataaagttccgaacagtaactcggtaagatcataaaaattttgcaagcactggaaaacttttgcagccatgccccattcactatcagaaggacaaatgttgttatacttttgacggtttgctgttttagcctaatgaaagctgctttgtagtgcaaggcatccctaagcatcaaataggttgaattccacctagttga

SEQ ID NO: 87822 - DNA, 750 bp, Zea Mays
cattgtagcatatgggaggtgtgcttcgtatatagtacaacaacgataagctaaaagtagttcgacccctgctaacatgcagagatgcaattttctcctcctttgtgctacaaaagaaaggtgtagagcaacataaaaaggttcgttcattctgtcttcggttcacgttgggttagaatataccaagagccctcgccttagtctaagctctctagctcagctcaacagtacacttaacaaaaggcggctagggctctccttattcaccagctcagacatctttaaagcatgtaatccttgcaaacacttttgcatctaatcaccaaccatacaaaagatgtagggtatcacactcatgcagctcaaaccaatctacattgtgcttgtgtttacaaccatatcgatgtcctaatacaatggtcccagtcctacattcctctctctccctctcattttctcttgtacctttttgtactatggtgtcgcataaccgtgacatttgacacaccacgttgggtgttgcgtgctttgctgtgttgcatcgacaatggcttcatcagcgcaactagtcgatgaaacgatggcctttgacactggctccaacaatactaaccatgtactaggtcatgagcagcataccggtcttgcttgatatatctctccgctacgttaggcgaagctaaggtcgggtcaggttgaccaacctcttcctccattacccaaacaacttcctttgtcggtctagttcga

SEQ ID NO: 87823 - DNA, 671 bp, Zea Mays
agaatgaccctgtctccgatgacaaaccaaccgtgcatggggaggagcccctgcagcgcgaggtgcgttgatagcggaacttttgccgcaacttccgtcattaccacgtcactggcgaacaagacctgactcagcctatttcctgggacaaggcgtccaatgtcagggagactccaaccaaacgagattttttcctataaaggagcgcatgccatcggagtcatcatatcacccaggagcgtgaacgtgaagtggtcgggcgtaaagctaggcccccacgtgagcatcttacctcttcctcgcaacctgtagcctgagttcacctaggccgtgcagactctgagtcaggttggtgacgtgctggcttagatggcgaacgatctaccttgcatgcctgacaacgagggttaccgatagatcctcactcgaacggtaaaccacctccttccaccagctcatccagatgacgaaattcaccatcatatcaatagccgacgcgataggcgaaccagcatcgaggcatcacacgcccgacaacatgaagaagaaatgaggcaccgagaggggtacgatcgggaccacggcgccccgagccgtgggtcgagcggacttcgttgttgctttgacaaacaggacgacaccacgctagtcggctcgtgaccggcttgggg

SEQ ID NO: 87824 - DNA, 651 bp, Zea Mays
cttcacgaataggtttatattggtgagtatgagtgaattgtgtgcttggtttgaatttaggcgaagaaaatgagatttgggcactcggctcggaaacgatagctcgaaacggggaatttggtgaaattaaagcctggaatatcagatgggcgtgaaattttgcgaatatgttactggaggtgttttgaaggtgcctgaaaaatttgggttcaattggagcatttttggctggtttgggcatttcaccgagcatgtggtgtgcgagaatttagggttttggagaaatggctatttgaggctgtgaaaccctccctaaggagctagaaacctgcaggagtactcaaggaacataaagggactcaatcatgtacttggattcatgggatttgatagaaattggaatttgaatcaaatggtggaaaggtttgagtgagagctccagtcagggaagaacacacagagagagagggatagggaagtctcaccagagaagagggcaagattgggcactggttcaccgaaggatctctgccggtgagggaggggtcgccggagagcagggagtgtcgccagagacagagagagacagtggccagagaggaaacaaagcctggcctcgggctcgggcgaggaaaagtttttttaaaaccg

SEQ ID NO: 87825 - DNA, 913 bp, Zea Mays
aattatgcattcaaaatttctatcagggtgccaatttctattcctttgttgaaatattctacaagaagttggcaggatgcaagtttgtttcagtttttcaatttggcaacaacaacaaatgcacttacaggtgttgggggaaaattagaagttacacatactctggttacttggttggactgcaacctgacctcaatacaagtaccggtacttctgagtggcaatctgatctcaatctttgtcttggatagagtgcatctgatgatcgtgttcaaggtatcacattgcaatcatgagcttcgtttgatgctgacctctattggaataacatacctagtcggttgtgatcaatatttgacatggaccattggcctgctaattccttgggatcctggcagagtggcgctagacctccagatgctacatgcctggtgttacaacctgtcaacggtgtgtcacctttccttctgtccaagtgcaagagaaagaaggctttgtccgtcgatgttgcatttgtgtttgcatcacaaaggattctccacgtagttcattcagttatgtggatcatgctcatctggttgagaagcatcaggtgcttgcaattttcctaggatcctgatggaagtaatgctacacatcggcttgagggcaagccgaatttcaagaaagggggaatgttatggactgccggcccaatagtccatggtccagcccaactatatgatggtttgtgctacaaagaagcaaggaaggagaggaacgaggcatcaaagaattattacagaaacatacactatctagtctctacttctcgacgactactgttcatcttctccacccctctcctctcatgtatccagatctcttttccttctagatcactatggctctgtttggcgcagcttatttttag

SEQ ID NO: 87826 - DNA, 580 bp, Zea Mays
tagagtattgctcgcttcaaatttcgttggagctccccgtttcagatgttgtgatcgatcaggtctcggtgaagctgaattccaatctgatttgtgtggtatgttcgatcccgttcccaggtctggctttgcttggtgcagagtgtgtcgttgtgctgttccttttgagcgtttgaagctgaggaactcgatgggaaaaggtggaagtggccccgacccatgggctcttgtataggaatgttgatgtgtgtggtgtcaatggattgagggtggaggatttagggtttttgagagatttcattgggagttcctctttcccccatctcgacgcttccctttcgtcgttctggaatatcccaacttcctctctatctagtttctgtggtgggtggtttcatcctccttcctctaggaggagcgaccgaaggtgggatctatgggtgtgcgggttggaaaggtgtctgtgaagttggattagagaaactggaatcaaaagtgggaaaggaaaggcccaaatgcattcaccctcaagatgttgcgctgtgggggacgaatcacaatctgagttggcggctcaaac

SEQ ID NO: 87827 - DNA, 302 bp, Zea Mays
atggatacatgatcaatttctggcctacgatgtgcatttttgttgatcatagaactgatagcattcgtagcatcatatgatttgatcaacattagcagctactattttggctaataaaaacccctatcagaaggtatcactaaccaaagaccgtggggctacgtgatggccataaacactcaattagatattaccaacccttattcctatgctacagatcatgggaggattctagaggtgcacttaatttgtatggttcataaacaactacaaaaaacatattgcacaccatgacagtgacc

SEQ ID NO: 87828 - DNA, 802 bp, Zea Mays
ggagggggttggcccccagactcgagaggttctttctttctttcgagtggacaactcaaggacggacgcagatgagacgacgctcagaagaccaacgaacaagaggaggacccggagaccggagctccacctccaagccaaggcttagataggactccaccttgtaaccacctccaccacgaataagagacttgggagcctctcatccctctttcgcctacttgtagcctttactatgagctttgatcattaatggtgctggtagtacaaaccacagatgactggatgtagggacattctgtccgaaccattataaatctcgccaacagcgcacaccgtccacatcccggaacacgcacaatacatttacttatcagagcgaggttcaaaacaccgacacctccttcttgtgtttgagagccatggtaaaatttccctaagtaggagacaatttggcaatgatgcccccaaccacgaacttgttaggcaagacatagtcaatgtgagcaagttccccgaccagaagctgattccatgagcccgttccacgacagaacgatcatccaccatcatgtcctcatggtactggtcattaacataaagttcacgtccaacatctaattttgtatacttccggtctagggcctcccataattcaccggcatatagctcgggttttagtgcatctgaaggtctagtcatgagaggaagaactagggaaatcacccatgagatccttaacgacacgagccagaacttaaccctagcttgccatctcttaaaattttcaccggcatatcgc

SEQ ID NO: 87829 - DNA, 944 bp, Zea Mays
aaaaaacaatcgtggagggacatgacttcgtagcctgctgcagagtcaacaattttttcgatgcaggggagcagaaactcatctttggggtaggctttatttaagctagtgaaatcaatgcacatgcgccacttgtcgtttttctttttcgccatgcaacgtttgcgagccaggcggggtactcaattggtttaatgaattttgcatccaggagccgctggaccttggctttggctgtctttgtcttctcgtctgacattttgcggaggtggtgcttcttgtggcggacggaggggttgatgtgcagtctgtgctcgatgatactttggctaactccaaccaggtcgaatgataaccaggcaaagacgtcattatttcgacgtaggcagtcgagcaagctggcctcctcctgcagggctaagccttcgccgattaacacaacatgattgggtagggccgtgtcgaggggtaatttcttagccccctcgtcgctttggatcgggttctgttgtctgtcagtcttcgctgatgtatctagattgtgggctggtgtgtgggcatccaagcaatggacattccgctgcccgaggatgaggtctctttctatgttacaggccacttgttgatcgccgaaaattgtaatgactatgttgggtcctaggatcttcatgcataagtacaacctatgaattgccgcctcgaaggcattgatagctcccctgcctatgattgcattgtatgggtatatcatgtcgatgacatcgaaggtgatgtgctttgttcgtgcatttatgccagtgccaaaggacggtggtaggacgacttttccgaggggtaagtgccactgcattaatctaagtccaaagctctctgcataaaaccctatctataatgtgcgtaagatttcaaaataaatcaccacaatagcatacattggccacaat

SEQ ID NO: 87830 - DNA, 1040 bp, Zea Mays
gaaaagcagttcaacagggggccagttcaactgggtttgaggctagttcaaccaagattcacttattcaactgcgaacttaattgaaactgcttagatctactaataatacacacaattgaagatttgaattaaaaccaactaagcagatcaaagatctgatatgatgagagacaaaatcatacccacaaaagcacatgagacacaatatttttaccaaggttcagtcacaccaccaaggtgccctactcctcgttgaggtgcccacaaagggccagatctttctcaaccctattcctcgttgccggccacacatgtcaaggcgatctcttcctcaatttgcccacaaagattcgatgatacaaaacgttcttgggaccgtccacaactttagagactcctaaggcaagattacaagcacacaataaacaacacgttccaagaataaagagatcgcaaggaggaacaatttgcaccaactataaaaagcgacagagaccaaagaactcatgtcaaaatcgcactttagatcaagaacttatctcacaccaaagaatcttcccaccgatctgaggggggaggacttggggcgtgagatcagagttgtaatgcttggaaatgaaggagagcagtcgtcacagggtttaggctcgagagccttagtgtttagaagaggggagaaaggtatatatagccgccacgaaaaatatgtagctatttttgggcgactgcgcaatttatggttgaaccagccctgatcctggttgaaccgatattcaacagagaactctttgtaaattcccggttcaacctgaaatcaaaattctggttgaacctagattttccagagactaacttgaagaattttggatcgtcatttataagagaaatgaaattttgaaagggaaggagggaaaaaccaaactatgactttgcaacttttcaaaacatgaattttgaagcagatagaattagttggtgcataccattcttacctcgcgaaagaactaagcatgcggagatccctattactaagattag

SEQ ID NO: 87831 - DNA, 289 bp, Zea Mays
caagtttttagatgactacgcaagtgagttgtgccagatttactatctccaacaaaatgctttttacaccaattgcattcagcttttaatttgcctcctactgtcacttgttcaaactctagccatacatcagatttgagctttcttttgcttccaacagttacattagcatcttccccagctacaaccacattatctgtacctccatctataggtgttggagtaccagcagcagcagcacttgaggacggtgtcggagtatcagtcgcaacaccagcacttgttggag

SEQ ID NO: 87832 - DNA, 596 bp, Zea Mays
gtgatagtggtctgggtcttagagtgcgaccctctctcgaagatattgaggtcttgcttgcttctctttgtgaccttcccaatgatgagaggcaagttcattttgagatgctagcgagtccagatgatgcagaaatgaatgttgtgctcgacatgttggctggggaatcttctgactcggcccctactgaaacaatggctgttgcagttataccagagcttgacaaagcagcggacggccaaaagcctgagggtactcgcccaaagcgtctttgccaggtcagtcgtccggctgcgcctgctgaagagaagaagaagaaaatgagacggcttcggcgattgtcatgcttgaaccaggatgttggcccttctgcccctattgctgaaaaagtaccggcagaggtctttactggagttgatcccactagtggtgtgcctgttgaggttgaccccaatgggtgtgaccgtgcgccggctgaccccaatgggtgtgttcctgttgaagctgaccctaatgggtgtgatcctgttgaaggtgaccccaatgggtgtgatcctattgaagctaaccccaatgggtgtgatcctgttgaagct

SEQ ID NO: 87833 - DNA, 435 bp, Zea Mays
tgaagcaaccactagaggaactgggaagggcagggaaacgagtaccaggggcactcggctgattggtaggagcgggggcagaagtgggacgaataaatacgggttgcatgaatggatatgaaggtgggcgaggcgaagaacgatttggattgaaaggtcggatcaccaaccttgttctcttttcaggtccttgagtagatttctcacccgcatatccctttgactttccatgtcccgcattttttgcttcgactgccaatgttgtactgacagccctgctgtatgtgaggtccaaacatgttgccatcttccgctgaagtctgtcatttagtcccctcataaaacatttttctttttcagatctgtatccacgtgatcaatggcgtactgggagaggtggttgaatttattgagatactgcatcacagtatctcc

SEQ ID NO: 87834 - DNA, 372 bp, Zea Mays
ttgaggagatggaattgaatgctcaaggcaaaggtataacaataggtttttgttttaccggtcaagaggttcttaaagattgataattgaccgggttagtaggctagatagccgtactatcaagaggggtcaattatcttacttgacatgtctttagtgcctcattgctcatatagttggtgcatttgcatgagggctaacatcgttttggttaatgaaagaaaaacttattcaaaagcgattttttgaatgtgggctgaattgaggtaccgcggaccgtccgggccagcatggcggattgtccgcaggtcttacttgaggtgatggatagaaacctagagtttctgtgtttcgtgaagtttttgtactatg

SEQ ID NO: 87835 - DNA, 945 bp, Zea Mays
gtccggctgcacccttaagcgacttttgcacggagagtcttttggaaaagacttcgattttgcgcacttattgtgctagtccggctgcacccttaggtgacttttgcacggagagtcttttggaaaagacttcgattttgtgcacttattgtgctagtccggctgcatccttaggctgcttttgcacggagtgtcgcacgcgagggtggccagcgctgcccctcgcggtgacttcgatgtggtcgaatgccgaagaccgtcgatgcagtctttttcgacattgtcttaatttttgcgggggatttttgcgtgtatattacatggctccgcctcattaaaaacctcacccccgggaggaaaagagtgcgggctggaatgatactgtttggtgaattacaagggcgtgttagccctgaggattcaaacaaaaaatttgcggagattatcaatattccaggaatgctctaggtcttcgccggatggcgttattagcctgtacgcactgggggacgccttcgtcttaacgatgaagggaccctcccactttggctccagcttgccccgtgactctgtccgagttgtccggacgagtacgaggtccccttcgttgaattctcttgggacgactgtgtggtcgcgccatgcttttgtttgagcttggtatttgttgagggcctgcagggcgaagacacggtctccgtcgatgaggtccttggaagttggttcgtctacgtcggggacggctgaagtgcttgcccgcggtgacccatgttttatttcctgcggggtcatggcctccgatccatatagcaggcggaagggagtgaacccagtcgcccggcactcggtcgtgtttagtgcccagtctgcttcaggtagcaggtcggcccatttacccttcttgtcgtcgagaagcattttcttgatggccgtgaatattttgcc

SEQ ID NO: 87836 - DNA, 398 bp, Zea Mays
cccctttgcataacatagagattgttggtgttctcgagtcaaacaatcactgacgaaatcgttgaaggaagtgcaggaggaaattcccatactcttcatcatctttgggcttaagcccctcttgaaactagcaatcttcatggccttagtgtccacatagttaggcgcgtaatgagacaagctgttgaaagcatgcagatactctgttactgattgtgcgccctgagttaatctcataaacttcgacaccttcattgccattagacccggtggaatataatttcctctaaaagctgcggtgaattggtaccaagcaatgggagcattctcaaggtaagcggtgcggaaatgagaccaccacatccctgcaggtccctacaactaatgcgctgcatact

SEQ ID NO: 87837 - DNA, 311 bp, Zea Mays
gttgagatccctcggtttgggaataatgccaacaacccaagtgaggcccctgctccagctgatgatgccccaaaacaaatgaagcaaacttatgttaggcgtaatacaaagcgggctacaggtcgtggaaaaaagatactgattttattggaaacccaggcaacgatggtgacttcatgtctgtccccaagaagacccgacaagtcagatttgctaagaatccaatgcctccacagcgacaatcgccacacagccctgacgcttcttcaccaaaacaaccaaagccaataaatcttgatgaagattcggat

SEQ ID NO: 87838 - DNA, 409 bp, Zea Mays
tgcagccggactaccacaagtacgcgatacgaagtctctcatttaaaagagaccaacaggccacattacaatacaagtcgcagttacttacactcagcgaagggtcactagacccaccgcacaaataaacacaactatgccctccatcaccgctgggcaaagtgagggcaccatacactacatcggctcaactttcgggatgatgcccgcctccctataattgaacaacattattttcaattcctcaccctaaaaaagcttccacagatccccctcatcaatgctcatcccaatcggcgaagacagtagctctcgtttcccaaaccgatctactcgacgacggtcccgctccatccccagccactggcgccgaccacttcgcgaaaactcaccaacgctatgcttcgac

SEQ ID NO: 87839 - DNA, 400 bp, Zea Mays
tcctcctgaagtactcgattcagaggatttgccacggtaggggtggtggcgctggtgttgtgacttggcccgcttgtgggctggacccccagtgttgcccctcctcgtgtcctggccacgaggctgatcaacacccgaagacttctatgactccatggtgtactggcgttgcatctccacacccaatgcatgctctactatagtacgaaaatccaccaacggaaaggcgcccagagcatgcctgatagaaggtttcaggccctgatggaactggttcaccttctccaactcattgtaagccacatgaggaacaaagcggaccatcttgttaaagcccacatcatactatgtgacatacttcttctcttgcttgaaagactgtaaatcaatcttcattttc

SEQ ID NO: 87840 - DNA, 589 bp, Zea Mays
catgactctcctaaacctaagaagaaaaaggatctgagggatgaatacatgaaacggattgtcgatgctttcgagtccaggaccttgagctcttacaagtccataacctcctttgacaacgaccccgtgcgtaaagaggttgctgcttaattagaacaagtcatcgaagatggtgcaacggaaggaagcgacttacatttctttatgactcatctattaatggaaaaatgttatagagatgtatttgctaccctaaataccaaagaaggaaggaacgcttggctgcgccgtgcttacgagaagactgagaagtctagttaggtgtttgcgttatcatgagtgccattgtttcacagttgtcggtcggattcctgttagtcgtcctgttatgctacaaactgtcagtcgtatgagtttttttcgtcgtccagtgctgttacaaacaatcagtcgtatgagtcttattttttccgtcgaagaagtatttcaattattcgagttcaagtactatttacaataataacagttgtatgcctgagaactatgtaattgtgtcaaccatgttggacttatgataaatgtacaactg

SEQ ID NO: 87841 - DNA, 368 bp, Zea Mays
gaaggccatgattagagccaatgtgtatgaaggcgaagatataaccattgcacattacatggctgggttacactgcaacattcagcgtattgttgagtttcagtcgtaccaaagtcttattgatttagtacatcaagccaccaaagctgaatgccagttgcaacaagatgttaagagcatcaagcccttgtcatatggtgcacgaaccatgactcgaggaagcaaatcaatctcaaggtttactgctgcatccttagcgacaaaaggttcaactagaggcttgcgatccaatattcaaggcaattctagtggaaagaatggtgctactccaaacacgagttataaaccagcatcatccacttcaacat

SEQ ID NO: 87842 - DNA, 684 bp, Zea Mays
tagttccaggccaccctcgaggcctctcgacttcaattcggcttctatcacccagctccagaggacatagttccagtgccagctctaatataagatatcagggttgcggatgaggccataagacagttcgaggatcatagatacttcttcttctgatgatgaggatctgggaattccgccaccacctccggtgccacctcgttcccacgatcatgaggctggtagctccagtgctgctccagctgcccctccagctattgaccctactttggatgctattcttcagtcgctcactcagcagcaggctcatttggtcgtagagcagcccaagcaggcaaccatttagcagtagatgtccgagaggatgctattgatgttttagactattcaggaccgctaggacaccctacaacatcaactcctagcatacatggctaaggaccaagcgttcatgactcatattctccagcataccggtgttcaggtccctccagtgcagtctactctttaggttgccgttgtgccaggtcttcagtcacgacccctcctccactcttttggtccttctatctttccgctcaggccggtcaccttggatttctcgacccaggtcgtcggacctgtcagtgctcagccaccagtgccaccagcgtctgctattaccactatcgccgtggttgtttc

SEQ ID NO: 87843 - DNA, 595 bp, Zea Mays
aatattggcaagcctatcattggcaaaagatttagaatccaactcgttaggcgataagcaagtaaactccgcctttttatcgagttcatcaatcagttttaaaagttgttgtttctccttttttactaaccccgctgagttctttgcccacccccttaaatattgtcgaagggacctaatcttgttttgccatatctgaatggcggtttcacctctcttttcttgttgccaaatgaaagaaaccatataaaaaaatccctctctaatgaaccatcctaactcaaatttaaactcagagaaattccctaggttcgtcggggctttaccattcagtaataaaggtgtatgatcagaccgagatctatcaagcgccttcactgagacgttagggaatttaagttcccactccgggctcattaaaaccctatcaagcttctcaaacgtgggtggattcaaatcatttgcccaagtaaattgacgtcccgccatatcaatttcgcgcaattctaaatttgctatgatactattaaacaaattaggccatcgaagactgaagttatcattacttttgtcttccgcacttcgcatgatattg

SEQ ID NO: 87844 - DNA, 940 bp, Zea Mays
aataggaagcaagccatcataaaagctgtcgaacatagccatcaaatccttcttaataacatcccagaacacctgccaaaactcagctggaaacccatcagggcccggggccttgttattttccatctggaagagtgcggccttaacttcctcttcagagaacctactagtgagcctttggttttcttccaccgaaacctgagaaatatcccctctaatagaatcatccagagtgatatgtgaggcttcaggtggtccaaagagatctttataataagaagtgatatgtcgcttaagattctcatctccctcgataacattgttaccatcctgaagcttaaaaattctagttttcctatgtctcccattagccaggaggtggaagtattgagtatttgcgtctccctgaagcagatttttcgctttagctctttggtaccacttcagttcctcctcccggagcatatccaccagtctattctttaagacgtttttataatccatctccgactgggatagaagagtgtgctccgccttcttatccagagcatctaatctatcgaggatatcttgtttctccttcttattatggccccccacatttttagcccagcccctcaggaattggcgcactctcctaacacgggcctgccacctttcaagagcattgcttccaccattctcattttcccaaacctctgttaccatctccgtgaagccttctctcaacaaccatccaagctcaaacttgaattcttgctgccgcgaggagcccccaccatcacccgtgtccagcaagagaggggtatggtccgaaaggtctcgattacacgccaccgtggtggcacgcgggaaatgcagctcccaatctgtggacataagaatacgatccagcttttcaaaagtcggattagccagtgcattcgcctaggtaaactgc

SEQ ID NO: 87845 - DNA, 473 bp, Zea Mays
gcggctcgtcggcagtccaaacccccattcatggaaggagacgaagctaaccacatagcccgcaggaagggttggctcctccttgtccttaggggaaagccactcggggtgcgtcctgagggagcgggggcaaagaagcaccccatccaccaagccctataggtcctcgtcggtcatggaggagaagggccatgggtcatggggagcaaggacattgagcttctcagccatgccaaaggagggaggcggcaaagaagaggtgtgcgggcttcttttcgctccccttgtctcagtgcgtgactcttggctgcagccaaaaaaggcagaggcgactagggctaggaaggcaaaagcaaaggcaaggtaagaaccaagagggaccccctccaagacatatatatagggaccgaccgaccctccgaggttaggtcgagccctcccacattgaaagatcaaatccagaaacaaatttt

SEQ ID NO: 87846 - DNA, 409 bp, Zea Mays
cctgcaagatcaagaaaacttcgaacctgcgtgaccgtggtcggaagtggccagctcgtgatggcaacaatttttgcctcatccatctcaatgccctgcgatgtcacaacatatctaagaaaagacacatgatcaaagttgaaggtgcacttctcaaggttaccaaataaacgtgcatcacgcaaaacatcaaaaacagcacgtaagtgttcaatatgatcatcatgagacttactatagataagaatatcatcgaaatataccaccacaaatttaccaatgaaagcacgtaaaacctcgttcatcaatcttatgaaagtgctaggcgcattagttaacccaaaaggcatgactaaccactcataaagactgaacatagttttaattgcagttttccattcatcaccta

SEQ ID NO: 87847 - DNA, 425 bp, Zea Mays
gttgcggatgctgaagttgtgcctggtccgagcgctaggcgcaggcggcgaagggcggttgcgaagcgtagagtgagcgaggtggacggcagtcggctttgtgtggacagggctggcaagcaggaattgttgtcctcgccggccattgcgagtgtgggtgagggggagttgcgaagtcttttgagggtgaggagcttaggataatgctatttaactatagggagatggagatcattccaaaggttgaaccgatgtaaggtgtgatgccctcgctgtacatatgtaactataatttgtatgatgaggttatgcgcctgtgctatgcttgtaaaggcgttgtgcgcttggtctagtatgtttattatgtcggtccggcgtgcctgtggtcagtcctggcgcggacagtttggtgtagggtttagcac

SEQ ID NO: 87848 - DNA, 463 bp, Zea Mays
gttgtttacaaaccacacgaaaaaggcaaggcaatgtattagtattactgctacttccacctttgtgttcatgacgacgtacgtacgtggtcccggcctctagcaaaagcaaaagcaaagcaaagatattcgcggcttgcttcttttgcatatactactcctctaaatctctaatgaagatttattcatatcatcagctcagctgcccgatgcacctacgaggagctacgtgaggtccaagttccgagtctttagctactagtacgtagtagtaactcttctgtcctgttttcacacgtgttgaccaatggtcaacagccgcatctcttctctcctaaaatacagtgtccaaattcctatgacgagtacctagctagctagtatagtgtagtaccgctatacagtagagtcgtaccacgttttcagcctcgtttcaagcgtgacaatcaagcatatgatggcg

SEQ ID NO: 87849 - DNA, 612 bp, Zea Mays
gtttcatttataaaactacacggccgaagggggtatcatggagccacagtcgttggatcttgcatcaagggctacgattagatcagcgaataggtacaacatctcggccatcggatcaccgatctacggcaccgattataccaccgaaagggtatccctaagatttaatctgagccgcccacgcgagatcaaatggccacgatttaattacgcttgagtcaatactgaccacccgatcagatccagcggccggatttagacacgtgaaggggcaccgagacgtctaatcttagtcgttccataccggatcaacggcgctcgcctatcttcttcctctagtcgcatccacggtagcccaccggcctccccacggtggtggacattgctgacgctagccactacactccctagtgcccgataacctaccatgtctggtgctaccagatgatgagtaaacgacgaactcagtcgaaggctacttaccgatgattacgcagtccgaagctctattcatgctagggcatggctccatggcgacaccacacaccgatgaggaattccttcaagcagaggtcagccaagcgctcggggtcacctcccgcagactccatg

SEQ ID NO: 87850 - DNA, 510 bp, Zea Mays
aaacacataggcactggaacaccagttggcaaaggaagcgggtcgaaggcagttccggtcaatggacccttcctaaaattcaataagtattataagcctcataaaagttagttattacatttaatacaacgcttacctttgtttagcacttttagcacgtctagacatcctacaaatcaataatatgacgatcaaaattgatcataaccctaataatcagacatagcaaaagaccataaaagggaggaaattaccttgataaacaggaacaaagtcgcctatgtgtttctggttgatattggtcgtttggtagaagagaagctgacgaccgaagctcactatttatagacacaacgctcggtgccgacctcggcaccaagatccacggcgccgacctctggccacgtcaccgccacgttggagccacgaagaacgttgtacacgccaaagtaattggcgccgagacgtactagctcagtgccaatgtcaatggcgccgagctgagggacc

SEQ ID NO: 87851 - DNA, 813 bp, Zea Mays
gaaggagcacatgcatccttcatggagtcagtgcctttcaacacaatatgcaccttcacactcttccagctaatctatctgttgatcgtctttgggatgacatggataccagtagcaggaatcctcttcccactgctcttcttcttcctcattatcatcaggcagcacttcatcccgaaatattttgatccgagccacctgagggaattagatgcagccgagtacgaagaactgaaaggttttacacctgatccatcagtggtaagaagtcttgatctacctggttttatcaattgctgttagcatatactattcaacaaaggctacttcattcatctgtgtattgttaacatgccccttctcacgcagtgtgaggacgagtctgttcgcagcggagatgctcagcctggatatgcttccgaaatactcgaggaattcacgactcaccgtggagagctgaagcgcaggaactctaccttccgtgatgggagactacttcaggtaacattttcgcgcaaacattagtgcctctggttttcgtaagattaattaattaaaggtctccccttcaactctggagttggaacttgatatttcctttattattttggtttggcagcttaactctatcaagatgacgagagagctttctcgggctccttctcggcttacatgaatcctggaagaatacgcggtttctgaatccgaactccaattaagcatgggggtgcgaagtctcatggcctaattgcttacagagtattttctgaagcaagcaactcattttaggtactgactttggggcaaatacac

SEQ ID NO: 87852 - DNA, 1053 bp, Zea Mays
caacaacgaggttcgagcagaagtcctgggcgtggttggtgaccaaacgacgcgtgcccagggagacacgaactagggccacggtgaggtcgtgcgatctcgagtgaggagggtggtgttcgtcgacgaggggaggcgtggcggccggtgacaacactaagatagaagacgacgggaggatgggaagaggagcagacggcgcgagggagatgagtgcatgaggaggaaccggggtacgatggatggaggagacaagcgcacggtgaggcactggacaatgccatgtggggtgaggcgctggaaaggcgcaacgtggagatgagcctgcgatgcgctgagggagatgatggcttagggaggagcagggacgctcgcacgtcaaggagaggaaaaatacgtgctgcctggtgcggatatgggtgaaggcagtgggtttggataagagaaggacgaaggtggggaaagaaaatatgaaaattttctctcatttttgcaaacgaaaagggaaaaaatacaaacataaatataatcctaggttctagaacttgggtttgggcgggatgcataaatggattggacccaaaccttattggactacaatatttaggctgtttgatttggtgaatattcctagaatcagataaatttctaccagttatttatatccaaacatttagatctggccagatgcaaacgaaccagatcaaagcactatcgtgatataacatttgagatggcattgatttagttgaaatcggacaaaaatctatctgttatctgaacccacttgatttctttgtctaggatagtgcactggagaacaatcccaattattaatcttgagcacgatttcctcggtaacatgcacgatctggattataaaagtcaaatgctcccaaatttgcatttctttactcgagcgatttacccagtacaaaactcgacgtctcgtgagattattaaattccgaacttcgtgaaacatttgaaatagtcagatagacggagatgaagacaatatcgaaatcatgatagacgttgattaggacataga

SEQ ID NO: 87853 - DNA, 380 bp, Zea Mays
gtatatccacttcattatgtaggataataagatgtctttaaagtatatataggtttgggtaaaaagagtagggtaaggaaagactccatctaagattgtggatcttgattcctcttggagttggatttgagtcatctccttccttgtcgaggttgagcttgtccttctctggtcttggtctcattgattcgcggtgagtgcatatcatcggggttggggaatatggttaggatagatatggatgagatacactacatgatgtaggtcaaaaatttgtttgatgataggtggggatagacagattatgcattccatcaagactctattggttgggttggtctgtcattctttatttagtgcagagtgaactaagctaaagc

SEQ ID NO: 87854 - DNA, 1060 bp, Zea Mays
cacatactaccaaacatatttttgtggagttggaattttattattcgcataccacatcaatacttcagaagaatacgtgagtataaatcataaatagtaaaaaaattaaataggataagaactaactttgtggggaactaatgaaataacagatgatagggcgttgtggtaattcaggattcacaaaaggcacgagcattcaagttaatgtcgcatagtctaaaagagttatggttggaaaaagaattaccttaatgttctagggtttttattctttatctttaatgcgaataaataatttaagtcactgaaccatagaagattaaagaaatgaagaatgaagcaccagcacagacctgtagtcctgctcacgtcccactgccctgcctagcacaatacttctccggctatggtctggaggctcgcaacattggcaccatgaccatcttcaaggagctaatcaaatcaatcccacagcaagctcaataaaaatctgttaggatgtaacagtgacaccaagaatcaggaacgtagaggggagtgaggacgcacctgcagacctgcttcggagttccctgatctgggtggcttgaattcgtcgttgatgtgtaattctaggacaggaaaggctggacaacagaggggatctaacctctgaagctctgcgcgttctgaagtgccaaagatgtcatcttagagaggggaacaaagtaagcgtggccaggacagatcacatatgcgcgggcgttgcttaccatggcagcttgtaagtcagggaagtgagtccagcgacgatctgaatccgatggaggcgcccaagctgatgtatgacagcggctcgaaaagagtcccgcacacaactatgaggtcctgactcctcactcctgtagaggtgaagtttgtctcccgcgcaccagcgcacgtcccctgtcccggcctcccgcagtgcttcctgttgcaacacatgtcgcacggctccatcacgcccacgccccgttcactgtccgtaacacacatgcgcgctgcgcgccaccggcatgccgctcggcggcgtgcgcgc

SEQ ID NO: 87855 - DNA, 949 bp, Zea Mays
aaatcagcatcaagctaaaacttgcaatatatttaaatatgttgatgcttgcatttcaaatattgctttaatcgccagcttgaatgatgagattgcaaaattaaatgctcaagctaaaacttgcaatgatgaacttgagaaaataaaatttgctaagggagattatttgagtggtaggcatcctaggatccaggatggtattggcttcgaaaggggagctaaaaacaatgccaagatccatgataagggccatgagtttcccaaatttgttaaagaaaaggggaaggcatcagtgatttataatgctcattcattttgtgctaatgttgttcataatactcacatcaagaatgatcatgttgctcatgtttctcattccaatgttcatgctaaaaatgcccattctatgtttgcaagttcatctcattcgtcatttgcaagagcagaacatggtaggcataggcatcatatttctcatgataaatatgttcatgtgcttgatgctaaaaagaataatcatcaaatggtacttctattgcatatcatacatttgatgcctcttatgtgctttcatgtaaatttggtaaaattgttgcttctcatattggtcgtagacacaagaatggtaacacttgtgtttgggtaccaaaatcttatctcacttaaaggacccaactctgttttgttacataaaaccaaattctaaacttgttttgtagatttatgcatccggggggcacaagttgggacatcaatagcggatgcacaaacaacatgatgggtaagaagcgtatgttctcatcctatgtcaaggacaaggactcccaagatgctaccacttttgggaatgtgagtaaaggcaaggtaaaggggttagataaaattgcagacaccactgaatattcaatttctaatgtattttttgttgattcattagattacaatccac

SEQ ID NO: 87856 - DNA, 452 bp, Zea Mays
gttttatgtattatttgcttcatacaacaaaaaaataaaatattcgaagatgcaattgaatcacatctcaattttatgatctttgatctttacaagctcgatatttaaaaaaagaatacaaatttgtatagcaaattcttatatctaatttattcacaataaaaaaacgatatctgaatatgcatcaatcaggaaaagaaataaaggcaacaaataatgattctaacaaatgaagtcacatagggacacttacatacaacaacaacaaagcttttttattctaagtaagtctgggtacatcaaagttaaaaactcaataaagctcacaagacatgattccggaacctagttattttctatccattattatttaggattctttatatcatatcttcccatatcaacttcagacttctttctcttttctcattaatattgcgtcttaggacccc

SEQ ID NO: 87857 - DNA, 351 bp, Zea Mays
caacacatgggcaattaactaggcgtgcacacctgcgatactatggatatcatattaagactcaaaagtatgagtgcacacccgcgataccgtgccccccttgacaccccttgcccccgttcctcgcggcttcggcgctacgaccactgccacccctgcccccgcaccacctaaagatttatatgatctccgtagcaacgcacgggcatccaactagttattaaaggcggacggaaacagcgcctactagcccatccacgtcatcgcgatttttaagagttattagattgacatcaaacgagcataatcggtctggctgcctcaacaactcccatcgtcgcaacgcttctg

SEQ ID NO: 87858 - DNA, 718 bp, Zea Mays
cctcttctcctttgtggtagtcgtgaccaaaggactagcatgggggcaagtagacgtcgacgcatctgaagaactccttcactgttcgcctgacatggtttcgttgatgaccggctccccatctcaaccatgatggatcgtgggcggggtctgcggctaccgagaatatataggtgcggctttgtggttatcttctggtaagggccgaggatggcgcggttaactcggccttatagttcgagacagatacagtgatggatctgttaaggtgcgaacggcttgaaccggcagcaaagtctacgacgtgtatcaaggggtggttgcgcttgatcggctctaagcgtgggatgggagataggtcagacaaatgggcccacttgccattgacagcagcagctgaacgcgcgacgaagttctgtttagctgacaccatgtttattccatcatggcattggttgcgtcagttagaaaaaaaaacaaacttactaacaggtcggcgctaggccatatccggtacagagaggctgcctccacatgtgctggaggatagccacgagagtcttccccacactgcttttttttatgttacgtcttcgtatctctatattgtatttcctatttcagttttctttctaattcaaattcctatttcaaattcagttcaatttgatatactagattcatttatcgatgcaacaaataaaaatctcaacaagat

SEQ ID NO: 87859 - DNA, 550 bp, Zea Mays
gtcttatgttgaaggatggatataaagctcatggatgcttcaggagtgatggctgatgctacaaatggatgactcgactatctcgtagtcatccatattgtatgctacttcacgttcatccttaacgatcatgttataaggaatgatacatgcatgcatgatcgcactaagtacttggtggaaaaagaataacctaggctagcaataatttataagcgagccttgaggaccctaaatgctctctatacatcctttcgcgcgacctcctagcatgtagcaaacatctgctactttggagtccgtgggaggagaatttttttctaaacaccggccaccgagagtagatgacatcggtaaggtagtacccttgattgtactcatgtgcattattaaccgtgaagttctcatttgatgctcctcccttgagcacgtcagtgaataatggtgattgattgaacatgctgacttcatcgtttgacccaggtacgtctaaaaaagcaagccaaattcacaacttatacgaggcaaatgcctcgagcatggaggttgg

SEQ ID NO: 87860 - DNA, 662 bp, Zea Mays
gcctactgaaggaaaagttgtggcagcctaacctgtgacaagatatggttgtgatctgaacaacggtctcaacttatgtaccgaattttggcgagatgtggaagtgatcgaaatacgttcttatagtgctctatgattattgaattcaagacgttccaattcctaaactatattagaacccatctgggcatacaaaatagtactaacactatcctctgcactctgcagttctgacatctgataacagtgctacatagatgtagacacatgcctggtataagatgtccagcaattgcagttatttttttgtttactcttgtatgagatgtatatacatgcatgtaacaagtaagcaccacctctttaggtaaacagtaaactatactaaggttaggacccctttcccatatgctccttagtaggcgctgtcgttatcctgctacagggctgtctgatgagcaatgatcacttatgtccctagatacgcacaatggatcacagatataatctgcatgcatattttttacctgataatagctcatcttattgtggtgttgatactttttagccatggtatgttgtgcattatttctgggttcttgttaaaattaacacaaatatgattatataacctaactgttagattatgtgtatgtgtttac

SEQ ID NO: 87861 - DNA, 296 bp, Zea Mays
tccgccatatccaggcatgccgtaggggcagtctggtggcggcgccatggccgatgttctaggggtggattccaccacggcaatgcgggaggacatggaggccatctgcgtggcgaagagccccagttggcgctggacttcggcaagggcggtggtgattgctgccaactccgacggctgggctgaagctgcagtttcggcttcatcagatcctggcatatccgataccgggttggtagaattaccccggctacggaggttgtatgagtggctaatggttggagggttggaggaag

SEQ ID NO: 87862 - DNA, 417 bp, Zea Mays
gggtgaccactgtaccctactaacagagcaatcggcttaagtcgacgacgacttaagacggtgcaacatgctcgcgcttacttgacttagggtgaccactatgacctactaacagagcagtcgcctttggtcggcaatgacctaagacgatgctacatgttcacactgactcggcttaggggaaccactataccctactagcaggacaatcaactcaaaaggcagcaatgatttaaaagtcagcacgatacatctacctatcctaaggcgaccactatgcctaaccagccaagcgattggcataagccagggaaagttccaaaaccagcacgctacatttactttcataattgttcaggatgactgttataccctgacaacaaaaacagtcagtacttcaggagaacaggatgttat

SEQ ID NO: 87863 - DNA, 458 bp, Zea Mays
gcgacgaccagcggcagcgacgacgactgtgggtcgcggacgcggttcaccacgtcgtgcagcaccaacgacctcaccatcacctccatccacgagggcaggtgatttaagcagcggaggcgtcttttgatggtcggtcgatcgagctttcgtgtgaatgagttgacaatccgttggccgttgtcggctgaagacgagacgagtagtgttatcttgcttgcatctgttgcttacttttgagaccgtgacaggtcacatgacgatcgtttacgtttggatggtgctccgctgtgcagattaatgctagcagtgtggaattattattattgattagggacaagtcgccgtgctgctttgatggcgaaaggttggtgatatgcatgggcggcagggttcattcaaaaggacgcctcctggtttcctgtagagggctctttcagttcagctggcctgcactg

SEQ ID NO: 87864 - DNA, 296 bp, Zea Mays
taggaatgtgaaaacccctctataaatatggaggaagggctacaccaaccaactatctctctagtttttggtttttgctctctattttcttgtattaacagatccataggtgctcttgtttcgacacttatgctcttgtgatttgggaagtgttgccttaaccacaccatgaaatttactgtatatctttgaggtatctctctatgaatttttgatggcttgaagctctctcttttaaaattctttttgagcgcttcatttcaatatttttagagaaaattagatttagagttgtt

SEQ ID NO: 87865 - DNA, 447 bp, Zea Mays
cagaaacagttggcacgtcatcgatagcacgatcaaagtcttcagggggacggtctactacaaccggacgcaccacaacctccatgagttgcaaatgggtcttcatagccgaagtaacataattatcccaatccagttgacaatcaattgggatgactcgtcttatgacatttggtggatgaccaatgttaagcactctgtcaaccgcaatgtcatcatcttcatggtaacctagttttgtttagcctttgtaaacacatcactcaaggagggtctaccatcgaatagtaccggcacgtgtcgcatgtcaatgaacttggcatttccatatggatcttgttccacattgcctccatgatataagctcaaaaaattgtccatctatttgaaacaccaattaaacattcaatataaactgtggatggttattgtaaagccctaaaattc

SEQ ID NO: 87866 - DNA, 385 bp, Zea Mays
aggtactcatgcacagtgctagtgtggtcattttgtagttttgacttttgagtgaccttgacggacaagatgtgtgctgtttccaacccagcatctacttccagactgttagaagatacaacctattgttagattatgatctgagatatacagtgtaacagcagaacatggatacgaataaaggggggaaatattcacaacttaaacaaaatggtagcggttgcttgcttttcatagtttccttggatttggtaagtaatgtactcgatgttccagactatctgtagaaaaatgctattggtttcactattttgctggtgactactgaagttagaagtgttgctagacgttgagttaatgaaccaacacaccaccgaacaatagt

SEQ ID NO: 87867 - DNA, 430 bp, Zea Mays
aaaatacagagaccattaatttggaccagttttaaattaaaatgttttatttagccttatttggactgaaaatcaattattagagtagcaaaactataaccaaaatgattaataaaaatccagtggacttacaaccaccagagccccactacaaaaataaggagcacctcagcccaactttttaagtaaggaaaataaatacaaagtgataataatgcattttccaaataaatcatgaacaacccttaataatgtgacaatgagcaaccaaaaattagctaagtccatgatgagataaactaccagagaaaaatgtaaacccatgaaaaagaagtaaactcacacctattgctagagatttatgagaaaggccacttaattcaaataatgcataccaccccttcccttaagcaaaaagatgccaaacttc

SEQ ID NO: 87868 - DNA, 586 bp, Zea Mays
agcggagaacggcggagggcaaacgatgaagcacgatgattagggtgagtgggggcggtcgtcgatggcgatcgtaggagcgggttacagcgacggcgaggcgcggattttattagggtttcggtggggccacgatgagtgggttgattgtggtcgggtgggtctcggacattgaccatattggctcggtcggctagcggggagcgacgcgggactgcggggacctgtagtgtgcgcacgatcagttggtcagcgtgtgtacgttgtgttcatatgaagcataaattgttgtgtaaaggatcgtaaacactgggagtttatacaagcattaatcccgaaccacagtccgcacgtggtataaattgttgtgtgtacgtcatgttcatatggagcataattttttgtgtaaaggatcgtaaacattgtgcgtccgattgatatgcagttgttatcgtcaacttacacaagcataaaccccgaaccacaaccccaccgcgacccgaccacaccgctattccgatttatgtaactgttgccgtcaaaatacgcatgcataaatgcggcacaaccccacgcgcgaccccac

SEQ ID NO: 87869 - DNA, 450 bp, Zea Mays
aaatatgtgggcaagtgcatcatcggattcgatctctattacctccagatggctcatcaccaaaattcattcagttatacatttacgacactgccaatgaggttcaaaacagaatgaattgcctaggagatgatatcaatagccaagataatttggattctgatatagtcaatggattaattaagatgctagacgatcacaatccattcgcaaaaaaattccgcatggcaagagaccgtctatctaataatgaaagtgaagatttcattattagactcattggagctaaggaaggtgaccctgtccagtataatttaccaacaacagatcaacttgccatgttaattgttggggatttcagtttagatacattcaagcgtgatattatcattgaaactcgaaacaacgaacttaaacgaatatcctcacttcatccagcttatatggctc

SEQ ID NO: 87870 - DNA, 454 bp, Zea Mays
cttccctcaagctggctaattctattggttctgctatttgctataagccctggcttaacagcaactggttcgattgatcatatgaattcgtgaaaacatccgttataatcctggaacaaattcttgaagcctattcttgaacaacgaatgaatgaagtagatgactctgtgttctacttaattaattgcttgaccggtggttattatttcttccggtatgtctcattctggtgtgtaaggtgagatgcagcactgcagctcctcccacctctgtgcaagtgtaaacataagatgacatctgcacttttagcttggaactagacgataagttgaattgcacgtacaatcttgttcttcatgtgcctatttcttattctcaaaattactttacattaccttatttacatatttcttatatttacgtgttttattttttcagtaagttctacttctg

SEQ ID NO: 87871 - DNA, 443 bp, Zea Mays
tcatgaggtaaattgagatcctcgatcagaaacaatcgtcttcggtacaccgtgtaagcacacaattcgagccatgtataactctgccaactgagaacctttataagtagtcttgaccggaatgaagtaagccaatttggtcagcctatccacaatcacccatatagaatcgtaacccttcggggtgcgaggcaacccggtaatgagatccatacgaatttcttcccacttccattctggtacttttaatgggtgtagtagtccagctggtctttgatgttcagctttgactctttgacatacatcacacacagccacgtgtgcagctacatctctttttgcccatatcaccattacttttgcttcagatcctgatacatcttggtgctaccaggatgaataaagtaatcaaagtcatgggcttccttcagaatagtttcttg

SEQ ID NO: 87872 - DNA, 375 bp, Zea Mays
caagggactgaatagggggaatgattagagaagcggtgaaatagggggatgaatgaaagagggggtgttgaatggaaagtacaaataaggggagacgaggggaaatggttggaatcagtctggtcttcaacgattccttctatcgacttctccttacatgtttcagtgtatgttcctccctctccctagctgctccaagcctccaaccaagccccctcacactcaggagcatgcctacaacccctatggaagataaaagtggagccaaataggaagaatagttggagtgaaagagaatagttgaggggtatttaaatgtgaatagaaagtatgaatggatttgagaggaatgattgaagagagcctcaaatggtt

SEQ ID NO: 87873 - DNA, 480 bp, Zea Mays
gagacttaactttcttaggcgcattttcttcttccaaggtcaaagtaatagcttccgaagcatatgcctcgatgggagctgatggcccagcttcgacagtatctagtgtcataccaacttcgctagatttctttgggatttcaccctttctatcaggcgctgaagcaggggtttgtacttttgaagattccataacagcgtctagtacgctggccattctcctcctttttagagttattgcaggaattttgaacaccttcgacagctccggctcttatggcgggttcaaggttttcggttgcgctgccgacttccttaattcagggttttcggccattttttctttagcttcggtaggacgcttcggcacttcggtcgtcttggttttctcatgttccgctattatcatcggtttcggcactttggccgattctcccttggcttcagcaagaacggagttgtggcggaactgcccgaatt

SEQ ID NO: 87874 - DNA, 781 bp, Zea Mays
taaccttttgaaaaaatgttcattgaatcccacaatgaaccattcaccacatctaatgatgaaaagttttgaaaacacatccactgcatcctatagtgtacgtaccatctatcaagtcttatggcaaaagttttaaaaactcatccattgcatcccacaatggaccatccactgcatctcacagaggaccatccaccacatagcacagtggacacatcacaagtcacatggtgaagttttagagcttttgaaatccaaaacactagtctgtgaggacactaaggtcgctcttgaccatgagcacaactgattaaccagttttgtgatagtcttcaaagattgtacaactttacccgcaagtcatggtacccacattcctaagtttgcaagaccattcacctcttccttgtaggtgtttcaaggttcactacgagacctttacaaaggatctcccatgcatattagactataacagaatacctagggcgatctcttgtaatctctctccaccatagtcctcacatgtaggccctctaggacatcccacccaaggcctagttaagcgaaagtggggccaaagaggcctcctccattcctatctgccatagttaatgactacacagtttcccctaattacttggtcaagaccagagccataatagtccttgtggttgtactatttgtcccgggtggtcgctcggtgagctgggccatagggtaaggaacttgcccaatcctaactcatgcatcatgtccccatgttttgctaaaaacatctttc

SEQ ID NO: 87875 - DNA, 315 bp, Zea Mays
cgccttgtgacctcgccgtggtcagcgtgctccaggtccgctcatgccccctgctctttcgtttcagtatccttgtgtgtccctgatgctccccgacccagccgattaggctaggaccccttagatcgttgggaacacttcctactgtccactgtgcccgctgtcgccgtggacaggatgatatagagctcaaatccagcaattaagcgaggggaaatggttgttaagggttcaatttggtgtctgccgcacgagagcaccggtagttgagtaatccggtcggtgtaggctcgccggagctcggttctccgccgc

SEQ ID NO: 87876 - DNA, 377 bp, Zea Mays
ctgtttgcttcactctgtatcttatcagtggcatagggcatagatatgtcttttggtctgtcgcttctgcaccgaataagtgcagcatgccttactactgaaggggatggaaattcttccaatgtgattagaaggatttatctttgttaaatatgttatgtatcttcctttactcattgactgagtctgagtgttcatactccatttctgacaacatggatcatgcaagtagcttaacattgcaagtcttgatttataacatggttcattcaaacaaaaacaagcaatactgaactactatattgaatactgagtagttcaatattgcttgtaagaaaatactgagtaaggaatgaggacacttgtctatctttatc

SEQ ID NO: 87877 - DNA, 347 bp, Zea Mays
cgcttatgctgtactttcgtggatgatgcacaaccttacctctgtctaaaaattgtggtattggtacatgatgtgctattgggctacaaatagtctccggtgcactgtattccgtatgtccattccattagagggaggaccggctgatttgtatgttggtttgaaaggattgaattgtttaatggagcgtctattcaatttgtgaggtcataaaatttctttcgtaagttgttcagtacagccaaccggctgtgtaagtgtattgagtgtttaggtcctcagttgggaaaatgcttaaacattttttgtcaaagattcttggtgccacaaacatccttttgagcttt

SEQ ID NO: 87878 - DNA, 523 bp, Zea Mays
ctgtggtcagtgaactccttcccacctcttgtgcccatttcaaattcttgtgtaaatcttgtgaatcctagtgcatggttgtgtgccccagtgctccattgaatcccctgcaggtttttagctccttcgggagggtttcacatccccaaatagccttttcaccgaaaccctaaaccttcgcacatcacatgctcggtgaaatgcccaaaccagccaaaaatgctccgattgaacccaaatttttcaagcaccttcacaacacctccagtaacatattcgccaaatttcacgccaatccgatataccaggcttcaatttcactcaattccccgtttcgagcgatcgtttccgagccaagtgcccaaattccattttcttcgcctaatttcaaaccaagcacacacttcattcatattcacctatataaacctattcgtgaagtatcggctcaattccacatcatttcatacctcaattcgaattccaaaccttctatggcactatttctcgttcaaacgccgtt

SEQ ID NO: 87879 - DNA, 968 bp, Zea Mays
ggaatgtggacatctcggacggacagactgaagaagctgaaggtgggagcgatgatgagcaggtatggggcaacaacaagcaagcgcgcgatgggagcgttcaggcaagcaagccaaaatgtgaaagaaagcgtaacgaaaatatcatggaccaacttgggccgtataataggagccttagcaataatgctgctatataaaagggacttctgaaatctggtgaagatatggaaaaaccgaaagctgattccatcaaacaactcttgtctcttctgctctacgtctagttctccttcctcaatccacattctctctatcagctacgctaacacacgcaagatatgcccagtcatcttcgggcaccaagcaaacagccacacgttgttgcaactcccaatttagtgcaaacgctggaggaacaaattagcgaagcctaacctgaaacttgtgcttgcaaaacacctgccatccgacattgcgttcagcagcttcacactggcttccaagattcacttcccacactggctgcttccaaagattcatttgcaggttctagtggactggaccagtggcatcttcaggctcaggaggagcatccggctactacctaccagctcctgctcaaacaagaacagctgccgcccagtgccaaattttgcatttacagctttttctttctttctttctctttctttttttaacacgttttcaggtactccttaaaacaagtatattcactctactctatgagcatagcaggtagcagcaccattctgtattgtaacggcaatgtctctcagatggattgcatcggtctcttttactgcatgacagatagtatcagaaatgtcaatggtagtgctgctcctgtaggggaggaagttaattgataagaaaacacggggaggtgggacccacgcaaagggttttctggcacgcgttcgcgtacgtatatctaccgggggctt

SEQ ID NO: 87880 - DNA, 606 bp, Zea Mays
atttgatttggggcgtatggcggtggtacgtatgtatattgatatggcataggtagatatgggggtggaggtgtccatgcaggtatgttagacctcaactagatattatgaccttccgtctctcccgattggtgaggtggtccaatcggtcttacctgttgttgctcctgaatgggtgtgcgaggtcgctttgctggccggtcccttgggccggccttcttttttacatatttggataataattgaacaaaggtcaggctaggtttgaccagccgaccagccgctttaaacgtattagttttccacgtacctatctctggtcgttgtggtttgaaggtatgtggtcatcgtggttcctgggcgttgctgaatcatccgctggaatgatccgggctatctagcggtgtttcggaccgtccgcgtctgtgtatcggatcgtctgcgatgcgcagaacaggtgctagcgcctggtttcctgcctacgctgccccccagtgttggaggtagtgatggtaattttcagagcctccccccatcaggagtcttcttggccactactttcctgcaagaaatttattattctcatcggccttccgtgtgtcgtcg

SEQ ID NO: 87881 - DNA, 725 bp, Zea Mays
gccgctagttgtgtggaggcaaggcaacatcgcctcaattcgaggtaaaatcacttctctattcttcgccctaccctcctctgcgtagggaacctttcgagatggagtttagggcattgatcacagaaatcgctcgcgacgggagctgcgccgctgtgattgttaggccgccgtcgagtttgtgcactagggatagaagacgacttctgggccgcaggatcataatcggctgatcgacggacgaaacgggtctcgggtgtgttgggtcgtcgatatgatgatgcacgactaggattggggttacgaaccgacggggtctgtttgggtcggcaccgtcggatggtaattggaggcgttagattatatctcggttattttaaatcctgaacgttggtgggagatctaagggctagcaatgcacatcgagttataaccttcactggtgtaatccgagccctcagctggtgatcggacggtcgtgaattgtgcgtaccccttcggccaggccattttgcataacagtcccagtgttagatggaaaacaacccgccgtccctctcctgttgaatgtaatcagagtttgatccctggattcttatgaaatgacccctgagctcttctgaaatggtggccgcagtccaaggagtaaataaaatgagtatattgatatagaaaatggtttttgtacaaaaaataattctagaaccttgttaaagtcatattta

SEQ ID NO: 87882 - DNA, 671 bp, Zea Mays
gcggaaaacactcttcccacattttcaagtttttcttcaatattgctcgcagcattgcagacaatgttctattcacaacttctgtttgtccatcagtttggggatgacaagtagtagaaaacagcaattttgtccccaatttgttccatagagtacgccaaaaatgactcaagaattttacatcacgatctgaaacaatagtagaaggcataccatgcaaacgaacaatctctttgaaaaagaggttagcaatatgaatggcatcatccgttttgtgacaaggtataaaatgtgccatcttagaaaaacgatcaacgacaacaaaaacactatcgctcccccgcttcgtcctcggcaatcccaaaacaaaatccatagaaatatccgcccacggaactgaaggaataggaagaggcataaataaatcatgtgggttcaatcgggacttagctttttgacacatcgtgcatcttgctacaaagcgctcaacatcacgccacattcgaggccaaaagaagtgtgtggacaacacaacctccgtcttcttggcaccgaagtgacccatcaaaccaccaccatgtgcttcatgcaacaacaaaagacgaaccgaaccaactggaatgcataggcggttagctctaaacaagtatccatcatttaggacaaattta

SEQ ID NO: 87883 - DNA, 383 bp, Zea Mays
gcgaggtctagggccttagataaggaggagtgagagagagagcagatgaggcggaactagataactttatcttgggtgttctttttgaggatagtacggatgaggtgatggacatggaaagtgaacatatagcaatgtctcgtactgacatgtccgaagtcacaaaggtttccatgaggaggaataagtcaaattcttttcagtctaaatgaaaggggtgttttggaattgtgatgggtttagagaccctttaaagcatagatttatttcagagttaacaaaggagcaaagtttatcttttattgctatttcagaaacagttaagagatcgtttacagaatcttttttaaggaatttaagtggagggagaaattttatctggc

SEQ ID NO: 87884 - DNA, 424 bp, Zea Mays
aagttcgtgttgcataggtgcccatggcgtgatgaaggggatgatcacacgtgctgcagcatcgccaccatacatggactgacagatttgtgcttggttaatgcatactaaagcggtgcatcccgattaataaatgtcattttaccaatgccatcgtaaaaaaatgtacataaacaacaaaattattcttgttgccgatttttaagtagagaatcatttcgagatatgaaattattactgaccagcagattgcaggcatatcacgttcctccagtagggttcatacaaagacgccattattttgagctgagcagaagacgaataccattgtgtttagaatcatttttcttttaatttaacagcatcacaagttatgctaattcataagacatatagtgtttgttgcgtaatccaggcaaatggc

SEQ ID NO: 87885 - DNA, 563 bp, Zea Mays
ttgtattcgaagaagagatgcctgacgtctgacgctacgacatactgtgcagtagattcatgcctgctaacttcccgtagagagccaaggccgagaccgaggtgttgtcagtacacccgagcccccgagggagaggttgtccatgccgtagtggttgtaagagcgtcggggtatgggtcaaaggctgcttgcggggtgcgtcatcgtcgtggcgtgtgatgacatcgagattccccacagcactcgtcaagatcatagcccctgcttggttgatgcagaagtcttctcgaggcgttagccgagctgtccctcgacgtgcgctacagtcgggcggagtggctgtctacgggattcgcgacgtagtcggtggctggggccgagctcgggcgaggcggagaactcgcttgacggctgagcttaacatcgggcgaggcggagaaattgcccaaaggttggacctggggtcaggcgaggcggagaggtttcgcccgaaggcccgtccgtaggacaccgcgcgccttcgcccacgcgcctccgtcgagggctttgtccacgcttctccc

SEQ ID NO: 87886 - DNA, 667 bp, Zea Mays
aaaaaggctgaggcaatgacggcaaagataaagatcccaactaaggcagattataaaaatgtgcctaaacaatatgtgccgggcgtgctctactatcttttgagaaactgaggaaggtcccggatggtattaaaggttgcatgactagtacatgcgtgcatcatcagttggcattgacaccattagtgtgcatatgccagaccatgcttttattggttcggaccaaaaggcctttgttgcattcgagaacatgtggttaatgatgagccttcagagactcgacatgcaacttgtgacggtgtttgcaatgtaagtgtcgctcatatttccacgtatatgtgttattattattagcgagccgtataaattttcaatatctgacacatgcacgtgtgacttgtagaatgcaacatgatcaacatgagatcctttacggtaccaagcccggtgctagtgccgataaaaggattgggtatctcaacccaatactgatatgcgaggaaagccacactttcagaatcgagaaagacaatgaagagttaaagggaaagacagacgaagaagttgaggagcgtctaaagactatgaagaaggagtttgaaacaagattcatcacctacatagcaaacacaatgcttaaatttcaagacagggaagccataatggc

SEQ ID NO: 87887 - DNA, 898 bp, Zea Mays
cgaccacctaggctctaaccaagaaagagaagcaaggtggaaaccaagtcaaatgttgcaaagttcacgccaactaagacaagacatgacataacatcccgggccatgaccagtcatccgaacgtcagaccgaaggcacgccgagtggctgctatcgacatgaccgcacctctctaagtacgccgcccaaccacgctcccacaggctcgagggcgggactaacctatacataaagtaccttagcatcagagcttctacagtaacccgaataccaggtagtgcgcagcagatacaccataccgagtgtactcctacgcacgtcaacgagtgaaacaatctcgtgatgacgagcaaggccgcacgatgcacgactactccatacgactgacctgcggggcccaccacacactaccacaagaatgtcagcgaaagaccacgaggacgggacagtacgccatgatgcaagtacagctacacacgaccctacggacaacatcagaggaaccatgcttcccaagggccaccggccaggcccccccagcagaatacaagtcctgactgtaaaatctagctcttggactataaaaggtaaggacaccctcttttctgaacacacaagcacaccagctagaaacacgctccatagcaatactacgatcaacactacactggactagggtgcaagcctgaaccagtataacataccctcttaaatcattcgcctgagtcccgatggatcaccattcgaagtgagttcgcgctaacttcccctccgaacataaatcttactatcccctggttttcaaaatcacgacaaaggtccaactactcatttcttaccataggtgtgatagtacatgattgcacaccactggttcgccgcattggcgagtgtgat

SEQ ID NO: 87888 - DNA, 298 bp, Zea Mays
ctagccttcagacctggtcgccggcggctgccactgcgccccagactagacatcctgctctggcatctgcgccacagaaaacctgtgactgctcacctgcaccccctgctggcctgctccaccagcgcctctgcctgcttggctgctgtcctgctgtagtcgagaagactagcaccggcggcgaccgtgacagagtaccagcatctccactctctagcagaccagcaccattgacgagatgagctcgtcatctcaaggttcctcttgctcccccgttcaccccttctttgtatttctg

SEQ ID NO: 87889 - DNA, 827 bp, Zea Mays
taaattagtatgtcatcaaaagagacaacaacaaattttccaatggaagttctaagaacatgattcattagtctcgtaaatgtactaggtgcatttgttaacccgaagggcatcaccaaccattcatacaacccaaattttgttttaaaggttgttttccattcatctccctttttcatacgaatctgatgatagccacttcttaagtcaattttagtgaaaataaaagcaccactaagttcatcaagcatatcatctaatctaggaattggaagtctataccttacggtgatgttattgatagctcgacaatccacacacattctccaagatccatctttcttaggaactagaaggacaaggacaacacaaggggaaagactttcttgtacgtaccatttttaatcagttcttccacttgttgttgactctcctttgtttcttctgggttggtgtggtaggcaacatgatttgggagggaagcgccagacacaaggtctatttgatgttcaatccctctcttaggtggtagccctggtggtacttcatcaggaaacacatcctcatattcctataatgtatcaaagacaatacttagcaaagtagagggtaggtcgttagtagaaagaaggttgtccttgtacaggagcacaaagaacatggcattaggttcactcaattcttttagatccccttcctagtcatcacgactaatccctcttttttcctgtgtcttggttattggaggctgtggagttttatttggctttggaaacacttccttactatttttgtggatcactctcaagtgcttctcgctctctcgc

SEQ ID NO: 87890 - DNA, 641 bp, Zea Mays
tgttggtcggcttccttcatagtgatttggtggtacccccgagtaaacatccaggaaggagagcagctcgcacctcgcggtggagtctacgacctggtaaatttgcgggaggggaaaaggatcctttgggcaagccttgttaagacttgtgtagtcaacacacatcctccagctcgtgttctttttcttgactaggacgaggttagcgacccatgtcaggtggtgtatctctcgtatgactccagctgccaagagcttcgtgacctcttcaccaatggccttgcgcttttcttcatcgaaacatcggagccgttggggcgaccggcctagccatagggtgtatgtttagagcgttcttggcaatttcccttgggattcccgacatatccgttggcttccaggcgaatacgtcgcagttgcccctaaggaaactaatgagtgcactttctttcttgttggagagcgccgcctagattcgaatgcatctagaggcattgacagtgtcaagcggcacgttcttcatgtactggttagacttgaaggtgctagagctagccttcggggtgtctagttgtctcgctgggtggcaccattttctagcttggctagttcccttgcggcaacgagcgccgacatgagtt

SEQ ID NO: 87891 - DNA, 634 bp, Zea Mays
taggagatgaggaaatgcagctgggagagatacgccgagaaataagaggtgatgcatacaataaagtcaaagtgactcatgggatagaagatgcgttgtggatctcagcttgttgattcctacattaaagatcacagacaggagatgcgtaggttcgtggaatcgctgggttatggcagcccgatgcgtgttgagcgtaggagtttgaaggcggcaaacgagaagagagcacaagaggcaagggaaatggaggcgactagagccaagaaatagatgttggggaatcttactgatcatctgagtgcaagtgagtgcgaaaaaggcgtgttggttttgcttgtacattgtatttatcttgtctatgataacttatttgtctcaatatatttgcagagattggatgcgccaggaactatatcgcagacatcaccattaccttcttcattccatcaaaactaagattcccataaacatttttctccacatttcctccatggtataatgttattaggacgttcatctattgcaaaaacgaattcataactcaataaccattaaatatggtacctgacttacactatcaactaatgcctaactaattactaatctcatctactaatatactaattcctaa

SEQ ID NO: 87892 - DNA, 313 bp, Zea Mays
tgactggaataccagaatgaccaccgagaggagaactatgcatagcagccaaaatggaacgctgaagagaatcattccggccaacccagagtcgacctttaaagcgaaccagaccatcagaaagggaaaaattgggaacaacagtgttgtcaacagccagcttggtgagaatgtctttggattctggatcactcaaatatccatcctgtaacgcctgacaccattgtggagtggatactgaaacagcatacaaggaaaccagtgggtgagctcttctggacaacgcatcggcttgaccattttcaggaccctc

SEQ ID NO: 87893 - DNA, 529 bp, Zea Mays
ctagattcttattagcagttaatcaatgctatcaaggtcttttgtctgattactccagtacgatactacttctgtgttttgatggaacttttgttgactgtttggcacttctttgtggacctatagctgacgagtgacgacctaatgtttagagaattgcttgattttgtttatgtataaaatataactaacagatttagttgagtccaaccttttggcttcaatgttagttctttgtatacgaaatttgatactttcatggtattaatcagctagacataagtaattttgtattatccatatatgttccacatatttggaactacttaatggtcaaatgcatatatctgatgcaaacaaatgcagagtgatagggcatacatcttagtggaaatcctctacaattaagaggcatactgacaacggataaattctgcatttagctgttcaacttagaattttttactatccaactttgacacatttacagactgcttgatatctgttgtatatgaatgcttgatatctg

SEQ ID NO: 87894 - DNA, 417 bp, Zea Mays
gtgcgatcaactgcaagggtgtctcgtgagggagaagaaaccgaggtcactgggacagcaccaatttcagaagtcatggaaagatcaggtctagttgtgacagagggaaccattgacgaaggtactcctgatgccgaagctgaatagactgttgttgaagaagaaaatgttgatgaagatggagaagattacagtattttgatccccacaaagcccagtcatttagattttgagaaatctactgtgtccgaagacgacatgcccatgatgatgaaattgggctattttggagaagatgaaagcaaacttattcgattcgctagagaagaaactaccccagtgccgaagaaggatgaagttgtggttttcaagagcttcttcagagcggggttgcgatttcccctgaatgagatgata

SEQ ID NO: 87895 - DNA, 446 bp, Zea Mays
gtggaagagaattcaacgacggttcagaattgaaagaaacaagaacggagagagtttaaactctcttcaatggttgttgttccccctcccttcactgctatagaggctacagttagccgctaaatgccataacggttctctctctacaagctcccctacccagtagcattcttctctccttctagatggagaggaacgctatcccgcagcggccggtcacttctgctccacgctcgtgcacgacattatccagacgctgctagtgcagatgcggttgggttggaaatataaataataatagtatggtgggggtataagggtatgatataaagggaatcgttgtagagggtagagatatggggggcatagattgctgacgtggcacgtgagtgtgatatagagggaggaatatagaggagaccgctgaacacagtcttagagctcaa

SEQ ID NO: 87896 - DNA, 648 bp, Zea Mays
ctcatatgtgttttccttttatagtctaaggggagcacgttcaagggggctggaccccgacaagcaggcccaaaatgcttgcattaaatataaactacctaaagctatataagcacaatagtgtcctacgcagcagcgggcgtaccgaggctccgagcggagcctcatgatggcattgctcacacgcccgagataaacgcctcggtaacttgcgttactctgagtgggcattgaatgcgtgcgacacgggcaaaccgctgtgtaccatggtaaggcgtggagcggtcttgtcgttctgtactacctgtcacaccttagcttgcacccctcaagccctctgcaataaaatgcgagcaccgtggctgctggcagagaatatacttctaggcaaaggtttgtgccacgggcctaggggccacgtggcgatttcggactcctccctgcgagtactaagaaagcacgcaagatgtaggcctcacgctcacatctactaggggtctgggcctgactctcatggttcggacgtctacacgtgtcagatcgggacctccctcgggtagcctttggtggtgtttgcaggggtccaggccccgccatggggcccgaatccatagaggtatctcctgagcgcacactcactcattgcac

SEQ ID NO: 87897 - DNA, 373 bp, Zea Mays
ttgggaggagccggtcactccttggcaggacatgtcaagggctgggggagaatcgtctatgttcaaccccatccctttctagccaagcttcaacaccagctctctcgccatcttttatgttggtctccccttcccctcagggtgtctcgactccgaggaagaagatggtccgggcattggcctagacttcttcgggctgcgcgaccccaagtccatgctgcagttcctgtttgcatgcaacgatttactctctgacagctcggatggctacaacaccgatgagggggttatgacccaactcgggagtgcttccacacaggtcacgaggaacatgacagagggaaccagctcgacatgcctcaggagaatgacg

SEQ ID NO: 87898 - DNA, 545 bp, Zea Mays
ttcaaatcagattattctttacataaaaccattcctccatccaggcccctagccaccttttccgaaacgtcggaactagataacttacatcagaacaaggaacaaagccataacaaccaaaattattatgataccgctccttgccagtggccttcatctcttatagcagctcgtgcatgttgcagaagcactttgcgcttggctctagcccttggctcctcacggccaaaataaaaatacccatcctgattatagcttcgggagtaatctgatgaagaaagatttcaaaagtctttaacacttcaaccagaaatttgctcaatggaaaccgaagtcctgccttcatgaagctccttgtaaacaacaacttcatcctccttgggtgcagggtcggtgctgtaccccccagccctcacaatagacatatcacgaaaatatcttcccttcatagcatcaatctgactctgtttgatggacgactttccgaagatagtatgactcgaccgccaaggccaatcttcggcatcttcgttcccactttccac

SEQ ID NO: 87899 - DNA, 336 bp, Zea Mays
ccacaatgtctaggttttacgaagctatggagaagaccaacacagaaaagatcactaatgagattctagctgggttgtctaaatatttcaacgatagtgatagtttttatgtggagagtgggaatgaagatgttgaagatcggtcgtggaggccgagccatgttgtctttgggaagtcaattatcaaacaagggcaaatcgaagtgatgaagggcaaatattttcatgatatttctatagtgagggccaggggaaagcactgttccccttcccgaagctgatgaggtggtggtctttaaaagcttcatgaaagctgggcttcgctttccactacac

SEQ ID NO: 87900 - DNA, 883 bp, Zea Mays
cgaagaacaagtgggggaattagtgggatttctggttttacttggcgatgaaggacgccaaggggattcccaggctgcctctgaccattttgtgctcacactactacatcgccttcccacagtttaaggtgaggaagggggatgcgaatgaagatgccctgcaccgcacatcaaaaatgagcagtgatcgtgacttggtggaagagtttattgcttgcggagtgtggccactggcgcacagttgggaggtgggcgaggtaaaactgtgtctactgccatttttgaagaatcagatggtgatgagcccagccttcacaattgatctacgtggttaggatggtgcgacctttgttagggatacaaaggctgaggtggtaaggactgttggtaaatattcgacgaagactaagatgacgagaagctaggatatacgcggttcgaatgttaggctaaatcatgtgtttcagctgaacgacctcctctatggcctgtatcctaaagagggatccgctgatgttcggggtgctgaggagctcaagaagaagggtggattgaagcatggtggggtggacgaggggtgttccaagggtaaggctgtggtgtcgccggtgaggaagaggagaaaggtggagacaaaggagaaggggtcggcgagcgcgactcgagttgcagaggcctcagacaagtttgctgaggagctagccgagagaagcgctgagccgggggaggtcatgtgatcgcataccctgcgggaagcatctgctcggatgttggaagtgactgggggtgagtggtgtagagatgaccgtattcctatggcttccgacaaggacgattctacgtcttttctggcttggtattttaaagtttttcgttacgggcg

SEQ ID NO: 87901 - DNA, 381 bp, Zea Mays
gcagatttattccgaatttctccaaaattgttaaacccattactaggttattgaaaaatgatactaggtttgactagtcctctaagtgcaatgaggcctttgaacagctgaaagtattgttgaccactgcaccggttttggcccaaccggatattgaaaagccatttgatgtgtactgtgatgcgtcaggcagtggacttggatgtgtcctgatgcaagaaggacgagtaatagcctatgcttcaaggcagctgcgccggcatgaggaacattatcccacccatgatctggaattggctgcagcagttcatgcccttaagatttggcgtcattatctgcgggggaatatatgtcacttatatacgaatcacaagagtttga

SEQ ID NO: 87902 - DNA, 424 bp, Zea Mays
gccaggggtttctacgtaagaattccaagactcagtacacacccgcgatagactgcgggttgatttccattttctccgaggactatcaagcaaaacgcccagccaaaagggtatgggatgatacccactgtacgatcccaagccgactcctagattatatcgacgctagttataaaccctgtttcacgaattaccgccggatcagaaatctatgatccacggcgcatgatcctcactttctcacttgaccgcccgattgcagatctacggttgatagtggttgggacgaaggggtatggaatgttataattgtgaccgttcaacccggatcgcatggcccaaggccatcttctctccctcgcccgaccgatatggcggcgcttcgccggggtgatgcccaaacgaggccctaggccctaacccg

SEQ ID NO: 87903 - DNA, 621 bp, Zea Mays
attttgaaaaatattacccatttatcactatttgtaggatcgaatcattttattttctattcgaaggcccactcaactcatcgctcgactttgacaagatgatacctccaagcagtggctagagttgccaccacctccctggacccgactctagaggtcgaagacgtggcttaggcaatcctaaactaccatacctctttctcactgatccttaaacattgcacatctcccaatatccatgttgcccctccacatctgatgttatccccttcaacatctttctaacccccactttgatgtttggtgactgtgatgctccatccctatggaagacaacgacagaacacctatcgttttagctaccatcaccatcatacacactactcatgtagggcgccatgtatgcgttggactaggtatggctacaacaatgacgtttgggcctagcattgcagacatagggctcccgcggtgtatcatctcttgccgacgatggcatgttgtcgaattggctcgttcgaaagactagggcgacatccctccaaccatgttgccaagccattgtttatcataacttacagttagaatgagattttcaggaatctatgggtgaaacaagca

SEQ ID NO: 87904 - DNA, 707 bp, Zea Mays
cattagttagcaagggcactgggaagaggcccctggcaaccggggctcaacaaccagtaggggagaaaggaaaggtctggcctagaagcattcaccctcggacgaaccctgaggccatacgtggcggagtaggatagggggggggggggggcaggcgaaccaaagggaaaccactcgagtggatctctcgctcgacccgagaccgatccaacgtaagtgactagctgcattaaccgtgcctggcaccgagccacggcagagacgccgatccgtctctcactcataacttacgagcctctcgggctacagcgcactcatgacctacaaactctcggactgtggcacatttattgttcgcgtgccctgacctgcgacacactcatagcctaccagggctaggcatgagtgcacatgccgcttgcagggcacaacgacacaagccgcaccaagacccaggctacgaaggccaggggtctacgtagcttgaataatggtgactgggccccacgctacccacgccatccgctgtaaagaatacgagacgactagacaacccccagatgctcacagacgcacgtgacttcaccaaggtagaacactcggttttaccatcgtccggtgacttcttctcgaggaagacatcgatgcctgaccccctccttaacctataaaaggaggacggacaccggagatagaggacgaacgga

SEQ ID NO: 87905 - DNA, 744 bp, Zea Mays
ggcgaacggaggggaaccgagctccagcaagcttataccgaccggatcactcgatgaccggtgctctacttcggctgagaccaaattcaaaccctaacaagagtttcccctcaactaatttcactaacggcgctctaacacgctctgtccacggtggcagcgggcacgacgaacaatcaaacgcgttcctgacgatctaaggggtcttagtctaattggcggggttggggagcatgaggggcacacaagaacactgaaacgaaagggcagagggtatgagcggacctgagacgagctagccacgacgaggcctctttcacggtggcggaaagcaggtttgggggaagtgggaaattggtgagctctagtgatcaattgagggcacgacttggtggcttggtgcttgactaccctacggagctcatggcgtgctcaacttatagagttcgtgagcggtgttgcttaatttcgacgaattgcgctggcggtcgagaggggaatgagtcacggcggtgatctaccgtggcaaccgcagagcgactgaactacggcggtcattggatggtcacttcggctcatactgacgcgataaacctcctaaggcgttggcgtccacccggtgaatggtgaacacgccagtgattgccgctcggccatgtcgtcggtgtgcactgatgaaccatcaagcacatagtacattccagcccatccgcgatgagatctttcaccccgtgatcgttatcc

SEQ ID NO: 87906 - DNA, 739 bp, Zea Mays
agacatcacagtgaactcgtacaacccatacttggtaatgaatgtcgtcttcggaatgtctgaaggtcgaatcctgagctgatgataacctaacctcagatctatctttgagaacacactggctcctctcagctggtcgaatagatcttctattttgggaaaggggtacttgttcttgattgtgacttcattcagagctcgataatcgatacacatccttttggtgccatctttcttctccacgaattggacaggggcggcccaaggcgaggtgcttggccggatgtaacctttctctgatagttcatcaatctgcttcttgagttcaactaactctggtccagatactctgtaggctcttttagaaatgggggcggtgctaggaagaagtctatggcaaactcaacttttcgctcaggtgtcatgccaggtaaatcttccgggaacacatttggaaattctgacacaaccttaataatcttgagtgaatctggctccttgctatcaatagccatctgataacaacttcctttctttggctcaggtgggactaactcggtcaccacttcctctcctagtggaggcatcaacctaattgtcctcttatcacaactgataactgcctgatacttatctagccaattcatccctaggatgacatctattccctgagtacccattactatgagattagcgggaaacactatcccccttatttccacacttacattcaagcaaa

SEQ ID NO: 87907 - DNA, 466 bp, Zea Mays
ccaaccgatactagccataattggcactaaagggtccaaaatgtaaataatctatggccacgtaatccccttagtatcagtcggatggataaaatcggtactaaaaggaatgcccaatgtcttctatgtggccctataaccatgtaaagccatcagcgattactaaagacaccatttagcatcagtccattcaatcgaaattgaggtcttatttcaaaattctaaaactaatagctatcggctaaaattagttgtggggtttagaaagagtcagataataaatcagctaaaattatcgtgctcatgtgaacattgactcgttttaccgggatccgataaaacacataaaacatttcaactcagaccatcagcgttaactactaattcgttgtaacagatcaacttctatttaaatttttaaaatgacgcttttttagggcagctacctatacaatgccaacccccc

SEQ ID NO: 87908 - DNA, 505 bp, Zea Mays
ccctaatgtccttgatccactgcctatttagcaagacatccttgactgtcctttcattgaaacccctctttgggattagcagggagagcttcagagccatttggtccaaggagcccccatgcaaccatttgtccgtccagaaaagagtactttcctcattcccaactgaagtcaccaccgagattgcaaacatagcagcagcattaggaagcacctaaatatctaaccccgaccaaggccgatcaggttgagttttctgcaaccaaagccacatcatgttcaaagcctaacctagagactccagattataaatgctcaaaccacctaggctctaggggtctgcaaactcggttccaattcactagacagtgaccccctttaacatctttccttcctttccataggaagcctctccttatcttgtcaattgccataatcacccatttgggacattgtaaggcaatgaaatggtaaaacatgcactgtcgtttgaattaccttgaca

SEQ ID NO: 87909 - DNA, 1202 bp, Zea Mays
ctgccgctctgacatcctattggttttgactctaatattttctaagaacttaggtctgtagttcctaaggtttttgctgcatacaaacgacactggtttgtattgtactttgatctgttggtttgagtccttagagggtttctgggttgaactttgggatcaaactcacatgctcgcaagtcgagaattttagtggctctcatccaccccctctggtcgcctcataggtactacaattggtattatagccagttaaggatttcccttccttaatctgtttgaaatccacgtaggtgacatggaatgtggtgttggcaagccaccattctttgatggggccaactacccatattggaagattcacatgtctttgtttcttcaaagtattggatatcgagtttgggatatttgcctcgatgttgcgtttaatgctgcaagtgaacgaatcaatccaattcaagtggagttccatgattcgaacaacaaagatcgcaacactttattctcgtgcctctcgctgggtgagtttgagtgagttggacatttggctacggctcacgagatctggtccactctcgagaaattccatgagggcaatggtcttgtgaaaaccagactctttgaggtgtactggcgagagtacgagaactttgttcagttggctggagagaccatagacactatgttttcttggttccagtccattgtgaacaagatgcgtgccaacaaggcacagttaccctatgatgatcatgagagagcactcaagcaacttcatgatctagattagagggtttggtaggtgaaggtcttggcgatcatggattcgctcaactacgagtttctcaccgtggatgagttgttcaacaagctcaagtccatcaagattgaccactaaacttgggccaagattgagaaccctggtgcacccaccatgtccttggtctctagaggtggttcctcctctaagcctcacctgctatgtttgctttggcttctttgttgtctattatagaggagcatgtggagagcctcgagatgaggagccgacactggtggccagtaggttcatggggttccacaacaaccactagaaccgggtgacgcggtgggtcgaaggatggagtcttcaactacggcgacctcgaccactttgtcgccaattgcctcaataagggcaagtctgaggctgacccacgtga

SEQ ID NO: 87910 - DNA, 510 bp, Zea Mays
cccaaaatccactttcttctctttctgcattttaccttcatatttggatctttttgcagctttctgctatgagtcatcaactctaatacccgcctctaaattttgatcgtcctcttccgaatggatttctctttcaaagaaaaaatcatataaaaacaatccaagagaactttccacaactccaggaacagcagtgacatccctacaagcaattctagctctcacatattcatttctgagtctggttctttcatcaattttgaccactttacccacgagtccgccaacttttgcaattgtcaccagagatctttgctccattggaatgccacttatcctgaaccaccctttttgcaagcagcctttagcattgactacaggggtccaagggtcaattgtgatatgagctttagttgttctcatgcctaagggtctaaagtatccaagatcccctatcattttaggatctggaaatctcattacaaacttattgtcccccacagatctagc

SEQ ID NO: 87911 - DNA, 566 bp, Zea Mays
atcgtgtaaagaccgcaagcggcaagtggtaaccttacggccgggcagccgcacattgtgggaatctgcaaagagagaaaatcgggcatactgtatatattgtatagtgtgctatcgcgttaaaaagtggtggaatatgatactgaaacgaggccctgcattattgccctctcgcgtaaattctccgtacgtacacacatcgttttactcgtggtggctatagatgttcaaacgtatcatccgctacaattcaatacatgcacttgataggcacgacacgaacgacacgaattggctatgccagacacggcgtgaattgaccggtatggctacaattccatattagaccgggccaatacgaacgttggtagctatgtctaggcacgacacgacaaaccctagatcgtgtcgtgccatgccggaggcacgatcatcacattagggtcatgccacccgctccagcacatctccaccgcttctattttgttaccgttgtaatcaacacaaggtaggagcgctcgactctgtcgtcgccagcctcttgttgtgcttgccccgactttgcc

SEQ ID NO: 87912 - DNA, 372 bp, Zea Mays
tagtctctgtccaggcgttagacagaggcgtttcagatcatacgcctctttacattgacacaggatcaccagttttcctagggggctccaagccgtttaggtttgaacttagctggttcgctcgtgaggacttcttcgaaaaggtggttgatatgtggaataaaccagtaaaaggcaacaactctgtacaacgttggaaccgtaagcttggcgcccttcgaagctttcttcgagggtggtcacgacatgacagaggtatatacaagcaccataaaaatgagctccagataacgataaatgatttggatgtaactgctgagggtagggacctatctgaggaagagcaagagcaacttgctcgtgcgagggagg

SEQ ID NO: 87913 - DNA, 407 bp, Zea Mays
ttggtatcgaccagctgccattaaattttgtgcctctaaagctcattcagcctttccgcttttgtgtgcttcgagaatccaagatctagttggccttcatatgacgagtattaggacaattgctaaggtagcaacatcgacatcgtcataagcattgcagaaagatgaagaagctatagacaccaaagtcatgcaagggtctgcaagtattcccatttcagaagttatgaaaggaatgacaactaagttgaagaaggggaaggctgaggaagcaactaaagaaggggttgactcagaggagaatgtctctgatggcgaggatgatgttgttgtggaagaagaaggtgatctatagctcttcaagcccagttatattgatatgggacggtctcttatacaatcaattg

SEQ ID NO: 87914 - DNA, 1326 bp, Zea Mays
gggatgtgactcagcctctggctccatcagagcagaaggaatatctgaagacaagaaagattttgaccaactaaatgaatctttatgcagcaagttggataagaaaaagggcgcccacttcttgggaacctgcaccgagggcaccgaattaccaaccggggcaaaatagttagcccagatcctatagaactggtcattccttttcctttccaagtgactcagcaaaacagggtccggctgccagtcttgcgaaaacataaagttcaacaccacattgctggggccattaacgttaggctccaccggttgagcatcagggataacaatatcccctggcacatggagatctccctgaattggtgggccgtcaaactcctggagcccaatcataggggcatcacccaaggtagggggcgggggcattaaagtggggcaccggcccaacaaccaccagatcaacaggaatctgcccattctgaatctgcccattctgcaacggagcaccatgaatgtgactagaagaactatccgaggacaggtccgaatgcggattgctgacctgctgttcgtcaggtggcaggtccagttggggctgctgcacaggtggatcattaacaatccattggtcccaatctccttgaatgttgtctgctagctgggcttggacattgtcttctggcgggaaattaagatcccagcccgcagccggcacaggttgacccagaccaaaaaactcaagaggaagctattgaccatcctccgggaccactggcaccgtgtcctcatcttgaggctgacccccagcaaagtttgctggatgatctcgcactgcactgtccacgagtcaccaataaagccgtcagcttctgaaaaacaatgaactgtgggacctcctccagagacgtgacccgaaccctgagcaaagtcctgtaaacattgcgtctgtcctcttcccacaagatcaatctaccgaaagaaccaatagccgcctgcaagtattctgatgaacggtaatccagggggaatcccaacaacataagccagcattcccgattaaataaaagggctatatgattccaagcatcgttatgccgctgagcagtgaaggaggcatcgaggtattgttgcggaccgagcaggacgagattgtctctttcaagcacgctactaaactgaaccagaacctgacccaggtgcgaccgctggatatcgcgcaccccaagccgcctgtgctccacaaggtattctctgaccacatccctcaccgccaggaaagtaatctcatgatcaggtaaaggttgaatgttgataatagcccagtcctca

SEQ ID NO: 87915 - DNA, 419 bp, Zea Mays
tcagtccttaattgcgttagcaacatgattcgttctgccatatatgtgtgcttataggtgtccccatgtgtcagccacctcaggcaattactcagcttctctagccacttaatcaagtactagggatcatacttcattgctcttagtccatcaacgtgaatctgcatgtccttcaccttagttgtcaaccaccacgtctacgcacaataagctaaaagacatgttatacaaacacatgctcatgttagtctacatgactcaacccaagaagcaacttcattaacaaccactcatcacaagttcgaaccataaggacacacaccaagtgttcaaaaaaacaaaacctaaatcacgatcaggtgcggaaacaggggcacatagggatctggctcctgtaacactctcataatgccctatac

SEQ ID NO: 87916 - DNA, 953 bp, Zea Mays
ccagattgtcacgggaagcaacgagtgctcatttttcttcctgcaagcaataacaacactaagcattgaagcaaagagagcaaagcaggagcagccaaggaagtttacctcttgtgccatcttctcggagtcaagctatgcatttagagaggagttcagggagcgagcaccatccaagaaagcagaagtttggattaagtcgacctagctctaagaatacttctcttcaatgtcagagcaccgccgagccaaatctgataaagcagcagaagaagagcgcatgacttagattaaactgagtggtgaaagcgaataaggaaactgtgggctcactaaccaatatttgacgccttcaggtcatctatttgtttttgaagcagcagagggttccactgcatcagagacgaagcttggtcggggacaggagcaccgcaggatctcagttgggcagtacaccaccaagaaaatcctatgatcatggaaagataagcaaaaaagatagtttgccagtaagaatagtaaaaaacaaaagttgactcacctggagattggagaggaataggggaagacccaaagcagcaagagttggtgcattgcttgatgaggggagatcagggggaataatatcaaaggcatgactcggaggaattttgaccccatcagcagacggcaggctcctggcgtctggctcactggcttctaaactgaccagaccagcgagagccatagaaagatgcgtcactgtagcctccttggaccggactgggggcgatccaacgtggacgtccatagaagcagcagagagggaacctgtccaacaccctcggaggctgggtcgttaccagcaccaccctcgggggctgggccttccgcaatagccacctctagggctgaagattcctcagccatgttgataggagctggatgactcggatcagcgctttcgcaagacc

SEQ ID NO: 87917 - DNA, 674 bp, Zea Mays
aacgcggtgacggtgggatcacagtcggggcaggtgagggcacggtgaggggtgtggacgccatccatgcacaggcgtgggatggagcgggggtatggcctaactgtggacgtcctcaccgcgttcttatagagtagtagtagattaggactgagagtataaaataaggatttacgcaccattagtattctacgacaaagaatggttcctaagtccttccatctcctaattaaggcaaagtatccaatgcacatatgcacacataaaatccagaccctccatctagaatccaacgacacctgactcttttgcaaaaagaacctcccgcgatagctgccaacggttgttgttaatttatagaaaccccccgcacccacttggactcataggagaaggcatttacgtgctcttgtacccagttgctgcccagctcgtgagtatagagggctgcccaccgccccagctctctgtacatgtacacatacatgctcaacacacatacaggcacagattaggtataaaagtactaatatttttataagtgcataattggatttaaagtatcaagctaacataattatcatccaacacagttgttgataaatattacatgatttgagcaaaataaacaaaataaaagactactaattgcttcgctttgtcttctcgttttt

SEQ ID NO: 87918 - DNA, 506 bp, Zea Mays
agtttattgtatttttagatgctgaattgaagtaaatactatcttagtctatgtttgtggtatattttgttttagcggtatatttagccgcacaatatattagaagctgtttaaaataaccttagagtggcccgggacgttaattttatagagctccgccactgcaatcaggtgcatagaaaccattccaatacactgccatctctagctagttgttcctaagctcggccgagggagataatgtgaacgtgagcgcatgagtgggcccaagctgcttccttgcccccctggccagcatcgccgttgtaatagacgattagacgatggacataaagcagatcgaatgacgtcgatgtcgtggctagctagctacagtacctgtcctagccaatattagtagtagctagatgcatgcagcaggggcggatattgttgggcggtcacatatatatgtttcgggttatccatccaacaacagtagagaaaattaattatggacgtttcag

SEQ ID NO: 87919 - DNA, 300 bp, Zea Mays
cggtagtgaaaaataaatatctcttaaaaaatagggttacgaaacgtaaattcccatttgtgatattaatatggacaggaaatcttggacgatcgagtctgttgagaaatatccacttctcatgcagacccacaagaagctccaggctgctgagtgcactcgtcactcgacagtacatggagaacgagaaaacaactagctccaagctggtagccatggtccaaaagatttgcaacaagcttaaaaccaaataggccaagcttccaagtgtgtaacgatgctctgtagataataaatctt

SEQ ID NO: 87920 - DNA, 1619 bp, Zea Mays
attcgccaaggatctgacaagaggtttttctgattttctaaaaatgaaaaatggaagttagaaaattaaagtgtcattccagtaacagcaacagaaaaaacaaaaagatatcacataccagagtcaacagcttttatttccctaagtgtagcatctggggacatcaatggcttgataaaaaattgggcaaacctaagattagatggcacaagcataagtgaaatttctcacaaggaaaataaggttaaaaaataaagaatgcaacaggacgtacctatctaaagcatcgtgcaggctatcactgttcacatcaaaatagaagtttgtgtgttcagaagatgtgaaagcattcgttgaaccaccatgctacaagaaaacacccattatccaagcactttaccataagcaacacatagcgacataaatttagtgtagaataaaatgcatgggtagtccctaaacttgtcctagggtaccaaccagatccccgaactctaaaaaggtatttttagagtccctcaaaatatcattgccaggttccaaacttatcatatggtgtcatccaggtccaaacaaaggtggtcccacatgtaagcctctaccgtccacctccatgctcacacatctctttccctcttcctctctccacactccaagcggcactgcatccccatccaaacttctgccttcatcatcatccacatcgaaggtcacaacatccacagtagtgaaggtggctaggccgaacacctaggcggatggctgctttgctagtgagttctcaccgcagtcaataatgaggtgtggaccaaacctccatggcatacaactcagggcatggagatgatcagggcccatttggacctagacaacatactatggcaagttaggtgacctagatgacactcatgacaccacgagacaagtccgacctaacaatggcatgttaagagcttgggcccttatattggcatgatatattatcatcttttggtcttaataatatcagtcctaagagaagggatacttgttttgtggactggtggaggaaagctcctcacagggtccataaaaacaagagaaaggggttcagtagtattatcattcttggagcctggaacatttggaggcatagaaataagtgtgtttttgaggggaagcatcctcgcttttcttctctggaaggaggatatagggatgagctccatctatggcgcttggcaggggctaaatacttaagagccatgtttgatcctggttagatttgaggatctctcttcttctgcaccgcttgtgtgcgtctgcggtgtgctggtggcctggagtgtgtgcaggcctagtatcttttgggtgtgtgtgtgtgtgtttgcgggtgtgtgtgttggttttcctttttgtatgattctggccatgtgcctttttttcttctcctattaatacaaagatatgcagctctcctacgtattcgagaagaaaaaaagagcttgggccctagaagacactcaaggacaagtttaggaacctaaaaataaacttatgggtgttcagggacctaaatgaaacccaggacaagttcaaggactgctcatgtattttacttttgagtgtatgaaatctgc

SEQ ID NO: 87921 - DNA, 909 bp, Zea Mays
ccagtgtataagacacaacttgaaagaagctcaagctcgacagaaaaactatgcggataagcgacgttgaccattagtcattcaagtcgatgatcatgtatacctgaaagtatcaccggtgaagggtgttagcccgttcggggtaaaaggaaaattggcaccccgatatattggtctgtttcccattcttgagtgatgtggacaagtagcatacagacttcgattaccagaatcattgtttgtggtgcataatgtgttccatgtatctcagttgaagaaatgccttcggattccagatcgaactatagatgtggtggatgttactttggaaccagacttgacgtattcagagcatcacattcgagttctagatcaaaaagacagaatcactcgaaagaggactctcaagttttataaggtacaatggaaccaacacactgaagaagaagctacctgggagactcaagacttcttaaagaaaaattttcctaggtttttagcttcatgtaacctgtaagatttatgtactttattgtaaagctggaacgaacccccaccccaccccctgctctgtaagataaataaggaaatgaagttgtgacgcgtttccttttccactactgaccctaggaccttaaatctcgaaacgagattcttttatggtgggaaggatgtaacacccctgttgttataagaactaaaacttggcatgacatcatatgcattgacatgacattatgtttattacacctagaatgcatccactaggctaaaacttcaaaacaagttgtgatgtgatgacttgaagtgcttcttaaccctagaatagggtacttaaccaagggattgaggtatgtgggagtttgtgataccaaattgagtattatctcaaaagttagtggaaatgtt

SEQ ID NO: 87922 - DNA, 501 bp, Zea Mays
cagaaggtcgtcaaagcttttagtgctgcggcctcagtggtgtcgttcgccctgaatcagacagtttcaaaatcaagtgaacgtcacccaggctgcagagggtgagactccagggttagtaaaaccctacagtgtggcacccagtgctcctcgtacaactgcaccatgtacagagggggtgtggggtacccaacggagcagagcacctcccacaagatagagggaaagccctctcaagaaaggtagtcaaagctgaagcgggtgtctcctccatcggcgggggcaggtgaagcatctgtgaaggaggggtaagtgtaagtgctacggtagcggtaaggagataagcgtgcttaagttataggaggatgcttaatttggattaatctgttttaacccattctcctattacccattcttaactaaggtttttaggggtcatgattcaatagattcccttcaacctttcgatagtcaccttttcccttgttagtgctgatttat

SEQ ID NO: 87923 - DNA, 619 bp, Zea Mays
aaaatccttgctatcctcggaatcatctaacaatccagctagtatcttgtcagcaatcttcgtagcattacttttctccatggcctcgtaaaacccagctagcgcaagatcttcactcttcctcccctcggccatcttagctcaagctaaaaacaactgaaaactaaaaacaagtgtaattcttaatggctcaaagcaactgaatagcacgataaatattttacaatgtctgttctatttatacgcaaactaccattgcaaaatggcctccgtatttcaaaaatttcacgatttagcgacgggaagatgtttttcagaccttcggcacaaggcctctgttcgcttcgcagcctgagttcgttacaaggaaacaaactaatactgcgaggggctactattggggtctttcatctttctaagatcctcaaaaacacagttaaccattgtttctcgacacatatttaggtgttgcaggtgcttcagcgctagttaccttcgaaataagatcaagaaaaagggcaaaggaattagcttcgtcataacagtagggaagacgaatgcaaaagtcaaatgaggctagaagaaggtatctataagatttcgtagccaagatgacaaa

SEQ ID NO: 87924 - DNA, 650 bp, Zea Mays
taaacctggatttctatagaaaaagaccttgtgtgatgaaaatatgggttgcctacctcatacattttttatttttttatcaggcaacattgagcgcagttgctttcacttctgtttcttctagccgattcttaatccaattccccgaggaaagcaaaaagacagttagctaaaaataaatagttgcctacctactaagttctcgattttggttatccaaattctaatcctcctctgctgcagagaaagctcgtggacgggcaacgaaccagcggcgtttccatacgcggaagtaaatcttctcatatcttctacttcaaaatgtcttgcattgtattgcgttgcttgatgacgtgcaacagaggaacaagaggattaacattgtgttttcaaatgtttattacaccagccatcctcttcgttttcggattgcagtacgtgctacaatatcacatatctcgggtttatccgaagaggtaattgggctcttgccttgtcttgtactcaatttctacgccattgtgtccttacatgagattgttcggtgccataccacttcctataaccacaattcattcgtgtggtgtgcctgctacatgctgccttcccctatgcaccaacgcttttatcgatttggttcataaacgtct

SEQ ID NO: 87925 - DNA, 811 bp, Zea Mays
gcttggcctttgcgtccctagctgtaggacttttctgagatcaaattgtctctattccctaccattaaaatttcccaataagagcctattttctttcatcagcagacatactcttatataatatcttgtgtgtacataattcttcacatttttgggtaacttatagggcgaagagcctctgagaaaaatgcctgaacgaccttcaggtgatgttccttttgatgactctgaagtggatacatcaatcggaaagccaattatgggaccaaacgaagcttcatcttatccagaacaggctcaggcatgccttgctaatgatttcttgagaaggtaaatcatctttgtatgatctgatgattcatttttaactttgtttcttgtggatatttggagttctctagtgatgaaaaaacattatttcaccttgcataatcacccccctctcacttgacttgattctttatttattttataggtttgatattgatgatagatcggtagtctcacatatatttcatcattggggcaagaagcaggcatttcaaaatccaaagagattacttgaaaaggtactgaaatgttcacagtgcgtgaacactctggaatctggataccaccagactaggatactctgatgtcttccatcatcgcagtgaccatgcctttgtgacatttactactaaagctttgggattgccagtgcccttttatgtctatttcatgttaatggtgtgcttgaattttcagatcagttttgtaattgatgaacgcctacgtggtaaaggatacaagcgcaaggtgaccccttttc

SEQ ID NO: 87926 - DNA, 655 bp, Zea Mays
ttcagagagaagtttgatgaaccaaacgatgactggttgaaatgcattgaagctaccagcgacgagctgcttgggacatattcaaaggccgaagatgatgccttgtctgtagccttcgggggtcggggcaagaaaagattgaacagggtgtttgatgcaattcgcttcgtataccctgattatcactacccattgcaaaggcaaggaaagaagaaaaaaactgccgcttcggccaccactgctgtgccgaagggcaagaaaatgaaggttctgacccaccggctgcgatatattgaaccggttgtagtgcctgaatttggtgaagggacctcttcaactgcggaagcaaaacaagctgctcccaccgtgcagagcgttgaagaaccgattgtagtgccgaaggtgcctatagtcgggccagccaaagccaaagatgatgcggccgaagagccagaattggaaaaaatagtgataatgctagaaattttgagcccaccagcaaaggcagaattgccgaaagtgcaaaaggctcctaccgaaactcccaagagaaggaggatggccagcgtgctagacgctatcatggagaccacaaaggccttgagccctgctcctactaagaaagttgtcgaagctgtcaaagaccaggccgaag

SEQ ID NO: 87927 - DNA, 430 bp, Zea Mays
ggatggccggagggcagcaccagcttgtggggggcacgagtttggagatgcgccgtgggaggaagaccgactacctcaacatcccactcaaggacagcatcaaaggatggcgcctggaatggtttatcatggagaatcatgggaattccctccccccatggttagggagacagccagatgttcgcactccgagctggaccaaatcccccacagacctggaggtggctgaggcaggggctctacttgctgaggttggattgttgaaagagaggggtctgactgcagaagctgtggtcgctgatttcattttcaagaacattcagccactaaaagacagagcatacccgacttatctgtatcgaggcctcgctgattcgacctgggttaccaacagaagaattcctgctgtggatttggtcagccggctcga

SEQ ID NO: 87928 - DNA, 438 bp, Zea Mays
ttaaggtcgaagaccctgtggtgaaggattccgtgggggcactcttcgatcggatgtggggtcctcatggccgggaggcggttagggagcggtctgatcgggcgagagagcaggtaaggcttgtctgttgtttcgtgtgattgaatgtgggtttgctgaatgagtgtgctgttgctgcagatggcgcgtgccgaggatgtcgaagaccttggggctctgaacggcgtgcggcccgaggccgaggtcaacctggtgctgcccgaggctgaggtcaaccctgaagctattgagggctcctccgccggacctgtgcccactgtgtctggtgaaggctccttgccagcccctgcgccgacggcggagggccccccgaaggcggtggcggagctggcagcggaggatcccaaggcggcggtagggccttcgcaggtggcttag

SEQ ID NO: 87929 - DNA, 1126 bp, Zea Mays
catgcaacaaacaagaggatttattaactccagcctgaaaactcactctcacagagaatcaaactcaggacacgaggagggctactcaagctatctaatcaactcagctagaagccctttcgccactttgctgataatttatttagcgtaatgaacacattgcaagtcagccaataggcgcttctaaatatttagaacaaacaatcatggattaggaaatgagactcctagtgcatcaattgaaaagactaatcatgaaagacaaactcaatgtccacacaggtttagaggcaccattccttacaaaataacaccctagcagataggaacactacaaaccttcatgtgagtttgaccatttcatttgtctccctgcactgggcacgcgtggggggatattggtggcttggaaggggggcacttgtaaggttcttcagaccagagtagactctttttcagtatatgttcaagttgatcatatttctggtactccttggtggtttactggggtgtatggccctcaaccagatgatcagaagttgcagttcttaaatgagttgcgcacaattcgctcggcatgttttggaccttggattattggtggggactttaatcttatatatcgagccgaagacaagaacaatagtaaccttgatagggctgtgatgggtagattccgtcgtattcttaatgagttaaatctgtcggaactgccattgatggggcgcaaatttacttggtccaatgaacgagcaagtcccacgcttgttcgtttagactgagtctttcacacttcaggctggggggattatttctcggactgtgttttgcaaagttcagcaacattcatttcagaccactgtcctcttctgttggggctgcatgagtattcccagggcaggagacggtttcactttgaaagctattggccaaaattggaaggttttatggagaaggtagaagaatcttgggtacagccagtgggttccttttgtccactgcaacattttgcagtgaagttaaaaagtctttcgaaacacttgcagtcctggagtcagcggagtgttggcaatgttaagaatcagctcttagcagctaaggaaatcatgcaccagctagaaattgc

SEQ ID NO: 87930 - DNA, 654 bp, Zea Mays
tataaagtatcctatgcatagtggagaactaataacatcgatctcaaatctagggttgtaggtacgtataattacattgctccacaatatggatcaagagatcatcatcctaccttattgttgttcacttatttttgactcctggaggaaataaaaaacaagggaacacaaatgaattaaccctttcttcaccctttaattaactattctcaatgaggttaattaaagggagacggttagaaagataaacaattgttgaagaaattagagcatagaaatgtgataaataactcatctcaaacatattactcttcttcatcttttattattgtaagtggttacaattataccttcaactttacaaaggataacacgaaggaaggaaggtaatatagctttgtaggtggagcaatccagttctcccccgcaaaaaaatgtgttgtatgcatggcattgtacctttatttatagtggtggattataacttcattaaaattacaatcatacactcagttcctatacacaaaaactataaattccgtagggacaacattgtcctttacattcatagacgtgttgaccaagcttctagatccttttcatccacttttgctcatgtgttggtgttgcggaactgaagctctctccttttcc

SEQ ID NO: 87931 - DNA, 1379 bp, Zea Mays
gtggcttagagacggccatggggaccgggcttcctggagtcgaagcagtggaaacggtgctggaggcaaccttgaggtcgagctggacgatgagatggtggaatatgaagaggaggtagagggcacatgcggaggttgcgaggcggcgagcgtgaaggcgagagcgcaagcggagattacggcggtgggtgcgaggcatcatcaagcaatctgactttgcagtgccaactaatgagaatgttgtatgtcacaatgtcaggatgcacattttcgttgggtagcttctctagaagatttaaagcagcatgtgtccatcccactttgcataacccatttatgagtgtattgtaagtcacaatgtcaggtgtcagtccttgattcagcatctcctttgagagctctagtgcatcacatacatttcccgccttgcagagttcattgatcagcatgttatacgagaaattatttggcttaattccctttgtcaccatttcctcaagcaacgccatactccaatcaacattcccctctttgcagagggctttaatcaggccattgtagctaataacatctagctggcaaccatgaagtagctaataatatgttctgcctcctccatctagtcattgttgcacagatgataaatcattgtattgtacgtgcaaatatccggcttgcacccctgactcttcatctcttggacaagccttgtcgcttgatcaagcttgccatccttgcataaggcatatatgataccattgtatccttgggagttcatactaaagcccttggctaacatctgatccagcatagctcttgcgtcatcccacatgccattcctacaaaatgaatgcaacaaggtagagtaggtcatgatatttggtgcacaactgttctcctccatcttatcaagcatccgcactcctgaaccaaatctcccaagcttgcaaaggccatgcatcaaaatactgtatgtgtgcacatcagacgggcatccttttgaacccatcatctcatacaactttgtcaccctggccagcttcccctccatcagacatccacagatcaccgtgttaagcatcaccacattcacctctggcaacctcccgagcaacgtgcacgcctcatcggcctgccttgttcggcacagcccctgcaggaggaacccatatgtcatcgcacttggcatgcatccttgcgtcatcatcctgtccaccagcctagctgcctctcgcacgcgcctgagcccgcacagcctgagcaccaggtcgttaaaggtgttcacgtccgccgcacaccccatgagtaacatctcgtcgaggagcatcgtggcctcggcgaccctgccctgcacgaccagggcgtggatgacaatctgg

SEQ ID NO: 87932 - DNA, 1279 bp, Zea Mays
aaaacttcctaagatgctctatattccatgagttccctatttctgtgccatccatttgagtaagacgatatgatccaggccgagtgacttctgctactatgaatggtccttcccatagtggcgataatttgtgtcgtccctcccccgttagaattcagcggaggacaagatctcccactgtgaaggatcgatgccatatggccttatcatgatagcgcctcagagtttgctggtacttggctgactgaatcactatattcaatcgttcttcttccagtatatcaacatcctctagtctagtggcctcagcttcagctatgttttcgaagatcaatcttggtgccccaaacttgagatcagcaggtagtactacctctgaatcatagaccataaagaagggagtgtttccatgcaaagctcggctaggttgagttctcaggctccagaccacatatgccaactctctgatccactttcctgcaaacttttcattcttgtcgaagactttctttctgagtgcttccaatatcatttcgttggctctttctacctgcccgttggctcttgggtgtgtcactgatgcatatttgatctggatgcttttttgttcacagaaatcaaagaactctgaactagtgaaattggatcccaggtcagttatgatgctattcggtattccgaacctgaatattatgtcttgtatgaattccactgctttagctgaagttagagaagcaatgggcttgtactctatccacttagtgaatttgtcaatagcaaccagtacatgagtgtatcatccttgagctttcttgaagggtccaatcatatccagtccccagcacgtgaatggccatgtcacaagtatggtttgcagttgctgtgctggtagatgctgttgttttgataagtattgacaagcttcacatctctggactaactcggctgcgtaactttttgccattggctagtagaaaccagacctgaagaccttcccaactagagtcctggatgctgcgtgtatcccgcattgcccagcatggacctcatctagcagttgcttcccagtagccgaaagaatgcatttcatgaagactcctgtcgtgccccttctgtatagtgtttccccaatgagagtatagtgagctgactgcctcgcaatgcgctctgctgcatttttgtcatccggctcctcctcattctttatatatctgatgattggttccctccagtcatcagaatttgactctggttggctcagaatattgcactcttctgc

SEQ ID NO: 87933 - DNA, 813 bp, Zea Mays
gaactcacaatgaccacaacaaagctacatcatgctgccaaagaaattgacaacaacaatcgtcccactagtcctgagaggaggaagaggaggccgaagctttggagttattttcaacacacatccaagaaagttgtactgtgtgttttatggcgaaaacaaaggccatacaacaaaaacctaccagataacaatctagaagcagaaagaacttcctactgcagccgctcagccatctcagccgaatgaagtattcagtacatcttcgtactactcaccttacatcccgcaatgtgtccaaccccaggaccccaagttacaacaatcttcagcctcgaatgcttcaatgtaggatatgcaacaacacgacagaagggaggctcctaaagtcagcacaattgacaacatagtcccagaaacaaaacacatatgctaagggcctaaggggctgggttagcaagattgaagctgccattaaaagcactcttacatatcctttatctacttatgtttctttgcaattcatttccttcgcattatgaagatgcatgcttctatcaaacttgcaaatgtaataatgtgcttgcaccttcgagtgcaatgaaaaagtaatggcactccaatggaccatcgtcccaaaaacaaagcatatatgctacgggcctaggtttgcaagatcgaagctgccattaaaagcactcttacatatcctttatctatctatgtttctttgcaatttactctccttcacattacgaagatgaatacttttctatggaacaatgtgccttcaccttcaagtgcaatgaagaa

SEQ ID NO: 87934 - DNA, 420 bp, Zea Mays
cttcagaggaagattcaactctcaaccaaaaagactattttgcttattctatggagaggataaggggcacacaataagaacctgccaagtcacaatatagaaacagaaggagatagctgaggctgaagcatgacagaatcaaccgaagcaagttctacatactgctttgtgttattcccatacatttccagagtatgtggccaaccaactgtggtggaactgcccagattattctagattaagtgccttggtctcacctcacgacaatgacacacacttaagacggaataaactgtcaatgcctcggatctagtccgattgaagccacttacccagggatcaagtaccatttgctcacacgaaggtgaggcacagagaaatacaataaaacataataccacaaatttaaataagtactta

SEQ ID NO: 87935 - DNA, 648 bp, Zea Mays
ctggacaatacaccataccgggtgtatgtctacaacacactggaggatgacgtagggctcatgacgatgggaggagtcatgctttgtatgatcgctccatgagattgaccaatgggacctgcatgcactaccacgaagacattagcaatagacttgctatagggacccatatggtatatgaacaggtcagtacgccatgctgggtgtacgactacgcatgatcctaccaaagatttcaacgatactacatcgaccaagggcaatatatcaccccttttgccagtagagaataggtctcatctgtaaggctctgcccttgaactataaaagggtaggccctctatttctccaacacacaagcacacgagttgtaacacaatctaatacaattccatgatcatcactacactggactagggccccagtatgaaccagtataaacacatgtcttagatttctcatctgagtcctagtggttcaccatttggagcaagtccgcgctagcactcctaccgaacacaaatcttattgtcccccggtttccgaaaccacgacaaaaggcatcccctagaacaacagaacccaggggtggccctcatagaggggtagatgggacaatcatagacattcagcttcctttgatctctg

SEQ ID NO: 87936 - DNA, 429 bp, Zea Mays
atagatgtggatgaggaaccactatcagaaacacctccagtggaagaaaaagtattttcatcaaaagtaatatcacgactgacaatcaccttcttagaatcagcacacaataaacgatatcctttgacaccagaaccatagccaataaaagtgcatttttgagctctaggcactagcttcccattgttaacatgggcataagcaggacaaccaaagattctaagattagaataattagctggtttaactgtccatacctcttctagaattttaaaatcaatagctgaattaggagagcgattaatcaaatagcaggcggcattagcagcttccgcccacaaatcatgcttatctcataaaccaacattagaaagaatgcaacgaacacgttctagaatagtatgattcattctttcagcaacaccattc

SEQ ID NO: 87937 - DNA, 464 bp, Zea Mays
cccaaatatgagttcatcggcataccaaaatatcgctgggactgagaagccccatttgttgtcgatgtggttgaagtagttattttagtgcccaattcatgcaacaaaaattcaggtgtatgagttttttctaatacatgtgtcatattctctatatcctctattatacttttaatccgattaccaaaagaaattttaatggattgaatatcagctaatgacgtggtgttacttacagtggggaggtgctgcagcaaggctgactaggaatcacactttattgccctctccttgacgaccttctgatggcaatctatcctaaagtgagagagataccacttctccgtcaccttgcatatctgagccttttgtcgctggaactcctcatccagtctcttcatgtagtcttctaacttttcatcatcagcggccgataagttagtcagccttgtgttgatgtccgg

SEQ ID NO: 87938 - DNA, 444 bp, Zea Mays
ggttcatcttccacaattgttggcaattcttgtggttgatgaacttcctcaaggattggatgacttgaggttgatgtgtttgcttgggtggaggatttatcacccaccacctttgcgcccatatcaatgacctcatttgtcatccaaaaagttccttcatcatcgttcttctcttgtggcctcacttcacctattgcaagcttctttatggcctcacaaggtgatttttcatttcctgcaatatcactagaaatatgcccttgcgagccattagattcatcaaacgtcacatctatcgctatttcaacaagactggtggtattgttgaaaacacgatatccgtgcgcatttgatgcataaccaagcaagaaaccctcgtccactctaggagcaaacttcgagctcttgactttcttgttgagaatgaagcatttgcaatcaaag

SEQ ID NO: 87939 - DNA, 391 bp, Zea Mays
caaagttaaagaatatatttcaagacggagacatgtattatagctgttaagtctatcaacgattgaccatgacgacgaagcattctctatgcaccaatatgtagtggaatacgaaaagaactaaaaggtataaatttgaaagtataagatgagatgaagggggagaatgttggaattgatcaccaccaattgacccaatggttaaccgggccattgacctcacaccttgatcaggggtgcccagcacaatgcaagcctagtgaccccctgttgtgtaaccttataaatagagaggttagggccgacgactaaacacacgaggttcacagtagccgtccatgcttcccacctttaaacaataaaccaatatagagggaggttgtcagcaacg

SEQ ID NO: 87940 - DNA, 401 bp, Zea Mays
ttgtagaatgatgggctgatgctttttcgacataatgactgaattgtagaagtctacatgaaagagcacccagaagtggttgtcgtcaattcgatcatccctcacgaagcgacgagggtttgcgtacctcttttcctgcagcagttttgaaccgcccttggagcaataatccatggcaggttcaccaccacggcgaatggcacgagcttggtgaagcgaagcccacgggcaatatgtgcctcaggaggagggagtgcagcgacgtagtccatgacgccatggtcatcatccacaggggctagaccctgaggattaggatgagcagcacgaccagctgtagtccgagcacgtcgttccttaggctgggtacaaggcctagcctcgacggtgctagaaccatg

SEQ ID NO: 87941 - DNA, 561 bp, Zea Mays
tgcgggccgaaccgtccggtcatgcctagtgccacaaaatggtgctcaacacatgctccatgccttttggagaagctgagtgaaccaaaagcactagcacaggctagaactaactcgatgtgattacatcggttctcttaggcctcctaccacatactaggatggtattactttaggaaacacctgtttcgtgccttgggcaagtcttcgccttgtaatgtttgcaacaagtaggtgttaccagatattacatatgtgattttgtaagggccttcccatcttggcgaccactttccaaacttctgatcttttctcgttagtggcaagatggtcttccatactaggtttcctaccaggaatgacttagccttgaccttcttattataagctttggcgaccatgatcttgtccctctctatttctcctagagctatcactctcttgtcggttacttcatcaatactatccatcattgaattataatgatcaccgacaattagatcattttgcctagcgaacctgacatcgtttaagcttacctctataggcaacactgcttcc

SEQ ID NO: 87942 - DNA, 508 bp, Zea Mays
cgtttaacaaatgtgttgccttattctttattcacagcaatcgaaaacaagtgaataacattggtgcccacctccagtgaactcaaatgaccatcttcgtcaagaagaactcgaacaactaccttcatcatgccgccgaagaagacagcagcgccaggggctaccctggcacctctggacaccaatcaagatgggctccttctaagggaggcccgaagccaaaaaaggaaagctattagcccaacaccataggaagaagagttggaccatgaaatcagggatctagaagctattcatcaacaagtggagagaggaagggaaaagatgctttggctggctgaacttcagaaaaagattgattaagcagtcaaagagatgtgtcacatcacacaagacaacaagcagacatgaaccacagtagagagagcttcgtcaagaaagcacaagccatgatgacttatggtatgacgactttcatcatgataacattgattttgatgatgctttc

SEQ ID NO: 87943 - DNA, 284 bp, Zea Mays
gaagaggtaagattatattacaaggtatggataaatatgtataatattctgctcaaatgtcgattacaatctttcgccaaacagaagtctaagtttttctacagataaatgcaagacgggaatcctagtcttcaggaccttcggaacatgcttcagtctaacggtcttcggcaccaccatcctgcagatagataaaggtataaggcggccgacaatctattaaaggtaaactaaggtaaaaagataaagataaaagcttcatactgagttaagcagtttccgag

SEQ ID NO: 87944 - DNA, 375 bp, Zea Mays
gagcatagggggataccatctttggctgcggaggaggatgcgtaggcgggaaaaaaaggtaggggccctgctcccgccttgtcatcttcttcctgttcatcgccgacccgtatcgacgcgtccgtggtccatgggcctccccctcacggtcgcgctggataggttggtcttccggggtggtgtcttcggactcggcccagtgcgaagggcggaaggcgtcgacacgtggagtagggttttcttcaggtaaggagttagggtttccgcccgatatcatcggtgctcattcttttccacatttcgcgtcgtttctctctcgcctctggtctcttccgagcgcgtcgcgttccagctttagtggtggttggttttctt

SEQ ID NO: 87945 - DNA, 563 bp, Zea Mays
cgtgaacacaccggccaaaaacaatagcacaactactccagtccaacccaatggttgtttcaagtgtggcgaacttggccactatgctaacaactgcccaaggcacaatcaacagacaccctagaggaacaacaaccaaagagctgatcagaacacaccttctcgtggatctacactaaacaagatttcgcagaaccatagtaagggaagagttaatcacgtaatagtagaatctgttcctgaggatgccgacatggtgtatggtatgtttcttattaactccatacctgcatcagttttatttgattctagagcatctcactctttcgtaacaaagtcatttgtggaaaagcataatatattaaactatcctttgacgacgaaactattaattcgatcaccaggaggtgaacttagatccactcactcatgtcctcagactaagattgaaattagaagaataagctttctagtggagctgataatcttggaatcgagtggaatcgatgtgatacttggatagactacttaaccaagtatgatggagtaatatcttgtgctaa

SEQ ID NO: 87946 - DNA, 513 bp, Zea Mays
tgtgcatctctgcgaagcctaccttgggataagcccacactttggactgtggaagtacctgcaccattgtaagccgaggatggtgggtggacaacattaagtggttggtggagccagcctttaactttgtcagggtaggaaggctgagtacctagatatccctttgaaggacaacattaaaggatggtgctttaagtggttcaccatggagaatcacaataagtccttgcctactcgctctagaaggtagccggatgtgcgcgtgccaagttggatagaggccccaaccgtctctgaagttgtcgaggcaaaaatcttgctagctgaaattgttgttttaaaggacaagggtctgaccgctaaagctatggtgattgactttgtcttcatgaatatcaacctctcaaggacagagttcaccctgcatatgtgtataccgggttaagagatccttctcgagtgacagacaaacaaattttagtgggaaacattttgtgtcaggtcgagatgatg

SEQ ID NO: 87947 - DNA, 746 bp, Zea Mays
gagatatttgatgagttgagtattaacatagttccaaccaacaagggcatgtggaaaaatagatggagtgcatcccttttgttcgggttgtggaaattaattgatctattattagtaatgcaagtaactatagaaacatcaaacatttgggctcgaccaaagtaaagatccttcatgtatccatgttcatatatctttgaccctttttcggcacagaaacaggcactgcattcgtgccaccgcaaatgttttatggagtagatcattcaccaacatgtatccaccgtatctatctatggcttgcacggcccacgggcccaggtgtcggtggtgtttggcctgagccatcgttgaagagctattcgtgcagcggggacacagttgctggctgacagttgaccttgcaaccgcgcgcggacggcttaccgtacacgaatctccaacaggcccgcgacccggccgtccacgtgggatactgggatgagactctcgctttcaattccgttacctcactgcaaggtggtcccgagatggtaggtgtctgtcacctcaacacctgtcggtgtcaaatggctaccacgatgatcgcaatcgcttatctatttccatcctgcaactaatctcataccgatccggaaattatcgcatatatccaaacatgctcttgtcccggaagccatattacgagacaaacccccccagatccgtccacgtccacctcacgctccgatccagcccgcccttgc

SEQ ID NO: 87948 - DNA, 314 bp, Zea Mays
ccatatagcatccctgccccgaggagaacgaggtaagcccaccacaaaatccatggtgatatgctcccacttccactccggaatttccaatggcttcagtaaacctgcaggcctcttatgctcggccttcacgcgccgacatacttcacaggcggccacatacttagaaacatcaaccttcatccgcttccactagaagtgttgcttcaaatccctgtacattttggtttcgcccgggtgaacggtgtaaggcgttttatgagcttctctcaagatatccatcttcacctctgatttctaaggcacacaaagac

SEQ ID NO: 87949 - DNA, 722 bp, Zea Mays
caaagacactacgcacagagtcgcccacgggcgcaaccggaccaacacaagcgtacaaatacggccaacaggccgcatcaccatacaaattacaattacatacacacggcgagggcatcacaaattacatcggctcaaccttcgggatgatacccatctccctgtaatgaaacaacattatcctcaattcctcaccctcaaaaaacttccgaagatccccctcgcctatgcccaccccaatcggcgaggacaacaattctcgtttaccaacccggtctactcggagacggccacgctccatccccaaaatcgtgaaaattcacccacactatgttttcccaccacccttcgccgcctacacctagtactcgcaccaggaagatcctcagcaccctccacacgcggcgaagtctccgccacagccacatccaacacaacaaaataatccaagccttcatccgaggactcctccatccaaggaaacgaactcccaaattcaccattggactcaaaacactcagacatagaacaaaacaaattatcatcggcaggcactacggttgaggccgccacaaaatcagtatagtcagcagcggttgcttgcgcaggcccaaacgtcggaacctgcgtagcaaccgaggttcagtatcacagaaacaacagtttacacttaaaatctccaaaccctattccgccacctgcgaaggcccgcccgccgccgc

SEQ ID NO: 87950 - DNA, 529 bp, Zea Mays
cgaatatgctactgaaggtgttgtgaaggtgcctgaaaattttgggttcaatcggagcatttttttgctggtttggacatttcaccgaacacgtggtatgcggtgagttaggttttttgacatattgccatttgaggattgaaaccctcccaaagggagctagaaacctgcagggatactcaagcgacacaaaagaacacattccaccacttggattcactggaattaacaagaatttgaattgggcacaaagggtggattggagttcactgctcaacaaaatagagagggggaaagtcagagggaggtagggctgctcaccgagaggagggcaggagaggagcacttggtcaccggaggattgccgccggtgaggagatcgccggagaggaggtttggatcgccagagagatggagaggagctgggaatagagaggaatggaggcttctggctcaggcgcgagttggggggcctttttttaaaacgcgatacgggcgcaccggatagtctacagtgcatatctggtgc

SEQ ID NO: 87951 - DNA, 640 bp, Zea Mays
cgcgcgatcttctcgatcccccgcggacctcgcgtttcagctagttgcggcctggccgaggctccctctccggctataaatggaagccgtgaccccccttcttcatcctctcggatcgtcgcgccgtgtgccactttgtcgccgtgagccgcaacaaactcgaccgcaacaatcgtgagccgcaacaaactccgaaccccaccccatgatcccctctggccggattccgcccgatgctataaagcacgaggattatgactccccaaccagctgaagccgtgtatagcttggtgccgtaggcgcatggatggggggtgcggggagatgtgattgccgctgccgccattgatctgcccatatgcgatcctccagcctcgacaggtggtactggggcagcgaggggtcccaccacacatatatgtggcctcgtcgtgctcgattgagggttggagcgcttctaatttctcgccggaattggtgcttcaccatggaaccgcatgcagccgtgggccgaactttctgcgccgccatcatcggtgagaacctatcctccgatctcgcccttatctctgctccctgttgcatccttcgattgggatttgtcacatcgagtcgctgtgccgcccctacgacgagagcg

SEQ ID NO: 87952 - DNA, 424 bp, Zea Mays
gatagatgaaacctaaaaaaactacaacacatgagaagggaagaagaagagcatatgcaaagatcaaatatgtcatgacacaagggaccttcatctaaaagagccaaatcatgtctccttcgttcatgacaactgtggaggaaattttggcagtgaatttgtacggggtggatcatgacatcgagaactgaaagtaaatgcacaacggacaatcgagaattgaaagtaaatgcacaacggacactgggatttagacatgtacaagctctcaatgcgagataatacccacatcatatgtgttacagtgtctattgcctatgcaatagtgatcagatgatctgcccttgattgacgctatcgtccccctttatagtatacactataaattcatttccatatttttatataaattataaaacctttt

SEQ ID NO: 87953 - DNA, 497 bp, Zea Mays
ccccatgttgccaaatatgcataagcttttaaattcttcatttggtatcactagaatattctttaccatatatatagtcatagattaagggggagttagtctattcaatcatgtcttctttcctgttgcatgaaattattatgtttttcctaagtggaagttttcgacatggggagtatgtctttttccataaaaggggagattgctttacaaattggggagaactttcttttaaggggagaaatctttttagagggcaatccatttattgcttcctgtatgatttatcatatcttcattttcggtgtctgatttcaagggggggtttgtggaccaaagaaacccaaagttatcaaataccaaaaaacaccaatttaaattgtttatgacctttcaactgggttatgatctttcaagtggttgcttatgtttggtttcggtcctagataggaaatatgtggatgatggagtcaggggaggcttaagtccataatcac

SEQ ID NO: 87954 - DNA, 381 bp, Zea Mays
aaactcttgtgatcagtatacatatgacatacatttcccagtagataatgatgtcaaattttaagggcatgaactactgcgtccagtttcaaatcgtgtgttcggtaatgttgctcatgccggcacagctgccttgaggcatacactatcactcgtcattcttgcatcagaacacatccaagcccaataccggatgcagcacaatatacatcaaatggcttctcaatatccggttgagccaaaactggtacagtggttagtaatgttttttattgttcaatggcctcattgcacttaacattattctttagtagctcagtaatatgtttaacgatcttggagaaatccgggataaatcttcggttataaccagccaatcca

SEQ ID NO: 87955 - DNA, 1203 bp, Zea Mays
gtcgccgaacacgaagcggcgacttttgacacctctttgctcctcaaagttcgagtaaacgtcgatccagttctcgattttaatatatttaaatggtcattggccacatttccattcatcgcaactcagaaaaaactgtggtgcctagctttacccatgtcgacatcaccgagtgattcctctgcttcttttgtctccaattcctctaggcgtgaaccaacccagagtgggatcctatagcggcatatgaaaaacaggcatctttgcactgggatgcagatggatgggactttgtagttgcatcgtaactcgacggcgacctcaccgatggggatgacctctagttcctcattgacggggagctgaactccgacaccagcactgagtggtcttggacgtacgacggagaatcataagatgtggagtccttggacaacgatgatgactcgatgtctggacattggatgggcatggtctcctccgacaacgaagatgacgagaacgacgacggcagcagtgactacgacagaagtgacgaggacagcaacgacagtggcgacgatgacggcgatgatgatggtggggcaagccaatgcgatgagatgcctcctaccaagcgtcgttggctgcagcatggtagcttattctgataggaaaagtagtttgtactaggatgaaaacaatccattctaatgaatagagcagttcttgttaacaatggcggctggcttaaggaaccgccagtgaaaaagctgaatttcactagcggctggctttagtaacgggctgtgaaaatagtgaattaacactggcggctggctttaggaaccacctatgtaaatcatttctacggccggctggcttttggaaccgcctgtgaaaatcatttggtggaagcgcttccatctgcagctgagttaccaaagcccactaagtccgctttcgagtgacttctcgcattcgacacggctcgtccccaaccctaacccgttgttccagtgtctccgccgtcacttcggacgctccagctccaccatcgtccgcccgtcaccaagactgttctccccctgtactcctccaactgagtcgtcgtcttgttcgtccgatttgtattccgtacgacctcgctcttgtttgaatctctggtgttgttcatcctattagggtgttagggtctccccctaaaagtctcctctgctgtcg

SEQ ID NO: 87956 - DNA, 571 bp, Zea Mays
gagtaatgtttggtagatttggttgggttcaagggagagaccaactcagactaaggtcgaattaattacatcacacacccacttagaggttagaaagggatgattatactcaccaaagggcatgggtaaaggtgagttaggatcaattggctagaactcccacctaaacaaggcgaaaagtggggagctaggagttcatagggcgtagttggattatgcacttgtaatgtttttcacttttatgttcatcaatcgaggagtagtaagaggatgtagagttttatacatactacaacccaaacctctctaactgctcgtacgttggctcttagtggttccaaggttcaccacaatgcccgtgtatgccccctcctctctctccaatctattattgtggtactttatgtatctaggtgtttgtccatgacgacatctagcatgctagataggagtagggcacttctgctcgagattcttgtgttttgccatgcaacacaactatggcaatgccaacatgatcgctagagatggcaatgagtaaatactcaccggctattattatcccataccc

SEQ ID NO: 87957 - DNA, 580 bp, Zea Mays
ggaaccatgaaatttgagttcatatattttcgattcgtccaaaatactcgacctcatcaagcccctgtgtaaagactccaaaacacgtggtttttcaattaagttgactttggtcgtagcttgttgtgcgaaaatggtatccattgacatcatacccagaatatttgaccctataggcaaaaccattggctacttgtcttaactcggcagttatagacggatctctttggccctgcaagttcaaacacgctatattgttataggattagcatgtaagagcaacttcaaatgacaaactaagcacataccttatgtttgaaccaggaaatgaaatcgggtaatccatttcccgcaccctttctaagaagggtatcatattcctgtggagttgggtcccttgatcgacgccagaattaatgtagaaattgttccatgtatggcgtcacctcttcaaagttggtcaatacatatagtatgatatggcgctactcttcatgtctcagggtcttggtggtcaaaccacttgcgcttccgagttgccctcgaaatatgctaaggttcgattcattgccgccatcat

SEQ ID NO: 87958 - DNA, 1010 bp, Zea Mays
atgatgctcctgtcgcacatgaagatagcttcgacgagcaaggtacacgacatgccaaaactttactgattaccaggttcgagtgcatgttcacgtgtgtgatggatgtcgtaaattgttttaatgtagatcacaatcatgttgtcacgtccgagaagtcaacttgaacgttgaatataggacaccatcaaagaaaaaatatatacttaaggtgataatttatatttgaattttcatatagtgcatcatgcatcattttattaatgacatatactttgcatctttctagagaggaatgtcatttgacgatgtagaatctgtagagaaattttataaggaatatgcacatgaaactggtttttatgttcatatagtgttttttgtgtgcaagggcaggatataaattaaaagaacaaactaaattcacagattcttctaggaatatgcgcagaaaaagggacacacgatgtggatgtgaagcttatatttatattaagcgcacaagtgaaggcaagtaccaaataacaggtctacatgagggacataaccatgagtttgtgacacccagcaaacgccacttacttcgatccaatcgttgtgtcagtgagcaggtaaaaactactcttttcaattgccataaagcaagcataggcacttcacaagcatacatgctacttcaagttggtgcagggggttttgagtatgtgggctgcacaaaaagagatctacaaaactactatagtgattttaggaacaaaatcaaagattttgatgctcagatgtttattgacaacttgcatatgttgaaggaattggacccgaactatttctttgaatatgaagttaatgatggtcggttggtacgagtgttttgggctgatacaactagtaggaagaattatgtccattttggcgatgtgttatcttttgatactacttacaacacaaaccaatatgacatgaaatttgcacctttcactggggtcaatcatcatatgcgttctattttc

SEQ ID NO: 87959 - DNA, 788 bp, Zea Mays
gtagtacatgatgcttgcgtgaaccggcttaagaccgacgggaattggttggtcgacataggggcagttcacggagtttgtccgcgacgccgagctcggttccgatctagctataacagtaatgcccaaatggtcacttcgatgagcttcaccaacaaacatggacagtagaacgctagaccagagacaatgaaccataccgtgctcgcttgaccgtgtgaggttgctatgtcggcgacatggtcaccaggctcacgaaagcactaagcaagaagcttgggtaaaccttgagtgtaatttggggaaagtgaaggtggtagcactgcacagatgtgaaccacaatgatccacagtgatcttggttgggcttggagatgacaatgatcctttccaccccctcggttgctctttatatggatagataaaaactcaagcagtggctagattcaagggatgtagaacaaaggatactcttgaggggttggcaactgcatgagcatgattgcgtggctcgatccagggatccacgctcgactcatgaacacagcaaggcagtagaaatgatggagctcaccacggtagaggacagttagataaggctcccctaggtagatattgttcagtccaactttggatatttcagtgatggctaaagttctgaacactcctgttatttaccccatctttatctcgaccttagccaaaagtgagacacggcgaggagaaaagatctgttgtagatatttcagatcattatgatctacattgctcgactgaaccctccttgt

SEQ ID NO: 87960 - DNA, 700 bp, Zea Mays
ccccatgtgttcgtggggccatgccatgatgttgaggagccgtgggacgtaaggggaagcttggctaaggcgggtgtaaggattgatagtaataactggcatcttgttctatgtaccccatgccagacggtccggtaagatacgaggatggtctggttgtgtacttagacggtccgacgtgatacgtggatggtccggcgtgatacatggatggtccgttcgtgtcagttatatcttgcacggaacatggtggtcctggtgcagatctcgatggctcgaggccagccgctgctggaccaaatggtttgagctcaagctcagacggtccggctgagcgtaggcttgtgaatttatcctagattggtgaggaggatgtggttgcctggtataggagttcattggtataccatatgatggttggggctgcgaacatccatttgcagccaatgatttttgtgcatcgtacctagcataaacatcatatgatgggtaattgggaacgatagattttgcaaacgcgcgctagtctcgtataatcctcttgataccaactaatacttgttgcattttcttcgttgtttatctacgtaagatctaagagattgtacatcgtctgtgttacttacatcgaggacggttgcagtaggtcggagcaatgctaggtcagtctcccattaccaggtgacttttctgatgcatg

SEQ ID NO: 87961 - DNA, 412 bp, Zea Mays
gccgcgcgcttccagcgtgaccctgtcgtcgccgagtagtcgatcctgtagaaacaaggcgagggttccgctgggggtagctgtaataacttttgattttgtaagatattctaagaaccgctaatgaggtagcactggaacttaaacttatttgtatgttatttgtccttgctgtgtgtagcatcatcaacttccccttggtacttggtccccctgggaggtaggctcgacgtgtcgaggttggataccagtataccaaagataaaattggtggtccggcccctaggaggtagtctctacagtctgagactacctactactggactgggacctggacctgcacacagcttcggctttgaagtttttaggagcacacccttaggacccaccatctagtatctttcatcctttg

SEQ ID NO: 87962 - DNA, 1072 bp, Zea Mays
atgggtattcagatgaataccattgaatctagtgggcccacccctgctccttcgaacaccatacgggcccccagccaagggaggtccggagttgttacgaggaagggcagtctcagtcactactcctcagacaaggcgaggctcgatggtgctacgtgttctacgatgcgtgatgtaagccatcgaggaaagcccgacgtcagcctctgagtgtactgcgcctctgcataaactacagacgagacatatacctgcccgcctcagtgacaggcggtgcgtccgcagtacacggcctgcacagtaactcacgcattaccgaggcaaatccattgactctctgtgccgcgtgggctgctatcatcatgactcccactgtagcccgtgtggtactaaggtgaagggtgacaggcggagaagacagaacgacatcgactgagcacccctacatgtgtagcgtatcatacctgcaccacaacctactcctctgctctgctctgactagatggggcaagggcacgacaagccaggaggtctacacgacgaccaagtgaagatatctattctccacagaccaacgctcccttactccatatctagcaatagtttaccaggcccacttgtcggggcccaatcaccccatgtatgtgcctcccttgggttataaaaggtaaggtgcacacactgtagtggacaactcgaacaggtctaaacgagttctaactcaggcttcagatgaacaaacagattcatagagactcaccagcaatacaactcataatggatgtagggtattacgcttcggcggtacgaaccactctaacccttgtgtttcatgttcttccacctaatctggcaaatccctaggcttctcctcatcttaggattaggcgggtgcagtctatcaccccgctggagttttctctctaacagggctccttgctattttgctcccagtcccagtaggatgcttctcaaactttctttgccaagaaaggtaatgcatcctttggaacataggaaaatgtcatgtttcctatgtttttcttgtgaaaatgaattgattcctataaaa

SEQ ID NO: 87963 - DNA, 547 bp, Zea Mays
gtcgccgggtcgtgtgcaggtgcaggggcggctccgcctccggtcgcgcgcaggccgcctgggactgggactctgggagccaggagggagagacggcggccagacatggagagacagagacggactcgattttagggtttctacttaaacggataaatgggccttcgccgtcccgtgcgtggacaaggacaagtgcgggcgtgcggctgcgcgctgccgtcccgtggccatggtcctgtgaaattatattgggccttttcgtgcctgttaacgggttgggccgggcttttttttcgtgcttcgtgccagcccattaagcccggcccaaatgtacacctataatgacaggcctgttggttcagtttttttataagatttttaaaaaatctagctatgccaagaatctcactgtttgattcatcggataaaagataaattgagtatcatgtaaattacacgcggatgaagataaaagagtatatatggtttaagatgtagaaagtgatgattttctactatcacgatgactcagctgattcagtgttca

SEQ ID NO: 87964 - DNA, 435 bp, Zea Mays
gttagtgagttcaagaagggaattggtggaccggaaacatgctttgcttctaggtctaggagtgaccttcattttggcaaggttggtgagtggagtggcttgaaaccttcagagaaacattcagccactcctaagcttatcaaaatcatcccacctaagcctaccacccctatgagagatggtttgattaaggagcctgtgagagcccctcattagaaacaagtgtgggttcaaaacctaaccacctcaagaacacacttgacatccttctcgacatctctagtgtcccccctccaaaagcccctcagccacccaaaaagcccaaatcccacaaacagactccacctaagagagaggtgtgatgtcaatgtgattattgtgagagcgatgaacatttggttgctttgtacttgaggaggaagagagatgggcggc

SEQ ID NO: 87965 - DNA, 584 bp, Zea Mays
cccaaaatcccctctgcccacgacgacagcgagcactgaggacggaccgaggtgttctcgacgatctagcgcagtctagttcaattaatcaagcctacgagcaacagaagaccctaaggatgctagaacacgaatcagagaagcgcgaatcaacctgtggatggctggccacgacgagatgccaatagcggcgagtttgaccgatttaggggaagtaccgaattcgcgggctacgatggctaatcgggggcgaggagtggtgctctgagttcgtgacaagataacggagcaggccaaacactcaatttatagggcgcgaccgcgagtaggacgaatttgaacggagaagtgatcgcggtgataggagaaggagccactagagcaactatcgtggcgctcactgatacaatggctcgaacggagggacaagggcataaacctgacctaatgtcattgattttcagagtttaagccacatggtgcctgtcggagggtaaatctctccggccaggtggcggattgcacccgccctaattcctaaaatgaggaggggcctaagcgtcttgcttgttacgaggttggtg

SEQ ID NO: 87966 - DNA, 298 bp, Zea Mays
gataatgtaatagggggtagactgatagtgttagtttttgtatgatactgaagatcggttgctgcgcaggttccggcgtccgggcctgtgcaagtaaaccctgatgatgttatgagtgatgatgttttgatggatgcaaatgcgatgtctcttagtggtaatgtgtcgggggaatcagattttgggttgtggtcttcggagggtggaaaattggggagccctttttcgtggacggatgatgaatcctcggaagatgatttagactattttgcagcgttggatttagctgcagcggagt

SEQ ID NO: 87967 - DNA, 661 bp, Zea Mays
gcgggaagaaaatccagctgcttgcgtggagtcgctgccctgtccacaaccagaaagagagagagagaggtgcagcagcctgttcttgcgtcgccaccagccgtggcctagcttcagcacggcatggccgccggtaagaacccctcatactatttgacctgctctcctcttcacgtagcaactggtagatcgtggtatggagcactggaacgcgcgaaacgcggagcaccggcagcgcacaaccgcggtgaattggtagcgccaccgtacggtgctgatcggaggaagaaggagccccctgaccgttcaatcggctatcgacggctgggattagaaggtgcatacctcttcgagtcactaaattatggccattgatccgcagacgaatggttctgattagatcgttcgatacctcttcgcggtattagatctgggcgtcgatcggacgatgtgcgggtgagattagagcgaccacataacccttcgccgtgaaatctggaccatagatcccggatcctgcggcctggattggataccggttcacatatgatggcgatctaatccgagccctcaaatgccgttccaacagttgaattctacccgtaccccttcggtggccgttttcataaagagaccccgtagatccatatattcaacccgc

SEQ ID NO: 87968 - DNA, 639 bp, Zea Mays
agaaaattcgggcgagtattctatactcaagtggatgtgactctagagggaaatcctgtgcttatgggtacgtttattgttgcccatcatcctgccaaagtactttttgatactggtgcatctcatacatttattagtagaacttttgcggtgaattatgatgttccaattcaagaaacacatatgggagttattgtaaaatctcctgggggaaagttaggcacaaaggaggtagcctttcatgtgccagtagaattgggtgggcatatctaccccaccaatatgatagtattgaagggacaggacatagaagtgattctaggtatgaattggctagctcaacatgaagctattattgacacgaggaaacggactattcagataaaaacagggatgggagaaagtcagttaacaattcagttgtcctctctagaagaagtgctaggaaaggcttatagtgtggtagttgaagaattaatcaatattccagtggtgcgagattttccggatgtgtttccagaagagttgccgggtttgccaccagaacgtgatgtggaattctctattgaattaaaacctggtacaactcctgtctctcggaggtcatatagaatgcccccaaatgagcaggcagaattg

SEQ ID NO: 87969 - DNA, 343 bp, Zea Mays
gttatggttcaaaagcagattggtaattcctaaagaccaggatctcaagaggagaattttggatgaagctcatctctccaaattctctatgcatccgggaagcaccaagatgtaccatgatctgaagcctttgtactggtggaccagaatgaagagggaaatagcccagtatgtatcagagtgtgacacctgtcagaggataaaggcaagccacttgaagtcagctggagctttgcaaccactgtccgtaccttcgtggaagtgggatgacatcagcatggatttcattgtgggtctgcccaacacctctcgtcatcatgactcgatttgggttattgtggac

SEQ ID NO: 87970 - DNA, 1040 bp, Zea Mays
cgcggccgagccaacagattggtctagctctaatgttggttggtcaatggacctgtttataattgaggggattataattgaggggactgtttgggttcattttaccacttcgattttacccttctatccttacacaccatcgaaccactgtcataatgtcttcctcgggcttcgacgttgggatgatcgaacacgaggtgctagatatgttacatcaaactatgatggacacgttgctgaaacctgtctctggatcttcaatgagagggaggtgaaggacgtggcagcggagctacatcaactggcgtgagccatccacatccgattgatgcaagactacttaaacgacccatatgtctatcgttcgctctactttcgtcgaaggtaccatatgcagagaagcctcttcaaattttagagggattggatgagcattccccctacttcaatcatagaactgatacactcaaccacaacagttttccccccaccaaaaatgcatcgatgtcctccacatgctctcttatggtagcattgctgactttatttacaagtatatcaaaataggaaaaaaaagttggccatagggtgtctcaaatatttctttagtggggtgtgatttcatgttttcgtgaagagtattgtcgtcgtcccaccgttgatgatcttaggcgagttttagctaagggagaggaggggattttcgggcacgatggagagtatagattgcatgcattgaaagtagaggaagtcttccgttgaatggaaagggccctttacaagggggaaattagatccccaaccatcatgcttgcctagcatgacttacagatttggcatgttgttggggttagcggggttgaacaacaatgtcaacatgcacaaccaatcattgttggccactgctatgctcaaaagagagtgaatggatgtgagtacaaccaagggtattacatcgccgatggtatctacctcaatggcaggtgtgtgtttgtgaagatcattcttcttctacagagttcaaagtatcagatatttac

SEQ ID NO: 87971 - DNA, 529 bp, Zea Mays
gtggtctgcccatatcctgataggtttgaaatttatttgatcggcgacagattggacgtctggtagatggctcttggctggtcttcatttcgctttgtgcttcaatgcttctgctgactagacttacagttcagtagctatatttggctttcctttgatctctatcgatatcttccttctgtcttaatacattcattacgtatactgtatggatgtgactgcttcagaaaatctattgaaaattcctggccgtcccccacccaatggttttttccaatgggtgtgaccaatggacatcttggtacacaaagcgtttagcacattgtcctggagtagtaacttgacatgaccgctgggcgtaatcatattgcccaagcggttgaccttagtccaaatggtgtcatgttatgcgaagcggcgtctgctgcctgactcgccttcaggcgatttgaattgcttattgaatacttgtgactgttcgatgagtgtggtaggagatgaatagttgctaccggcctctataaatatc

SEQ ID NO: 87972 - DNA, 493 bp, Zea Mays
tgataagcaaggattcagtcattacctttagaatttctgccacatcggtagcagaaggtaatgcaggagcttcttcttctatatcaatcgccttcttcttcagagcaactgtcgtcggctcagggctcaatttgctcttcttcaggttttcttcatcttcttttaccattctagtggcctgtctacccacaacactgacaactctttttcttttctgcccttcggcgcccttgttcaaccgttcataatcaggatattcaaaatgtagagcatccattacccgattcaatcttcacttcggtcgggagccaaaggctgcggtcattaactgatcttcttttttcgtatagttccctaaaatctcattacacataacttcaatcgtgtctaaccattcttggcagggttccttgaagtgttttttgaatttaaagtgataaggcagccgaacgagttcaccctctttcttctcttctccaagcttcggcatacc

SEQ ID NO: 87973 - DNA, 448 bp, Zea Mays
gtcgaagaggtcatcaatccggggaagggggtacttattcttgattgtaacttcgttcaaggatcgataatcaatacacattctcatactcccatcctttttggtcacgaaaagaacgggtgctccccagggagacgaactgggacggatgtaccctttttgctgtagttctgaaagctgaagtttcagttctgccaattcagtgggggccatgcggtatggtctttttgcgatgggcgcagtgccgggaatgaggtctatatagaactctacttctctttctggtggcatcccgggcaactcttctggaaatacatcttcaaattccttgattacagacatgctttctactgccagactaaacaccattggatcttttgcaggcggttgggcttggcaggaaactgcctttccttggtgatctatgagaaggacagttctacttgcg

SEQ ID NO: 87974 - DNA, 313 bp, Zea Mays
gtagaagcttcttgcaaatagccatctcttcattgaagacctatagcatgaaacacattcaacgtgttaaggggtaggcctccacggatgaaagcatttgcccctaggttgcaatcccgacaacgtccgtctccactcctttctatcgaatatggaggtcttcttacttcatggcccttgcaacctcctattcaacatccctagcctcctaggccttaatataggttgctagatcttcctctacccatgtggaggtctcatccttctttgaggtgacaatgagcagcatcgtcgcctccttcctatggtgaag

SEQ ID NO: 87975 - DNA, 408 bp, Zea Mays
ggaattacaaaacaaatcaatggactcctgccggcccctacccaaccagtcaaacgaaagagaaagctgattcctagcaacttcaatctaaggcgaagcaggagggtggcggctctcactctgctacaaaggtgtgcaggcatctgggtttctgtgacaagagagagaatatctccttcacggatgcaagaagatatgctaaactgttcgattcacctctttctagagagcacattactgcgctggtagccctgtttggttgggaggtgcccccacctgggcagttttgagcagtgcgttggtggagctgactgaattttttcatggattcaaatggtattctgatatggaatgtgaggggcctcaacgattgtgctaagagagactctattaaatccttggttcttg

SEQ ID NO: 87976 - DNA, 820 bp, Zea Mays
cccactgtactccgatagacaaaggcatccttgtctgtaagaggttccccaatttctctggataacttttcagtgacacaaagaggagtggcaacaagcttacaagtttccatatgaacttgactaagaatatctctggcatatttttgttgagtgagtgtcatgccccaagaattgtaagtcatttcaataccaagaaagtaatttaactgactgagatccttcataggaaaagagactgatagctactgcagtaatcgcattgttgcttcagaagaggagctagtaatgaaaatatcatcaacgtacacaagcatgaacatggtgatgcagttagcagagtagataaacaaagaatcatcaactgaataagaaaaaccaagctggtaaagatgctcactgagtcgggagtaccacgctctaggggactgttttagaccgtaaatggacttgtgaagcttacaaacataatcaggtcgagaggcatcttgaaaccccaaaggttgttgcacgtatgctgtgtcatcaagaaaaccatgaagaaaagcattgttgatgtcaattttcctagtgtgccatccacgagagattgtgagggaaagaacgagacaaatagtagccggtttaacaatcagactaaaagtctcatggtattcgatgtcatactgctgtgtgaatccccgagcaacgagctgagcttttaatttttcaatggagccatcatgatgttgtttgacacgaaaaacccacttacaacggataatattgtgatcaggaggtttaggaatcaaagtccaagtgtcattctactaaagggcca

SEQ ID NO: 87977 - DNA, 419 bp, Zea Mays
agcagcgtctgaactggaaaggctcagctgaggagtgagagctgtgcagtgctcacccacacctggccagtcatcacagccacagaccgcagtcagtaccatgatcaatactaatcagtagcactagcatgatcccacaggatacagtccagatgaacagagcaggggtagattcagattgtcggtaaaagcaaggaccaataaccgatcgctaatcatagcggcgagagggagaggggccaggagccgatcgctgcggcgacggcgaggtgccctttcagaaagatagaaaagctcagcgcacgcactagcaaaagcgagagtgatccagccatcgccacaccacggctcacggcacaacgacaacatttcggcatgttcatcgatgtttcagagtagtagacagattcttcacagat

SEQ ID NO: 87978 - DNA, 350 bp, Zea Mays
cttaaccttttatacctaggtttaggtacacaccaaaataaacaaatttttgtatagttagcgtggacaaatctaatgaaaactaggttttgatctatttttctctcgatgcttcactacttagtccactcttcacctgagccatttgattctctcccctagcgcaagcccactcatggctcactcgcttcttcggtcatctactgaccagtaaatcggtgacctaacccgcccgctgctgcgcactttgtcttctcatcactcatcagctcgtcgactcgtcgggatcctacacacaacgttgatattttgcctcctagtctgcaccagcacatgggcaagctgttggt

SEQ ID NO: 87979 - DNA, 407 bp, Zea Mays
ctgaaaccgaaggcatacaaatcctccgcgaggtccatagcggaacttgtggctcccactcaggacccagggccctcgctgccaaggtgatttgttagggattttactggcccgcaataatttgtactgccaaccgagtcacaaggtcatgcgaagcatgccaaaagttctcccctcgcttaggcagcccttcgcaattcaccaagctcatcgcccatacatggccacttcaacgctgggggctggacatcgttggaccactgcctatagctcaagggaacctcaagttcaccttcatcgccgtcgagtatttcacaaagtggattgaggccagggcagtatccacaataacatcgaagaccgctcaaaaattcttctggcaaaacattgtttgccgcttcagagtc

SEQ ID NO: 87980 - DNA, 652 bp, Zea Mays
ttcttattgatagttcaaatatggctcggaccaaatgtctagccccccatctagtggggatgacaaccaggaaccgtgccattttcttaggcctatcaagggcaaggtcattgcaatagagataatagagtgaggtggcagtggtggtttgattagacttgatgcatcaaatacaccttctacttagtcacactagtcaaaggccacacctctttgttagtcgatgtgcacacacacatacttgtgtacccgatcgaggtccgatagtaggggaaacgaccagtagttacacctcccaagccctagttttgagagcatgatgactgatgagtacaaggtggactagatttaggttgacctttgtttgctagaccttcatggggctacatctagttggttcatcaacatgtactaatcacagacttgctacctgaggtacaagacccaaaaggagttctattcaatacgactattcgagtcattttacacgacacagttgatgtttatgatttctctcaaggatcataaaaccatcgacctttgtatccttatagaggaagttggactagaggttgaggagtacctcacttacctggcagacttgcaagagcttctcattagtgtaggactttaaattgatcaatgagccaat

SEQ ID NO: 87981 - DNA, 608 bp, Zea Mays
gtggccgagcgggacacacgagcgttgcgcggaaaatcggttgggtgggctagcgtgcagggatggttcaacagatttaattgggtgggttagttacctgtagatgatctccacatgtgtgagatgaataagaatatcgccccttatatgttccttacctcccatactacttaaatagcccattaggatcatagccccatatggagatatgtagccgttgcatcccaaacaaccatctctctatgcaccatcaaaccatatgacgcttggtcgccgaaccaatataatgcgtcagagtttgatgactccgaatggacactatatcagcactagtcactggtgaccgttgggcatgcctctgatctatagcttatggccgaaccaatataatgcgtcagagtttgatgcctccgaatagacactatatcagcactagtcactggtgaccgttgtgcatgcctctgatctatagcttatggccgaaccaatataatgcgtcagagtttgatgcctccgaatggacactatatcagcactagtcactggtgaccgttgggcatgcctctgatctatagcgtatggttcaacgtcccatttttctctcagga

SEQ ID NO: 87982 - DNA, 432 bp, Zea Mays
tggattgattttgagtgcatgtgtcgcaagaaatgaattactgcgcacataggcgatgaatgggtgtgatgaagtggtgacatgccgaagtagtcatcgcttcctttgcggttaagtcaaggtcgtgtgtgatgatgctatgcacgtggtgaatgcatttgttaaatgtatgtgatcattttagtgcactaaatgatttggataaaaattgtaagtctacttgttagtcctcatttaattaatttaactctaagaaatggtaaagtgctagaatgattcaagtctctagaatgcggcaattcttgaattatatagaagctgaaatttattgattgctgttttgggctgcacgcattgtttttgttgtgctgtttgtttgataaaccaaatcatgttttctgtagaaaagccatatagaagagttgtagataa

SEQ ID NO: 87983 - DNA, 319 bp, Zea Mays
tggttgaaatgtattgaagctaccagcgacgagcttcttgggacatattccaaggccgaagatgatgccttgtccacagccttcgggggccgggggaagaaaagattgaacagggtatttgatgcaattggcttcgtgtaccctgactatcattacccgctgcaaaggcaaggaaagaagagaaaaactgtcgcttcgggcactactgctgtgccgaagggcaagaaaataaaggtcctgacccaccggccgcgatatatcgaaccggccgtagtgcctgaatttggcgaagggacctcctcaactgtcgaagcaaaac

SEQ ID NO: 87984 - DNA, 1030 bp, Zea Mays
ggaaattagaaacctagcaaaattggtttggtatttttatcatttttctacaattttctagaatttctttagctctggcagaaaaggaaaaagaaaagacatgaacagtattggaccgaaaccggcccaagtcggcccaatactggaggaaagcacgcccgcgtacagactttgcgaataggccctcgttgtcttgaataaccagaagcggggtcgcagcactattcctggagtcactgacagtttacagaaacctcccccaagttctgtttcttcgcaggccgaggtccatgacggggaatggcgaggagccgagctctagcgagcgcacaccagtcgaattactcaatgaccgatgctcttcttcggtctacacctaattctagtcctaaggagcgtttcccccaaactaatttcaccatcggcgcactaacacgccctgcccacggtgacagcggacaccacggttaaccgagcccgttcccggtgatcctagggactctagctcaattggaggggtcgaggagcaacagggacacacaagcacgctaaaacgagagaacagggagcatgaacggacctggagcaagctggcctcggtggggtgtttctacggcggcggaaacggatattgggggcaacgagcaattcacggtctctggtgaacgattggaggcaagcgtgggtgctatggatgcgtaattatcctacggagctcacagtgtgctcaatttatagagtccgtgagaggtggccggtgaattggacgaagacgcgcggaggccggagaggaagaggggcactggcgcaagcgcttagtggctttcaccgtggcggtcctcccggagatcaccggatatgcctaacacgactaaccgtgacgtggtaagatgcctgggcacgtggtgcaagaccgcgaggtggcaatctccggtgaacccatccgaagcaatcgtaactagctcgggtacggtggtcggagtaatttagtggccggaccatatccacggtgtgatatttactgaccccg

SEQ ID NO: 87985 - DNA, 419 bp, Zea Mays
ggacataaatgacatgctcgatctgctagctgaggactcatctgatgctgctcctgagggtacattggcagcggtgccccttctagaggttgatgcgaccttggatgtcctaaaacctgtcagtactcgcctgaggcgccctagccgaaccagtcagcccgagccttctgctgatgagcagaagaagaagagaagacgcctccggcgagtatccagctttgacgaggatgccagtgccttagctcctgctgccgaagaaatgactgcaattggccttgctgacattgaacccaatgggtgtgctctacctgctgctgaccccaacgaggatgctgtttgtgctgttactgtggaggatgaggaggaagaaaatgaaactccattaactcggaaaaacagtcggcaattcgtcgctagcg

SEQ ID NO: 87986 - DNA, 539 bp, Zea Mays
cctgcgccgcctagaactggtggacccgctcttctagctttttctccttctcctccgcctcgagctcatgctcggccagcaacttatcctgcctttcaaacatttcctccctgaaggcgagatccttctcccgccaggcgagatccgcctcccgcatatccagggatgcatccttctccttcaggttctcctcggccagggcaatgttgctggccttgtcctccagctcccgctcccatttttggatcctctccacagccgtggtctgctggatccgttgctcttctaggatttcgttcaaggcgctcagctttgcccggagctctgtgacgaccgcctccctctggtctaaggcctcctccctcttgaccaacctcttctccttccgactcgcctccaactcctgagtgtacaacctctggaggtcctttttgtaatccttgcggtcccgctcgagctcggactgcttagaggtgaactggcgggatgccgccttggtgcactcctcgagctgggtgcgccagtcgctgaggcgttgg

SEQ ID NO: 87987 - DNA, 854 bp, Zea Mays
ctcacaccgacggcctatagtgctagtagcacgtaaatattcagttatgcgagaaacacgagatatcaaacggggcaagaagcactcgtggctaatccatctgtcatgccgatctaggttatatatatcattatcagtggaagttcgttcgatttgaagccacgaggacgaggcatttcttggtttctttcaactgaaaccaccctgctcctggtgccaccaccaccagcagatgggataccaggcaggggtctcttcatagaaagtgcctgaccagatcacacactccgatactctcccatccagtgaccggcagtccactaacgtcctgtgctaagacatgaccaatccttggggggcacaaaaacgatttgcagaatcatatcgaatgcttgagttgacgctacgctgctagatgctatgctagtgatgagcaacgggcaagaagctggggaaaagtctgcccacgcagatcaggtcttcttcttcctcctcccttttcctggggcagagatcatggcgctccttgccacataagcgcacacccgcttgcaactttgcgagaagctgctggcataaagccatctgtttgcacatggttttctgttcttctgttacattctcctttctgcaaaataaagtcgacacctgcaatcatacgccggcacgaacaatgatgccggcgcctccaggagagggattaaggtaggtgcaaagtggaagaatcgtttggtatttgccctccggaggaacgagtcatcatttgccaatggttggttggcccttattgctggcacagtaaagcccctccttccggctcacgtcttccacggagagaaccgcttgaccacccg

SEQ ID NO: 87988 - DNA, 501 bp, Zea Mays
gtttgtgcgaacagagtccaaaaattgggcctgatatgccgatttaactgtgtagcggtgatccatagtgaaattccaggtgatggcatcatcacgttctgggtgaaactggatcttttggacttcagaccaaagaatgcagaactcatcaatgtggtgggaagtaatcgatctatcaaacagcgcaagatccatgatccaggcattgtttgtgaccgcctccgccaaagatttcctcttatttcttgatatagaaaagggacgaggcgccaagttctttggcctttgccccctcacccaagcgctgccccagaaggagattttagaaccatcaccaatctcaatattcgttgatgccgcaaaaagcagtctatcagcatcagagcaaggaatctctaaattgtcccagatatttcgtgatgaggtgcaattatgccagagccatcgcgcgcgcaaggcacgcgcaaaagcgcccaaatcaagaactcccaagcccccaag

SEQ ID NO: 87989 - DNA, 936 bp, Zea Mays
agtagccaccaacaccaaccacgtccttaactggtgttcgagaggatccacggagggcctgggagcttcactgcgttacttggagggcgctcgtggccgagggaggaagggtcgaccactggggcggccagaattcatcactgagcacgagattcgtcgcgcgccgtgagtggggcttgtcacttattgaatctcgatgagtagcccctcgaaaatatcatgtggttacccgcttcttgttaccacctttagatcggagttcgggtgcgggaattggagttttgtggcgtgattggttgagtggcttccgtgggccggcctcccacgcgcctggctggccagcgaaggccgttcgtcccgtctccgtgcgtgtagatggatggtgaaatattggcctagcctacatgtgtacatgcaggtcgatatcgttacatacaagcaaccaatcacaattttgtatccggtcaaagcgtgtggagagcctggttgcttctatacaggcaaccaatcacatagttggtgaaccccggccatggtaccgccgtcggattttgggtaccgccgggaagaggcgtctagggtgagaagagaaaccatagctgtgggatcaagctaggacgatcaggattaggtttcgggtagcagcttggcttgggttgatgcggtccatcgatcgagtgatttgcggctcggattagattagatgaaggataccggtttgggcggtgtaacgtgagtcattcgattcggattgatcgggcgggagttgattttagggtatttgaatctggagcctcaagacccgatcgtgtggttgtggtgacatactggttcgatctcgggtagatctaatcatggtcgtagacttctaatccgacgaccatgaatgcttcataccctttcagctgaacgattgtgcaaaagagtccatgtagt

SEQ ID NO: 87990 - DNA, 517 bp, Zea Mays
gcttgtcgaagaccagggttaagtcttccactagggtcaaccctctcttagtcttgaccatgatgtcatcgacgtatacctttactctgtccctgatcaggtcccctaaagtcttactcatcgcccacacaaatgttggcaaggcattttttagaccataaggcattacgacatagcagtaaagctcatccgctgttacaaaagcggtatgcttcctatcttccctagacatctggatttgatggaaaccagagtaagcatctaggaaggacaagaagtcacacccagaggtagagtccacgatttgatctatacgtggaagtggatacgggtccttgggacaagccttattaaggctggtgtagtcgatgcacatctgaagcttcccattcgccttgaggatgatgactgggttggccagccacactgggtgatgaacctcttcgatgaagccgacgtctagcagcttctggacctcctttcggatgaagtcctgccgctcaacggactgtctccg

SEQ ID NO: 87991 - DNA, 1101 bp, Zea Mays
cagggcggtgtggccaatcttgtcgcagatttggcactgtggtttgtcgtcgctgtagctgctgttgttgaagtacccgcggccaatgccacgtcctcctggtgtagctaagccacggccacgaccgccggagcggccacggccaccaccacgaccttgctgattgccacgaccgcggttattgctgcctccacggccgcgtttggccatgttggcagatccttgcgatccgccatgcagtagatccaatctgtgctcaaagctcagcagctgagagaccaattcacccactgagatagactcggtgcgcgcccccaccgccgtcacgactggactgaactcctcatcaaggccgaccaggagataagaaaccagctcttcatcatcaactttctttccagccgaggtcatatcatctgccaggaactttatttttgcaacatactccgtaacagacatgttacctttgcgggtcgttgcaagtgcgatcctcgtgttgacggttctcgcacgtgaggcagatgcgtacatccgcacaagttctccatacacctcttgcggtgtttcgagtgtggccacttgggccatcacctcccgtgacagcgacgtcatcaggaacccaagcacctgctgctccatggctttccaggcagcatgatcgaggttgggcaccttcttgaccttctctccatccttggcttcaagttctgcatgtggaggagtgccggtgccgtcgagatagccctgcaactgcgctcctcgcagtatgggcaggacctgcgccctccataaagggaagttggtattggtcaatttttcggtgatgacctgaccgaacaatggagacgcgacgttgagcgccgaggagctcgccatggcgacgggcaagactcaggcgacgctagatgtatttttgtgggacctagctctgattaccatgaaagcaaccaggaatgtttaggaagcgttctcacctcttcagaggccgcgtagctttgttaatatatgcagagaagagccctctgcatggcgtacaaattaccaaccgaaatcaaggagatgccggtattatacctttctattttacaacaaccatatctg

SEQ ID NO: 87992 - DNA, 1401 bp, Zea Mays
aaacgagagagagagaaggatgagctgaccggaaaggggctggccgcggtgaggtgagttttgcggtggcggaaaccagtttgggggaaacaagaaattcgcgagctccggcgaacgatcgtggttgattagtggtggctggttagctgatgaccctacggagctggtcacgggcttaatttataggcggcttcgtcggtggccggtgaatcagacgagacgcgcggcggtcggaggtagaagaaggtactggcgcaagcgctaggtggcttctaccgtggcggtcattccggcgatcaacggagaggctagaggaagtcatggcaatgcggtggcgcggttaggacacgcggcataaggccgaaaggtagcggtgcaccggcgaggttatctgcccagccacaaagtgaataagaaagccacggtgagtcaccggagtgacctccagctcaccgccggcaaggatctttcaccgcacgtccttatccacccaccccgagcacgagtcctaacgccggcggcacgaatcgcgacggaggagtgatcgacggcggggaagaaacctgagattcttcttcagtcactgtaccatggcgagtggtattcagacaacctgacagagcactttggagcttggttttcccttaaactctaatgacaacacaagtccaactctgcagcaaacttgtagtgcattataccaactacaactttgctatatggtgttgtcacaaaaagtcattgaatcatgtctgaaattgggcttgaagtcggtggtagttcactgttagtctgaaaattcagaccaaatcagcctgacagccaaagtttgagcatgattatctctaaatttctcacaagaacatgacttgcccacttcagcaaaattgttctcctttgtttgctttacaacattgatgtggtgacctagggcaaggatcctatattttaaaagttacaaggctccaaagttgagccctcaacactgaatttcagacttagtatagaactcaaatgaggtccactttgcaattaagtccaaaatccagtatttggcttacaagtccacacatttgtaaaccaaatgacttaagataccttactttgatagtttttgcactttagtccaaaagtggactaattttgcacatagacccctagggtttggttttagggttttccagggttccaattagggttttttggtatcgcaggggcataagtatgattcaactttatttttggggacattttatgactaattccctaaaacctttaggttttttcaatttgggttaggtattacccctttaatctctatttagggttaagttccctatccagggttctatttgcaaaacactaaaacaatacaacttgtttgaaatttttgcctagtga

SEQ ID NO: 87993 - DNA, 292 bp, Zea Mays
ctccaacttacattgcaacatctacgagtaccctctcaagtgtggtatctggtgcaccactagacacatccaaagcctagtatttggtgcacatggctatagtttcccttcttcacactgcatcgatgtcatccggtgctttatccagtgtaccacaagatatgtccactgttgctgagcaacatgtgtttattcatttcttcttgtgtcttcatccgtgcttcttccatcttatgcttgatgtgttgatcatctgagtcacccctttgccttagtccaagtccatttatgc

SEQ ID NO: 87994 - DNA, 518 bp, Zea Mays
cgggagcgcaatcgataaggctagggtaaggcctggccgggcgatggtgtgacttgtggttggcggggatggtgatgcgggcacaaccaacacccgatggtgtaggggcatggctggtgtttgacagtgcggggctcgagcaacgagagagagagagagagagataacacgagtgcatcaagaggaaggaggcaaggcatctatagggatggaacctcagcacagagatatatgtgttaaggtcggcaccacatatcttggtgatgaccttcgtaccacgagccatggcatcgacatactgtcatattagggccacaatagctcacacatcatttatggagtaataccttgacactacaacctatgtcagtgtgtgggtgggaccagggatggtacaaccaacaacgattaatgtgggacagagctggagctaggtggtggcacggtcagagcaactcaatggtggagcaaacgtcatgggattggtctagagcgtggctagcgtcaagatcaatgaa

SEQ ID NO: 87995 - DNA, 781 bp, Zea Mays
gccagatggtcgggtaattccagttgataggaaacttctcccactcgcttcaggaccaagaagggtccaataaagcgagggggacaacttccctttaattttaaacctcctcataccccggatcggtgacacctttagatacacatgatcaccctccttaaactccaactaccccctccgggtatctacatagcttttctgtcttgactacgtagttctcaagttctcccttatcaaccgtacttgttcttctgcctcttgtataatttctgggccaaagaactacctttcaccagtttgatcccaatataaaggagtcctacactttctgccatataaagcttcaaacgggaacatcttcaaactagcctagtagctattattgtaagagaactccgcataggacaaactcttatcccaaccgccaccatgtttaagagcacaaactcttaacatatcttccaatacttggttggttcactcggtttgcccatcaatttgaggatggtaggccaagctgaaattcaactgtgtgtccaagcactcgtgcaacttctacaaaaaccgagaggtaaactgagatccttggtctgacacgatcttcttagacactccgtgtagacaaactatccgagccatgtataactctgctaacctggcgcctgagtatgtggtcttcactaggatgaagtgggctaccttagttagcctgaccataaccacccatatagagtcatacgcagtagatgtgcggggtagacctacaatgaagcccatacca

SEQ ID NO: 87996 - DNA, 489 bp, Zea Mays
gataatacttgttattttgctaatgggcaaagcaaactacagaagcattttgtttgtccacctaaatttagtaaacagtacaaggaacatggagtgccaagcaaagaactacatatccataaatggaccacctagatgtctgggatcagcaataaagtattactctgtaattttcccaagttcaaagctagacataattcatggaaagacaataaactggaagcaacacgaggttgtaaaagacagatgctccatacttgtgggcacaagaaggcaaccctgatgcttgagagtctgtactgcttgggattaactctgagaaaacaaaatggtaagtagagaagcaaagattaactctaagaaaacacaatggtaagcccctcccagaaacatgccacaattaaacccatcccagaaagtagaaacccagccacaatttgcaccaaaccaggaatccacacatttccagtttacaaagttacaatatca

SEQ ID NO: 87997 - DNA, 523 bp, Zea Mays
aagagaattagtgctaacccaatttgcactctagaatctagaaaaggggaaggaaatgaatactatacaatacaaataaaaccataattaaataacctcaacagagttggtatgatcaaaataaataattagtcagtgtacaaatgtgtcacaaaaattgagtttaaattgaagtgttgaatttgaaattcaaaatgaagaaaaacagaaaagataaaagaaaaaggaaaagaaacctaactgggcctaacctctctaatctggcccaactccacttactctcacgcgcaacccactgctcctctccctttctttttattcctcagtgcctctaccatgtgggcctctttcgtcagtctcccatgccgcgtctgcacccccacctctgcgcgcatggatgaatcgctgccaggtgggctccccagctcggtttttctcaagcacaacagactcacaccggtcgctgaaccgtgggaccatgttgtcatcacctgcctggacgccgaagcaagctcaatccgtg

SEQ ID NO: 87998 - DNA, 797 bp, Zea Mays
tggagcctaatagttttggcttcgctaaatatattctatcttatcttagtacttgtatggaaaaattccattttttgtgtgatgttctcatggaataactttgcagattgtgcatttcataggtagtggataaacttcaaaaagttatagtacaatcaatgttgaccaagccattctaaaaaaagtgattttgaatatgctaagttattccatgtttttagtatattgtactattcatgaaggttctagactgacaatgattgatcttacttttaggttccataaaaaattattggtgttgttttagcaagtcaactaggaaaagaataggtaaattaaattacttccttcccttctattgtgtgagtgatttcatcaattggatgccttgctatttaaccttttgcccaaagtgtggatttatataacatacaatgctattttcagttttagattgatagaattgactttcaagaaacacctctttaacacattttacttcctgcaaatacctaccatggattttagataaatttcttgattgtttttgttctgacacatacaaatggtaggttagtatggtatttagaaatgtaggcttaagtttatctgtaggattaagttgcagtaaataggtgacagatggatatttttatgtttatctgaccttttgatgctctttggattatatattcattcatccattacatgttaagtgtgcgtcaaatatttggttagttggtctcgagatgcatcacaacaatagagttgtggggtattcccgtgcgttgctacag

SEQ ID NO: 87999 - DNA, 590 bp, Zea Mays
ggaaagtaacagtttgatactactggtgtgatggggtgaatggtgatgccccagctaatcctgtcccaagaagacacaggaacagtcagacgcatgggggaggggagggtcttgggacaaaaagcctgagtgcctgacgaaagccatctttacataaacaaacaacccacgcattcagcaaaccagggaggagatgagatggctgactgactgctgctttgagtaaaacgctgttgttgttgctctggattgcaggcaaagcaacccagaaaaaatacacgagcacaacctttttttcttcttcttattcttcttctagttcagttcagtgccggatggatggacaactggacatggagccctgcccttgaaacaaaagtctctataggtatagagagcaggtaaagctgcatttggttcttgacaggacgtgcggcgagtgatttccagctaccaggagtacgggcgagatcgtcaacccaaccgtgcagtgcaacaatgacggacttgctaggggctacagttgtgccgttatttctggagtacagcgcccgcccaactggaaccgcagggcccacatattgatctcg

SEQ ID NO: 88000 - DNA, 437 bp, Zea Mays
ggatgagattctatgatgcagtatctcaataaattcaatcacctctcccagtacgccattgatcaagtggatacagacttgaaaaagaagaattgcttcatgaggggactaaatgacagactctagcgtaagatagcaacgtgtttggacctcacatacagcagggctgtcagtacaacactgtcagttgaagccaaaaatgtgggacaaggaaagtcaaaaggatatgcaggtgaaagatcaacttagggacctgaaaagagaacaaggttggtaatccgacctttcaatacaaactgttcttcacctcgcccacccacatatcccttcagacaacctgtatttattcgccccactcctaccctcgcccagcccaatcagtcgagtgcccctagtactcgtttccctgcctttcccagttccttcagtggttgctt

SEQ ID NO: 88001 - DNA, 510 bp, Zea Mays
acaaggatgcatggcaagtcaaattttcaaagtgcatatttgccacccgttccattgcatatctaggccatgtaatcagtgcaactggggtgcaaacagatcctagtaaggtcacagctgtggtaaattggccagtcccatcaaacattaaggaactacaaagcttcctcagtctagcaggttactaccgtaaatttgtgccccattttggcattatatccaaacctttgatctctctactgaagaagcatacaattttctgttggacatcagagcatgacactgcattctgttgtctcaaatctcggctgagccaggcacctgtattggcgttacttgatttttccaaaccattcgtgttggagaccgatgcctgtgatcaaggtgtggggcagtcctaatgcaaagtggtcatccaatagcttatgtcagtaaggcgctcggtcctaggactcggggtctctctacctacgagaaggagtacttggccatcctcatggcagtcgatca

SEQ ID NO: 88002 - DNA, 535 bp, Zea Mays
atcctaattatagcttcgggggtaatatgatgaaggaagatctggaatatctttaatacctccaccacaaatttgctcagtgggaaccgaaggcctgccttcaggaagcttcgataaataacaacttcattttcctcaggagtaggggcagtgctgtctcctccaaccctcacaatagacatgtcgcgaaaatatctccctctcatggcgtcaatatgactttgtttaatgctcgatttcccgaagatggtatggcttggccgctagggctgatcctcagaagcttcatctccactctccacatcataactatcactgtcatcagaatcttcagacaaactctccattatctccttagtaattttctctatatttgtttttgccatagactcataaaacctagcgataaaaggatccgcaacttttttctcttcatatagctaatagcttcttctcctcagtcatcttttcctgggtcatcttcttctccacagacatgcagcaagcacgtctttaaaccgaagttcgaaaatca

SEQ ID NO: 88003 - DNA, 537 bp, Zea Mays
tttcagctgcgttgtcggatatggcccaacggtgctctgaccttgaggagaagtattctcaaagtcaagccgacttgggccaacggtgctctgaccttgaggagaagtattctcaaagtcaagccgacttggcccaaacctctgcttctttggaaggagcatgttctttgaattcctccctcaatgcccagcttgaatatgaaaggatagcgcatgaggtaaactccctcggttgtcttttccatgccattattgattgggtactgaatgttgcttcttgttcgtaggaggagaaacgagcactcacggcctctcgtgacaatctggacaggttataccatgacgctagtaactccttgtctatatttgagaggagccaccgcttcactatatcggacctgaatcatcatcgtcatgagctgcaagtatcccaagacgaggttctatgacttggatagctgttatcgaccaaggattccaccatcagggatctgcgtacttccaagaagcttatcgcgcaggagctagaagccgctc

SEQ ID NO: 88004 - DNA, 614 bp, Zea Mays
ggtcagcatcatctaagttacacccattggggtcagcatcatctaagtcacacccattggggtcagcttcagcaaaaactggtactggcacttcctcagcagcaggagcagaaggattagcatcctgatccaagcatgacactcggcgaagacgtctttttttctttttcttcccctcagcaggagaaagttggttgagtggctcggtgacgacgcttcgggcgaacactatcagacctctgagtatccaaagctttgtcagcctctgggatgggtgctacagccagtgttttagcaggggctgcattagaggaatctttagccaacatatccagcatggcacttatctctacatcacttggattcaaaggcacctcgaaatgaacttgcctctcgtcgtcagggacttcaccaagtgaggcaatcaaagcactaacctcttcgggagagggtcgcactctaaggcccaaactgctatcaccagcaggaggattcgacacaaaactggtaaaagccttggaaggaggtagattccaggctgagtatgcaacaggagcaccaatgttcgacaccttgcctctgagtatcatctcgagccggctgaccaaatccac

SEQ ID NO: 88005 - DNA, 415 bp, Zea Mays
ctcgctcgagggctgagcttgacgtcgggcgaggcagataaatttcctgaaggttggacccggggtcgggtgaggcggagaggttgcgcccgaaggcccgtctgctcggctttgtcgtattaggcgtcccatcggagggcgtcaggcggcatgcgtgcatgttttggcacagtcgtaatcatactgctgcgcttgacgtgatcgctgtcttgtccaccactgtgctccgctgtcacagcgtaggttggcacacacattaaatgcgcatgtctcctgcgtgttttcgggtgccttgtcttatctgcttgaagctggctcaggcgagacagactgggctgagatgacctcgagcgaggcggagtgagtggtgtcgacgtcaccctcgggagatatctcggctgtcatctctcggaag

SEQ ID NO: 88006 - DNA, 868 bp, Zea Mays
gtttactaggcatgatgggtttggagatcaaatatagtattatcggggataagatccccggtccctagggctgccagtcagcgatggcgctaggaggaggcctctagagacaagggcccatcggtcggatggaggggaaaggaaatgtctgccatgggagcatccgccctaggacgaacctcgtggcaccaagccggggtcgggcgtggcagaactaaatagggtggcagggcgaatcgaagggaaaccactcgagtggacctctcgcttggcccaagctcgacccatcataagtgatcggtcgcattaactacaccagttgtcgatccacgacagaggcaccgatccgcctcccactcatggcctacgagcctcttgggttgcggcacactcataacctacaaacccctcggactactgcatatttatggcccgtgtgtcccctagcttgcagcgcactcatgacctatcaggattaggcctaagtgcgcagaccgcttgctgagcacaacaagacaagccgcaccgagccccaggctacggaggccatggatcggtgtagctcgaatgatgacgctcaagacccatgctgcccgcgtcgttcgctgtaaagaatacgagacaaacaggcgatctcgagcccacgggcttcaccccgtggcagaacactcggttttaccatcactcagtgtctccttctcgaggaagccaccactggctgaccctccttggcctataaaaggaggaggttggtccccagacgagggggtaggcccagatggatacccagcacgaagacgacaaacggacggaggaaagaggacgcaccgatgaggacctagaggtcggagtccgttgccaagccaag

SEQ ID NO: 88007 - DNA, 407 bp, Zea Mays
ccaacgtgggtggatggactgcacaagcaaggctccaagactggcatggccacgcgatcgggtgggacgattggatctgcatgggcgatagagcagggtggttgagctagatgttggagggtctaagaaggtttgggagttgtgctagggccgtgcatatggttgagggcttgtttactagtgatggattgagggagattaaaaagaattaaatcttttcgtatctaaaattatatagaaagagatgtaattccttcaatttcctctaatccaaatgcaactgaaaggactaagtgggttggctgtggtgacaagtcacggtggtgtacgaggcgatgggtgcagtgcgggcatgtggtagacgtcattgacgcgtgagggcatacctgtggtcaaagggatgtaat

SEQ ID NO: 88008 - DNA, 489 bp, Zea Mays
ggcgccggtacttcccgtggtcgggaagacacgcccaatccaccgcctgtactgccaacgttggccgaggctatcgctgccttggtcaatgcgaccgccgacaacacccgctttctacgtgaaatggtgggaaaacaatttcagcaacaaggcggaagggcctatccgtagggaccccgtgaaacttcatacctggatttctcggaaactcgtcccccactattcgttacagctgaagacctctcaaagccgacaaatgggtataggttaatgagcagaaatttggactcatccgctgcaccgagacctagaagccgttgttcgcggctcaacagttaagaggccctgctagtacttggtggggaaattatgtggccattcagcctgccggacatcaggtcacatgggacgaatttaaattagcgtttcgtgaccactatattccagaaggagtgctgcacatgaaacaggaggaattcatgcgactca

SEQ ID NO: 88009 - DNA, 323 bp, Zea Mays
caggcatcggcctgtggtgccttggcactgggtccgccattggttgaagtgattgacgtagcggccaatggtggcgagctgggtgggctgggtggtggcgtagcagtggggagatgttgcggcggcggagcggatgaagacgaggtacgccgagtagccgataccaggttgtcaaggacgtcgggaccttgggtagctggcccttggctttggagttcgtagccacggtctgtcttcgccaacgaggttttgtccctctgttgtcggcttgttgcgagagagacgggagattagagataatgatcttgcttgcccttctcaat

SEQ ID NO: 88010 - DNA, 427 bp, Zea Mays
cgtcatttcccaaaacgaaagattcattgtcccatattcccaacacaatgatattgcgcgcattgctaggaatttcatcatcaagatgaacctcttcgtgaggcaaatcaccatcagggtgaattaatcggaggagagttatcacagacaacgtgaatctgcaatcagaacatatgctttgactaaggtcgatggatcatatccgcaggcgtcctcgcagaatagatcaaatgccaataagtcaaatgtggatatgatattaatcccgggtatatccacattacataaggtagaagcattcaaaccaatatggttaatcctcaatgatttatggcaaactccatatacacaggagtacacaccgaacgacaggttcagtttagcttatgtgcgtttaatagaatattgaggcattacactatatggg

SEQ ID NO: 88011 - DNA, 337 bp, Zea Mays
atctcttagagctagatctcaccgatagagcattcacctggtcaaatgagcaagttgaccctaccatgactaggattgatagattcttcgcgacaacagagtggcatgacctgtacccctcggctgacctacactccatgtgcaccatgacgtcagaccactgcccgctcttaatgcaaggccactcttcggttaccttctaccgggggttcagattcaaatctttctggccacagattgaggggttcaacgaggtagtccatcaagcatggaattctacagtaaacactgatgatgccatccttcgacttcacgtaaagatgactcgctcggccaa

SEQ ID NO: 88012 - DNA, 547 bp, Zea Mays
cgccctatcgggataacagggtgttgtagaggaatttaattaactctttatcacataagttccttattcagaaaaccactaagaaaaaaaactcagaaaatgaaacaagcataaaccaggaggcagtgttcttaaggcagtaaggcgtggcgaggcgttagattacttgcttggttccatataatgaaggatttggcgaaggcgcccacccagaggatgagctgacccactggcaacaggtttgatttctaataactgccttttccgcgatgaaagaaattattttggtttcttgctcttatgaagtataacaataatgatgatccaaaatgtcaatgcatcaatctggcaattttgctaactgtcctgtgctttataggacgcttttccaccacgaaagaaattattttggtttcttgctcttatgaagtataacaataatgatgatccaaaatgtcagtgcatcaatctaacaaatttgctaactgtcatgtgctttataggatgtaaagtttcctattaccaagtttacattcgcaactatgct

SEQ ID NO: 88013 - DNA, 523 bp, Zea Mays
caagatagaaaactcagaaaacttcattgaggatctgcagatggtcttcaacagcctgaggcggtaccggtggaagctcaatctagaaaaaagtgtctttggagtgccagctaggaagttgctcgaattcattgtcagctaccgagggattgaagctaacccggagaaaatcgaggctatcatgaggatggaagcaccacgatcacaaaagaaagtgcaaaggcttactggatgcatggcagctttaagcaggttcatatcaaggttagcagaaaaaggcctaccattctacaaattgctcaagaaggtagacaagttccagtggacctcagaagctcaggaagctcttaatgcactgaagaagttcttgaccacaccgctagtgctaaagccgccacgccgagccatgccagaccactcggcagaggatgtgctgttgtacgtctcctgcatgactcatgtggtgagcaccacgttagtagtcgagcgggcagaggaaggacacacatatccagtacaacat

SEQ ID NO: 88014 - DNA, 548 bp, Zea Mays
ctttttccgtgtcaagctgggcatgggaagcgcgttggatacgttctgtggacaatcatacggagcaagacaatatgacatgctggggacacacacgcaaagggcgataattgttcttatgttcacgggtcttcctctggcctttgttttggccttcactggtcaaatccttatcgctcttggtcaaaaccctgagatatcattcgaagctggattgtacgctcagtggttgattcctggcctgttcgcgtatggtttgcttcagtgccttaccaggttcctgcaggcccaaaacattgtccacatattggtagcttgctctggacttaccttgctacttcatgttatgctatgctggttgctggttcaaagtttcggccttggccacaaaggcgctgctctggcaacctcagtatcttactggttcaatgtggcactgctagctgtgtatgtgaaattctctgaagctggcagaagaagttggcatggatggtcaggggaggcactaaaattgaaggatgccaaagtgtatctaaagctagcaatcc

SEQ ID NO: 88015 - DNA, 912 bp, Zea Mays
ggagcataacaccctactccactatgtgttggattgttgtggaagcttgagagtctgaatgaacttgtgttgtaacgttgcatgcctccccttttatagctgaaggagggcatggacaaaggtactgagccccaacatgtgggcccagggacaaaatgtatatagcacttggagctactaatgttcgctgctggggcaatcttcccgtaccccgacactcgagattttgtgtatcctcggcgtgccggggaagcttcttgtacaagggacgatatctatagtgcgctgcatagcacgggcgcactgtttgggaatagacctgacaggcacgccgcctgcaaggttgtcctgacgccgtctgccaacagagtgtacaggacgcattaaatgcagagagggcacatcgtctgtcagcgtggtggcaggcggcgcatcctctccgtattaaatgtggagaatgtgcggctttaggggccttatgtcaggctctgcccgttggcttatgtcacgggccacaagccacgcggcagcagcgggcctccgcctgagcggggagcgtagggcaaggcctagacacatgccagcgtcggacccttactcatgctggggctccccccatcctaggtccctattggggtctggaccttgctcaaagggacctggggcccagcgaagggacccggtatacctttctgggagccctggactgtaatcgaaggctcagctatacgtataggggtctggtgttcctctttgtgggtctggacccgataatgcaccctggagtgtattatctttcctttccacgtggtacccctgaacctgcccatgtggtggggtcagggtgcctttttccgcgcgacgtctttatactgtagtagagggtacccctgattgagggtactgacagtg

SEQ ID NO: 88016 - DNA, 518 bp, Zea Mays
cctgctcatcggccatggcaccgccggccctggtgaacgccaccgccggtgtctgcgattgtaagatggggatcatctggcctggccgttgatctacgggcgtgtggccacgattagaaggtgataatgtttcggccagattcaatctgggcctttgatcggctgattcacggtggggactggattagggttacaacttcgggttggtgcgccttgtccgttgatctggtcaccaacggctgtgatcgcgccttgcataccggttcggtcagggcttcgtgatcgtggatctcaggatcgacggtcaatagcgcgtaccccttcgtcattataacggatccgtcagatcgggatctgacggctcatactcgcccagatagattcagccgagcaaacttctaaaagagaccccggaaaacttgctattcaacccgcggtctatcgcctgggttctctgtgtcttggtgcactttgcgccagggcccctgcacttcctaatattagtgtgcccagtccag

SEQ ID NO: 88017 - DNA, 550 bp, Zea Mays
acatcaacatacaccatgccaccgaacaaagcagcgacaactagctccatccttgcaccgatcgatcctaatcaagggaatgaagctctcatcagagaggcaaggaacaagaagaagaaggccatcagttcgccccctcgtgaggaagagcttgatgaggaaattagcaacctcaaagctattcaccaacaagtggagaagcgcggggagaagatgctttgtctttcagagctccaaagaaagattgatgaagcaactgaagagatgcgcaatatagaagatcacaaaaatatgaacaactttagggatcaagattacgatggacgtgatcatgacaatcttagtcacgaggtgtacaatgcccaagatttcctctatgatgaagcttccctactgacactagagctacgagctacacaatggccaccactatacaggcctcctacactacctatctatgatggcctcgcagacctaaagcagttcctcatgagctacgaagccaccatgtcatcatatggtggtaactcaacagtcatggcaaagtctt

SEQ ID NO: 88018 - DNA, 649 bp, Zea Mays
caaaaatacaactaataacaatgagaaactaaaactacattccacggatggttggattgtgacctcaactcacatccatatgcaatctctattcctatagtgctttctataatgcaggagtttctccatgtgtcaccccctctcatacacctctctctgttccccgccccacttttccttccacagtgattaccttcacctgcggtcctccacgatcactccactctcgtacactagcgatgcgcccgcgaggcaggcagtgatgcaaagtaagaagatgaccaatgaagttggggctactaggtgttagcccaacagagctatcataccatcaattgaggtacataggttttcaatttggtaaattttaggactaattaggtttgatttgagattgtagctatttgaatgatgagaggaggggcactaacatgggtacctattgtggcaccgctgccaccacgcttgtgagcctaatcgtgagctggaccccgcaccacctttctctcaagcatctcgatagtttcggttgcttactctagtggcagcaaagcagagagaggatgaggaaggggcaacgatgactaggatttggtgtgactcgagccacctcacgggagacgacacatggattggaattatggttttt

SEQ ID NO: 88019 - DNA, 807 bp, Zea Mays
ctgataacatgggatgaataatagcgccgggattgctaaggtatttaattggccccataaaaactctatatcttccatgaatagagacatcaagtttgagctaataggttaggagacatcagtgtgttagatgtacatatataaatttggtgagggagagcttgggattttggtgaggaggacaagcaaaaaaggcagcaaatatgacatggctgggtcaaactgagtagtgtgctctagcaaaaatgttaatattcatgaatcatttcacattgaagcttccctaactcaatcagattttcttttgaagttgttgcaatcagatatatagtaataaacatggctgtgttttactgagattgatcttttacaatcacaaaaaaccaacatgtgtgtgatgttatgtccagtggccaccccggcaggtcgtgagctctttaatccttatccctcggctgactgaatgattacaggaattatgatgtttggtgttgttactatttgtggatggcaacactcaagtactgcaataggatgttagatgctactcaatttcgtccaggccctcgcattgcataggatctgaattctgcttggcttatgtgttccaatccaactaaacacaacataggaatgtttcattcatttactttatattaacatgttacattttgtttgcttcttttttcagtttcgaacctggatcaacttcttgatactactatgtaatgcaactatcaatttcttttgcacatatatttttctaaaatgctttcttgttgttgatcagtttcagtacctaggatg

SEQ ID NO: 88020 - DNA, 709 bp, Zea Mays
ctttaccttgcactagaaggaattgtggccttccttgtgggcatactacaaaaaactagatcgagtcacggtttagaccaggaaaaactggaaacagtggatttggtggttcggttcacccaaaataccatacaagcaattgaacagatgtgaatcgatcagttttgtgatgaattgttgaatcgataccagttcttaagaaccaaccaagtctaaaccaagacataagttacccctcattttgctccattttatggcatgaatgtagcggctatagtaaaaatggtcaataaggatattatatatagagagagaaactacgttttatagttgttgggggcacatatgcaaaacaacagtcgcaataaacgatcttcatgaactctgaattctagaacttctatagagatatgtcaatagctggtttttatgatcttgatattcaaaaaactcataggggacaattctcatagatgtccaagtattagggacatggcacttcaaggtcctcaagggaaattttatgatagatgactgggccctagaaactctccttctagtgcccacaaaagggcttttaagacaggtgactgagccttaggggcttagccttccgctgccctcaaagggacttttatggtagatgaccaagcctcagaggccagttttttatgcccatatataggaggtcttttggtagaagacagag

SEQ ID NO: 88021 - DNA, 535 bp, Zea Mays
ggtagcttcggtattgtagttggttcttcagtcctttgagcagggggagcagtgtttcctgattcagcagctgaagaagcctccccgccaaactcaggcaccacggccggctcaatatagtgtggccggtgggtaaggaccttcaattttttgcccttcggtgcaggctcatctagagtggccggagcagcaggtttcctcttctttccctggcctcgcagtggataacggtagtccgggtaaacaaagccaatagcgtcaaaaactctgttcaacctcttctttccccagcctccgaaggctgtggataatgcattaccagccttggaatacgatccaagcagctcatcactggtaacttcaatgtattttagccagtcatcattcggttcatcgaatttatctccgtatctaaatgtgtacttcagccggaccagatcaccttcactagatttggtgatggtttccttcggcatttcccgtctctctataagcggccatactctgtatgctatgtgctcttgtaccaaatctc

SEQ ID NO: 88022 - DNA, 662 bp, Zea Mays
gctgaatttgtggtcttcatgggaataaaatgcgcagacttagtcaagcgatccactaccacccatatagcatccctgccacgaggggaacgaggtagacccaccacaaaatccatggtgatatgctcccatttccactctagaattctaatggcttcagcaaacctgcaggccgcttatgctcggccttcacgcgctgacatacttcacaggcggccacatacttagaaacgtcaaccttcatccgcttccaccagaagttttgcttcaaatctcggtacattttggtttcgccaggatggacggtgtaaggcgttttatgagcttctctcaagatatccagcttcacctctgatttctaaggcacacagagacgacccctgaaacgaatcaaatcattctcatcaatggtgaactcccgcggtttaccatcaccaaccctctttcgagcttcctgcaataggcgatcctgctgctgagccgcacgcactctctccatgagagaggattgaataagcatccgagtctcctcgctagcggtgtcgacataacacaaagcgatccccaaacggtccagatcagcgatcaacggcaaggccacctttggaaccccggacctgctaagggcatcatccaccacattagccttcctcgggtgataa

SEQ ID NO: 88023 - DNA, 634 bp, Zea Mays
tcaatgggggaggttgtggtgccatccatgccacgggtttcgcaacgccctgcgcctgggactgttgcgcacgagtatccttgctggttgcccgccgtgggccattttcgatagttggggagttgctccgcaacgcccaagctttatggccttgtcaggatagtgagacagtcgacatcgccacgccagtgcctaatccatggagcatagatcatctatataagttttatccgtaaggacatgaccgggaataagtttattactttgtaattaggttgcacctatgcgtggtccaatccggtggggtccatcctcataaacctggtctttcgcattcatcacatagctcatgtgtaccaagttataaagaaaagatttacctcacttctatctttgcgataattttcttcctattttgacttacaagcattatttattctaacccccatgtggttccttactgttgttgctatgttgagatccaaattgagttagccggcttatagcttagtttggtgcgcctttactgctgaaagggattcagattgtaggaagccaggtttggagaaaacacacctgtttcctggggtggtatgaagtcgtgtagccgcttagcctggtcctatacctaaag

SEQ ID NO: 88024 - DNA, 727 bp, Zea Mays
aagaaagtagagttagtaatagctaataagctccagcaatacctctttcctttaagatgttcctgaagcttcttcactgcatcctcgaggactctctctgaggcattacatatcttgttggcaagattaagaacactaaaatcatctgacacagttacccactttagtagatggaaatgctccttgacctcagggtccttgtagatgagctgagcgagggtggtcttgcctagtcctggcattccaacaatgggaacgaccatgagatcacgactgttaacatggccattgaccaatatgttaacaattttcttcctctcatcgtctctagacctggcaacaatattttcaggatcaacgataatggaatccatctcacgcaactccttccgtgccgttgttgcctcgggctcaagcttgttgaatctaaaggtgtccatttcttttataaggtccttgaaggtgtcaacaactctgcgaagcctatagcccatcctgatatggaaggcaacacgattgtgggtagggaagagttttacactggtcataacgccaagctcggcgatgtgcccattcttcttggctcgacggcggagcgcctcgtactcgaagtcgtcgaagacctcgttcgcctcgtacaccgctgtcttgagctgctcgagccatttctccacgccgcggcgagatgcctgcctctcggcgtcggtgatgactttgaggatgggag

SEQ ID NO: 88025 - DNA, 882 bp, Zea Mays
atctcttaaccgcattatcctaaatcattttagtttgacctcaacctctttttacattagcgacctggtctaaaactcctctacgcactggcgcctcaggaggtctcctttgaacatgtccaaactatctcaaccgatattgaatcaatttctcaattggtgtcaccccgatcctatcccgaatatcttcgttttgaattctatcccttcttgtgttcctacacaaccgacgtaacatgcacatctctgctgcactcggttgttggacatgtcacctttttgtcagccaacattcaacatcatataacatcatcggacgaatcattgtcctatagaacttgtctttaagattttgtggcaaccgcttgtcacagaggatgccagatgcatgataccatttcaaccaagcgattgaaattctatgcctaatatattcatcatttccaccatccttttgtagcattgatcctaaatagcgaaaagactccttcctagccaccacttccccatcgagggtaacatctccatcttcatgtctagttgccttaaaatgcacatcatgtacccagtcttggtcctactaagtctaaaacctttcaactccaatatgtgcttccacaactctaacttcctattaaccccttccctactctcaccaactaacaccaaatcatcagcaaagaacatataccaaaagatatcgccttgtatgtccattacgacctcatccattaccaaagcaaatcaataaagactcgatgctgatccttgatgtagtcctatttttattgaaaagtcgctagtgtcaccatcacatgttcggacaaatgtcattgcatccttgtatatatccttgatgagagtaatgtacttagttgggac

SEQ ID NO: 88026 - DNA, 350 bp, Zea Mays
ctttttgtgtcttcggcgcctccactcctaccgaagggcttagaacttctgatgttttcgtctctttggttctcggttcttcaattttgtcaaccttcggcattgtagccgaagaggtctcaccgccaaattctggcactgtggccgattcaatatagcgcggtcggtgagtaagaaccttcacctttttcctcttcggcgcgggctcgcttggagcagctaaagcaacatccttcccagaagttgcactctttctcttctgcccccgtggcgggtagcggtagtcagggtacataaatccaatagcatcaaaaactctatttagcctcttcttttttcgactcccaaag

SEQ ID NO: 88027 - DNA, 745 bp, Zea Mays
atcaaattgagagctaccgacctcgggtctataaattgagtgtgccattaacttcgttaggtaatcacgcatctagcgcactcacccgtacctcaaataatccaccagcaagcttcaatttcgcatttcccccaatctgtttaagaacaccgcgtgttctgacctcgccgtggtccgctccaatcaggtccgattttgctaattgtgtccttattttagaacccatgcttgtccttgatactcaccgactcacccaattgaactagcaaccctctggtcgtcgggaacatgattgtctagccgcaacgctcacggtcaccgtggccagggccaaccaggcactcatttgtgaaattaagtgaggggaagtgttcggtaggggttcaattgtgtccctgtctcccgtgagctccagccatggcgtcgtccgaccggaatgggctcgccggagcgcggcaagggctgttcctcgtcgtggaccttactctgtaaaggaatagaaaccaggggtcctttctggaaactgtcagtgactcccgaaaatagtgcttgtgctcatttcagattagccagagagctgagggcctttctgtaaagccgccagcgcgggcgcaggcgcgcccctattccctgtgttgttgggccgtctaggctagaattggcccagtactgttgaagcctttcctttttccttttcagtagaactttggaaatccgtagaaaagtatagtaaaatcctaaaaat

SEQ ID NO: 88028 - DNA, 685 bp, Zea Mays
cttttataccttttatagtttaagaggggcaccatacaagagagcttagggtcaaacaggtggacctaaaagtatttacatcatagaacgggatacatcggatagagctgaatcgccagatctttctgagcatatatcccttcttgatcgatacatcagatagagctgaatcgtcagatcttcctgagcatgtatcccttcttggtcgtcgagcaggctcctgacatcctattctcctgttttgtctaatgagagtatgcatgcaactcctgcagtaggttggggcgtagtttgccatgctaccgtatgtaggtgtgtgcggtgtcgtctcatctcctccgcccgtctcttcatgtctcggtaacgcacgaaggacagtgaagtcataatgaagggtgccccatacgacgaatttggtcaatgcccttgcctcggtaatgtgtggttaacagtataataagcacattgcagggctggcgcgctgcgtgcatttaatgccagagatacgctttccgccactagcgcggataagtatgcaccccattcgcagtcaatgctggtgggtccattttagaggctttcgtcaggcatcattcgctggcgtaacgctggcttacgccaggtgtgtctgggcacgcgtcggcaccgggcctctgcctggacaatgggtagacccgagaataag

SEQ ID NO: 88029 - DNA, 412 bp, Zea Mays
aacttattgtgtcttctgagggaaaataagggaaacaccatgaagtcatgtcaaatcgcaatccagaagcagaaagagctggtagccgcaacacaaggcaaccaatcaaaagaagtataccatacaaaaccttattactcaccattttttgtctcatgtcatgcttaataccaagaaccgaaggcacaaccctcggcatccaatgcttcagttcatccacagtctaggcaatggggaccccatcaattctacctctagggaccaccactgtatgagtaaccacctttcgaccaacccagtatccaacacaatatatgcatcaactagtgtcacacccggatttaagggcaaacccaagcacatctcaaatgagtaataggatcaagtctcacacatatgatgatgactcatg

SEQ ID NO: 88030 - DNA, 636 bp, Zea Mays
gtgatatcggccgtttgatccaaaatctgcgcgccagattagacttcatgctagttattcatccgcgctcaaccatggccgtcggatccgggatttgcggttctggtttaatgactcgaaggggtacgcccagattcggtctaggccattcctttcatgatcaacggtctagggccaactcaccctagatctaatcctagctctacagcgattgatcaacggtcttggggcttcttcctccccatgaccccggacggctgcgtcacgaactggggaaacgtctagctcgcgtgtaggttgactaaccgcccaggagtatggatcggagcgtggatagaacctatgcagtaaggatgaaatgttgaattacatggatgtcttcttaccaagttcgaagcacaagtacagttgcccacggaggcttgcggcgtgatggcgattcctcaacaccgcccgcgaagctcccgatttctgacttggcgaatacgtgaatgagtcttcgcgcggtacggggtgatatcgcagcttgacaacgcccgcaagtcgttggagaacccggctcccaccgcacgacagagacgacgctcacaccctcactcacgacggcggtgaaacacggtggcacatgcacgaatg

SEQ ID NO: 88031 - DNA, 872 bp, Zea Mays
ggagcagctaccactgggggaccttagtgttcaagatgacctgacttatgcggagtaccctatcaagattctggacactttgactcgagttacaagaaataaggtgataaagaggtgcaaagtgcaatggagtcaccatggagaagatggagctacttgtgagagagaagaagagcttcacatagattttccccatcttttccctagtccttcttaaatctcgaggacgagattcttgttaaggggggtaggatttgtaatacccaacttctatgcaaaataataataataataaagtgcatgtttgtacataattatgcccctcctttttgaccataagcaaagtaaaatatagaaatgcatgtcatgctgattttcttatgtggtgcatcttaatggaaacttatgtattcaaatccacttaaatacaaaattaaagtaagaaattggaaaggattatgaattagaaagaaaattcgaattaagtcaaatattccctaactatagaaagaagagttaaacaaactgtaaacagtagaacaatttattcactttaggactgtgtttggagtttggaatctgaagttcaaaacatgaatttagattttgtttgaatatttgaaattgggaaaaggaaatagaaagaagtgaacatgaaattacaaaagaataaaacaaaagggactttaccacgtcacttgggctgaatgctcactgcaggcccatctaacttcaccatccaaccgaatctggtgcacgctcggcccacttggctttacttcgcgtggcccagtgctagcaattccagtccgtaggcgcgcttgttcctcggattggctgaccgcgtggccccactgctcattacctctcac

SEQ ID NO: 88032 - DNA, 603 bp, Zea Mays
ctggctccccgtctgcccaggtgacggcgcggtagcctgggtggaggcaacgcgagctccgctaccaggccgcccggaggagcgcgaatctccagtgaccgccgcgactaaatcaggttggtaggtggcatgctcctactccccacttgctcgtggtgggcactacattgaactatctagcttctttcctgtttggtgaaccaactcggagtcaacaacattctagagtaaaactatgcttttttatgttgcccgattagtttaggtctttaggatgggtataggatgcaattgtgcaatattaatgattcactttagtgtcatgtcacatgtgctgaatttcattgtgattaggaattggatttccctgttatctcggtggtaaaatgcaatactgcagaggtgttttcacttcctggttcatctttcaattggaatcacagttgctaatcattcccatgtgcatcaatcaggggtcatgtcgcaggcctggtcatcaactacgcgctctcggcgtcgaagcacagctagggatgtcgtagaacccagaccccttgttgttgttgctgcaggaattgtgcccattagcgtcgatctggaggc

SEQ ID NO: 88033 - DNA, 405 bp, Zea Mays
gagagagagagagaggaggatgaggaggaggagaggagcggttaccgtgtaaacggatcaaacgggccatttgctcccacgatcccacgaacacaggcaccccacacccccacccaaatggccaaagccgccgcgatcgcgagctgcaatacccgcgcacacccaccctgcatgctcgagcgccaagctggatcacaaccctacgcggccacgccacaccacaggccacaccgtatcgatctgcatagcaaaagcagtagcaacatgcccgcatccgttattccgatcccagcaaaaacaattctcacagaaagagattattttgccccctcaccaatcctgctcccaaaactcctaaccttttaatccgcgtttgttttcctccggccgtccctggcttgcagc

SEQ ID NO: 88034 - DNA, 398 bp, Zea Mays
gttggagaaaggtaaagaatttaagtgggatgaagcatgtcaaaaatgttttgaggaattaaaggaaaggctaaccactgcaccagtgttaattaagcctgatattcataaaggattttatgtgtattgcgatgcatcacatcaaggacatggatgtgtgctaatgcaagaaggaaaagtaattgcatatgcttcaaggtagttacggaagcatgaaaagaattatcctacgcatgatttggaattagctaccatggtacacgctttgaagatttggaggcactacatgattggaaacaagtgtaaaatattcacggatcacaaaagcttgaaatatattttcacgcagaaagaacgcaacctaagacagagaagatggcttgagctaatcaaagact

SEQ ID NO: 88035 - DNA, 1027 bp, Zea Mays
ttcgaatctccctccaaaagacctttagtcttggcccgttgataccatttaatctcatcttctctcagcatcgctgcgagcctattacgaaggaagtttttggtatcaatttcctgggtggacaacaagaccgtttcagctttcttatcgaggatgtctaatttactcaggatctctttcttttcttttttgttagatccgctaatatttttagcccaccctctcagatgttgtctaacttttctgattttattctgccatttctccaaggccgaagtgccaccccagtcttgtgaccaaatctgagcaaccatatctcgaaacccatccctcagtagccatccgagttcaaacttgaacatcggttggatattactcgggagactgtctccagtgttaagcaacaggggcgtatggtcagaaatatccctagagtgtgctaccaccgacgccttagggaagtgtagctcccattcagtagacactaggattcggtctagcttttcgtaggttgggttgaccctagaattggcccacgtaaattgtctattcaataactctagttccatgaggttcaatccgtctatgactgcgttaaacaagaacgaccacctcgggttaaagttgtcgttgtttttctcagatgacttcctgagaatattaaagtcaccaccaatcaaaactggcaccgttacccgacctaccatgttaaccatttctgccaaaaattcttcttttaagttatcttgcgcaggaccataaacacaaacaagcacccatttaaagccatcattcttatttcgcaaatcaaatttaacatagaagtcgccttcatctataactcctatatcgaaaaccgagagatctatgcccatcagtattcctcctgatcgccctctaggttccttacagtgccagatgaaatccctcctcgcacataaattttttaggaaagtgaccgaaaattctttctttaccgtttccgataaagcaatgaagttaaggtcaaaatccttggtcatgtccg

SEQ ID NO: 88036 - DNA, 950 bp, Zea Mays
gatcccttagtcagcggcccgaatcctaccgtgccacatgacctatacccaattagtaaggtgttgaagtgttccgaatatgttccctgcatatacaaacatgtgcagacattagtccgagccgtgttcggttccccgggtcatatcatctataaggagctgatcgctttccccgagctcgcactggatccatgtcttagtggcgcatggagccaacaaccttaaaacccccccgcttcgttcgcactgggtggatccgacccactatggttaaaagcttcaccacacaactggaacatcctacacatagctaggcctagcgatcatgacgggcaccagagcaccggttagattagaagcctaagaaacagcacgagtcaattcacggaacaatcctcgcccaaaccgatgcaaagaacccgacacgccatcgaaacatccaattctcaggcaaggcctagccatatagatattaaataggtctttgataaattaaagactaaccatgacagatcagatacaccaagtaaaaacgaagcagaatgtcgcccttgcgcttgggaactcacacgaaggcaacgaagcacttataatcgacagacaacatacatacacaacgatcatgtcgaatactatgataactagtgcatctcgctataaaaatggttcagtacgagaaaatacagagatttgtgaataagaacaacaccacccagtcgtggcacttatccatggagaaccctgagaacaagggcggcgtgcggcaaagcttgcggtcgaaaacatgtaaagatttatgatcaccctatcgaatgatgatatatatttatagtccaggggactctctatccctagtgtaaaagataagctctatctcccctactttttaagctggtttaacttattttcactaaattcatggctgcttggcccaaaatgttctcgcatgg

SEQ ID NO: 88037 - DNA, 446 bp, Zea Mays
caaggtgttgtgcctgcgcaaggctctctatggcctgcgacaggcaccaagggtgtggaatgccaagctggattccacgctcaaaggaatgggcttcacgccaagcccgcacgaggcggccatctatcggcggggcaatggaggaagtgccatgctggtgggtgtctacgtcgacgacttggtgatcaccggcgccaaggatgcagaggtggcagcattcaaggaagagatgaaggccaccttccaaatgagtgacctggggcatctctccttctacctggggattgaggtgcaccagggagactccgagatcacacttcgctaaaccgcctatgccaagcacattgttgagctggctgggctcaccgactgcaacccagctctcactccgatggaggagaggctgaagctgagtcgcgacggaggaggtggatgctacacagtac

SEQ ID NO: 88038 - DNA, 815 bp, Zea Mays
gaggtatcctatgccaacattctaaaagaaatggtcgagctcttggatgaagcaatggttctatgtcaagaatgatctaagtgacagggaggatgtgaggggtataatccagcgtcccatatgatcacgcttcggtatcaggaggccatcgatcgcaagtgggaacgaagtgcaagcatgtttgatggccttcaacgcagtgtgtacttacattggcaccaaggatttgattcaagagcatattgcttacaaggtatgacctcttgtgaatgactagaagatgccgaaggagactgctgccggctccagcgaaggtgttctggtttacttaagatacacctatcgctatagaagtcaatttgacgagccgaatgatgattgacttgaggctgttgaggccaccagtgacgagctgttgggagcttattcgaaggcagaggacgaagccatgacaactaccttcgacgctcatggcaagaggagactgaatagagttttcgatgtgatcgtatttttttatcctgattactgctttcctgcctgaaaacaagggtcaaaaagaaaagtggcaacttcatcctcttccgtcgcgcctaaaccgaaaagagctaaggttttgactcgcaggccgaagccacgttctttagagaggacagctgcagtgcttgatacataaaagatggagattgttgaaaatgccgaagctatccccttggctccagagataattcctgttgtgacagtcgaagctagtgtcggtccggtagaagagccggaaacaaagagctcaatggcagaagagcatccaaaactgt

SEQ ID NO: 88039 - DNA, 942 bp, Zea Mays
ttagttatacaagtaataatggtgatggaaataagtacatcgacaagaagtttatcgtttttatttttgattcagcttgttttagctatgcagcttttattttcaattcactaacatctagatattaactgacagcaaattagaaagtcaccactcacgagcacaacaccgagaaccctggtagacgctccccattgcttgcataagcatcttcacttttcagatccagcaactgtccatacttgacggttgacacagcttcttccagaatgcttgccatggcagcattgttttggtcctcgaagtattctgctacagatggagcacactgcacgcgacgacatctctcgcctggcacgaggtggtgtcagggtgaacagcgatggcgaactgcgcatctcgtgtttttcttttctctgaacacaatgaatccttgaccaaaggaagaaacaaatagagcctaaatcaagatgccaacgcagatgctctccaacgcctcctcatcgaagctgttgtggctctccttcagcgacgacgactttgaccgtagcgcagccacacttacaactccccgcagatctaccgaaccctacaaaaatcaagaacccttatatcgcaaccacacttacaactccccgcagatctatcgaaccctacaaaaatcaagaaccctacacgagagaggagatgcgaaggatgggggacacgacaaacttacgggcaagaaagttttggctactggagaggacagatgccgccagggagattgcagcgccgccgcttacgtcgcctggcgctcgtgtctcgccgttgcttacgtcgcttggtgctcatgtgtcgtgtcgcttggtgctcatgtgtcgtgtctcgcctccgcacttgctgcaggcctgcgactgacgaggaaagattccacgagtcaagagtcgtgggtcgaatacc

SEQ ID NO: 88040 - DNA, 588 bp, Zea Mays
atagagaaagagataaagtctggttgcacggagagaaggttggcgcaggtttctaatgcaagtattgtagagaaacaaagagcggatggggtggtacctgattgaaggagcatctcgcgcatagaaggaagaatgtcaagaaatgtccatctgttccttcagacataaaggcatactttcaacttaacatagataagacaaaggaaaagaagagttctaggttcaggcagcagctgagggcagatgaggcagcacgaacccattttggggacgatgagtatgaggatgaacttaaagcggctatgcatcagtcacgtgtagagcacgaatttagtcagagggctggtgcaaggtatgacaggggtggtggatcctccagccagaggatatctcgagggccacttgataggatgatgggaaggagtagggaacaagtacctgagcgtgttagagactacaatcttgctcaagcctctcgaccaaggcaacagaggatagatactggtccctggacaagtaagggaaggagctcgaaaaagattcttggtagggcttaggcaaaggcttgtcatgctattggcatcccgg

SEQ ID NO: 88041 - DNA, 556 bp, Zea Mays
gtaggatagtgtggatgatgcatgcggatatgatgcccaagccacctaacaccaccgtttcagcaactgaaagatggtgtaagtgatttatcagttaatatcaatgataacgagtgcaatgaccccttctagaatgaggtaggtcaggtgcaaaaacatactactttcaaatctttgtcattgcatcagaaccagcacctaacaagagaagtgagtaaaaagataccacaacgacatccagtgcacacccaccaggccactccagttgataaaaaggtgtgatgatatgcatggtaaggctcgatggattggaagcttctatagatctttgtcatttcatcacccgggcggctagctagctaggccacctaacatgcacacacatacaaaaagtattctttcatattttctggaatgacatcactactactagaacctctctctggtattaattcattgaaccgctgtccctgtccaacttccatttccaggacatactcaaaaaaacattttagaaaaaaaaacaaaggtatctgtcacatttctgttgttccag

SEQ ID NO: 88042 - DNA, 549 bp, Zea Mays
gtcattgtgttttagtatatagttttttattatcagtctataattacttcaacgtcacatcagtttttcttttagatttttagtttcaatagacacgatgttttagtaaaactagcgaagtgctacgttgctaagatttcatttatgtttaagtgtagagtttaaaaaacaaaggcatgttggttaggtggatgtaagacatgttagctagatgaacgtaagggcttgttcgttagggttggaattggctggtatgatggcctgatccatgggtgtcatcccaacctggatcaaatatcagcccacgaagaaatagttgttcgcttagcccacacgtgtttacaaaccaggcccaatccacacgaaaaacctcaaccccggcctggaattcgtccacaaaccaacagtcgtggaactcatcccggccacactgcgctgcccacggtgcggaagcgagcagtggcgcgattcgagacgacggcgacacaaggcttcttccgccgctggccgccctcttcgtcagggctcttttctcctgtgagttcttgc

SEQ ID NO: 88043 - DNA, 376 bp, Zea Mays
gtgagaatttttggcacgcctcgcacgagcggaccactctgttggctacgcacacaatggctgacctgtagaaaccttatcacatggccttagcagcgagagccctaggtcccgagtgtgatccgcatgttcctctttggacctcgcgaaggagttttatgccttcgacttctgtgatgcatttgagcatgggttgggttattcccttcttgtataattatcagtcgatcactgtgaagtcatagcttctatgtttcaaccttttgacttcgctttggttagaggggtgatggtgaccttgaaggtataaggtgatggatacccaccagtcttcgatcattatcagatgtactattctacagctgtcgagatcttg

SEQ ID NO: 88044 - DNA, 524 bp, Zea Mays
gttgatattgtcatcaaagccatggtcgaggtggttaggccagaaccaacaacgcaatactttgcaagaaaacctcaacattctctcgagaaattactacagaagatggaagaatatataacaatgacttttgtcagagaagagaggagttacaaatatacaccaaagctgtcaggggcttcggaggaagattcaacctaaggcatgttcatagtattcacaacctagtgcagggagaagaaaaaataactcaatctcagtgacagtcagaccaccaacaggcaagctcccatcaactgtcttctcacaacatatttcgcccacctgctccaagagggggaaggggaggctgaagctttagtggcaggtttaatgcgcctctaagaaagccattttgcttgttttgtggtgagaacaaaggccacacaataagaacgtgccaccatacaattaaaaagcaaaaagaacttgcttcatcagctactcgaccttcctagtcgaaagaagtgttcagtacatcttca

SEQ ID NO: 88045 - DNA, 508 bp, Zea Mays
attttttgttattcataattgtcggtttagcctgtgctagttaatagcaacttgtgcttttctcaaggtcatgagcttaagtaattaagggctatagactgaaaaaagtaaatcactttgttgcattaaaggcaaaacctttcatgagcaagctctatttgccttaagttatgctagtccaggtcagttgtcacttaggaaagcgagatattcttgagaccaaaggcttctgtggctgctatttgtattcgtgttatagttctttctcgggatccatccccatcatatgcatgcatgtgtacttgcagctgctctaaccatcagtgcatgcttcatgtccatgtatgttcttttggttctttcgttgctctctgataataattttcttgccccaacccaagagcagtgcaaagagtattctcgtatatacttagtttgattgttttaattcaaattcatatttgtctccgagttattttttaatgtttagagtttagttttaatcgtt

SEQ ID NO: 88046 - DNA, 491 bp, Zea Mays
tgctagagtgttgaacagtgcaaaatggggattgaaagctgctggagttggtctagtaaggagcatcatatggatatccgtacgagtacaaaggagggtacaaataagtgaaaggttgagaagtatgagtgttggtggaagaagtgtcgtgattttggaaaccagggggcagtgagatttgtgttcgctgaagggattagtgtggacttacttcgaatggtgaatcacaaggactcgagcgtggatctaagacggtgggtttatactggtttaggcttgcgctatagtccggtgtagtgttgaccgtagtattgatatggagcgcgttacagtaggtgtgcttgtgtgtttagaaaaaaggggtccttccctttgatagttcaagggctgaactctataatgggggacttgtattctgctgggaggagctcgaccgaggggccttgggcagcgtggttcttctgttactctctgtagggtcgtgcgtagcc

SEQ ID NO: 88047 - DNA, 434 bp, Zea Mays
gtccagtttagtatggctgccagatttttggacagctgccacatttcagtttaagcacatctgcaatttcagttagcttcagtttacttcactctgctctgaaaatgcaactgaatttctgacagaaaaccgagcagactgaaccgagcagactgaatttctgaagtagcagaaaaccgagtaggcaatagtgtgaaatgcgcatgataaaatagaatcagtctgtaaacaaaaactgattttctgtttggatggccaatatacggtaacctgtatttgactgtaagctgtaggctgtcggttcagttcagtccaaactgatttcctgtttggatgaccgatataatgttatctgtcggttcagtttagtcaaactgaaaacacctgaacacaaaactgaaaacagaactgtgctttttggtaaggtgtcggtt

SEQ ID NO: 88048 - DNA, 652 bp, Zea Mays
gttgattggacttgatttgcattgatatattaataaaacaatacggcccatgacaaaaattgataagttttaaaaacatagttaagcaataatcacacaatattaattatctaaactttgaaggtcactaactctagatcaatcaaatcaataatcacaattaaaattagcgaatcaatctagaattaaaattaagcgtgtaattaatgaggaactgtaactatacgaatattgcataatcatcaccttaagattatggctttgcactttcagatagtgaaaatttgaaataggagatgtgataggtaatattgttgtaggtagcttaatcatcaaattatgcgtacaaagtgcttttcaaaagcatagattaatccaattattagatctaaactattgtttatcttctctcaaaatctcgtctaaaaaataaatagaatttcttatttataacggacaacaaccactatttggctcgaccgaccctccttgggctggccggtttgcctcttagcccgcctagccaacatgggccaccaacgcctttttggaccgcccctgcctccacgagcctactttggctagttatcccttggtcatggccatggctggccactggccgttgttggctggtcgcagcttgacattactg

SEQ ID NO: 88049 - DNA, 524 bp, Zea Mays
ccggcgtcatgcggcattggggcctagttaacccgaaggttaggtccagtgggctctgaactagcttctcctttttctcatcaaccttaacataaaatcactcagttttccaaccggttggccatttggtgcggtagataaccacctgagtcttcgtatctttgtggtaagcaaagttgtaacagccaaagttctcgtgtagcccatcttccctagccttcgtctgatagtgaagctcgtgcgcccggcagaaagcttcggcaagcggttccactcctttggcttcggagagcccagataaagacgctgagcctaacgatagcgttaggatttagctgatgaagataaatttcgaacgaaaacatccgcaatcattccatgcaagggaaacctcaatcatgctttaaagaagcttctgaaaactaccacctcatcattttctggctttggagtgatttcttctccaccaaaatgaattagcttcttcttagcttccccgaagtagcctagcttcgtcatcatgg

SEQ ID NO: 88050 - DNA, 738 bp, Zea Mays
tcatggccccacgatatgactctactaggaaacctgaaagtctttttttcgttgttgattttttaatttattggttgtcatttatttgagatgagtttttaaagcacaatggatttctgaagattattaatactaaataatgaagatgaaaaaaatgaatggacaagtgtaaaaacaatgctaaaaccaaacctagtagaggtatgtgttgcaaacttgtagttagtaaattttgctataaaataattagacgatcattagttcagcttttatctttgatacttgtaatgattcccctttttacacctctactttgaaactaggaagggtacatttcatcttattatcttttaaggtacaacatggataaaaggtggatgaataaacctaggtatatttctaacaatgttctataaaccattattttgtagtaatcacctttgaccaacatatcgtttttgtacctaatatttataggcacacgaaggtctacatagatggggtagctggatttattgagtttgcgtttagcaattttataggtggaaatagaattctatgttcttgtagaaaatgtgttaattctctatggaaagatgaaaatgaagttcgtgcacacttgatatgtgatggctttcaagagggatacaaaaggtggacttatcatggagaaacagactctatgcctattaatagtcatgactatagtgatatagaggctgcaaacaattcagatga

SEQ ID NO: 88051 - DNA, 814 bp, Zea Mays
aattaacaaacacatccaccaaaataatcggacccgatacatatacgtgtatcgatgcgccccttacacactagtttgcattttaacttagacatcacttgagcactactaattatcatccgcgaccataaccatacgcatttagactacaacaagcaattcatcgtgaccacgagcttaaccaaaaccatctaacaagtcggctaaccagagcaacaatataggccgctatacaccaaacacatcggcttgcctattattatcgcaatccgagacacaatatatatattacaatcacttacgcaatcgactcctacttaagatgagttggctaatcacagtataagacttagcaaaccattttagaccttgcaactcaaaaatggttgggagcagattaattagtttttcttaaccatttctcaacttaatttagttaatacaccagtcacctaaaatagcacattgttggggtctaacatagaggcattaacacatggcttaaaattccataagactacaattgctactgaaggacctaaaacacttatgtgtatatcttaccggattgttcttcaattttaacaagtaccggcttatgaatgctgctcgcctccaataattattgggctgcgatcacgctcatataagacctctaatcgctcaacaagatatttatttatccaatgggaatggaatgcaatatttgacaaagcaaggcatcgatccgccatacaacagaaatcatcccgacaccgatggattttttactagactcatcatttaggctctactgataatttattgcgaacga

SEQ ID NO: 88052 - DNA, 407 bp, Zea Mays
acagttgctactttttatgtactaatgtgatctctaatttcgtgattatcatatctcaaacacatcactaggcaaagactctccctttcacttcagctagtaggtgcttgtacattactacagtttccatttatgcttaagtatagagtataaaatcaaagacatttgtgttatgttggccatgtgggtatgaatgtgatttggaaccaacaactatggttcgtattcacatttgtgcattattttagcttttttaccatttaaatataggggagcagggacacatcaaacacatcagtgctgattctttgtgtatcaggacactattactatccaatgtcaggtatctggtgcctcaccgggcacgtacgatgcaccaacaacactacctaaatgtctatttcaac

SEQ ID NO: 88053 - DNA, 434 bp, Zea Mays
agttattcaatggatcggcgaagaggtcgaagcttttgaagaagtactcagtgacagtggagatttttgtgccttcgccggtgcccgaggggttgcagcagttttggaaaagactggctgtgaacatgttaaggctgcagcccaggcagaaaccaccctctccatagacgatacgaaggaaccttcaaccgaagccactttaatgggcgggaagttctattccaatatctggatgaagggtggccatgagatggtcgatgaagctataaagaagagcgaaaaagaatctcatgatgcacaagtggaggcaaaggaagctgaagaagctactgaactcgcattgattataggtatcctttaaaaactttttgtctcgttgtttgtttatggcttcaaaaattcatcattatgctttttactacagtcggcctttc

SEQ ID NO: 88054 - DNA, 670 bp, Zea Mays
gagctttgtcatagctggcaaatgaatttcttggatctagatacgaaatgcatctcaataattgagtagatctttcagtgaaacgattgtttaattccaaaataacttgatcatagacaacaataaatatctcatttttgaaatgatgatagtaagtcactaattgacctccacgcccccttgagcgaccttagacagtaattgtatcatccatctttggtacaataatgttatgttggttacaaaaggtctttacctcctcaaacaatgttattgcttgaggtagaggattcatcatgtccacgaaaagcaagtgcttgcaataaaaggaatcttacaactcccaatatgacaagcaaacgacctttatattcctctttcatctttttaccccctcgattcatcacatgagacacactttgcctctgatttttatagtcctcataggaccttctagacttattgtgatctatgccattaccatgagctccaatggtttcacgtccatctttccatcgacgaaacccaacaaccgtgaaggcatcaacaccataattttcagctcttggttgtttaaaaaggtagcaataaaaacaaaaggtcgcatccttggcaatgttatactccaaccatggattatttacataccattcatcatgaaaaggcctat

SEQ ID NO: 88055 - DNA, 358 bp, Zea Mays
tgggaaagttttcaggtctggtttctattggccaacagcgaagagtgatgccgccgagttagtccagaggtgtgaagcttgctaattcttgtcaaagcaacaacatttaccggcacagcagatgtagaccatccctataacatggccatttgcatgatgggggctggacatgattggacccttcaagaaagctcagggaggctatactcatgtgttggttgccattgacaagttcaccaaatggatagagtacaagcatatcgcttctttaacctcagccaaggcagtggagttcatacaaaacataatattcagatttgggataccaaatagcatcataaccgacctgggatccaac

SEQ ID NO: 88056 - DNA, 854 bp, Zea Mays
ctggattcaaatggcccaaataaagacactcagtcgaaccatggcgttggaagtcagctggtgtataaacacttcgtaacgttgtagcacctttgcaatcatcttgtacaatgggagccgaaggccagccttgaagaaactcttgtacacaacaacttcgtctttctttggctttggcattgtttcatccctatgaagacgtgcgttcacactattactaaagtatccaagtctcctcatggattgcaaatatttatcttttagtgtagactgcccgatctcaatataacttggcttcaaaggcctgtccttcggcattttcgtagctactctcaatgatgaggccttcagtgcaggaggcaaagtgtcctatcgcacctctgagaaggttgggctaatcaactccatggtgccaccaatgtaggccatttgagtagagtcaatgatctttcactaagactgattgagccaaagttaactctcgaagtgctcctaaacaaatagtttcggaggcacggagaattttggtagcaggtaggtgaaggcagtaaatgtgatctgccctcacctcctcggccacttttatactaaaaacacgcgtgaagcagagcgggtcattgaaattgttcccccgtagcatcccaagtccccccaatgatttaacttctgagtcacccttttttacttcaaatgtatcaccttattcttaaacaagcttcgagaaggtgttttttggatcttcgacatagggtctccaagttataacttttgcgatctaagctcgtttgcgaagaaaacaaactcatactgcaagaggctactgttgtgggccttctatgccaatgatcacttgc

SEQ ID NO: 88057 - DNA, 529 bp, Zea Mays
aggcaaattaatgagatgttcttttactttcttgttagcttaccctcaatcattttctgtagttagcgcagtgataggcaacacatacaaatgattgtatccccgtacctacctcctgccagcacaaatctcaaagtaaaatgagtcatgcttttataaatcgattcaaggcatgaagtaacgacttttttcgctctacaaaagggggccaaaggcgacatgcttttataaatcaattcaaggcatgaagtaacgaacaaaatggattgtcttgtgggaggaagaaactacacgtacgtttgacagttcaaactcaacaacctttctgctataaccaccaatctgctttgctagcaaacaacttccatttaatcgatttaactttgttgttactgtcatgcctgcgtaagtacatcacttataaagtgaaaatagttgatttcacatcgcaattactcaagaacaaacgtcgttttagcccattttcgtaccacacacacagaccccagaaggcgatttagcaacaaac

SEQ ID NO: 88058 - DNA, 638 bp, Zea Mays
cttttgtcttgattatgtatggcccttcccactttggctctagcttgccccgggactctgttccgatggttcttgtgagtactaagtccccttcgttgaattctcttaggacgacattgttgtcacgccatgccttagtttgagcttgatacttgttcagggcctacaaggcgaggacacggtccccgtcgataagatctttggaagttgatttgtcgacgttagggatgactaattggtttgttcgtggggctccatgctttaactcttgcagtgtcattgcctcagatccatacatcaggcagaagggtgtgaacccggttgctcggcattctgttgtgttcaatgcccatatgactttgggtagttggtctgtccatttgccctttttgtcgtcgaggagccttttcttgatagcgcagaagatcttgcccttggcgcgttcgacgacaccgttggactattggtggtagacagaggcgaacactgccttggtgccgatggagctgcagaattctcggaagtcctggtcgtcaaactgcttgccgttgttgactgttagctcggatgggactccaaaccggcagacgatgttctgccagaagaatttctgcgcggtcttcactattattgtggag

SEQ ID NO: 88059 - DNA, 392 bp, Zea Mays
cggggggagctcctgccaccggaagggtaaagcacccagggagcgttggagcagtgaagtgccgtttgaggcttctcagcgacgtttctggggatcctgtcgccgtggactcgagtcttctggaagcttcacgacgaatggagacgacgggccgacggggaggatgtgtacataaacgatcgtgtccgctggcaatcgattggacgactacaaatgtaaagagcgacgttccagctgaatggaggactatggaggaccgtcatgatatgatcggagggccagaagaaaataaaataacgtggcgcttcgaggagctagatatgctccggtgcttaatatatagaaattctgccgccctgtggattttttttggcgccgttcttatccctggc

SEQ ID NO: 88060 - DNA, 954 bp, Zea Mays
atgaatgccatgtaatgctcatgagaatgcaaagataataagaatttattacctaaggtcttgaatacaattttccttcatggaccggccgaatggggcaacgactggggtctccgagcggttaacaccgaattggacccttcccaatccattcccctaacctaatttcgcaaatgggtgcctggttgactctggccacggtgaccgagagtgttgcggcgagacaaccatgttcccggcgaccagagggtttctagctcaattgcgtgggtcggcgagcatcgtagacctatgagagtacttaaacggggaagaagatggtatgagcggacctgaatggtgctggccatggcgagattgatttcacggtgttcttgaatcgaattggggagaatccgaaattagtgctcactggtgggggatttgggatacaggtgggtgcagtagctgctggaatacatggcgaagccgaaggggggctcaatttatagaccaagtgagcggtggctgggaatttgggttgaactcggtggcggtcagagaagaagcgagtcaccggcagggtgattcgtggcagttcatgggataagaagccacgacagtcactgggtaatgatcatagttcacggcgatgtggtcactaaccagaagcgtggcacaatcgtggcggaggacgcaaactccggcgacggccgcacggccacgttgccgatgcaagtggtcgggacacagcgaggccacagcagcccgaacttatccacgacgcaatctttccatggctaggcgtaatccactcacccgcagcacgaatcacggcgatcggcgcgaacccgagcatacggctcgccggcggcgaagttatccactccggtgatatttccagcattgtaccatgggatatgttcatcagtgtacctgacagccaagttctagggcagtttttctcgaaaattt

SEQ ID NO: 88061 - DNA, 579 bp, Zea Mays
ggacgagatcactgttcgccctaattatttccgcacttgtttaacccacgggctgttttatgtgttgcttttgaattgctcgatcccttttgctgctcctcgtcttcttcatgggaatgtatgtttcctttgctcggccttgctctctgctgtgctctgctgtaacggacgcagcctctggttgtagcacaccacaccccttctgttattttggagaaactggaagcgtttcgggtttggaatttggcacctagcttgaatgccaccgaaaccattttggagctgagtagggctcattaagtgatctctggcaaatgattgagcaagcagtgcagaacttgtacttagcaaagtaggttttatgcttcaaggttacgactacagctacagcctgatgtttttatgcataatttgttcttctgttctaagcacgtgattgttcccagatatgctggaccattcatgactttttatccacttgtacatacttttttttctgtggcctcacagtggcatgcttttcatttgctagtttttagcaagtattggagatacagatacatgctgctttttttcgtg

SEQ ID NO: 88062 - DNA, 737 bp, Zea Mays
ctggtatgcttcttggcaagaatactatcggagacaagctatgcatgatgaggtggcattgtgaggtgacggtgaccataggctggccaatttaggcctctaaagttcacttggttggacttctggatgttttagagtctggcaaagcttatgtgctcgaacacacatgagcgatgctaccatgagagcagaacgctacacaaactctagaaatggcaggggtgtggtgtatgtgttttggcacaactgaggtcttaggtttcaagttcaggtgatcaagggatgcattgatggaaagggtaagatcaggacgatgcaaacttggaatgttagttactggcactagaaattagaagaggaaggtaggaattaggtgtgttgaggaggatatcatcgaaccaagagtttatttgataatttagattgtttcttacatagttcatcccattctccaagacaactttctattatttatactctcctacccagccgatcccactaggtagaggcaaccctcagacccactttgacccctagacacggacattggcactatcgcactaaggatagactgcacttttctaattttccttttggctttgcaattgttggacttgagaccttcttgatgggatttcatggacgctacgactgatcctttctcaagcttttttatcatgtcttcacagtgatcttgaggagattgagcattgcactttcccttccattgaatcaag

SEQ ID NO: 88063 - DNA, 514 bp, Zea Mays
ccgggcactgccctgtggggcccgcacgtcggtagctccatctcgcaactacgcgcgcgcgtgatttggtgttgtgactgacgttcagggcccacaatccatcctccctcccccttgctctcggtgtagccgtggctctgacagtgggtcccgactgacagggtcatccccttccccgcgtcgttcggctctggttgaccgcaacaaactcgacgcatctcacgcgagcttatctgagcaaactccgaaccgtccgtggccctctcggcggcgctataatacacagggccacgatctcccatctagccttctttttcttcctggtgcaatccgcgaaatggttgaccgctcatgctcccatcccccaccagcgccgtgctccaccagctgcacctcctcctagccatggcgtagggcctgttcctcttcggcttcacctccgcgttggctcgccttcggccgtcgtgaggacaccaacaagctccagatccgaacgctcgtgctccaactccgg

SEQ ID NO: 88064 - DNA, 657 bp, Zea Mays
gccgttcaaaggcacaacgatggtgtgaagaggatctcccttcggctgcttcccggagtgatttacgtcgctcttataaggaggcgctggtggatggaaggtccactgcctgcggcgctgcactggtggatggaaggtccactgcctatggcgctgacattggtgacggtggctgggtgaaggtggtgggacgtcggtctcaccatcggagtccctgtccccctcttcccttcagacccgttcccgttgatttacgtgggaagtgcttcaactgtttctcaccatcccaccgtgcggccgagtgtggcagtttggtgcggtgctttcattgtcgcctgcctaggcatcaggtgcgcgcgtgtccacatcggaagaagactctacaccacctagcgagggtgttagtgtggcatccagttcctaggaaggtcatctcagagaaagttcatctctacaatatggaaggtgtttcgcgggtcagcggtgatggtgatggagtgaagacgatgaagcgcactcgccgtggacagaggcgccgaaggatggatcgggtggttttgggcgcacttggtcgggtctcatctttggcatcatcatccttgccttcggtggtgcacccccctcgttcgcctgttcttaggcgttcaaggttgctcg

SEQ ID NO: 88065 - DNA, 418 bp, Zea Mays
aaggcagaaaagctttgctgatacctagagaagattattagagtttaaggtgggtgatcacgtatatttgtaggtgtcaccaattgggggtatgcgaagattcaaagttaaagggaagttgtctcctcgtttcattggacccttcttaatcctaaagcgagtgggagaggttgcatatcaactggaactacctgatcaccttgtggatgtacatgatgtcttccatgtatcacaattgaagaagtgtcccagggtacctgaagagcagctacctatggaggatcttactgtccaagatgatttgacttatactaaccttaactcgtgtcacaaggagtaaagtgataaaaatgtgcaaagtacaatggagccatcatggagaagatgaagctacttgggagagagaagaagaactgcg

SEQ ID NO: 88066 - DNA, 510 bp, Zea Mays
gctgctactggtacctcgcgtccctctcctagtcgcggatctcccaccccatgaggttgtggtcctggtcgaggtcgtggtcgcgggatgggagcacgattagctcatggcatcgcagctttcttttctatgtgcaggaacatctcttatgatgttcatgagctggctaggcgacagtgggagactgacgacaacctccatcgtcaggctacttccttgggtatgccttttgctccccgctcgcctgatgtgcccctccatcctcctccgccagagattaatgaatggcaccagcaagcctatggggttccattaatgtcagcagaagatgaagaaggtgcggaggaagaattttttgatgacagagagcagtttgtcctgcctccccaccaaggggatccgggtccatcttcttcatatcctcctccccaggatccatttggcagctatcctcccccaactcagcctaaggaagaaaactttgaagcaaatttggtgtcgcagttcttt

SEQ ID NO: 88067 - DNA, 1010 bp, Zea Mays
gcacaatattcaacaacctctcaaaggaggaggacaggaaggagggtaggaaggatactccatgaagaaagtacacatcatttcttccttgaatgatgattctcgagggggctcatcaccagagggaaaacttgatgaggatgaaggatcctaataaagaggggaggaggatggtgatggtaaccagatccagaaggcctcgagtcaccaggaatgggtcctggacccgaatagggaggaggaggaaagtgactggagtcgggcggcctggggtcaccgggaatgggtccctaacccgggtaggaaggaggaggagctgaagtatagaaggagttatcaaactcctcgatctcatcctcaggggtaacaaatgacacaccatactcctgttagtgccactcgttgaggttttcgtggtaggtgggggtcggaggcggaggagagcctggaggcatgggatgacccgtggaggcgatgtaacgatgaaagtcctcatgcagcgccacagtctggcacctatgcatagactcctcgatcgctcggctgtggcacatggcgatgacgccagcgatgcccttagctagacgcacaaatagtccccggccttgaccccgtcctcggccctgacctctacctctcctgctatggtccatcggacacaaagcggcgacgacgcgagaggaggatcatgaagaggaggcggctcattagaagaaggagggcctccagaccctgcgggagcccgcttagtacgtgcggctgggttgttggagtctacccagtacgacacgtagcgggagtgtttgaccggcttctctaagtgagtctgggtgaccacttcgatcatcttcatgataaagggtgcatgtagacaccctttgagtggagaccaggaagcacgaaggatctcttcccagatcatgtcaaacgcgttgatgcgggcaaggctgttgggagcaaggagaagaaggagaatctgactctccccaaggacgttcatttgattcccg

SEQ ID NO: 88068 - DNA, 274 bp, Zea Mays
gaggaggctcaccttggtgacgagaagacgatggcgcggacggtgagccgtccatggcgagcgcagcagagtgattcggatttgaagggtcgtgggaagatgggcgatggggaaccagagaaaatgggaggaagcagttaaggagaagatgaacaggacgacgtgggagaatttgcatgcgagcggacccacatacggcagttttccaattgaaaaacaaacgcacggcgtggagatcgtacggggcacatgcatgcgatttcttcattcttca

SEQ ID NO: 88069 - DNA, 364 bp, Zea Mays
gcggattcgagggcagctcctgtgcaaggcgagaccgacatggtggtgaggaaggtggtagatctctacgtggggcgagaggttggtttccattgatgggctgttagcgcaactaaccttgattcactgatccaatcgaggatggaagggtcacgacaagtgggtaaagatggaagggcaagctgctcaacgactaagatggaagggggcgttgatcgtacctggatggatgaggctggtcggtgctgggcgacatccgcgggagagaggcaggggaacgtctggcgtggcggtgggtacgacgagcgcggccattgttggggtctcgttctctgccgaaggtcctcagaacgaagaaatcgcc

SEQ ID NO: 88070 - DNA, 696 bp, Zea Mays
ctctcaacgtggacgagtgtgtttagcaccctgaaccgtttccgattgaatggagccaaacagcacaccagtgtgtcctttctgctttgtttggttccaaacgattggcgatgttttgcctaggaacgtcaaaccgtgaacgcgtcagctattcaaaaatatttttctaaagaatcctgcatctgaaatatttctatggaaatctggaataccaaattggtccaaaattagccctagtagcatctggccgtcattctttatatacctacacccattgactgccctgtacgtaatcatgaactacatgtgcttgtgggtgcgcgtgcgcattcatgccatccatccaagcaggaagagtactgatttatttcttcaacaccaagccccaaatcgatttctttctcatacagtactgtatattaacaactccgtggagtaaatacatagctaggacggggcattatgagggaataaatattaggcttgttttgttggcacttgtactcttcatgttgttcaccagtgccaactacaacaataaataaaggtgcctctccatctccacggttgttgggagcgtgcatttttacatccttccctactgatttcgctcctcccttcacttgatttggtgacatgcatgacacgaaatttacgagggaagagaagagtcgagtatttgagtttgagttttat

SEQ ID NO: 88071 - DNA, 743 bp, Zea Mays
ggagatcacacgagcatgtggagggccagctggcctaagggtgtcctggcgaccacaaggttagacaactggcctgaccattagataggcggccatgtagaggtcatccctcaaggcagaatctacagggtttcgtcgcatccccgatcataggtggtgacaagttcattgaacccaatgtgattgagatgatggccttagagggagaagtagtttgggagaccatgatcttggatttttgataacttaggaggaatgatgaaggagaaggataccacttaaaaataacaagagtcactttcatctactcacctctaccaaagatacagttctcatctttcaggaattcaaaattgaatcaaacaaaagaatggtgggaactctttggtcgagtagacaaatgttgatcgggtggccacatgggggttgagtggcctggctcattggcgatccgaccatagtagacctaactaggcaggctaagtgctacatgcacacctataacttgtttagaaccattttttgtaacatgacaaattgctattggtgagattgtgtgggtggaagcaaaagttgtgattagaaagcatggtagtctacatggctcattttaggttggggatagaccttagacatgtgatcatacaacttcatgtagctcgaggacatccaactctttaagctatggcatttagggcttgaagaaaaaaaaattaagacgttcatcatttgccttaaaattt

SEQ ID NO: 88072 - DNA, 1135 bp, Zea Mays
aaggtagccgaggtcaacgtagttgtggttgggttgtcgtgttagtggagctgtaggcgcaagaggcaccatggtgatggtggaagcgcgtcgaggcagtcatcatggaagggagcaatcctaaggtcgacgtggtcaaggtcatcttagatgaaaaacaatgatgcaatcgaggtagacggggcaggaacatgaggctcgatactgaagtcgatgcagtcaagctgcctagagcaaggtgtgggctgggtttgctagacccaacaacgcatcggagacaaaagcatgtgttgatgttgccaataccaaacatacaagatagagggccacaaccatgtatcaacgtctgagggatcagaagaggtctcggcgacaattgtggtgcatagaatgacgaggtacaaggtgtggacgcaacatgtggttgtcggagtagacgaagtgaggatgagatatgtagttgtcctggacaaagaagcagtgctgcaacaaatgcgtcgaacccgaaagcgagcagtctggcgaaagtggatgctcaggaatgagcagtctagacgcaagacgtggtggcggtgatggataagcaacggtggcattacactcataggtagtgctccaagttgacagcaaagacctgatcagcaggacaaagaccttatgcggacagatggcacaggaaagtcgttaatgcatatgaacgacaatgtagatgactagatgcaacaacgaagcggacacacgagcggtggtgttgtggcccaacgaggcgacaccataggaagccaacagtcatattgctcgaagacgatacatggactctgatggacgtcacgagagctgggcagatcgcacataatcggttgtaccaatcgagtatgcgcgaggtggagcaacaatggaagaagtcggtgggggcatcctaatctatggtggaaatgatgaaatgaaaatgtagaccaaactaaatgaccaagacatgggcaggatggcatcccttggcatcgcatgcttcggccaagccacacagtcgaagatgtagatgtcagcatggtcaatgtcggggctagagcaggtacgcgcgaggccgacgggcctcacgatcctgaccagtgatcgggcaaaccaacaacaatac

SEQ ID NO: 88073 - DNA, 468 bp, Zea Mays
ctctctctctctctctctctctctctcaaccgcgcaaggcaccgtcgcccgtctgccaccgaggaagcgttggtccgagaagctgccaccgaggagccctctgtcatcgtcgtctcctgtggcacaacacatatgccgccttgtcattgaggtatacctccttgacctatcgaatgtaaatgcgagtgtgattagagtagttaaatatgtgtgaagatgtttattttcgtcggttttttatggccgacgggagttaactttatgtggttagagttagtttaaaattgttaattgatactgttcttagttttaatattactttatgcattatacttgctagttttaatatcacatgtgtggcttgatgttaggtaagtattaattctattatagtagatttaacttatgttattgaattgttgaatttgatgttatttattgattaggtttaacttataatcttgtatt

SEQ ID NO: 88074 - DNA, 377 bp, Zea Mays
tccacgtcatgtgtggccaacttctccaatattttttcatcacgtactccctgtcggaaggccgtgatgatggaagcatcagaaatacgaggtatagtacctcgcaccttggtgaaacgggagatgaacttccggagagtctccccgggctcctgcctcaccacatggaggtgggcctccacaccgtgctgctggtaagcactggcaaagttcgcaacgaaccgcacgcagagctcttcccaggagtagactgaccctggggtgaggttcatgagccaggtccgggcaggtctagacaaggccacatgaaagtatgttgccatcacagcggtgtttcctcctgctgccgtgatggcggtaacgtacacctgcaagaa

SEQ ID NO: 88075 - DNA, 623 bp, Zea Mays
agcaagcgtccacgctagcagggtggcgacactaggttgtgacttgttcaccctaatggtcaccacaacgcctcaaagtgccacgagatcctgaggcttgcgaagcgtgtcagcgagcggcgtgagtagacctccaaggagggctcaccactacatcattgaactggcaaggagaaggctgatgactgcgatgcttccgtgcgcggaagagagcttgggtatcaatccctcaagcaagtcttgaaggacatccttgacggagactccaactacgacaacgacgaccgcgcgcaagaagtggtacatcatgtatggcgggagttgggagctgacctcccggagggacgtgaagtctcttcgcggggaggtgctctcggcaaccctcgaggcaccaaacacggcaccccatcagaaatggcgaagcaccaccatctccttcggggcatctgattgccctaacaatatggcagggtcagacgtattgccggtcatcgtcgctcctgtcattgttaacgtgaagctctatcacatgttaattgatggaggggttggcctcaaagtcatcagttatggtgtgttcaagcagctttagatctcagagtcaaagttgggaccctctcgcc

SEQ ID NO: 88076 - DNA, 653 bp, Zea Mays
gcggtgctctggactgatttgggggaagtgagcaattcgggggctctggtgaacaattgaaggcacgagttgatggattgggtgcttgactaccttgaggaaccaacggcatgctcaatttataagatcctcaagcggtggcccgtgatgttgagatggcgtggtggcggtcggagagagagaggagcactgtcgcaagagattggtggctttcaccgtggcgagctcaccggcgatcacaggacgtgtgtaatacaagctactgcgatgtggtaagacatcaaggcacgtggcgcacgatcgttcagcggctaacgccggcgaggatgatcccgaccagtcgtggttcaagtgggtacggcggcacaacggtgagcgagctcgagctaatccgagcgtcaagatttttactcttctccgttatccacttgcgttgtgcatgaatcacagcggctggcacgaatccgggcgcacagctcaccggcgatgaggttctctgaacctgggatatttccagtacactgtaccattggattctcattcaatcagcttgacagaccactttgcagagcctagttctcaaattttcatgtgaatacttactaatctgcctttaacaaagttgtagctcaaccaaccagctacaaatcgac

SEQ ID NO: 88077 - DNA, 503 bp, Zea Mays
gagatatggaaaatcggtaccctgggactgggagttcagatcaagagcttcaatgcggatgcgaggtgctgggacgttgatgcgtggtggcagagcaaacgacgactgcgagaaggtgccgaagtcgtcatcctcgggagcttcatgaccagtgcgattcctggacgtcgatgaagagcaaccttgggataagaagtccctcaagttgcggtggttctccatcttgcggcgaccggcgacggagaagaaggggcgagcgctgatgaggagagagcggctggtgatcgagctgccggtggtcggagggggagcgagcggccgatgttcaaatttggagcgagcgacaacctaggtggaatggggagcgagaggctgccgcggtgaagaggggagcaagcagctggcacggtgaagaatcgacagcgagggcgacaggctatggcggctagggtagggaagaacactaatgttgtgacagctctaaggcagggagaggaaatttt

SEQ ID NO: 88078 - DNA, 336 bp, Zea Mays
tcttcatatcaaaacaataaaaagtcaagagttttaccttaaagttagcataaaataggctaccggtgatatgctaccgtcggtacctgctgaggtctgcctcaaccttcgggaggccaacactctttgataaagtaccgacaaccttcgccccagtgtggtcccgaaggcatcctaagctttcttcgttgactcccccgaagagtaacgcacctggtatgtacccacaagatatagcatactctttcagttcttctttttcagcctttgacaattcttgcccaagtatatcttggaaattgaagtcttcttcttccgaagtatcctcggctttct

SEQ ID NO: 88079 - DNA, 920 bp, Zea Mays
gagggcagtgctaggcggtacacccctagtgattggcgctgccagattagtgccaacactcttatctcgctctgcaaccctttttccgcgccccgacgaactgttcatagctccagcaggccctctatcccaaagtgcaaaatagaagccacccttggtgctccgtatgcctatgagttctttctcatctccgcacctcaaccttcactttcatccgctcccaccaaatccgctaccaccctgaggatcgaccttcttcctccccccacctattgtcgaatccgcaggagttggtctcatcacgacgctccacctctaagcccacctgctgctcaaggaggactgaagggagtacgtctaagtctgctcctgcatcaacggtgttgcatcctccgtcgagcatcgccattgcgtactctgctccatgctcacgcaccacgctaacaccgcgggtagcttagggaagctcagtcggctcgttgactgcgacactgcacttgcttccagagttctaggaggctcccgatgtttcgcaaggcgtggcctacgaggacattgttggtgtttacttccgactgcgcactacttcagtatatggaaatatcgaatgagttccatatatcctctcacgaaacccaatagctgggccaactcttctccaaaagatagtttataaacctctcattcgaaagtagtttatactaaacattttctaaatgttggggtttatatttgattaggtaacacttgcaaaacacaatattcaattccctggtgtcatacgaaactcgattaacatagttttgtcttgttaagtgtatcaaaaatgacttttacttgtatggtgataacacacttctccaatttggaaatcgttatttgattccaacgctaatattattagctcaattccaacttag

SEQ ID NO: 88080 - DNA, 378 bp, Zea Mays
tggatgaggacatcaaggaggaggaggatctcgaggagttggagccagcatataatttggacactgaaagcttgttttcctctagtggaccacctttgcctaagcctagtgccacctcagtggctcgttgatttgtcatgctagtagtagatgtgttagaaagttgtactccttgcggtagcctagcatttggacctcatgatgtaataggctagtgagttgagtccttctgatacagatgtaacccatgatgaacttcttttgtggaatggataagcatgattttaagttttgagaaatgattcaagcatcaccttgtcctaaaattatgaatgtgtagtgcaaattggaatttaagattcgctctgcttactcttt

SEQ ID NO: 88081 - DNA, 724 bp, Zea Mays
tggaaagcttggtcatgacgtcaggtcctgggtggccgagacgacgatgccaagtggtgggggtggtggtggagaccaggatgagaggtgaatacacatctgtggacgacgaacggagcgtgtagaggggcccaacgctgtcacatcgggtgagtggggtcttggtggctagatccttcacagaaaaaccggtagggtcaaactcaatggaacaagaattgtcggtggtgaaccgacggacagaaagaagattgtgagtgatgtgaggggctacgaaaacgtcgttgaggtagaacggtccaaggagtaccaaggcacctactgaggtgactggaagagtggaaccgttgccaacaacgatcgaggtagggtgtgtggggggaggtgggtgtgagcgagagggcatgcctgtggtgggagtggtgtgataggatgcactggagtcgatgacccactcagagggcggtggggccaacaccttggtgttgtatgcggcgacgagggcggcagggtcctagtctgtaacgaacgaggatcatggtgtcatggtagactgtcctatgaggcatgtcgtaggcaggtggcgtagtcaggagagccgacgccggaggacgggcggcgctgggggcctaaccatgcctaggggttgtagaatgacggccaactctgttgccaccccggccggtggaacctccataagaggagtcgccacccccacgtccgc

SEQ ID NO: 88082 - DNA, 326 bp, Zea Mays
ctgaattcacccctgtcgacactcgacacagacttgtggtttcaagtcttttgtcagtttatttacaactgaactgctgaaggtgtcagacaatgatgcaggattatgaatcccttgtccttgtgcataccattaccatgcatgcgtatatgtctgtctgcatatggttttcgtcttgacgaattatgccacggatcgattgctgaattacagttggtcctagactccttggtacggttacatcttcagaaagagaatagcatcattgacggaggagttgctaggtagtaggtactgtactagtaaattctgttggaccatgaatt

SEQ ID NO: 88083 - DNA, 426 bp, Zea Mays
ctggtcttcaattcgcttcgtgcttcaatgcttctgttgattagacttgtacttcagtagctacttttggctttccttcaatctctatcgatatctttcttctgtcttgatacattcattgcgtatactgtatggctgtgactgcttgggaaaatctattgaaaattcctggacgtcccctccccaatgggtgtagccaagggatggcttggtgcactgagcgtttagcaaactacccttgagtagtaacttgacgtgaccgcggggtgtaatcatatcgtccaagcagttgacctcagtcccaatggtgtcgtgttacgcgaaacagcgtctgtcgcctgacttgtttccagacgatttgaatggcttattgaatacttgcgactgttcagtcgccgtggtaggagatgagcggttgcctcccgc

SEQ ID NO: 88084 - DNA, 356 bp, Zea Mays
acatagaggagggtgaggaatctgctatggctagatttttgggcaggttaaataagagaaatttaggacatccttgcttataaagattatgctaacgtaacccgattgtttcatcttgcttgcaaagctgaaagggaagtgcacggacgacgtgctagtgcaaggtctaatgcttctgcaggaaaatctacaccatggcagcagcgcaccactacgtccatgactggccgtacaccagcaccaactccctcgtttagtcgaccagcaacaccgccttcctccagcgacaaaccatgtgcatctttcacaaattcagcaaccaaatctgccaagaaactagcaggtagtgcctcttt

SEQ ID NO: 88085 - DNA, 398 bp, Zea Mays
aagtatttagcctcccgtaacctttaaagtttatgtactttgttgtaaagttagaacaaacccccacacccacctcctgcttggtaagggaaaataggaaataaagttgtgacgtgtttccttttccattacttaccctagagccttaaatcgcgggacgagattcttttatggggggaaggatgtaacgcccctgctgttatgagaactaaaactttggcatgacatcatatgcattgacatttcattatgtatgatacacctaggatgcatccactaggctaaaatttcaaaacaatatgtgtgatgatctgacttggtcaaagaggcccttgacctaggatagagtatttttccaaggattagaaacatgtggacttgtgagatgagcattagag

SEQ ID NO: 88086 - DNA, 1080 bp, Zea Mays
ttatacaattccccttctatgattttatatggccttgctcttgcttgcattctcttgatgtatgcttcatcatcaactagatggattcctgaaggaaggttataatttctattctcctatcttcgctgtgtgtaggggagacagttagaatagctctttcaatcaagtcaaccgagggtgcctttaacacttcgaagagcacttcggggacaggaggagcccctgagcggcagacttagccagcatatcagcttgttcgttgtctagtctcagaatattttttttactaaaaaccactcaaaggaagattccatccttcggaccatatcaaattacatctccaagcctgggctctttactttgcttcatttgtccacttgacctatgatgacttaggagtctgatttcaaaactgctcttcttacacccattgcctttaactttcttaatcctagaagcagagcttcgtactttgctatattgtttgtgcgctggaactgcaacttggcagcatacgaagttcttactttagatggtgaaacaatgacagctgcagcaccagccccgaaggacccccatgaccatcatagaagactgtctagagagcttcatctgattgggttgcttcgtcttgtgagcctggagtccaatcaacaataaaatctactaatgcttgagattgaatggaagatctgtgaacaaagtttatgataaacacattgagttctgctacccactttccaatttgacctgaaacttctctgtttcttatgatatccttaagtggttgagatgatggcacaataatgttgtgggattggaagtagtgtcgaagctttcttgaagccattaggactgcatagaggaccttctccatctgtgtataattccttttagatgggattaatacttcggatacaaagtagacagacatttgccttttcacaccttcattcactacttcttgaaccaagacatcacttacagttgattgcgaagctgatacataaagtaacagaggagccctggtgaaggtggagaaagtgttgctagctttatcaggtagtgtttcaattcttc

SEQ ID NO: 88087 - DNA, 647 bp, Zea Mays
aatttactaagctaacagtaaaaagaaaaaagagaaatgatgaatgatgaatagtattgggccgaatctggcccaagtcagcccgcgatagaagaaacgcacgtgcgcccatgcccgcgttacatatttgcacgaagacccctaggtatctgaataaccagtaaagtacctcaggtactattcatgtgtctcactgacatttgcgcaaacacccctggacttttgtttcttcacggctctaggtcctcgacggagccgcatcgaacacatggccggactcgtggtttcctggcgacggcgaccccttcgatgaaaaccgagcctaccaatgtgattcccgagacttacctcctatttcccctaagttaattgacctcaaaccacctagagcctcactagccacgacgacggcagattgatgagctctggtgaggtgtacagaggtctcgagcacgatagtgtttaatccaaggtcatgacgagtaccagtaattcatcaaacatatgatgctcacctaggtttgcccggagaagctacggtttggccgctcaacgtggacactgccctcagcggcgttcaccgaacgacacaatgttgttccaattaaccctacatggtagaattcaaacgggcaagcgcataagct

SEQ ID NO: 88088 - DNA, 753 bp, Zea Mays
cgaggggataatttgcctttaactttgaatctcttcattccacgaagtggtgacaccttgaggtacacatgatcaccttcctaaaactccagtggtcttcttctattatcagcatagctctttttcctggtctaagctaccctcaaattctcccagataatatggacttgttcttctgcctcttgaataagtttaggcccaaagaactgtctttctccagtctgatcccaatatagaggagtcatgcgcttcctgccatatgaagcctcaaatggtgacatcttcagactgtcctggtaactgttattatatgagaactcagcatatggtagactcttgtcccaactgcctccatgctgaagggcacaagctctcaacatatcttccaatacttaattcatcctttcagtctatccatcagtctgaggatgataggccgaactgaggttcaacttcatatccatattctcatgaaagcttttccaaaatatagaggtaaactgtgatcctctatctgaaacgatcttctttggaactccatgtaaacatacaatccgacccatgtataactctgccagctgagatcctttatacatagtcttgactagaatgaagtgagctactttagtcaatctatccacaatcacccatatagaatcatatcctttcggggtgcgaggcaacccagtaatgaagtccatgccaatttcttttcacttccattcgggtatcttcaacggatgcaatagtcca

SEQ ID NO: 88089 - DNA, 275 bp, Zea Mays
gggagttggtggtttggctttgcagttgtgggcaaagtgaccttcttttccacactcaaagcatttgataggcttgtgagtctgctttggcttgtattgagtagtagctttcttttgcacaaaagcattgtatccaataccactcttgttgtttttcatgacagtgttcatgagcaactcattttggaggtattggcccttgttgaacttttgcacacttgttgcaagatgttcattttcactcttaagtttcttgacctcattttaatcctttc

SEQ ID NO: 88090 - DNA, 624 bp, Zea Mays
ctcaggttttgggccccactcaaacttctcgctttgctcgccacttcaaagaaggggtaatgtagttgggagcatgtagcatatgtgctgagcactcgggctattcttgacttcctgtactataaagaggatgtcacatatgatgcaagctactgtactgccagaagaagagaaatattttgccgcagtacatggggccaatggtttcaacttttaagtccctttctacatcccacctgtctttttctgtctcgagaaatttggccactttgtattgactaatatttcttgtatttgagtttggttttctgcttcctcgctaagagaaaaatggagggtctaggggcatgcacatgataattaggtattgtcctactgcagcattttcttctatgctttcattgtttctgaaatatttagactcacaccagaaaactggatttccactacaggtgttatcttgcaggtgtgaatcattaattggatctcttgtgaggtactttaatagatcatagaagatgcagatagtatgatagttactgttgaagaaagtattatatcagttagcttttggcaacatggatttgaattatcaaagtaccaactcgcagatcagaattttcg

SEQ ID NO: 88091 - DNA, 689 bp, Zea Mays
cctaggaagccacacagaagaactccggcgcgtcgggcgcctcggcttggccaaattccgcggcggcaacctcaccagaccagtggagttccaacccgtcgtcgccgtacctgtccgcgttgcctggtgtggtatgtaagcattcctcgcgttcgtctagtgtggggcatcgtgtagcatggagtagattgaactatagggcatcaagggccggaatcgtgatctccggcgatccccgccgccgtgcgtgggggctgtttgcgcggctcggggtgggagaagggcgaagctggcgcagccgttggatgtggatcggacggtcccgattagtagccgggagtacccttacgcgtggaccgtagatctgcaatcctatggatacggtgcgatctcggttattttggatccaaaccgtagatatacgatccagcggctattgttgaataccggttcagagttataaccttctaatctgggccacccattgtggatcggacggccgagatctaaccataccccttggcgggtactttttgttaaagagcccctggaaaaataacaaatcaacccgccatcctatctgactgtgcactgggtctcgtacctcttgcgcagggacccctgagttttctggaattcgaggcctagtccaggggatattaaaaaccgagaaaatgattatagaattt

SEQ ID NO: 88092 - DNA, 828 bp, Zea Mays
tttctcatcttcgcaagtccaggtccccgaccacggacggcggagcagttgctccggcgagcttgtaccagccggagtacgcaaaggttaagcttcttacttattcaacatcaaattctacctcgggcgaccctaattcctctactaattgcgaagttctagctcaaaatatgtctgtccacggtgatggcgcaaaccgaggacaacccgaggtgttcccagcgatctatcatggtctagtttaattggctgggccgataagcatccatagcccacaagagtgctgaaacgagggtaaggagggtatgaatggacctggaaacgatggtccacgacacggtggcttacggtggcgcggagaaccgaattgggggaagaaagaaattagggcgctactgtggctaatcggaggcaggggcgggtgctctggcctcgtgacaacctaacggagctagcggcaccctcaatttatagcgtccgagggcggtggctccgaattttgaaggcgaaggctggcgaccggagagaggggtgagtcaccggagtcgcataacgtggcatttactagggcagaggcttaagacgatgactgaccaattcacacgacaccttgcgatgaggtaatagggttagtagcgtggcggattccagtaaacggtggtcacaccggcaatggtcgtgcggccacgtcgtggcgcaagtggatgggcaatagagcggccacagtgctccaacttcatctacgacgaggtcttttcaccccgcaaagttatcagcacgctactggccacaaatcgcaggtcgccggcggtgaggggtgattgtcac

SEQ ID NO: 88093 - DNA, 428 bp, Zea Mays
catccttgattcgtgggagaagatctggacgaaatgttctagctctctgcttgaaaggtctgaaaccggacttaatgggcagccgatgctctacgatctctcggcttagtcccggcatctcagtgtaattccaagcaaagcaatctgaatattccttcaatagaccgatcatttcacttctagaatcggtctccagggtgttgtttataaaagtcggccttggagttttactatctcctatgtcgatctcctccaaaggatcggccgatgtaaacccctgtcctagtttatcgagatctctgaattcctctatcatgtccccacagaggaataagatgttctttgtgtggtggtggactctccgatctcaggggtcggatcatccgtaatatcgtctctatgtcgtggtagatgttcggtcttaaagt

SEQ ID NO: 88094 - DNA, 485 bp, Zea Mays
gggtgatcggccacaaggaacgtacccatcataaccggctctcccttcggtgtagtggccacttgagtgtaatatattcgcgcagtcttcttgatattcttgcccgctgaattagtagccatgttccctttgccttgactggagctcccagagttctgctgattgttaggcttattctgcctcggatatggacaatctttgataaaatgaccagactttccatagttgaagcagccatttgaagaactagggagggcggggaaacgagcaccaggggcactcgactgacttgtagaagtgggggcaatggcagggtgaatgaagacaggttgtttgaatgggtaggagggtgggcgagatgaagaacgattctgattaacaggtcggattaccaacctggttcgcttttcaggtccctgattggacctgtcacctccgaatcccttcgattttccttggcctgtattcttagcttctactgccag

SEQ ID NO: 88095 - DNA, 812 bp, Zea Mays
tcctataatatctctaatctatctatctataggggaggtctccccctccttttttataaaccaagagagagggttacatatggtaggtaggactagaccaaacacctatcttgttctccatttatgggagcctcataccgtattcatggaagcccttttatgtcagtctgtcattctagggttgtcggtggtgtcagtactagatatcacaagcgttttctggaggatgtgcaagtttaccgaaagctagaatgtggaggggatagaagcaagctctccatgcctacacaagagacctatgaggttgaatcacacgttatcgatgaccaagagtgcacatctaccatagcatatgtagtgggtgactcaagatgtgatagtccacggtgggcattgaccatatcgccatagtgtgaagctcaggtgcaccttaaagcacacaagttaccacagtgccacactggtgccatgccctggcttacataggcctgaacaccaggggtaagcatgacgctaatacaattgtactatcgcgttaaacaaggcatagtacgtcttacgactctatcaactcctttactaataatgacgttgatagctagccacgtggtgggtctggagcccaacccttgacctggggacgataatgggggggggggctagaagacgtggcatgtcgggattccaataggttcgtgcctaccggagccctagtgaggtggttgtccaggccttgcctactagttggcggagcgcttgtatgaaggagtttaccctggggtttggaggcctcatagggggtccatgaccct

SEQ ID NO: 88096 - DNA, 309 bp, Zea Mays
gaagaatcaaggcaaggactatcagttggcgaaccagaccagtccatggtgctctggaccgagtgcacagagagctctgcaaatggctctcaaacagtgctactcggactcatctggtggtgcaccggaatgaggtccaccggctagtgaccaacgcctatcggaagtggcaacaccggatcatgcaggtggcacaccggaccgctactaaagctcaaggaatttgtcagaagccaacaactagctgacgtggaggcaccagaccggtctggtgcgacacagaatagcaggattcctccaatggcttgt

SEQ ID NO: 88097 - DNA, 482 bp, Zea Mays
caagactcaatagtccccagggtcatcaccaccataatgacccgaaggaggaggatatgaaggatagggagggtagggagggtagcccgaaaagaaggtatgcactagatcttcctcaaatgtcgagtcccgagggggctcgtcagatggaggaaaacctgacaaagatgaaggaccctagtatggaggaggaggagggtgactagaaccagaaggcctagggtcaccaggaataggttcaggggcgggagcaggagcagaatggaagaaggagtcatcaaactcctcggcttcatcctcaggagtaattaatggcacaccatactcctgttggtgtcattcattaagggtcttggggtaggcaggggtcggaggtggaagagggcgctgaagcatgggatggcccatgggggctgcgaagcctcgcatgtcatcatgcagcgccagagtctcgcgcttgtgcacaacctcctcaatagcac

SEQ ID NO: 88098 - DNA, 862 bp, Zea Mays
tacgtccttccttccgtacctgctcctcctcacaacattgacttctcttagttgactgctggtggagtttaactctagcaaatgatctgcttgcatcctccttgtcaattacagaaggaaataaaccttacatgtttattttgagagccacaagttatcttccatttttaaattttaatgcaacaaggttttgatggaaccggtcgtattgaaccgcgatagagccgcaatggactgcctaaaacggatgcctatgtaagttattatatataaatatatttacacaaaatttgtctatcaaagttatgaccgttatttagtcgtatgtttaatatagcttcaggttgttcaacgactaccgtgaagaagatttttatgggctaccgcggaaatacagtattgtcgctcgggtagaagttaaattcccgaaggaaccatgtttccgtgacagacaacatttcatttttttctgacatcaatgtaagccaacaattctttaagtttcattttcaaagttacacgatcttcataccatcgcctcttctcctactgaaataatattagggagccaagatcgaggccataacatatatgtatgagacagtcaaacatttcgacaatttgctccatgaaaagcatgtttacaagatgcataatgtaaagttcagtcttcatccgggtgaatttaattttcatcatctaaatggtcccatggaattgtgtcttgaccaacaaactatcgtggagccatacactgttccaattcaaatggcgccattcccaaaacaaatactcttgaaccttgctgatattgccgagttgccaaacaggactttagtcggtaagaatatatcgatctctt

SEQ ID NO: 88099 - DNA, 3415 bp, Zea Mays
gcgagaaggcggaagaaggggagcggcagtcgcaggccgcagctcgttgatggtggttagggtttcgccgcccgcacgctcgacctgctgaagaatcgcccccctgttgaagaggtctgcgcctcgccctataaggctccggggaagaggagatagacatcagtggaccccggcgcgcggctgatggcggagcaggagcggagggacgcggaggctgggggcgatgccgcgggcgcagcggtggcgtctcacaccagcagcatgcaggtgaggtctccgcaccctacttctcggctgtcctgtacgattttgggagctttatgatgcgtagatccgctcgctgctatttgattggctaaacctgcgtccgttgcgtgccttcattttagtttgttagtgcgtagtaggttctggaagggagctgtcggaattttgcatggaggcggtggggaatttctgtgggccaaccgtgccttagatccgagttagctgccgttggagctggtaaattattgttctgagagggattgggtgtgcttatttcttggtgaactgtagtaatgagcgagatatcataagacttggtttttttgttcatgaggaatatgtgggtatgtttttttttgttttttgtgctatccccatgctgctgtaccagcacctgcatgtttgggaagtagtgaggcctgctttactgtggagttagcctgtgtcacttggtttctcactctgtcagtgaacttattggtgatagtctcgatgtgaacagttcagcacaatgagattgacaatttaaacaaagacgaatgtgccctgagcatgatgtaatcactacccatatgccatatcatttcgtaaacgtggggcatacttgattgaattatattgatacaatatatcagctactaccattttgattatttctatgccggcagtagtatccttctatcttgaaaactgtagagccttcccatctcatctgaaatttctatacaatcaaaagttccagcttaggtggatgtgatctacattgataaacttaacatctaggaagtaggaacagaagttgttttgatttaaatttattgcatcatttgattatatgtaccggtgggattttgttcctctgaagccaaatatcccaacttcattgaatgtctcacttcattgtagaaaaacaatcgacttttggtagtttgacctaaaagaaagataataaaaggcacccatgatactccctttcagtggttgttgcgtatgtcagaaaggtcaaaacagcttgtgatacctgccagctgatctatggtcatatttgtatccgtagttaactagttatactacccaatccaagtatcggtcacttcagtattaaacaaacactgatagccatgatttgttagacattgttgcaatggactagagcacgtgatgaatgtttcacttgcacagaatttttattgtggataagaggcccttgcagcagcatgtcattaggtctaggtgcagcagaggtaccaaggatagcaaagtatgacagtagctgggcataatgtgggagagcctagagtgcagatctaaccacgtcaaaagtcctacaagtcttaacgttcatatgattagaccgaaattttgtttttaggaatttgcaaattttgattagttcttactgtgttagtcattggtccaacgtccaatgaatgtttaatttgtgttaactactagcctttctagggtatctatatcgaggaggtccacacgcataatataatgatgaagcattcttctattttctgtctctcgagctctctagttctctctaccaagctatatctgtctgtctcattacaatccttaaccccattcagccatgtatattactaacgatggttacaattctaactgttccagcgtgtcaaagtataccgtttggctgatggtgggaagtgggacgatcaaggaacaggtcatgtttctattgattacattgaggtatgaagaatttctttgctaatatgggtggtatttataatttcttattcatgggtctaagctaattctcatactttctcctgattttctttgatagtgcccaaatatttgtttgcctcttgatctactttagttttgctaccctagtaccttgttgcaacatgcttcatttgaccctcattctgtttctacaaataatgaaattgtcaactattcatttttttcactgtcaagggaacagtgtcccaatgtaaaactaaagaaaaccttgtcgaagtagacatcattttcatatttcatactgtaatggtgattcatggaacagtgtcccaatgtaaaactaaagcaatagtccactaaaaatgaaaataagcacaaattacttgatgatgattcatggatcaatatatcggtgtaaaagtaaagaaatggtccagtacaaatggaaacaagcagaaattacttgtagtctatgcctctatggcaccatgatattctgtcattgtattatgatttctaatctgtgtgcttactttttggaccttatatgatttattatttcgttggtttcagggttcgaaagaactcggtttgactgttttagatgaagatgacaatgagacgctacttatgcacaacatcacatctgatgatatttacagaaaacaagaaggtgaactaactcagtatcactctgtttttgagctaattcatatcttttttgcaacttcctaatccatttcttttgttagaaacaatcatttcatggagagatcgtgaagcagcgacagacttagcactaagctttcaggaagctgcaggatgctcctacatatggtgattgaagcaagagctgtggtgcagttaccatgtttttgttcaattactctttttggtttatttgtgttctttgttggtgctttgcagggaacatatatgtgaaattcagagaaaccttcagttcagtaaccttggtggtgagtttttaaaaatcagctgtgactgtttattcaaccacacatttgcatgcagcatgctcttctcattttaacgatgcctgcagctccggaagttggtcgtcgtcaatcatcagaatctctagaagcctctagaataatgcattcaaatggtacaccccctttgctgaacgtccacttgagattgtgccattgtggtatctttcaaaaataatatttagaaattattttaaagcgtctagtttgggaacataacagaaaagtatcttactgtccattgcaaagtaggtgactagattctggagtgaagcacaactagaatctggccgttcactatttttgcttggtgttatgtgaacgaaaaggcttgcaccatctgaatataaataaatgtgtcctatgttagtagagttcagtgaccatttgttactctattttgtacttttagc

SEQ ID NO: 88100 - DNA, 451 bp, Zea Mays
cggagaggtgggctggaggtcggccatggggagaagcaacgccgtagaggaggcgcggtggggtggaggacaggaattaggacctaggcggctgataccatgtgagtgagttggaagcatgtgtttgtattgatgatgatagacagtacatgtacaagtatatataggggaggaaggtgagaggtaaaaggaagccttctacacctaaggaaagatctagactacaatcagatcctcaatcagagggattgagactagaatcagatcctcaatcagagggattgagttcctcccctaatcctctctatctatatcagagacagcacttccatacagggcggccggcatatctgccaggagacagccgtgatacactttctaacagagcggttgaccattgaagtcttttgtcttcttgctgcaccagagagtccggtgcattcttactttg

SEQ ID NO: 88101 - DNA, 450 bp, Zea Mays
tcggcttgtattcttcccattttgtgaatttttcaatagccaccagcacatgtgtataccctccttgagatttcttgaatggcctgatcatgtctagcccccagcatgcaaagggccatgtgtctggaacagtctgcaactgttgtgccgatagatgctactgcttagctaacaattgacatgcctcacatctctagactaggtcggttgcatctttcttggctgttagccaatagaaactagctctgaaggctttccccacgagtgtccttgacgctgcgtgcactccacattgccctacatgaatttcctccagtaagcatttcccaacggctgagtcaatgcacttcatgaagactcccatggcccctcccttgtacaatgcatctcctatgactgcatagtgagtcaactgccttgcgatgcactcagtagcagccttgtcatctg

SEQ ID NO: 88102 - DNA, 1107 bp, Zea Mays
cacaaaacctgtgctaggactctgaaaatacttgctacatagcagggatgagtcccttttgtttatctgtcattattgtccacggatatgtgttctcgatcttcaaatcatcttttcaattattgcaaaaaccatttccaggtggcaagcgattcaacttccacaacagctacaactaagggataaatgcagtcatttgggtccatccccactacacacaacagttggcctccaaactttgtcttaataaaacaaccatctagataattgatgggtctacatccacctaggaaccccctcttgaatgcatctaggacatatagcatgagttcaaaaggttaccagtcagattaacataatgtgagctccctggattacttctccttaactcatgtccatagttccagagttggttgaattggtttgcttcatccccatgaatcatctacattattttccttctagctctagccaagatgctcctagatatttttaggttaagatctttctggagcactttatggaagcttgtaatgctcctcttttcattagccctaaaattctctgcatacttccttgcaatccaagtagcattgcacctcctaagaccactctttttagtagttgtgctttccatagtaggttttcacagcaaaagacttagctcttgtatgatatgaagcatacaaactccatggatagttttcagcatagtgagctctgactctaatcctatcattcctagccatcttaatctccatcctatttctgacattatactctatgataccttctatgagtctttcaactcaactaaacataagtctaacatagaaggaaggattggccatatcttcttcctcaaatgtctgaaagatagattcatccccataagagttagactgtggcatgtctagccttttagcatttatgtcattgtcatcactgtctcctaagtttctatcaaccccttgtggatttcaactttgtgcctttagttcatcaagcaaatttgcatctcctagttccacctcataatcattgtcacaaaattcactatcagaactgacagagtgtgcaaggtcatctgtgttttctgcattctgc

SEQ ID NO: 88103 - DNA, 352 bp, Zea Mays
ctggtgacagcttcctttccttggtccagacaagaccaactccactaacacttcctctcctgacaaggatactgaattcacagtcctcttgtcatagctaggacttgcttggtatttggttagccaattcatccctaggatgacatctatggtcgcatcccagttacccatcactattagatcaatttctcccaaagcttcgacttacggcacctgggctgccagtagctttccgaataggacatctcaaaattaagggaatttgttgtatccggtggttatcagcctggatccattctctttggtggtgtggatgaaaattttttgggatgtatcctcgatcgcgctggag

SEQ ID NO: 88104 - DNA, 688 bp, Zea Mays
tcggtggaagatggcggttgagctgctggaattatttgcatccttggactggtcatctgctgaacaaacatcgcactcgccaattgctacatcaattctggaggaggattcgatagcatttgagacatctggtctttgaactctttcttagcctcctccttaaaataattgacatttgttccttgtatcgatcacatttcttgtacagaccttcccactatggtccaaagccttccttccatccttccttagacaagattcctcgtacatgaccaggatgctgagggttaccgagaccagccattaggatgtttctctccctttgtggcttaaatgttcattggctctgcttagctgccattgcatatatgttttttgccgcttcttcgatagtgggatcatcaaaagatacactaaccttagtttcccttggttttctagcacggatccaattagttgtcctttcaccaagttgctcggacagcatcggcaaccctgcagccttcttatcggcgtcttcttatctccatttaggaatttgatgcttgtaaccacctatgcctaagtggttgtggtacttgttcttgttagatagttcaggatttgcctcgcttagagatataaaatcagggctgctcctctgctctagaaatactgcccactgacctactgagattttatttatttt

SEQ ID NO: 88105 - DNA, 346 bp, Zea Mays
tcttaattcatctcgagattcgccttaactattatatccttccttgttaatgttgatctttccttctccgatcttggtctcattgagtcaaggtcagtgtacatcatcggagttgggaaaatatggttaagatagatataggtgagatagactacatgatgttggtcaaaaacttgtttgatgttgggtggggatagatagattatgcagtctatcatgactctattggttgggttagttcttctactcatggttgagttggtctgacgttcttaatttagtgcagagtgaattaaggtaaacatattttataggagtagagtctaattcattttaccagtattaa

SEQ ID NO: 88106 - DNA, 852 bp, Zea Mays
cagctgtacaaaaaggggatcagtgagcccatgctaaaatgtgtgaccgaaaccaaaggcattcagatccttcgcaaagtccacagcggaacttgcggctcccattcaggacccagggccctcgctgccaaggtaattcgtcaaggattttactggcccgcgataatctgcgctgtgaatcgagtcacgaggtcttgtgaagcatgccagaagttttcccccggtcaagcaacccttcgcagtacaccaagctgatcgcccacacatggccacttcaacgctggggtctggatattatcggaccactacctacggctcaagggaacctcaaattcaccttcgttgccgtcgagtatttcaccaagtggatcgaggctagagcagtatccacaataacgtcgaagaccgcccaaaagttcttctggcaaaacattgtctgccgattcggagtcccgtccgaactcacagttgacaacggcaaacagtttgacagccaggactttagggacttctgtttctccattggcaccaagcctgtcttcgcctcggtataccacccacaatccaacagtgtcgtcgagcgcgccaacgacaagattttcactgccatcaagaaaagacttctcgacgacaagaagggcaaatgggccgaccaactacccaaagtggtctgggccctaaacacgacagaatgtcgggcaaccgaattcacaccttttcgtctactatatggatccgaggccatgacgccacaggagttaaagcatgggtcgccccgaacaagcacatcagcggtccccgatgtcgacgagccaacgtccaaggatctcatcgacggagaccgtgtcctcg

SEQ ID NO: 88107 - DNA, 532 bp, Zea Mays
gaagagggcaagtgatcaaagaacaagtgaagaaaacagccagagcaagcgggctatttaaaaaggccgaggggtggtcgtccacttcctaccccgctcgccgaacagtcacaagaattcaataagcaaatcaagccgcctgaaaatgagtcaggaaactggcgtcatttcgcgtaacacggcaccagttggacccaagtcaactattcaggcaaatgattacatctctccgtcacatcaagttactacttcaggacaacacgataaacaccctgcgcatcaagacacccattgggcacacccattgggtgtgtcgcctagaattttcaagatttgctaaaggaacgatatccacaaaatatacgcaatgaatgtaccatgacaaaagggggagatcggctgagacgggaagaagtcccattgtggttactgaagcgcaagtccaatcaaaagaagcattgaagcatatagttgtgtgatgtctagccgaaggccatctgtctcaactagccagatgtccaacctgtcatcg

SEQ ID NO: 88108 - DNA, 689 bp, Zea Mays
aaacatatatgctctaaatgacaagcatgacgtcgggagagtatgaatcgggtcaggtgaccgtcggtcatatggtgcacacggagaacaggaatctatatgacactaggcaagggcgcccatgcttaagcttaatcaagtgcttgatggacaatttgaatatgtgttagcctctctgagcaggtacacgaagcacaagtgcacgggggtaaattgaagggtcatctatgtgatgttgatggctgacttgtccaaaaatagctctatctctgtcttttttctaaagacaattttttagagctcaagctaaattgtagattatttggcagaaatgacttatcctagaatcagagctatttttttattatgtgccagagatagagcttgattcggtgaaactactatttatgacttcttattcgtagtataaagtggctctagcttttaggtgttttcacagtgccgtttttttaatatttgatctgaactgtttctgtattaaagtgtcaaagctagagccgttgaaggtactatttgtggtctcttcttcgtagtgtaaaaatggctctgccttttaggtgttattcacaaagaccgctaaaaaagtgtttgacatggctctagcttttttttaatagaaaagtcagagttgaagccctgctaaacgggctcttagactaaggactcgt

SEQ ID NO: 88109 - DNA, 848 bp, Zea Mays
cgtccgcctcgcctcggctacaagtacggacgacctggccgcgcttgttaaggacccgttctcgccgcactacgagcccaaaccctatcgccgccgtgcaccgggtgcagaggaagccgccaccggtaacccgcctctgtaccaactccccacccctgacgcgccacccggtacatccaccaggacgtcgcggagtcgttggtgggcgccgttggtgtggaagaggactgcggtgcgggcaattgctcgtcggacttcgtcgagcgacaccaccgcgtggccagactcgcccgcacaataatccgtggtgagcctgccctcatgctattcgtactactcttcgcttcgcgtagcaccattcggggtgagccgttgggctctgaatcgagcgttgtgcatctccggcgaactccatggccgtgggcttggcggcgccgccgtgcgtagctgttcggtggggttgtagctagggcaaggagtcgtggccgttggattgcaagcgaacggatgcgattcgatcatggagataccgattcgggtatgcataggatcattgctgtggccgttgatcgtgaaatctagggccatcgttggatctcgcgaacataaaatctagaccgtaggtgctggatccgaccgctgcagtcgcataccgattgggatgaacgaaaccctaatctgggcggtctatttttaatctgacggctcataacacccgataccccttcggccttcaacttttgctaaagagaccctgtgattaaaagaaatcaacccgcactccaagcgccagtgatctgtgccttgggaaaattttggttttgcccctgcgtttcctagtattcgag

SEQ ID NO: 88110 - DNA, 422 bp, Zea Mays
cttgactgtgcagttctcaaattctcccttatttgtcggacttgttcttcttcatcttatataatctctggtccaaagaactgcctttcaccagtttgaacccagtatagaggagtcctgcattttctgccatataaagcctcaaacggggacatcttcaaactggcctggtagctattattgtaggagaattccgcatacggtaagctcctagcccaactaccaccatgtttaagagcacaagctctcaacatatcctccagcacttggttggttctctcggtctacccatcattttgaggatggtaggccgaactgaaattcaactgtgtgtccaagcactcgtgcaacttcttccaaaaccaagaagtaaactgtgatcctcggtctgacatgatcttcttaggcaccccatgtaaacg

SEQ ID NO: 88111 - DNA, 405 bp, Zea Mays
ccctcctcctgactcgaccgcacggaggataaataccctcccagagtctcagccacagtgcattcccccatctccctgccatctcggtgaaccgagaaagagagagagaaagcagagagccgctctggtcagggttatgcggagccatggcgctgacctcgtggtggagtcgagggaggtccttgggaggagtcggtctcgtacgggaaccttgccgtgcacagggagctgggaatcggcaccaactaaccaccgtgaatccggcatcgccgtgggatgttccttgtggggggtggtggtctcatcgccgtaattcataggtaagtcggctggattcgagttcgtagaaccatgaatcgtgttttggcgggtcttctagtgcgattgtatcaccggtgctggggt

SEQ ID NO: 88112 - DNA, 573 bp, Zea Mays
ccgtatcgggatttaagttcccaaactagccctaaggtggaaaagtaagactgtgtttgttcatgaccaagtattattgctacaccattctttggacatgccactgtttcctaaattgttgtttaacatagttactgttagttatattgtgggtttgatccatataaataattaaataaaccataagatccgcattaaacaaagtttgcattatgatttagtaccatacgagagtttgaacggacgttaactcaacttataaggttggactttgtatgtctacatagagagattgagaaaaggaaggagtaccacatgcgcgccatggcatggcgatgttttgccactttggatactgcatctggggggaagttttcattcgtaattcctaaagttacgagatgttctcgtatgatgacagaatgaaagtttttgcacggtcgcgatatgacatggcaatgttttgccacttagggagttactgtatgtgaggtggcgatagtttctgttcttactcctagagttacgagagtttcatgtatgatgacagaaggaaactttcaattcataact

SEQ ID NO: 88113 - DNA, 494 bp, Zea Mays
aaaaactactgaaatgaatggcagatttagccattctgttcagtaaaggaaatcaacatgaataataatgttagacagaagaagaagtttacaaaacagaaggttgcagttaactgaacagaatggctaaaatctgcctcatgcttctgaatcttgcaaacattctctctctctctcttgatctcctgcgggtacagtgactagaacctagagtagagactacagaatagtaaggtttgcaaaatcaccatgatggccatatgttgatgggaaatcctaaaccgataaaaaactgtaagaattttcagaactaaccgcataggcatacagaactccgtaattgtgtgacaggcttttgctggcagaaattcagagaaaaaccaagtgcacaccacaccacacggcaggcaatgtcctgataaaatcacgatggtttaagctatctcactttgcaatttaaaagttctagccctcctttgattgctgaaatttca

SEQ ID NO: 88114 - DNA, 528 bp, Zea Mays
gtctctccactgtacatgcccttacaaggtagccagtgatatgttatgcatgggcaggcaaaggggcgcactgtttggtctgttgccaggcgcggtgtggtactggtacggcacggccgttgcaggccactggcagtccgctagtagtacagtacagtggaggcggacgagacggggagctgctaaggaagcgatgccggatttaattgcgctcaatcagcaactgcagacaggcagtaccgggtgcgcccatcagggattgaatgcagggggccaccaccaccaccaccacatgcaccgaaaacgaggcgtccgcagacagctaagtagcttgtagtactactcctccagctacagcttgcatgctccgtccgtgtccgtgctcagctagcgcaaaccgcgatgcatgcgtgtccgagtccgagcttgcgcccatgcatgcatgcacagcaggccgatcgagtctcacagtactctaggagagtaggagggtttgctttgcacgcgcgctggccgcttggttggaag

SEQ ID NO: 88115 - DNA, 469 bp, Zea Mays
gaaggggagtccttggatcatctcttctttcgccagcctctgaaggaccggaagttgagatgcccataacgggcatgcaaatgccaagacgcctgttctgcttttgctgctagggacacgagatgctccaccctgatctctagaatgtacagacgactggacgaacgttgtaccttcctcaagagctggccacgatcgctgtaaatgcgcaggggtccctcttgatgacaatgccacagccgtcctcatccaactgaccaagacttatttcgtccatttggttacctgtatatgagcgtgcaaggcccacgtggtgcaaaattccgatggtccatgttgtttggtaacctggatggcggtcggagccaggcccgattggtgcaataccccggtctcaaccaggcccgactcatacgaccaatttccatgtcgctcaggagcctggttgcgcacgttcactccactcgcc

SEQ ID NO: 88116 - DNA, 686 bp, Zea Mays
ctcgaaaactccaccccagagagataaaattagaatctactcctgatgcacgatgatgtttatgtctaggaaaaaaaactagttcaggccaagtcgccctggtcgtttgagatcgagagactgggctcgctcttggctagtagggtgcaaccactacagctttgcttttgtgggcacacacacacgctgtagttggctggtccatgcctgatcttcaccatcatcctcccctgctatctgctaattctttaagaccctgtctgccagttgccaactgcaacttaaacaaatcatgatcatgactctctttttgtttgagcataaactcatcaccaagtctgtattcctagtagcacattgttagcacagtactgcttgcagctggtgagctgtcacagtcgaacgagaatctggagtgcgatgcgagtggcccatggcaacaccctcacacacacacacacaaaaaaaaaaaagaggaatgggaatgcttggactgcgtgcatctcaccggatctccccaagcttccatggcccaaccagaaagaggggagggaccagggtatcaatcttctctaggaatggcaacgtgaaatttcacatcaggttttagctcatcatctctgaccacgcaacgaaaaaaattctacacggcgatccctacgaacgtttgcgagggagattttttc

SEQ ID NO: 88117 - DNA, 475 bp, Zea Mays
ttatcacttatcttgatttttgaatttgtagcacgatttgaataaatcaagacaagtgaatgcctcaaagcatgagacatacccacctagcatactagtaatagcaaaaaagatttcaacacatcctacacatgctaggtgccaatcttaatggtgaacaattttagattgagcaagtaatagtcaagttcacaattatgaaaacaacttagctcaacaatattgtatcaatatgagcaaaaagagcctaagcatgccatagcattatcatgtacacaaagaacatacaactaggagcagaatcacactctagcagttatacaagtgaaactcaatatgacatgcagatataatacaaaagaaagtgaaagcagaaaataagaagaaaagaccaaaagggagctctctaataaaaaagggaaacaaacacctaattcccatcgcaaatgaacaaaagttttttgatcaaggggtt

SEQ ID NO: 88118 - DNA, 767 bp, Zea Mays
gaccgagcaggtctgcaaggcagagcgggcgaccaggtcctccgtcgagcaagtctgagcgtcgagccagagacgcaagcatatgtcgaccacgatagtgcgtgacaccaggagcccgggtgacaagacgcggacaaaactttcctatcagggacgaccttagcaccggagccccatacaatggacagtatgacagaaacaacaagacaggatgacatgtcgaatgaaccagtccacacgcacgaaagggcaacaccgggcccacaatggcagaggggaaccatgccgtgtcaatcgagtcctggggttacgtcatgggacccgccacgtttcaccacaaggacatcaggcacaaacctgccacaaggataggagcaacaggctgcaccatgtccaggagcgctacttcgtacaaccaagagaaggagccctgggaaacagatgaaagatttattctctctttattctctctctctctctaaagaaagagaaatgtaagatctaacccttgggatataaaagggaaggaccctcttcctctcagatagacacataagcacactagttgtaacacgctacaagcaatactacgaccatcactacagtggagtaggatgcaaacccaaaccagtataaacctcgtgtcccaagttcattgtccgagtcccatcgattcaccattcagagtgagtccacactagcatcccctgccgaacacaaatcttattgtccccgggtttccgaaaccacggtagttggcgcgtcaa

SEQ ID NO: 88119 - DNA, 871 bp, Zea Mays
gtgagcgtcagtcccgtcttcaccccctccgcgacggtatgttccgtgcccctcctctgtagcgtgataggaagcgcgagacgtcttagcctaggcactggcgtggatgcggtggggcaatgctccaggcgctgtcgaggggatgacttgccactggatggcacatagtctcgagcagtctgtagatgaaggcttggcgccgagctagacgggtagtgggaggcgaagaacattccgcgccgtataacggcggactcgggtcgtcgctgccagatccttggcgctcggccgcggcgaagtggtctggagagagaaaagagagaagggagagaaccggtgatgaagaagacgcccgacatcacttgatcatgcgttggacggtaaggattaaagggataaggatgaagaaaccgggaccgtaggatggtgattggagggggtagatttatctcgcgtacccgccgttcatcacgaatcgcacggctttgattagaagcaggaaataccccttcatcccaaccgttatccaccgtagaccggcaatctgacgactaaagcgaaatagtggggatcgtgcgctgtgagtcgtcgatctcagatccgacgatgactcgggaatcaggatttatacccatcgccggtctaatctgggcgctcggggttggatcggacggtccaaacatcactgtaccccttcggccctgcacatttccttaagagcccctcgggtttcagtgaatcaacccgccgtccagtgagcgctgttcactgtgtctgggctatttcgcgcctgagtcccggcccttttacaaatttgaggcccagtccagaacataataaaatcagggaaaatgattattaaatagatttt

SEQ ID NO: 88120 - DNA, 380 bp, Zea Mays
cccgcctagacctaaacctagctagcctacacactccctacaacggatcaaagagacacactccctacaacggatcgaaaagcacgatctagttgagaagatttacctaggaagggtcgatgggagtgattgcgcagatcgccggtgtcgtatgtcggacgtcaggaccggcggagatgtgtcgggagggtgagaggagatgtgtggggagggtgagagaagcccaattccatgtttagaggctggaatcactagtggacttcatatgcaggctaggaaagtgagtggaaagttgatttccaattccagatacagccaaacaagattggtaggaatcaaattctaattcagcccaattccgactaaacaaacaggcccta

SEQ ID NO: 88121 - DNA, 431 bp, Zea Mays
tcttactcatcgcccgtacaaatgttggcaaggcgtttcttagaccgtagggcattacaacatagcagtaaagcccatccactgttacaaaagcggtatgcttcctatcttccctagccatctgaatctgatggaaaccagagtaagcatctagaaaggacaagaggtcgcacccgtaggcagaatccacgatttgatctatgcgtggaagtggatacgggtccttgagacaagccttattaaggctggtgtagtcaatgcacattcgaagcttcccgtttgcctttggaacgatgactgggttggccagccatacggggtgatgagcctcttcgatgaagccagcatcaagcagcttccggacctcctcacggatgaagtcttgccgctcaatggactgtctgtgaggtttctgactcactagtttggcg

SEQ ID NO: 88122 - DNA, 477 bp, Zea Mays
agagagtttggtgctgttatagggacgcaagtgtggccaacatgtgcacctgaaaatgcgtagcatggaataatttggatgtgtatgaaaatcctttctaaaggagtggtattgttgatcacacgactcggaagcctattaattagataggtggctgttgaaaaagcttcatcccagaattttaaggaacatgggcatgtgcaagaagggctaaacctgtttccacgatgtggtgatgcttgtgttccacggaaccattctgttggtgcgtatgggggcaagacacacgacgaccaatgccaagagaacgaaaaaatttattgtgaacagattgatactccccaccccaatcagactgcacaaatttgattttagtttccaataggcgttcaacatgagcttggaattgcaagaatatttgagcaacttcagaacggttatgcaacaattatatccaagcaaacttgctaaaatcat

SEQ ID NO: 88123 - DNA, 550 bp, Zea Mays
aggatggcgacgtcgatccctagtcaatggtacttgcggatgcacatcagaacacatggtttatacaggttcaggccacatgaatgcgtaataccctacgtcttgtgcggtgttgagtgttcgattgggatgagtttgtggatataggcgattgtggaggtgggtgaaagagtttctatcgatctaatggtagatgggcgagagagagagagtttggtagggtacctcagcagccttatatagtcgactggagaggtatccctctacaaatcatgaagtttgtctaattctatctgaatctatcttttgttgctgtgagcactctagatcttctagagtcaggttgcatccttctcagtcatctcccgagtatctcgctattcagttgcgcatgaagcatgtctttggaacatcagtgatctttctgcgacgggtgcactcggatagcaaccttgtgccatgttcttcgggattgtttcttgctccgagtgttatcttcttcggttaaatttgttttgcctgagtgcggcccaatagtatgccctgctgg

SEQ ID NO: 88124 - DNA, 1540 bp, Zea Mays
cacttattgtgctaatccggctgcatgcttaggcgattttttggtcggataaattctatttgtcgcacacaatggctgacataagacttgccattgtggtgactgtcctaccatcgaatggcgaaagctgacctcgcggcctttttcgactttttctggtcgtactttttttgtggggggattttcctgcttgttttattacatggcaccgagtcattaaaaacctcgcccccctacgaggaaaagagtgcaggcctaaccaaagtaatgtgtcaggaattgttacaaatgcgcgaaggcccaggctgtgcgtcaacttatagataatttttctcatattgtctacattccatgaatgttcgaggtcttcgcatgtttggcttgcaagtctatacgcgttcggggatattttctttttgatgatgaaaggtccttcccactttggctcgaacttgcctctggattctgttctactggtccccctcttcaaactctttaggagtgacaattttgtctctccaagccttcgttgctgcttggtacttgctcaatgcgtcgagggcattgacacggtccccatcgaggaggtcttttgttgttggctcgtcgatgtctgggatggccttgggctttgttcggggcgatccatgcttgagctcatgcggagtcatcctctgttccgtacatcagtctgaatggggtgaacccgatagcgcgggactcagttgtgttaagtgcccacacagcctcgggtaattgctccgcccacttgcccttttatcttctaatagtcttttctttattgatctaaagattttaccatttgcgtgctctactaccccgttagattgtaggtggtagactggcgcgatgactgcctgcgtaccgatggaagcatagaattccctgaaatcttgattgtcaaattgttttccattgtccactgtcaacttggagaggactccgaagcgacagacgatgttctgctagaagaacttttgtgctgccttcgctgtgatcgttgatatagctcttgcttcgatccacttggtgaaatattctactgcaacaaaagcaaatttgagattgccttgcatagtgggcaatggtccgactatgtcaaggcccatcgttgtaacgaccaggtatgggtgattagctttgtgaattgcaagggggcctcgctctaggtgaaaatttgtggcacgcttcgcacgagcggaccactcggtttgctgcgcacacgatggctggtcagtagaaaccctatcgcatgaccttagcggcgagggctctgggtcctgagtgtgaaccacatgttcctctatcgacttctcggaggagttcaatgcccttgaccgctgtgatgcacttgatcatatgttgacttattccctttttgtatagttgtccatctatcactgtgaagtcatggcttcgatgcttcaatctcttggcctcggcctggtcagcggggtgatagtggccttgaagatatagggttatgggtgtgcgccaggcttcagtcattattagattt

SEQ ID NO: 88125 - DNA, 847 bp, Zea Mays
ctctcctgcgaaggaaattgcatcgaaaaccccgagcggcatctggtcgctttccaaatccttccccacggaaaatggaaacacaataccctctggtgctcatttagacttgttaacccaaaagcacaaatcccgtgcgtaatcagtgaaatccgcagtgcagtgcaggctgcaacgcaatcgcaagcggctgatccgcgattccatttccatcaccacggcaatgcttcacatcagatcaccccaggataaattaataaaaatcccaagcgcatgcaaccacctgacctgattgagcttatcctgctgaaaggccaaaaagaaaacagagagggacggaaatcagacagcaaaagcaagcgcacaagccggaaatcagacagcaaaaaattgcaattgctctgagcaagacaactaagcgcccttctttactcgcaaagcgagtcctgcatccaaaagcagaattgcttcatacacttgagctcattcattcatgctgctgaccgagaacccagaactgcacacacatacccttttttagtttttttttattacttcatggctaagcatcaagctggggctctgctccaggatgtggcatggtgttctcagctgctgaggcaattacttcacggcaggcaaggcaaccataacatgcatgcgcccgcgtcaggccaggagctaaaagcttgaggaaagtggcaagaggcgcctgcctaagatttccaagaaccgacacgggcattattaaagacagaccgcgcatgcacagtcaccagggatcaaaagggtgacagtccaagggaagaagaagaagaaaaggagaaccactgctcgcgctttgcac

SEQ ID NO: 88126 - DNA, 585 bp, Zea Mays
ctgacccgtcggcccatgtaaccttcagccgcgcagcccacctgtgtgcctcgtgctcacgctcatgtaccatggatgaagcgcacgccgagaaccacactgtgagccaccattaccgagtcgcaaaatgtcagcaacgtccagggatccgaaagccagtcatactaccagcggcaacgatggagatcaagccaacttgtctcaacggaaaagcagccagaaaagcgatcgcgtcagctgaagcaaagcaactggcgagcaagtgggccgattgggtcgtgtatttagagcctggtgggccgaccgtagagcctggtgggccgaccgtgtgacgatataaacatgtgccgtggttttgtaaagggacatcgaataattaatgaacggaatatcaactggttgccgtcacgagaccttcttcttccccacgtctccaatctctactgcttcccctcttccctgctctataggcttctagagggtgctaacacaaaaaggatggagctcgccgccgtagcagaacctgcgtccatcacctcctcgtcctcgatgccatgcccgagggctttgcttgatgcctcgagg

SEQ ID NO: 88127 - DNA, 886 bp, Zea Mays
aaaaggtgcccacttcttagggatgtccaccgagtggtcagccaacccagcaggagcaaagtatttggcccagagcctggagaactgggcagatctttttctctcctcaaacatctagaaaacagggtcaggatgccattcctgagagaacatgaaattcatctctaaattctgaaagtgattattgtttggctcgccaacatgggcctgatgaggcaggtcatccatatcatggacatggtccacttgaggcaccggtccatcaacctcctgaggcccattgaatggggcagcattgatagcaaacccatccccaagcagcacatgtccattctcaacaaaatgaccattcgaaaggggtgcaagctgaccagcaccaatggagctatcaaacgacaagccagagtgctggttactgagttgtagttcgtcctgctgaatgggttgctcatctggcaggatgggttgtggaacctgtgggcggagccccctagcgcccctttagatccgcccctgccgaaaaagacattggaacctattggaagatgttttaagtcttatttttatggaacatataattttacggaacccttgtggacttatagttatgcgaatcttgcaaaggatgttgtatgtgcagcaggtttgatgaagatggcgcccacctactgctgaaatgtaaagaaacacggagggtttggcacgaactgaacctagaaccagtcagatgtaagttggccgaggaaagacctgctgtagtgtagacacgatggaaatggtgtttgcgttggagaacaaaacgaagctgatggttgccacactgctatggctgtagtggggtgagagaaacatgcagagggaggaagggcatggatcgatcggcatt

SEQ ID NO: 88128 - DNA, 463 bp, Zea Mays
tagagtttatccatttaactaggagcaaaatggaccaactcttaatatgatgatctgatggccacactcccttcatgatttttcttttccttgtctcaccctttaagatggctccatgtgtcgccttcgatttcctctagaaccgtgccaccggattttaaatccaaacccatgaaaatggacgttcaactgagagtgtaggtactacatcatggattcatggcattaactaggtagatagaaaatggcttgtcaaatgcactcaacctacttgtcacattgcaggacagcgggcatgtcgttcattttcctcgagggacgttcaatattgtaaatgtgcatactaataatttaaaaacaaaaaataaaatcattgtcgaaccggaccggcactgtgtgctgagaaggcggcccacgcacggcatgattctcgggccgaactagcacgagcccacttcgaatc

SEQ ID NO: 88129 - DNA, 469 bp, Zea Mays
gccaaaccctgtaatgtggcacccgatgctcctcgtatagttgcaccgtgtacagagggggtgtggggtatccagtggagcagagcacctcccacaagatagagggaaagccctcgtgggaaaggtagtcaaaactgaagcgagtgtctcctccattggcgggggtgggtgaagtcatatgtgaaagagggttagatgtaagtgctaaggtagcggtaaggagataagtgtgctcagatttttaaggaggcagatcaacttagatttatctattccaactcatttcgtgctacccatttttaactaatgtttgttaggggtcatgattcgatgcattttccttaacttttatttatttcatgttttataatgcatgcatgcttgaatgaacgtcctctcattgatcataggggtgctcctagggcatccctactatcctagcttggcctatgtggcttacttatatagc

SEQ ID NO: 88130 - DNA, 817 bp, Zea Mays
cgacggcgacgagagaagcaacaacatcagacaaaaaagcacgagcaacagtactttggaaagcgaaataatgcatttatagccaaatccccatggtgaacagtgtcaccatatattttctcaacagtcacatctagcagaccccacaaggcggttcaccagatgatcgagggcaacatttgtccattttaaataagagacttcaggattggcccattaggatgaaccattccctcgggagggctactggtggtgcgaaagccaaaccagacctcgatcaacactacgaaggcttgccccctcatcttgactaaccatgcttgagtgcagactagggacaatcaaagccttcgccaagtttgacttcaatggagccttcgattaggcaactaatgtcgaccatggtggaggctggtgcctaggcgagggcccgggtgtgggacaaacatcgaggtcgaagacttcgctcaccgtgactccaaagggcgcttgacacaaatcacaccccaacatggagtgaggggtcccaaggcacgaaggctccgagacggcgaagacactagataagaaaactcgcccgtgtcatcgactcattgtgggggctcctcggagggcccacttgtcagcgtaaccatagggtaactttgtgagtttttgtattcattgagcgttgcggtgatgtaattaccccattacacgaaatgttctaggaatgtacttggtgacccggggtgcgtatgtacttcggaccacctacccctatgttgccctataaatatacttgttgtgtagttggacaggagacacataacgagac

SEQ ID NO: 88131 - DNA, 523 bp, Zea Mays
cgccttccttctgtcctcctccgaaacaaaaatctttgggcagaagcttagagatggagtcaacatcagttgatcacttctatcattagaaaactgcaacaggtatgtttcaagtatcgattttactcaaatcgacctacaactaaaaggtatgctttgctcctctcctcttgccgatatgttgatgaaatggtcttttgctctttgatgtgcttcattttggctctgcgtgctctaaattactttatttgtattttgcagagggcacatactattgttgctctgcttgaatgactgaaaatcttgcttcaggtaaacttcctgttctgacgagtttgtagtaatcaccaactttatgataaatgagcatggtctttgagcagaattaaaatgtctgaatcttagttgaccatgatccttgaataaagtagggttgtgtaagatgttgcagtttgttacgtatggctagggtatagaagaaaacaaaaacacgatgcaaatatcaaccaaaaatatgcttcat

SEQ ID NO: 88132 - DNA, 1305 bp, Zea Mays
aaaagagggttaagtagttggtttccatcctttgacggtggtacaacgaccacagatcgtcaaagaataaatgtcgcacaggatctatattatatttgctccaaaatgcatcttctgacacaacaaatgtgaagtcctcgagtttgtatttgttgctagccaccatgtaccactcatgcattctaatctccggagtcgataacttagaaagttgcaccgtcgtcaagaacggcctcccattcacaaatttaggaggaacatcctccttcttgtatatcgggatattgattttaagacgtaatgattctcgagtatgaatcattccatcttcttcccatacttcgaaattgtctatttgggaccgtgtgcgtactccacgagatgctgattccgcttttgattgatctgtcataactctcttcaatttttgcaggtagcgtgtcattgcttctgacggtttcttgacattgtcagtggcgattcgctgatgaattttctttgaagtagttggcccttcaatattggtgtcaacctttgcttcctttctgatgtccgcatcgatattctgaggaacaattttgtctacgtccccctcgtcgagttcctccgcaagaggtgatatgattgtttcaacggtttttgtggaggccggtgctatattttcctgcaccatggggtatggaatgatcgaactatctttctgttgcattggtgttgaatttggcgttggtgacttatgacgcgatagacggcttaagatcggctcatcacccaacttaatgtcgcctcgatgccaaaggaccaactcgttcattgcctcctgcaaagttatgatcccctcaactggaaagtctatctcccaatcttcacaaccactgtctgtgatctctagaacttggaccacagcatagtgtggcaggacaggattatcctggtagttaacaagtcctggttttaccaaaccagtagcatcttgttttgtttttgtcccagattgattgattggaatatgaagacaacaaggcttgtcctcaacaatatcgtctacagggtacttggtgcccgatacgaagtcttgcacagatcctacgctgctagggattagaggtggactcatgtggcctggcttgagttcacatgatatgcatcgtgttttcttcattttcttcatcacgtcatcaatagccttttgtaccctttcatcaattgtctcttcaagggtccttttcgacttcttgtgtttcctatatgacgccgcatactctggaaacgcctctctccaggaaatcttagaagagattcccc

SEQ ID NO: 88133 - DNA, 311 bp, Zea Mays
gaaaattgcttccatggttgaccttccaggtatgaatccaaattggttcatggtgatatgcgtcattcctctcaggcgatgctcaataactctctcccatagcttcatattgtggcaaatgagcttaatccctcgatagttggtacatctttgaatatctcccttgttcttgaagagtggtactaatgtacttttccactctgtttgatgtcttgtcctttcaccaagagttgatccatctcatccttaatgcatttaacttggttgaggtccttcgtcttccttttccgaatcctagtcattttatagac

SEQ ID NO: 88134 - DNA, 399 bp, Zea Mays
agccatactttggtaggaatttatcaccatcgaggaacaccaagattttcattattttcaaagataaaaatctgatgatcatactgccgtcaagaactctgttgaatcgcagaaagtttgtcgcaagaatcgaagtctgaaagtaaccagagataaagaaagaagtcactaatcataatatgatggcataattagcaggtgagctgtggcgtgcgctgttctgattttgatgaccatccgggacccatccctcatggaccagtactaatccaactccccacttcctagcccgtgggccccgtctcccagcattgcaccaccctccagtgtccgcggcccggccgtctcgactccatcgtccaggcccccaccgtccgtctctccctccctcccccgtcc

SEQ ID NO: 88135 - DNA, 741 bp, Zea Mays
gctaaattagttctctaattaaaacaatttatagtttgaagtttgcccttttataagtaagtgttaacacgattattaccacctcaaacattatgatttaatgattgcttagaataaatgcaatattggctagtagttcttgtcggtgtttgtgactcgaccgcgcaccacggggttacccacatgatgcttttgtgtaggacggcgtcgttgatcgtgactcaatggttcgtgtagaggcacatcggtattactcgtagagttatacaggtttggacccctttgaattgcgtaataccctacttcctgttgtgcctaagtattgatttctggagtacgagggttacaaatgagctttgtgatggctcagttgatgttgatgagattggggtgaaatggtatgagatgcgatgattttgtaggggttccccctcgccttatatacatgaccagagagttatccctttacaagttgtgatcactatctacttcgcttatccccttctttgtcgtagattgcagtcctgtatatctggagtcttcatcgcctagtcgcccgagttatcaccaaatgcatagctcttcgggtgcttgcaacaacatcacccgagatataagtgcttcagtggcgcctaactcggtcgaaggtcttcgtcatcttggatcgggctcgcccaacctggctacatcctgccagcccatcctgtgggtcgacctagtaggaagaccatcaagaggacc

SEQ ID NO: 88136 - DNA, 583 bp, Zea Mays
gtcgtgttctgcgaccgcgccggggaggggaacacgcacaggcaaaggagcagcaacgcgttcagccttagtgcatgcaacaagacaacgacgatcgcagagcctcagagaaaacacgatgggtggcgcctcgtaggttcctcccgtccagccccgtcagtgcttgcatagtgttccttagtgcatagtggttgatgacctaaattaaaaagtatatatggctaattgtttttctgcgagtacatattagatgttgttggatttgtggtttttgtctagctaattttattctcgaacaggaaattgtagattgtacgatgctaccagcggctgcgcccagcgggtaagagtaagattgcgaaccgggcctcgagtccatagggctagctggctagccctgcccaggtaggggaaccgatcgagccgacaacaactgagcagcactgcaggcttgcagcagagggacatgcggacagcagcactgcaggcttgcaacagagggacagacggacaacagccagccaccaggacatcccctcaatttccacgacgcttcatgagtggagggagacacgatgcttgc

SEQ ID NO: 88137 - DNA, 479 bp, Zea Mays
gttctagtttcaggtctaagtattgccatgaaggaaagagtggtggcggttctactcgtttcaaggagcatttagcacatcaagggaagggtgtcaagaattatccatttgttactcctgaaataaagaaattatttgctggtgagctagataagacaaaggaaaataagagatagaggatttagcagaggcaacaaacagatgaagcagcaagaactcattatggtgacgaagaatgtgatgattatgatgctgaactttaggttgcactacatcagtctcgagaggagcatgaattcagacaaagagcttgtgcacgataatgataggggtggtggatctaggtcgagtcaccgagacaacgttaatagaggatagacgaagagactacaatcttggtgtaagctctggaccacgtcaacagaggatagacactggtccatagaggagtaagggtaggagctcaagagagattcttg

SEQ ID NO: 88138 - DNA, 555 bp, Zea Mays
gagaagaagccttccccgaaaatctctaagaaagccagaacgaggcagcaaatagcgcagcctccagcgccccgggcgaagactacctcctgcaagtcaggagccgagaattcatttacccgaagaaccccgttgtccacctcgtccacagaagagtggacatgaattacgaggaaaaaaagaagcaagcaggatagaggcccaccaagctgctcttctagcaccttcaccctcaaagaaggacagaaagaagtttgtcaccacagcaactcctttctaccccgatgtcctcttcatcgggggaagagtggaatcatctcccatctccgacgacgagccatccgtgcctggggaagaacctcctcagcgagaagctcgccgacggaggaatcgacgccggaatttttggcgacatcacgaagctggggaacgggacccggcacagcctgtatcccgagttgaaatctcggaggtgagagaaactcccgacgaacgagtcttcagagaaaggaggaactctcgccgatgtgatcgccggcaggctcaagagcaagc

SEQ ID NO: 88139 - DNA, 3473 bp, Zea Mays
gtaagatcctgaataagaatcagtagaaacagcttgaagatttttggttgtttctggaaactggagataaacgtctgcaagatcctgcagccaggtgggttgagtaacagaaactgcgatgagctgatccatggttctcctcgacaaggcattggccaccctgttgttttgtccttgtttgtagcatattttatatctcagtcccaaaagtttggtgagagccttttgtcgccattgagtggtcaggcgttgatcatcaaggtgtaccagactgcgctgatcagtgcgtatgatgaattcgccccccccccccaacagatacgagcgccaatggtccactgccataagaatggctaaacattcattttcatatgttgacaatccaaggtgccgtggacccaaggttttactgataaaagctattggatggcctgtttggtgtaaaactgcccctatacctttgtccgaagcatcagttttgatttcaaaaggttgactgaaattaggcagagctagcactggcgcagaagtaagagctgtttttagggccataaaggcttgttgttgggtctccagccatacaaaagattgtcatttctttagcaaatttgtcaaaggttgactgatgatgccaaaaattttgacgaattttctgtaatacccagcaagcccgaggaaactgcgaatatctttcacatccttgggtgtaggccatgtcttgatcactgctaccttgtccgggtcagttgcaactccctctctgctgaccacgtatcctagatagtgtagtttgttttgggcaaaagcacacttcgacaattttaccttgaattgatttttgtccaatatggagaacactgccctcacatgtgccatgtggtcttcccaagtttgactataaatgagaatgtcatctatgaagactactatgcattttcaaaggaggggagctaggatagagttcatggtgagttgaaaggtagctggaccacctgtgacaccatatggcataaccctgtactcgtaatgtccattatgggtctggaatgctgtttttggcacatccactggttccattctaatttggtggtatcccgaacagagatccaaactggcgaaccattatgatccatgtaattcatccaataactcatcaataattggcagggggtatttgttcttaactgtcatggcgttgagccggcgataatccacacacaatcgccaatctcctgttttcttacgagccaagatgataggagaggcgaaaggactggaacttggttgtatcataccactttggagtaattccgagatctgtcactctatttcatttttttgagccggattgtaacggtaaggtctcaagctaaaaggtgaagcacccggaagtaagggtatagagtgatagtgagaacgagggggaggcaggcctgatggtttgtcaaaaagggagctatattcgtgaacaaggcgttgtatctcatctaggacagcggttgtgagatctgagttaacctttgtatgtaattcaacagtacaccagagttcatccatcttttccaagtgatagagatggggagcggaaatgtgatccattgtgaataaatctaggaccagaccttgcaacacaactctctgttgtccaactgtgaacgccaaccatttttcttcctagtgaatttccatcggacttcgtgaagttagccaatccatacccaagataacgtcatagcactagagaggtaacactttaaggttcaagtggaatgtatggccttgtagagttatcttgcactgagggagataatgggtgcagctaatgatctggccatttgctacctgaacttggaccggttgggaaagaggaattatgtttggacccaattttgctagaggttggctgatgaaggaagaggagctaccataatcaacaagcatgataatcttttttgtaaataattgagccgtcagtttcactgtttgtggagcttctgttccttgcacaacatgtacagacaaaaccataaggtcgtccccagagtcttctgatgtagtcttgttttccacaggagcttcatcagtttccaacagttgccaaagttcttcaactatatggagaggaacagttgcactacactgctgagttggattccaacgtaatccgcatttataacataacccttttgccttacggtaagccataagagctgcccccttgaggtcatcctgaccccttttgcgaaaatcaggtgatgtatgtttttgcatcccttgtcctactgcagctggtggagatgaagttgtgtgttcaaactgccgataaacagatttgtgtgttgaagaatcattcagtcggtttgatgatggagacaccagcggttgcgccaattcttcctgtaacaaagcgagagagacggcagtatccaaatcgatgggacgatgaataagaactatggcacgaatttctggtgcaagaccatcaatgaatctatttactatggcagaaacactaaattgaggatcatgtgcaagaatttggtgcatgagggtatcaaactgttcaatgtattcagtaactgtatcactttgtgtaatgtggaaaaattgtctaataagagagttgtgttgatcacgctcaaagcgagcacacactgcagcacaaaactccgaccacggtgccagacgcaacaccggatcagatgactgtaacgagaaggccgctgacccaacaaaatgcattgttgcaatcttaacccaaagctcccggggtacgatgaacacatcaaaataattctcacttttagccttccacattttaggatgatgtccgtcaaattgtggaaaattaagttggggtaaagttgcagctaaacgtgactgatacgatgcccaataaggatcttgcgcatgaatcaccggagtatgaaagacctcaggcggagggattttagatgtacctttgaccggaggtggagtcagggtggtcaccaccccaaatccatcgctccggtgcagagatgcaaggtgaagatcgtgctgtcctggactcgcctggtgcagcgataatcccagtgaagttgatggtaagaacccagcctccagagccccagcgtcgaacaccttcggaggagtggtatgcgcttctttactcgccatcaattcatccaacttatccgacagagctcccacatcttgacgaagattcaacacttaagtttcgatctgcggcttccacacagaaaaatccctcacagctgcggtattagcatctaaggactgcttgatggattcattttgcagttgcatcgcttgtagaagcgtcgtgagatcacccacgcttttctccatggtttgcagatcacgttgcaggcgagtcttgtattgcggacgaagaagatactccagaggatccactaggattgcaaccagaatccgataccaatttgtaagaccctcgacaactctagatt

SEQ ID NO: 88140 - DNA, 415 bp, Zea Mays
atagcaatagaccaaaagaaagtagaagtgattcagaactagcatgtacccacatgtgataaggacatttgtagcttcttcggtatgactggatatcatagaaaatttgtggcacattttggaaacattagcaaaacactcactgccctattgaagaaagacaccaagtcacctcctctcccaaaccttgtcggcttctctctctaaaatcctatggcctttatacttagcagtgcagatgacaatgtcgagcggtaggcacagcttcaacactaagactagccacacaatgatgcgaccagtttgacctcttgggctttgatggcgatggcaaggggggttggatcaaatttgccgtactttatttatttatgtccacaaccgcacattgttgttagcattagatttggttgta

SEQ ID NO: 88141 - DNA, 584 bp, Zea Mays
ggtgattcttggatcggggagagattacaagttgggaactatgagtgttgtgggtcaaggtgagatgaaaatggtaagggtgtctcctggccttatatacacgaccaaggatagttattcccgcacaagtgataaacgtaacccattcgtctatctccctgtttgtagcgaaccatcttcctacatctctggaatcctcttcactcatcttcctacaatcacacctacaacatgcagatattcaatgtgtattgatggaatttgcaaagttgttcatagatccaaatcagctacctccatccagagtatatgatcactatatccctctattgccaggagttgtacctatgaactctagaccctatagatattctcctttccataaagatgagatagagaggcaggtgaatgttttactagaagttggtttgattactcctagtgtgagtccctttgcctctctagttcttttggttaagaagaaagatggatcttggagattttgtgtcggctacatgaaactcaatgacatgactgttaaaaatatatttcatatgccacttgttgaggagatcctagatgag

SEQ ID NO: 88142 - DNA, 613 bp, Zea Mays
tcccttttgcaatgagatgaaaatacctagtattctcatcaccatcatttatgaatctgtctctcacagtttgttttctcttacacccttcttcagccatcatatttttcagattccactccatttcaagtttttgaagtctttcataatccgaaatacccataacttcacttctcttatctaaaatatcaattttatacatcagctctttcttgagtttcgaatatctcccttccacattaatattccaacctttcaacattttttcagtctcttcgttttttctttcaagatatcaatgctttttctgcctctaacaggcaacgaccagttatcccagactaaacttttaaaatctgatctaagcctctagcacaattcatacctaaagtcctactgagacgaagggacacatgatcagaaaaagtcctactgagtccataaacactaacatttttatagtgaaggtcccattctagactggcaagaaacatgtccaacttttcaaacgttgggggatctctgttatagagcctaccatttagatcaagctctatcaagttgtgaaagtcaatgatagagttaaacaaagaactccatttatttgtacccc

SEQ ID NO: 88143 - DNA, 567 bp, Zea Mays
aaaacacaaacacggagggtggggcggacctaggagcagctggccgcgatgaggtgctacacgacagcgcagtcaaccaatttgggggaaaccccgaattcagcggctgtagtggctaattgaaggtgggaatgggtgctctggctttgtgataacatggtgcagcagaccgggccatcaatttatacgggcttaaagtggtggccagtgaatttggtcttgcacggtggcggccggagaaagaggagatcactggtgcaagcgattggtggcatctactgtggcggctctccgacgatcaccagatatagataacccgagctattgcgatgtggttaagggcctgaggcatggtgcagtcgcggtgaatgacgtagactccagtgacggccgtaaagccatgtcgccggcgcaagtggtcgagggacagcgaggccacagtaacccaaacccatccgcgacgagatcttttcactgctgagcgaaatccacttgcccaaatctcatggtttcttttgtaaatcttcaaataggtgaaccataagacttaaggtaccctaatcccat

SEQ ID NO: 88144 - DNA, 833 bp, Zea Mays
ttcttcacccagccgcacacgcactcatgccgattacggcggtaacaagcatctgattggcatgacaaattgtgccatatcccaacaaaagaccagcctggcgataggatctcaacaaaccggtcccaccaccacgctggatatatacgtcaggtggcacattgccgaaccatcttaataccactaagggaagggagagagaggatagcatcgcttgggcctcgcctccgccgctataccgggtcatggaggggactcgaagatttgctcaagctcggggatcacgttagatgtatggctaaactgcgggagtgcgaggtagtgacgtaattcctcgtcgaagtggcgcagcgctgccgatctgccatgtgccgtcgacaaagctctgcgtcgtaagggttccggtaagacaactccccagatgttcaccaacgtccttactttgggttgcgttgttcggatcgggtttgggttacctggtgttgtgttagggcgctctggcgagccctccgccatggccttgggagaaaattgtgtctggcatccgtcctggtgagaagatgggggcccaaccgtcaatcctgggattgagggctgggaggaagagagcgagtgtgccgtcgatcggtcgttgggcggccacgattagaagcaacttacccctctagcttgattaaatcagatacgtcgagatcagatccgagggcttgggattcgtcatggcgtggatgttttggggctacagatctctgatcctgcggtcctggtgtcgtaccagttcattaaatgatttgatggctatcgtctaatattgatcctgcacccgagatcct

SEQ ID NO: 88145 - DNA, 740 bp, Zea Mays
ccagaaccgagcggattcggcgaacccgcaccgtgccgcgaaccactatgctcggcctctcaatcaccagtaaatactaccttagtattttcgcggtagttcgtccttcctcttgcgcttgttcagtcgtggtttggtgcaccctgagcacgtatccactgcaccggcgaggttggggaatggcgccgccgtgtggagacctggccaccgcgtgttggggaattaggcgagggagagagcctcctgtccgttcgttcaggatcgaacggcgtggattagatgcagctggacggtaggtcgttttgcgctacgccgttggatgtgagttgggcggctcagatctgatggagagcaccgtttcagacagggtagcgtggatcgttcgatttgatcggagggctagggttggggcacatcttcgttaaacctcgaccacagatctcagatcgtgcgcgccagaacagatcgcgacattttaaaatcgggggccatcggatcgtgatccagtggcccataatgcaccgtaccccttcggttgcgcgttttacagaaaaacccccgcagaattacacaaacaacccacggtctgcggcagtgttagcctgagtcttaggacatttcccgtgtatgcccctgcgcatttctgtaattgaggcccagtccagagaatgttaaaatcagggaaaagatatagaaaatgagtttttaatgtgaaaacaattcatagaatttgtataatt

SEQ ID NO: 88146 - DNA, 608 bp, Zea Mays
actcagaaccagcagaggaacaactctcagaccaatcaaaggtctggtggtaattcgcagactcatcaaggaagcgccataaacacacaggccaaaagcaccaacaatgcaccagtccaacccaatgttgtttcatgtgcggcgaacttggccattatgctaacaactgcccaaggcgcaaccaacagacacctcagaggaacagcagccagagaaatgaccagaacacccctgctcgtggatctaaacagaacaaaactccgcagaacgagaatcgaggaagggttaatcacgtgacagtagaatcatttcctgaggatgccgacgtggtgtatggtatgtttcttattaactccatacctgctttagttttatttgactctggagcatctcattcatttataactgagccattcatggaaaaacataacataccaaagtaccctcttaagaagatgctacatattagttcaccgggaggtgatatgaaggccacacactcatgcctccatgttaatctcaagattcaaggaatagattttctagtcaacctagtggtcctaggatccaatggtattgatgtgattcttggatgtgactggttgaaa

SEQ ID NO: 88147 - DNA, 498 bp, Zea Mays
attgtttggctactcggcaataaaggtttttctgtgaactctttgtataaaaagaagatgtgcgatcaagtggttgttccatacagattttttttggaaatcaaaattaccacacaaaatcaaagtttttatctggctggttgtgagaaataaaatcctcacaaaagataacttaaaaaaagaaattggcatggttttggtgattgttgtttctgtggtggctctgaatcgattgaccatttattctttaactgtgccattgcaagatttgtgtggagagtgattcaagttgccttaaagctggatttcattccaaaaaccaccggtgagctctgtgatagttggatgaacaatcctaagaataaagtcaccaatttgctactgtttggttgtggtgttgtgttttgggcaatatggagaaccagaaatgattggtgctttggagataaaattctgcttgatccttctaacgtagtttttctctgttgcttttggttg

SEQ ID NO: 88148 - DNA, 662 bp, Zea Mays
gccaggttgttgctctagcactttgtagctactttcatgttccccgatgcttctgtcaacaatatcagttgggaggtgctgcaaatccttaatcaggagtgggagaacataggtcactacagctaaggcgacaagatccaagcatggacgtactgatagctctacatagcctgtcgtcaatacacgacgaacaccaacataggtggttgtgcttacctggtttaggtgtggtgctgggagtgttggccagaaggcctaaccttcgtggtttgcctataaataattgtaatgtcactgatttttaatcacttgcatcatttgattatatatgctaacataatatgcgtgttacttgcagatctagaatcaccaagatggaacccgtttggtgtgactatagctctagaaagaggtaaaaatatgagagggaacccgcaaagatgttacagacagtacatggacttcctcgacgtcttgacagaacaataggttagcaacttgcgcttattatcatagttaacacgttgtttccctgatattatttctcattgtaagttatttggatgccttgggcatgatcagagcgagacccttacggtctaagcaatattactgagtgtgacaatgacactcagatgtgccacttatcttctacgttgtgg

SEQ ID NO: 88149 - DNA, 322 bp, Zea Mays
gtagaaggtgattggctacctgagtaagtagccgccggtagcctttcgtatctggggttcacgagagatcgtcagctatctgcgccagtacccctccgacctcacttggcgtgttcattgcacgacaaaagtcggggtacatgttccgagcgaagagaggattctctcgccgtagcctagcggcttattcggtttgctctcgctctcgatcttgagcttgtcggcgattgcggcggcgagagttaggcctttctcattgcattcgttcatcgtgagtctctcccatctctgaggcttcgtctcttgaaacgagctgcgccag

SEQ ID NO: 88150 - DNA, 506 bp, Zea Mays
aaagtaccacaaataggtgacaatgccaaattagtaaccacgacgataaaatcaaccgatcaccatattatttgtaaacacaaatactacgtaacatattcatggagtgtatgtatatcataaaatatcctattttttggtttagtcaggttacaacacaaacttacggagcaaacagagaactgaatgcatattgcaagaatacaaactaagggtgtatgctatgtcataggctcatggtttttcttccctttcaggtgacaatattgtcatctggagtcgtcgatcttctggcagagacgacccaacaactttctcaacaactttctcttcgtctcgccctaatcttctgaagcagtttgagcttcgagctgttcaataagattcttcaaatttcttgactgatgcttctcttgcactaaattcacctgcagggagtcaagttctctttcgcactctacaatgagaacaaccttccacaccttctattttctggaacacttcgc

SEQ ID NO: 88151 - DNA, 588 bp, Zea Mays
taacaacatgacctacataataggttacataacctatcctaccaatctagaggcaaacaatcaaaccagattatgactaatctcatttaactcataagccacctactaaattggttgctctaccacttgtcaccaaccatgagtagaagatctaacccaacctgtagagtcatgatgaactgcataatatgtctatccccacctaacatcaaacaagattttgatctacatcctgtaggctatctcacccttgtctatcttaaccatattcccccaacttcgatggtatacactaaccccaaaacaatgagaccaagatcggagaaggaaaagatcaacctcgtcaaggaaggagaggaagtcgaacccgatcttcaaatgcattatcacccaacacgaaattctttctcaccataaactttcttaccctaggctattcttgccctaacctacctatcttttatcctacacaataaggtcactatacatatatatacccatgctttcataaccactttctaattaacatgaaacttcttattcttaaactaattagaagttaaaggctaaactataaataaggctttt

SEQ ID NO: 88152 - DNA, 412 bp, Zea Mays
tggcgaccaagccataccatctttggaaagtcaaatattaagcaaagtcatgttgatgttatgagagaaagatactttcgtgacatgtctattgtaagggttggaggagacagcaccgcccttgctcctgaagaaaatgaggtggttatttataaaagctttttgaaggcggttcttcggttcccattaagcaaattttcggttgaagtactaaagatatttcagatctttcttcatcaacttactcccgaagctataattagaatgggcttattttttgggatgtaagaagccaagggtcagaaccgagcacgaagtgtttttgcagtatgcatgaacttttgtacgagacgaaggccaccgacaaggagcagtatcacaacaacttcggttgttacggattcattgctcg

SEQ ID NO: 88153 - DNA, 793 bp, Zea Mays
ctgatgatgaaagctgtattggttccgttgcaacgcacgggcatatacctagtaaacagtagaagacggtacaaattaaagccaagcgaacagactagtcttactaaaaaattgtgagtcatcgtttattgttgtgatttgttttttatcacttaaggttgtttcagcaattgagcatgatttaaaattttatacttttcaataaatatcgtctgatcgcttgatttcgctcttcaacctattgggtccagtagttcagattcaaatctcgctggtggcaatggtgggtgttgattgttgaactgctgatgcagcaacgagcgtggtgcagcccccacctgccacgcaaaccaaccggctccctccaacggctcagctagataggccccagctgtcatagagccacacctcgtacgtactcccagcacaatgatttcaaactagtcgggctcagttctcaccatctcgcctccgcagtccacacagagctctgtcgaatcgctagccgggtcacccaatcgcgtgaggccacgccagtggccacactgtttactgttccaaatcgtagtagactagtagagcgacagcttttctcgtacggagacaacccaaccactccgctataccacccgtcacaaccgtccatcgcacgcatcaagatccgcgcggcgtgtgccctctcgtgagtcgcatgccgcgtcgaccagaatttgaaaatgccgtgtttaaaaagagccgttgcccgtttccaaaccacagccaggtggggcccagtccagctcctggcccgcgc

SEQ ID NO: 88154 - DNA, 709 bp, Zea Mays
gtaacaccccaggtgttacttagggttttcactcaagcctacactagtgaacccatcatcacatgtggtttaatttgagcaaaagacaccaaacttgggggtcaagatcctaagtaggtgtaacccatcttagaagtcatgttttggccttatcatgcacctaaagaggagagaatggctcaaaccctaattcaaatccctttaggcaaatggagccctagaggggagtatagcaaaaaggctatgtgaaccacattatcatgacttgggctaattataaaagttgtattacacttaataccctacaaaaaatagtaagagagtgaccccgaaaaggtttcagaaaaaccccaaaaagggtcaccaaagagaagggcataaaaaatcagatttttctcactttcaaaaccagctctctttcaaagatcaaacatgttcacatttttccaaacctcaaaaatatagggctcaattaacaaaatggcacctaaagacccctagaacaccctggaaaaatttgaaccccaccctaagtcgtttgacacgacttgacacggtttttgtctcgggctggacagctcggatagagccaacttcacaccacaatatctctcaaccccgaccatatctttgcttggaactcacatggaaaagataggatatggtgcagagaagataccttacacgggatttttgctgagatctacac

SEQ ID NO: 88155 - DNA, 291 bp, Zea Mays
gaagatgtgtggaaacatcacaagaaatgccaaatcagccaacaaccatcgaagccatacaatctctgcaatactagtagcaaaagcttgaagttcgacctctgtactagaacgagatacaactgcttgcttcctggacttccatgcagtagtagaagagacaggaagaatgcaatatcaagggatggaacgtcgatatgttgggccactcatccaagttgagttcgagtaagcatgaacctgaagtggactatcacacacatagaataaactctgagatgatgtcccccg

SEQ ID NO: 88156 - DNA, 604 bp, Zea Mays
gtagggcccgccaagttgcaatgcactaggcatataaataggaacccgcagcgacaacatttgttgcgccatgtcaattgcttgtgctattttttcaagcttgaaatttcttgctgtcagatttcgatttatttgtgagcttcgtcatttacacaagtgctcgttagatgtctgaagagaagaagatgtctaaggagaagaaggctgtggaccctgctctagctgggttttacgaggctatggaaaagacaaacacgaaaaagattacgaatgaaatattagctgggttgtctgcggattctgatgatagcgagaactttgatgtggaaagtgggaacgaaaatgccgaagatcggccctagcggccaagtcatactatctttggaaagtcgtccatcaaacagagtcagattgatgctatgaagggaagatatttttgtgatatgtctattttgagggctaggggggacaaggaggatgaagttgttgtttacaggagcttcatgaaggaaggacttcggtttccactgagcaaatttctggttgaagtattaaagacttttgaaatctttcttcatcagattactcccgaagctataatcag

SEQ ID NO: 88157 - DNA, 1111 bp, Zea Mays
gttccttatcgttggatattatttgtcaccacctttttttgcaggggatattacaagaaaattagttgagcctataaaggttaccgtaccagttccttaccattggaatattatctgtcaccaccttttttgagcctataaaggttttctctaagaaggacctactttgcatctagataataagtggccaatccggataactgcaatgcaaagagtggaggatttactgctcggaggttcctgaatgtttctttttttatatatgttggttgtactgtgcactttcaaatatttatacttctgagttgaagaagtgtaatacttcttctgagggccttctctatttcatctttttaccaggtgctgcagactatttagactttcccatgctagaagtttagtcatttaggaaaaaatatatggtattgctctggccattttcatttcatcttgtttgattattgcactttatgcacagatggtaaggaactataaggtggctcgtatactaccaaggattattgaatttgcaaagaatgatagaagtgttgttcttggcgccgagtatgagaagcatcgatatggtatcgcaacaaatagtacttgatgggagcctacaaaatgttttccccaattgcattccttttagaatttcaccattaacaacatgaaaattctgggtccgaactatgtttgtcgtgaagttgcagccctgttgttagacccatgctaggacttactttcgtgaactgatttttaggttatcaaaaaatggggtgctccaaataagagaccatatcatgtttatttatgttaaacttattagttatcagatttctcataagttggatgtatatagaagacacaatagaatgattattagtgagtatcaaattcagatggttattttccacaatactatttgttctgataagttttttattgcttctttatagaattggttgctcttttcacaagttttgtgttatatttgtgcacgtaacaatgctcctttgtttcttcctaaattcttgcgttgttagtgcaagttccaaatccactgttttggcaaccatttatatgtgacatcatatagatatatggatatgga

SEQ ID NO: 88158 - DNA, 549 bp, Zea Mays
aacagatcgacgatttacgctaaattcatactcatttacgctattttggttcatgttttacgtcgaaatctgtctgagccagaacccgcgcacgatcggacgctcgcgattttcacggcgtaattttcgagacccattcgccattacgaaacaggtctacgatttacgctaaaattcacactcatttacgctgttttggttcatgttttacgccgaaatctgtcttagccagaacccacgcacgatcggacgctcgcgattttcacggcgtaatgttcgggacccattcgccattacaaaataggtctacgatttacgctaaaattcactcatttacgctgttttggttcatgttttacgccgaaatctgtctgagccagaacccgcgcacgatcggacgctcgcgattttcacgacgtaattttcgggacccattcgccgttacgaaacaggtctacgatttatgctaaaatttgtactcatttacgctgttttggttcacggtttacgcaaaaatccacccaaaccagaactagtgcacgattggac

SEQ ID NO: 88159 - DNA, 999 bp, Zea Mays
gtgtttagggccatccgattacgatccagcggtccggattcaattcccatcataatcgaaccggtacgcatggtagaccgttagatcagcaatggacggcccgccaaacacccacgctagagactgcatctaaccgttcgatccgcacgaacgtataagattcaattatgctacggggtcaatcctggccgcccgatcaaaccgatggtccagatcaatactcgaagtgatacgcctgttgtctaatcatgaccgttggttaggatccaacggccgacgcctattccctatcacatgccgtccgagcccgacagcgcaagggcacgcacggtggtgccaccgccagcgaacggtagaccatcgccctagtgaacctaatcaccccccgctaggtggtacacgaagataagggccagagtactttagtgtggcactaaccataaaggacgatggcagcgaaggcaggccccacggaatggtggtgcaggtggcaatccgtggctccggtgagaaattgtgagagacccccgccacgactcgccaagccagagccatcaacacattccagacacaagggtgagtctcatgggcctgtgatcaaaggtttgtcgcaagcgtgcttcaacagcgacgagtactccctcgcggcgccagttccctccccgccacacttcttgtcaacgatgaatccctgacttcttttatacctcgagcagcgcaagatcttcggagaaaggaggcatggctatgccgagcacggaaaccgcgggttgttgtggatttgccacagggtcccgacgggcgcggcgccaaacctgtttaagcccgtagccgggaggagggaaggtaggtggagcttatacgtagatggccccactcgacagcgagtcatccgcgacgagcgccaaggtcaaccggagtcacgggcacagaattggggaaaaggggctgacgtactgggcccaactgtcagcgagagtggaagaaggcgcgcaagct

SEQ ID NO: 88160 - DNA, 881 bp, Zea Mays
gcatgaagttagggctcgaatataagcatgatctagtaggaatttggctatagttgttatggcaacattgtagctgaatcattggtctacaactttgttgcagagctttgggtgggatgccaaagaaaattgagagaaaattcgccctaaacatagactaacagactgtctgaatgagcctcgcgatggtacagtactgaaacagatcgactgcccagccgttcaccgtcgacgatctctccgccatgattccagctgtcgctacgattcgtgttgcgggaaaggggataagcacgatggagtgaaaatctcggcactggattagctcgggctcagacacagataagattcgtcgtacccccttgctcatcgatcactcgggataggatctcgccgtcgttgagccatcactgccgtctgccgcgtgtccagacactttaccacgtcgcggctaaccgtgctacgcatatccggtgatcaccggaggagccgccacggtaaaggccacgttgcgtggccaccagtgactcatcctgtttttaccgatcacgctccgccgctcaaattcgttgtgctcgcgatcggtctctataaattgaagccaccgtgagcttcgcaagatcatcgcgtacccagccacccagtattgccctcagttgatcactagcaagctccaatttcggatttcccccaaaaccttcaagaacaccgtgtgagttgatctcgccgtggtcacccacttccaggtctgttcatgctctctgctgccttgtttcagcattagtgtgcttccctgatgctcctcgaccaacccaattacgctaagtcccccttaatcaccaggaacgcgatacccattcgagtgtccgcgctgtttccat

SEQ ID NO: 88161 - DNA, 481 bp, Zea Mays
atgaagacgaaaaagattacaccatcttgatcccagaaaaacctagtcaccttgactttggtagatctactgtgacggcagatgatatggttataatgaaaaaaattgggttactttggagaagccgagagtaggcttgttcgttttgctggcgaagaagtggttccagagccaaaggatgatgaagttattgtgtttaaaagcttcttcagggtggggcttcggttccctctctatgatatgataggagaggttttgaagaattttgaaatataccttcatcaattgacacccaacgcaattgttagacttagtgtctacatctaggccctccaaagccaggggatgagtcctaatgccgaagctttctgctaggtgcacgagctgcatcaccagatgaaagctagggcagatggccttcatgaaaattttggctgctacaattttgcgtatcgaaaggatacaaaggcaccaattctta

SEQ ID NO: 88162 - DNA, 715 bp, Zea Mays
gtctccggtgaggtgggttggacggcatcgacgacgagcggtaggcggttccgaggaagcagagaaagaagcaccggtggcgaagggcgatgctctggcaaggggcaacagggactcgttgtcacgctgttcatgggaagcagagctctggcaagacgacgaccgacgggcagggagcagcaggcacggtgttgcaatttcagtggtggggacgacggcaagcatcgagcagcagcagcagcaggcacggaggcgagtgtgatctcggcgttgcgaacggcgacgtagtgcgtgcaaggcgcaggtgggcagaaaagtcagagcgagcgggagagaaaggagaacgaggctgtagggacaaagagcgccattgatgggcgcccctccgctacccatgtgtacgccgctgccccaccattgatcgcatctttgcctgctgcagtggagcagccgccgcctccttttctccccttccccactgagtcgtcctcctccatcgcgccattaatggcgtcgacgcttgccgcttccttccctggcaccgttactctttccctggcttataaatcgtgctgtcgcgacctcgtcgatccatttctctaattctcgatcctgctacatgcccttgccgtgctatccaacgcggccacagttccgtactcacgtcgttcaccaccgcgcgccagtcctcatcgtcaatggacgagcccgcgac

SEQ ID NO: 88163 - DNA, 484 bp, Zea Mays
cactgtggcaatggcaggagaggaggagaagaagaggcaccaagctatggactggtcatagagccatgccaagcttgcgagctctagtgggcctctagctcctaacgaagcaacaactgataggcagggttgtgttcatccaggaacgagcatgtgtaaagcgagctatccagccattgttgctaccactcttttgtcttcttctcatcctccttgtcaccgtatctgcggaagttgctaaccaaggtggatgctttcttcagttacatgaataaacagaatcacaagtatggccagggaatgatgcaagcatgcaacacaacaacaactttgaatgctctcgtggtctgtaacccttagaaatggaaagaaaagaaatgagactgcctaagacaacttcttaagtatgaaaactaaaggaatcaaagtggatggagttattgtatacataatcatatggcgctagttgcaaacctaatccaag

SEQ ID NO: 88164 - DNA, 632 bp, Zea Mays
tggttgtgatgaatcaaacatcattattgaaaatgaagctttggtaggaagagtaaatgctctaactcatgacttagagaaagcccatggtggaaaagctaaagtagattttatattgggaagccaacgtttctctcttaatcgtgagggtcttgggtatcttactaagaaaggaaataatgcatttgtgaagcaaaagaccatgtttgtgaaataatgtgacaaagtgtgtcacaaatgccacaataagggacatgtcaagaagaattgtcctaaaattaagaatgtatccttattttgttttgagcattgctatgttctttcacataatgcaaaaggtgtacatgctaagtttgttggcacttcaattgttggtaccaaaaaaaagccatttgggtgccaaaatccttggtcactaacatccaaggacccaaacaaatttgggtacctaaaagagattgatttccttttgtaggtaaactacaaggcgagaggaaatcattgggtgttggatagtggttgtacacaacatatgaccagggatatggggatgttcaccgaaatgagtgaggaaggttgctcgacctatgataacatcacttttggagacaaccgcaaaggaaaggttaaag

SEQ ID NO: 88165 - DNA, 903 bp, Zea Mays
atccaaggtggaggccgtttcaaaatggaaacagccctccaacgtcagtgaagtacgaagctttctgggaatggccgggtattaccgccgcttcatcaaaggattctccagcatggcgaaacctatgaccgaactcctcaaaaaggacaataagtttgtgtggaccccaaagtgtgaggaaagtttccagatcatcaaggagaagcttacaaccgcgcccgttttgacactaccagatatacaccaagatttcgtcatcttctgtgatgcttcaaggcaaggcttagggtgtgtcttgatgcaaaatgagaaagttattgcctatgcatcccgcttactcaagccacacgagcagaactaccccatccacgacttggaattggcagccatagtacacgctctgaaaatatggaggcactatctgattgggaacaaataccacatcttcaccgaccacaagagtctgaagtacatcttcactcagccggacctcaacctccgtcaaagaaggtggcttgaattgatcaaggattatgacctcgaaatccactaccaccccgggaaggccaacgtggtagcagacgccctcagccgaaaacctttcgggattaaagggaccaactttttagaagattggaagaaagaatcagctcaactaaatgcatgcctgggagacaacggtagcctggaagtcaagccaatgctagaagatctcataagcaaggctcaacgcctggacgcagagacaaccagacttatggaaagagctcgcaaggagaaacttccggatcttaggacagatgagcaaggagtcctctggttcaaaaaccgtctgtgtgtaccaatgggagaggcacgggaagtcctgctcaatgaagcccacaactcagcttactccatcca

SEQ ID NO: 88166 - DNA, 437 bp, Zea Mays
ggcaccaaccttctcactgcagcggtcagacatttcataaaaccctggcagagacatacttccaagtatcactggaagagaaacatcttccttgttgcaactgtgacatccagggccatcattgctgttatcaacaacccaatccatgttgttgttccaattggcagagtcgtcaaaaccaccagagaacatgccaccacctggagctgtgatgtcaaaggccctgaggcagccatacttgtcttccatgatcctgaactcgacagaatcgccgaccctaagattgtggttacctgagagtttgtgggacttgaggggcggctgtagaaaatacaggaactcaccatagtcgattgaagtgatgaaaccgtaaccggtggtggcgttgaaccactccagcgtccccttcatcatcttctccgatgacatcgtgattg

SEQ ID NO: 88167 - DNA, 838 bp, Zea Mays
gtttagttaggggctgatttttgaaataagaaaattcatgattttcttttgcttctcatttgtttttggcatgcttggggatttttctaactctttttggggtattagtcttgctaacttttgttatccattttatgagctacaacatttattagaggttcattttatgattaggtgatttggttagtgtccttgttgaccttgttttggtgttccatttgttgaagggtggggggtacttagggtttagccacttctagcccttttatgtgcatcacatggttaaggttgaccatctatgataattaatacttgattagggttctaacccaagagtatggtgactttttgcccaaggaagacacatgtgataataggtcatgggtgtgtattgagttaactctagagctgacaccttaggtgtcacacgctccccgcgtgtgccctaagcgctggtcagccacccatcgcacccatgcccttgtgcgcttataaagcccgtcgtggcctcagtaacactccccgcacatccctaaacccatccctgagcacgcatcaccggaatttcatcgccaagccgagctccgctgtcgttgtttatgacccgactacgcaccatgaggttccccacatgatgcttttgagcaggacgacatcattgattgcgacttgatggtacgtgcagatgcacatcgaatcacacaagggtttatacatgttcgagccgctagaatgcgtaacaacctacgtcctgtcgaggctgaatatttgagtaccactggtctacacgggttacagatgagcagtgggcggtggagggtgggttctcttgttgatc

SEQ ID NO: 88168 - DNA, 733 bp, Zea Mays
cgagatttgtaaggaaaggaatacaaaaggattggcttgtaattcaacttttagtctatacttgtttcaaatatccagagtattttatagtcaatagtggatgattaggaaagcatgggtgtatatatgtatgtctactttattatgtaggatagaagatgtctttaaagcatagataggtttgggtaagaaagtgtagggtaatgaaagactccatccaagatttgtggatcttgattcatttgatgatttagcttgatctttgaaggcttgagttgatgcttatccttccttgatgaggttgatcatcttcgatcttcggccttggaatcgtcacccaagttgggacatatagttaagatgacttgtaattaaggacagatggtgggtaggtcgcatagaatgagtgttgacatggaatgagtgttctatggtataatctagcttcctttggggtcaagcttgattcctattcttctttaatgagattgatctcttccatcttgagctttggtgtattcatccgagtttgagactggaggttaagatagatctgtgggtaacagatgggtagagggtttagtaggtagctatgagttaaatgagattagtcagaatctggttgggttgttttgcttctgaatggtttggataggttatgtaacatatgatgtatgtcaagttgttgggtatggccgagttaatcccagtcaccaatttaggcttaagtgag

SEQ ID NO: 88169 - DNA, 601 bp, Zea Mays
tagatattgtgattcaagaatgcggtcaccttctggtttggaaccaaatttcttcgtggtgcgtggaaactttgccaagccaatgacgaaacaattacctaccacaagtggcggagctccgtagaaatgatggcccagaccactctacaaatataacgatttactactcgtcttttcatttttcgcactttaggggtactaatatttaaaacaatccagtgaaactgtggcagatagggaaagagaatcagacatttgggaataattactaacaatagaggagaatcacaggcacatggtagcaaggagtcagcactcagcacatagcgctcgccgctcaggtggtcgctgcccattggccacggaggcgctccgccctcgcctatgaataagaaaaaaagggaatcgggttgagaaagttgtatagtttgggagaagatgtaatggcaggggcggatttaggcggtggcgcagcgccaatgcagggcgcgcacgtcattgctacaggatcgcagggacgctggagacggactggcggaggtgcagaccggactggcggtggcggatgcctgagtcagagcccgcccggccgcctcggagg

SEQ ID NO: 88170 - DNA, 733 bp, Zea Mays
tgcatcccaccctcgctgtacaaaattgccgccgtaaggagttcggagcaggagaataatgtaccgttgcggcgatatcgggtgtacaccaacgaccaacttgtggggaccggcctcgaagcttcaccaggccaccaaggacgttcctgcgtcgaccacttgcttggaggtaaccttgtgtctgcggaatcgctcaccggagccacacaccacagcgggccacatagcgtcaaggaccgagacttctacgccgtcaacgaggtgagatactatccatccaagttccttggttcccccagtacgtgtagcaccccactaattgatgtttagtgcaccaacgtgtcgttaatggctcataggagtaattcctccgccgtaggccgccacacaccgtgggatgacttccacacgtcaccattgtcggtaatggatccctccctaatttcgcctcatcccccatttgatctagcactgatgcgcgcgtgtggtggtgcttgggatggttgggatggctgtcgtcggtaatggcaccaacgtgtggtgtggtcctgcgccactggtccttccgacgggggagaacgacgtgtcagtgtcgccgatttcaagattcacgtccgagattagatcctggcattttaaagtcgggatcgtcggttagcagatgagtggcctagattaggtttagcttactgtcgcacccgggctttaagggacaaagccgggtgcatctcat

SEQ ID NO: 88171 - DNA, 2077 bp, Zea Mays
ctcgacagtcagggccaggattgcccttgcgttggcctcgacggtggcttggagggtttgtacggccttggtgaggttctcgacggtggtcttgaggtcgtcccccatggtcggcgcggcgtaggaagtagcagagcctggtgaagaagggttgatggctgatgatggcgaagtgggtggcgcaggcgaggatcgccgggatcgtgataccaggttgtcaagggcgtcaaacccctgactggccagaccacagctacgtagctcatagtcgtcgtccgtcttctccagtgaggatcaacacctcaaccgcaggcttgagagaatagtagtagtgtaggagatagtttattgcttgcctcctccctgtggtttacaaggatatatatagccctcagcccattaatttaggagctgataataggaaagaccccactactttggtaactaataaaaaggaaggaacagccccccaatctaggagctaataataggaaggaatcagcccactaatttaggagctaataatacgaaggaatcagcccactaatttaggagctaataataggaagctatctctctttcctagttagccactttccctgccttcctgttcactcgtgcctgctgtgcgcaccgcgtgctccgctacgcgtcgcacatcccgtgcccgacacctcgtgtacgtctggcctctggacatgacactgcagtgtaaactaagcagcatagttccgcatgactgaacgcagcacacaacctttcattaaaacatgcacaagttcaaccaagcaagaatagcacaactcaactaaaataaaagtgtaattgaatacagcacacatcctggtgaattacttagacatggagaatgaaaaaagtagcacttaaaataccaaaatgaagtaatgaacccaaatgaaacaagcaatagtgcactatgtaatttgcatagtacagttcttatagttagtcgttggtatgcatttccttttcacatggcatagaaataatgggacactggaaacgaagaggtctaaggtctaattcaacaaagtaatggacttgccttagggcaaataaggccctaagcctttgaaccggtttttcaagtataagagacaactaagaaattgcatgatacaactctgagcccctaaatcattaatgtagttaagagacaatatatagagagactcgtgcagagacagactctattacttttttcacttaaccccctaaagacccctcaagggactccatattaaatagggttggctgtaatgcccttatgaaaggttgctcaataagcaacaaaacattaaaggcacaaaagaaaccacgaaattcacttaggcatgtacaaccctaagagcatggtgcggtttttaagtaaaagacacagctaagacacatgtagatacaatgggtgtttgtataccttgtgtcttattcaataaaaaaatactaagacatgactcatttatatggattgtactagtgaagttatgtcttgagcttagaaaactgagccagaggtgtgtcttggtgaagcattaatatacattgtacatgcccttaggcattctcgatgagagcttcattgcattatttccaatactaccacatcatcaagagtgagatgaaataaagaatgtttcattacactctcaatacaaagtttcacttcacaatttcatagactacaatgtcaattaaatgttgcatctaaatagccaatacaaatgtatgaaatgaatgaagatgaaacaaattgctctcaatagcggtttcatgcattttccaatgttttggaaataagttgacacagtttcaccaatgtcttgaaaatgagttgacacggtttcatggtgatgaaactactttcatccatttcataataaatatagtgttatatcatctaaaaaatttatgtgccattctaattaatgtatgaaacttctcgtaaaactatgcattgagaatggccttaggattttatttgctcataaatggcatggaattgcaaaggctgctccgtggtacaacaacccgtgtaccctctaatccggagaggaaa

SEQ ID NO: 88172 - DNA, 359 bp, Zea Mays
aaaaatgacataacatattattgaaccaaatgaggataacattcatgcattcatttcattgttcataaaagttttcccctgggttacaacattttaggggatccacccttaagaatagtccaaaaggtggtaccaaaattaatctcgcgtgggttcccgtcctcctaacatgttaaacgaacccatcaaccatgggtggtagaggcaacgctggatgcaggtgaagggggcactccggagggagccgcattcggtccgaaagctggctctatctcctcgggatcctcctctccctcgctgcctgcctcatttgcttccatgtcttggtggtgcatctccaggtggtcgttggcctccgc

SEQ ID NO: 88173 - DNA, 790 bp, Zea Mays
gttgaaccctgaccggggcgatcagtcattcatcgtctccttcaacattcagctttgtcgatcatggaaggcgtcctacttgaggatccctctctcgtccttcgttcgtagatacaaaggcgagtggttctttgttcgcaacctcgaggggagtgcgccaatgttcactagctggatcctggtggctaagcctgagtggccttatggtgaagagaagaagttcaagcgaaagatcggttatatactggatgccatcaccaagcagcatgggcggggccttttcgacgagaggctgatacgcactttcgtgcatcagcgcctttagctgctcacggctcactaaacgatgatgtagcagttcaccggtgacaacaactccgaccgccactccaccaagaaccttgggaagcaggagcttgtgtcgcgtgtcctcgctattacggtggggttacgttagattttctggatgagagtggcaccttgtcgttcgaccaagcgaggttgagtgacctgttaagtttttccttctctttcccctttcctccttgtttgggtctcaatggtgggcgctcttgtaggggcttggtattgtcaatgcctcccttcctcctctccctgaaggcgccgctatcaaggtggagaggaagcaggaagcagatgaggcggccgcagtggtgcgtaagaagcgtcgccttgaaagaaaagggagaagaagaaggcacgctggcttatgctaggccggggggagtatctccccatccactaaaacgaaggacatgacctccatgat

SEQ ID NO: 88174 - DNA, 455 bp, Zea Mays
ctttggtacagtcgacttactatgttgctatacaaaaatcaaagaactagtggtgtgaagttgttctgtcagaaacaagccatgcgaactgggcaatactgaaagccagattcagaacaccatggtctcagtgagatgcagtcgatttgggagcaccaaatatgagaatctaagcagaattgatccatgaatcctatagtaatcttgaatactgttgtttggtaaacaaattttattaatgaagatcaccctgttcttaacaagaattaagagatagagagggtgaaaggaggtcggttcagtaaaacaatgaagatcagagaaccagaaatatctgcagaaggaaaagatctctggttactgtggttttggatgtgtgcaggtgaagtggagataggaacgaccgcggcaagataactacaggctgattcacggtcccgcgagcctaaccggag

SEQ ID NO: 88175 - DNA, 983 bp, Zea Mays
gtttgcttctgccatggttcaacggccgattggagcaccttagcgtgcagatcttggcaaaaccactgtgtacggtctcttccctgcactatatcctaccttttttatgtgagtcccaagccaagatacggtcggggtagggagatatagaggtgagaagttgcatctgttctagctgtccaaactgggacaaaagctatgccaagtcgtgtcaaacgacttggggtggggttcaactttctccagggtattctagaggtattttggcgccactttgtcaattgggtcaaatggttttgaagtttgaatgagggtgaacatgtttgatctttggaaagggggtggttttggacttagaaaaaatctgatttttcttttgtgctcaaccctttggtgaaccttttggggtttttctggattctttttggggtcactttcttactatcatttgttgggtattaagtgtactacatcttttataattggcccaagtcatgatcatgtggttttcatacccttttgttcatacttacttctagtgctccacttgtccaaaggggtctgaattagggtttgggcaattctcccccttatatgtgcataacaagccaagggcatgacacctaagctaggttgcacttatttaggatcttgatttccaagtttgaattcctttactcaagttaagtcacatgtgatgatgggcttggcttgtgtagtcttgagtgaaaaccctaagtaacacctggggtgttacaccagagtctgattggcggttggaccgctgcttatgtgcgcctgttgctgcaattactgccggcccgcctatgaccacgccaactgccgtgcctattcccacggttgattgacccgtgaccgtcgtacttaacgacgttgttgggccatgcgctgggctgcctcgagtcgctgcactggttctgaaaattttaccttttcagactcccgtgacagtcccgagaaga

SEQ ID NO: 88176 - DNA, 948 bp, Zea Mays
atcacaagtaagcagctattttacaaaaaaaaacacacacacacacactcctacagacgttaatatgttgtgttgttcactctagttatttaaaaaaactctacctgcgaggagagaaaccaccccacagcattgcattaagaagaaacttaggccgagaaacaccccaaaggcgaacgcccaagacacatgcatgtggccatgggcatctcgctgcaggtggttcacatgcatagctcagggacagagccgacgagggttgtttttgctcccacaaggagtcaaatctaggacctgaggtgctaccaaggcacatgtaaccactaggctacagacccgttcgccagttaaagttcaatgaagctatgagataacccatatagagttactactgcatgggagatgtgtgcttcatgccaagcaaaatttatacaatttctgaccaaagaatgataggcagccaagacaaccaaattaacaaaacagtatgtctcaaggtatcgcaatagaagcttacatacatgatgagcacatttggcaactttgatagttctggaggaatgtagcctgacaagttattgttatccaataatctgcaaattaattgtgttctcaataaagtataaagactaatgatgcaaatatgcaatgtcagaaacttacaggtgaacaagtgaaggtaatctggataactcaggtgggatttgaccgctcaatgagttgttgttcatgtgactggatgaagatagaaaattcattagggtacgtattccttgataacagagatacaaaccatattatactcacaagtgcttggttttattcaggttagcaaatgatttaggtataagtccagatatatggttctgatcaatctgaatccgattcagattaggaaggaagccaatctcctctggtaaagagccattcaattggtttccattcagg

SEQ ID NO: 88177 - DNA, 653 bp, Zea Mays
ggtagatccacaatcttgttagcttgttgggctcacaagcatcattcttggcttaagcttagctcgtgtacaatgtaagccatgccggtatatctagaacttttctagtactatatccacagcagttgtcccaacttggatgtagaaattgaaaattgggcgaactgtacaaggatgcagatgcaaaaataaggtacccattcagtagaacatgaatgcggatggctgaacagattatgaggaggagagagtacccagatttggggtacacaagggggtagcgtcctttttcacatctgtatccgtgttctgttgacagctaaacaataactaggaccccccattttagtacggatgatgcaataggaaagctgctagaaacagcctaaccatgtggcttaccgaccttacctatttttcttggtgatggataagatcacaagggatatacaagggaatgtcccttggtgtatgcgttttgcggactatgtagtagtgctagttgatgaaagtcgagcagaagtaaatatgaaactatagttatggtgagaaactctagaattaaaaggttttagactcaacagaactaaaacaaaatatattagatgtgattttagtactacacatgaaggagatgttatggcatgtttgga

SEQ ID NO: 88178 - DNA, 563 bp, Zea Mays
attcggacgagtacgaggtccccttcgtcgaattctattgggatgactgtgtggtcgcgctaggccttcgtttgagcttgatatttgttgagggcctgcagggcaaagacacggtctccgtcgatgaggtctttggaggttggttcgtctacatcggggacgactgaagcgcttgtccgtggtgacccatgcttgatttcctgcggggtcatggcctccgatccgtatagcaggcgaaagggagtgaatccagtcgccaacattcggtcgtgttcagcgcccagactgcttcaggtaggaggtcggccatttacccttcttgtcgtcgagaagcattttcttgatggcagtgaaaatcttgccgttggcgcgctccacgatgccgttagattgtgggtgatatactgaggcgaaggcaagcttggtgccaatggagaagcaaaagtccctgaaatcctggctgtcaaactgtttgccattgtcgactgtgagctcagacgggactccgaatcagcaaataatgttttgccagaagaatttctgggcagtcttcgacgttattg

SEQ ID NO: 88179 - DNA, 584 bp, Zea Mays
gttagtaccaaatttctggagcagggagtgtgggttcgacgctctacactattttttgcatggtgtggtagctgtgcgggcggaaggtgaagctgtttacaagtcttcacaacactccggaagagtaacactactcacttgctcaagatcttgctagctctacctcccagcatcacttctcctctctctcttttggcttataactatgtcaagcactaaatatatcacataatataatagagaggggcaaagaatgattctacagttgtttgctaccatggggtatcacttgtgtactggttgaggtcggtgggggcctgttttccagcccaaaggcctcctgtagcggttgcaaataaattggaagtgttttgtccgtgggtgcaccagacctccaacgatcacctgcctcagtgcgatctgattggttgtttccttctctaaaaggactaggcattggttcaccggaccagtccagtagcatgtcttgtgtgccataggacccggtcctataggggtactattgatggtttggtgcataagaccgagtattgtagacgatccgatgtgctttatccaaaaac

SEQ ID NO: 88180 - DNA, 768 bp, Zea Mays
attgagcttgagagcttgtatgaacttgtgagcctgagttgggtctaagtgtgtctaagtgtgtctctcttgtatcgttgtgtgcctccccttttatagctcaaggggggcacgtataagggtgctgagccccgacatgcgggcccatgaacataacggatgtaatacttggagcaactaatgctagttgccagtgtaatctccttgcgccctgatatccacggtctatgtagcattggcgtgcagcggaagcttccctggcaacgtacgagtgatgatgagcatagtgcactccgcagcacgggcgtactgcctgccaacggaatggacaggcacgccgtctgtgagacggcctggtcgccgcctgccagtggagtggacagggcacattaaatgccgaggtggtacatccctgccagtggaatggacatggctcattaaatgctgaggcggcacatcgcctgtcaggcgacgcgtcttatccgcaataaatgcagaggacatgcggcccagaagccttacgtcaggctctgcctgttggcttacgtcacgggcaattggccacgtggtagcatcgggtctccgcctgagcggggagcgaaagcgtacgcggtatggtccggacacgtgtcggttccggacccccgcctgaccttgatcaaggcctgggtattctttgtcccggaatcccgggaccttgttgtgagtggcccggaccccacacataggggtccgggacccgtcccaggggtccgggcacgcccgtgg

SEQ ID NO: 88181 - DNA, 1502 bp, Zea Mays
gatgatttggatgataaagccttatgtgacaccgcgattgtctgtggggactgggaccttttcgaagagtacctgacctacgaaatatggtcgctgagccatgacaaggtggttggagaggtgatcttccatgacattccaaacctaaccaggtaggtgcgaagcccccatttgatgttgacttgaaagttaggtcgggcaaagacttcatcaatgagattgaaggcgaagccaccaagcttgttggcctagtgacggaccatgaagctgctaagagtttggagatctaaaaaggttgcattcaggtgaatcgagtttttaggttgatgggtctatcttatgtatcacatgtggtctatgttaaggtggaagtgggacaatcactacaacaaagtagaaagcagggaaagcagattcgaaggccaagacgccacacatccagttttagctgcccacgatgacctcattcgagagcatggggcgatgctgatgcacaaaccgtgtttgatgccttcgcctaagcctgagcatgggctacccgaccaacccgacccgacccgctcggaaaaaacttgatccaaccaatgtgacggtgggtacgggccacagtttttgacccacaacaatccatgggctaggtatgggctatgatttttgacccaaaacccgacccaacccaaaaaaacacgtcccgacacatctgatagggaggcatgggccaacccgacccgacactatgcacaggtcaggtgtgggccatgtcaaacgacccacatcccaatgctgacccaacccgaggtttgaataggtctaccttcgccactgaccaagctgacacgtgccgatcgcctgcgagctcgccatgcgacaccaatgttaacgatgacaccttcatggacaaggtgaccaggggtaagtttgggaataactagtgtgtgggtgagttggttcaaagagtgtgaagtggtgggtggttagagacacgcctccagcccgtgggtgcaaagatgttgcgctggagagaatagcaaggtcgttgaacatatatccatacttgtataatattgaggatgtcatggcagccacaacgagcatgacaaagggaaatgcactggaacaattatatgatgtcattaacatgatggggtggtcaaaagaaacaaagcacccaggtgaccgatggtgcgacaacatctggtgtgctgattgaggtagcgaagcttgccataatggcaagaacagaaatgatgaaggctatggttgtgacaccaatggaagtagatacaatagccccctagtgatgagtagatggacatcaactatatggtcaaggcccaatcaatcatatagtcccaagctcaaggggagttcaagtccagcttattcgcgaatcaggttaggactgcaggagtagtcctcacgaaaacagacgcacagaccacatatggactccattttttacgttctatatataatttgaaatctaataagataatctttcc

SEQ ID NO: 88182 - DNA, 575 bp, Zea Mays
ccgggtgtgacacaccttttgtctgagcgctccgaccgcccttcaccatcgtccttcttgccatcgacgatggcgccaagaagtaggaggctagtgatgcataagtcaagggcgtataatgactaagtgctagggatgtaccacaacttgcttgggtggatatccttgtaaatgtgtggcaaccgaatgccagctacatggctgatggagccaaggccaaagctggggaagcacatcatctttggcgtatacttgctagcagggttggggttcctagcctcgtcattcccattcatggttctagagttctaaaggatccaactgacacacctctctcttaactccatcctcctcctggccacctttgttcacttccacgaaatgtttgtcgcagtgcacacaagtttatcactctataaaagtcgactagaggggatgaatatgcgaaacctgaaattaaagtcaaaacaacccaaaaacttgatctaagatgtttgatatttaagtgttagaacaagatgcttagtttagggtgagtataagttcaacagtttaaagttgttgccaataagaag

SEQ ID NO: 88183 - DNA, 384 bp, Zea Mays
gaatacaaattatgaagcgtcttaccccgcttttacaaggttcttaccagcactgcaggtggcaaacggtgaccggtgtgactgtccaacgagcgtgggtgtgattgcaaaggagtacctgttctacttgagagaaagctggagctatgggaaggctaactaaatatatatatgtggcacacaagtctgtaacagatagcaatgctgaataagtgttccaggtactcgtcctagttgctagcctagaaaatgtaatagaacagttggaccaaggcacaagaaatgaggtacaagtatataggtgcagcaagaaacaggcttggggcaaaataatcacagaggtgcacagaacattggcgttttagtttatgtgctactcttttc

SEQ ID NO: 88184 - DNA, 497 bp, Zea Mays
ccatcggccagcgagcacactaggcaagaaaagcctctagcaactagggctcgtcggtcagctagaggaaaggaaacgtctaccctggaagcacctaccccaaacaaaccccacgccatcgagcctagggtcgggcatggcagaacccagacagggggcgagcgaaccgaagggaaatcactcgagtggatccctctctcggcccgagactgacccgacataagtgaccggacgcattaactacacttggtactgagccacgacagaggcgccgatctgccttccactcatggcctatgaggccctcgggctgcaacacactcatgacctacgaacccctcagaccgtggcacatttatgacccgtgcaccccccggcctgtggtgcactcatgacttatcatgactaggcctgagtacgcaaactgcttgcacggcagaacaagacaagctgcgtcgagccccaggctacggaggccaggggtcggcgtagctcga

SEQ ID NO: 88185 - DNA, 606 bp, Zea Mays
gacagagaaaaagccttaccaaagaaagcctaaagcacgtcgtgcaatgttttagaccacattatttcaaaatccagataacgcaatcaagaaaccccgtcaatgcaccaactatatttacatattaccaaatatggttttctttacatctttattgtttaataaaaaaatataatctgggtcagaattgtgtatagtagtttagatttgtccaaacttcactttctctgcctttgacaaagaaaagatgctgagacatgtgagcggagaagttgcaaggacggtctagcgcttcagcatttcgtcggcgatgcatgggtcttcgcaatccatacttacctgtacgctcgttcttctcggccaagttaattgtaataatacatgatgtcaccatcagatccagcgcccaactaataacaacacaaccgcgtccttgactcgagagtgagaggccgggtcagtcagtcatgctccatttgcttgcttagttattggaaagtacgaggcaccatcgatcccaaatggagcttcagatcactagcatcgcaagcgacatccctacctacaaaagctattttcggtggtcaaagactatcgaaaataaac

SEQ ID NO: 88186 - DNA, 359 bp, Zea Mays
ccttcagccttgggttactgcagcaggtttgtagtgctttgtttggtgagcaagttttattaacgaaggtcggcatgtattacttggaatcgagagaaacagaggggttaaaagtagggtttcagtttggtgccaagtgctgtttcagaatctgaaacgagtttcagtgttgctgaaattttgaaaacagtgtattcctctccactttggacccatttaggttctaattcttaagctttcggtggataatcattatatcaaatttggagatctattgtaggggaacacttcttatgaacaaggatctctctgttcttattcggtttggaaaaaaggatttgctccaagtcaagttgttt

SEQ ID NO: 88187 - DNA, 306 bp, Zea Mays
cgggaacatagaaaacaacgaaagaacattcaaaactgctgagtccctcaatagcgacagggttgctgaagctatcaactactgcaacaatgactcctaggaagaggagaatggctagtgtttttatgctgttttacaatccacaaagtcgcccgctcctgctactactgaagtttctgatgataaaattggagatgcaagggaagtagccactgcaagtgcttctcctgttcatgctgaagagggtacttcaggagctaatccagtagagctggtgaaagaaaatcttctagaaaagcccacgtc

SEQ ID NO: 88188 - DNA, 544 bp, Zea Mays
tggatgcactcctctccagctcggtttgcgccgccggtctctctcccttggtaagccatgtctcccctccccttctgcgttagctgctcctgctttccccgccaaggtgtcgactggtgcggcccttcccattgaagaagaaggctagtaggtggttgagcgtagacagaggacccgtggtgtgcacctccctcgtcgagggtcccgtgtggatctccgaggtcggtgttacaactgcctctctacttctcaccgggttgctacctgccggcgtccaacaaggtgctttcggtgtctcagctttggacatcgggtggcagtctgctcgtctctgccggtcgattctcagaaacagccagtgtggcagcgcctgggcgacgtcaaacagcgtcttccgggaagacaggaaacctcccatcgtgccttggtgaggccgaggattccggtgcggcctccggtgtggcagaggttgtctggcatggacaaggctcattctctggagggcgcgcgcaagacctcggtctggagacgtcttgcttcgtcg

SEQ ID NO: 88189 - DNA, 329 bp, Zea Mays
ccgccaggcgttccttctgctcagctaattccttctgaagctgcttcttttctgccagcaactcaagaatatgggatgcgtcgagataccgctcattgaaggacacatctagactttgttgcagctgctccacctacgactgaggtgcacgactgctactgctggtctccactgcacgggaggccatctgatgcttgggcactcctcgtggtccaacccgcatatggggcgtctacttagggggagccattctgaatttttaaggaatatagatgtaagaaaagatcaaaggattactaggattagtaagaataatttttaaacccaca

SEQ ID NO: 88190 - DNA, 650 bp, Zea Mays
catggggcacgctgtgaaagtcgatgtctcttgcattgaaggttagtggaacatgtgaccactttatccgaacaacaggtcctatgacgacgacgtggttgacccttcggtagtgatcccttttctgtcgtttattctcaaaattcgatccagacccttcggtgatcatatgaattactcctctaaagggtggatcggcgatgtcttcttgcttaggtggtaggggcagtggtaggtgttggtttggatgttgtggtggttgcagggctaacctttcttggtgctgaaggcgttgttgctgtgggaagggattggggttttgttgttgggggaagggattgtggttttgctgctggaggtaatatcgatgtttgttttggtattgatggtggtggtatggttgtggttgataggtatgagcgatgactctttggttgtctatcagggcggccctagtcattcagtccttggtcgccctggtctccgggcaatccctggtggggtgcactaagtgtttgccatggaagacatagtagaatattcttggctactgagggcatcagcctttgcctctacccctagtcgcattgccaccacgaccttgttgcggagggcagccctgacgacgggggaggggggttctctcctag

SEQ ID NO: 88191 - DNA, 364 bp, Zea Mays
aatatattgatcaacactggatatgttgtgggtaccattagggatgaaaacgatttcggtttctcgccgacagcaagagccagagtacaaaccaaatgaatatgtctgcgtgcacgacgaaccagatgaatccgcgggtataggccactggatggtgtagatgcgaagcggagcgtgtgtgggtggcgtgtgggtggcgtagagatgaatccacgggtacacctaggccccaaatcttataagtgacaggaaaaaaagcctagcgcgcgggaaggccggatttcgcatggcgtacggggtaggggagtaataagcgtcgaggacatcacggcgcagtcgcatggagctgcccaatctacaggcc

SEQ ID NO: 88192 - DNA, 545 bp, Zea Mays
agttttttcaggcagaatttggtttgtagcctcttttttcgtttcttcttctccagtttccaaggatttctccttggcaggctttgaaggcccggcttcagtcccggcctggctctttgcagcctcggcttcagttagttttgtctcagctcgcgtttctggagcttcggcaatttttcctagagtagagcttgaactctttatcgtctccagtacatctaatacattgaccatccttttcctttttggggtcgctataagatctttttgtgcctttggcactgttacttctgccgaagggctcagaactgatattttgtcttcgactctaggttcttcaattttgttaaccttcggcattgtagctggttcttcattcctctgtgtgagggcagattcttcggctttagtagccgaagaggtctcgccgccaaattcaagcactacggccagttcaatatatcgcggccggtgagtaaggactttcacctttttcctcttcggcgcaggctcgcttggagcaactggagcagcatccttcccgg

SEQ ID NO: 88193 - DNA, 719 bp, Zea Mays
ctactcatgcagccttcacagggccaggcgccgccggggagttcaggctcggcgcaaggttccggaagattctggaagcatgggcctgcactgtggcctgcaggctgcagccttatcttgctgacgaggcgcaggcgcggccgcgcgaggcgagaggacggagaaccagaggactgagaggagagcagcgagcgaggtgaagcgccaagttgtccaactcaatccaggggagtggagaagatgtaggagagataggaggggccctatcagccgtttgatgtggatcaaatggatgaagagtttcgtagcgttgtggtgtagaggaaaacccagaatgggtagagggagatgcggccacagttccgtctggagcactgcacgggaatctatgtggaattttatagggctggtgcacatattcttgttacgcgttgagttgccaacctgctgccatgtgttagatttatatggccatagatttttttggctaaaaataccacaggtagaaatatgggtaccatgaaatttcgatgagagacctcatctagccaaaatcactcttgttttattctttgaagtccaattccccccacgatgtcagaccacaacaattaagagaatgcgtatactacgagcatggatctagaaaaaggattgcctgacatagctaagacacatataggtataatggggtatgtaaatcttgtgccttatttaat

SEQ ID NO: 88194 - DNA, 455 bp, Zea Mays
tgttgtttccaatagctgctgagatccctctcaagcttcggaaatccaatgttctttgttaaagtgttaacaattttcgcctcggcgcgatcaggaatgcatcctagtatttcttcgtccacaccgccaaaaagcacgaatccaggctggtagccacctgctattacgaattctcttagttcatacatatcttcttcaaaaagctgttggtcacccaggtgtcataaatccaaggtcttgctctccgaagaagcttcttcaatattcttcatatttgaggttgaagtttcaacagcaaccactttgtcagtttccttctcgggcaccacatcagctataatccgatcaatcttcgatagggtggtcctgagcgggcctccactgctttcaacttcatgggctacttcggtagcttcatcagttatggaaggagcagttttttccttgctcccagc

SEQ ID NO: 88195 - DNA, 284 bp, Zea Mays
tttatttccaaaataagattagttaaggatgatttccgattccgcctagcttcatcatactacaagagtgtacaagtgttataatccttaacaaagatcttttgaactttatagattttagagcctgatatccaaatcatctttctgatccaacagtatttctttgagcacaaattgagagaaagactcgagcgagactttaaggcatcaagaatagagcatcacattgtttgcatttagcagatgacaccacactttattctctttataaagaggcaaaacac

SEQ ID NO: 88196 - DNA, 363 bp, Zea Mays
agccaccggtgagagagcgcattgggaaaaggcctctggcaagtggggttcgttggttacctagaagatatggataacgtctgccctgaaagaacctgccccggtcaaaccacgcgacaccgagcctagggtcgagcatggcggaacctaataggggatgggcgtgtcggaggcaaaccactcgagtggatcccgcgctcggcccctgactgactcgtcgtaaataaccgaccgcattaactactctagacaccgagccacaacagaggctccagtccgctttccactcaagacctatgaacccctcggaccacacagcactcatgacctacgaacccatcgacctatcacatttatgacccg

SEQ ID NO: 88197 - DNA, 467 bp, Zea Mays
cgggagaggaaggagaaggaatggctagtttttaaagccggtgggatcagcaaggggattatcgacgcatcttggtgggccacgagggtctttactcgtccacgctagcgagctgccgcatcggcatggttcaccgataaatctgatgaaatcatgtcgctaatcaaatttatgcagttgtgtgaactttttctcactaagcaactattgagatatagtgttcatagctcagtaaaagggcaggttgccatgtttttacatgtggtaggtcataaccaaaggtttagagttatacacatgacctttcgaaggtctattgagaccatcagtagatacttcggggaaagtattgtatgttgttggtgaactgaggaatgaaatgatcttgccaccttcaactgctacaccaaccaaaattagagatagccacaaatggtacccctatttcaaggtcagccaaatccaaa

SEQ ID NO: 88198 - DNA, 1211 bp, Zea Mays
gacctctgtttcgagtccttgcaggttcagctgattgcttgccatagtcgaccagacatgttttgctgcaactgcaatctccttcaagtttcaagggcggcctgggtgcgcagggatcctccctccccgtatctccacgcatataaactgacacatcaaaaggcctctgagttgcatcggcacgtgcaagctcgtctccatatatacagcccaccaatcaccagttaaatatggtcaacgaaacgcggagggcctagacgcacgctaattgtgttgcctgactgagcatcgctttcccagaccagtgctaattgtgttgcttctgtcagtgctcggcttggttgagtgctaactgtgttttactccacgtagagtttactcgttgctacatctgcaaacattgttgcagaggttgcaatatgtagcaggcatttttatgtggcttgtaagaccgtctccagcaacagtctgtaaaccgttctgtctggtatatttagcggagccattccttctttatgcctctagcaggagacgctaaagcatccgctataatatagaggaggttcttcgttcgctaaacgtggcgtgctcgcttccaccctgtatcaactgttcattctcgtgttccctccttgcatccaaataaaccaggcctgatgagtggcttgtagcccggcaaggttttggtcaactcgagcacgacatgacttggcactattttattatttctttgtttttctataaaatctctatagtatatttgaatatagagtataaaacataaaaacatgtattctagtggctatgcagatgtgaatgtgggtttagagccaacaattgtgcatagtgtttcttatttttaccatttaaacctcacatccgtatgaaaaattgtagatgagttcgagaatttatccatattgccggtacatggctacggtggttcctatatatcatgtgtgattatattttaaattttcagttcatatattaatggtatcgatctctcttaattttaatgcaattatacatgtgttgctgtgatagagggcgttggtttatgctcgcgcgggagcgcatgacgcacgaagaaaccaacaaaactcctgtattatgtaatagcaaagataaatattttcggttaaaggagcggcagtcgcagaacgagcggctagctagggcggtaacgccgcgcgtgggtaggggtacgg

SEQ ID NO: 88199 - DNA, 927 bp, Zea Mays
gtcaaaatgtcgctgccaaatcctagccggattggtgcaacggggcatcagactatctaagctgacaactgtttctataacaaagtggccaactcagacatgtatcgtataaataagtatcagccaaatagagttagttatattgtttgttgtctaaagtctatggactataaagtgtatatttataatcgccaataatcaggagacatatgttcctacgcagcacgtatccttcatcctttcgacgcatcaccatcccatctacaatttttcatggtaagtcacactgccctaatgcggtctatagtagctcgcatcatgattgtgcggtaatccgccttattttggtagatatggtactaaacgttattgttgggaagatacgctagttagccgatgtagtatcattttgttattttgtttagacttcatgttatagattgatcttacacactcgagtgtatattgctttctcggttgctacattaaatgacgtgtggctgcaaaacatgcatacaacaactcgagagaccgatatgcatctagcacccttccttacatatcttagtcacatcatctcttctagatggacatccttggaggtcctagtccatgtttgcgtgtgtagacatcagctcatagttacaaatgttcctagagtcatgttcctatagtcgttggtatgatacatattgtagatcggatttatgatgttcctatgaacatggacaattcactgtttatctagccctaggttcggtatatggtgtggataatactggcgactccttggcccgttttttcgcctttggttatgcttgtggtatgcatcaatctaggactaatgaccatctaaatcatggtttaggtatatttatctcatttttatcgctcttaatacacgtgcgaagcgctaggctaataccg

SEQ ID NO: 88200 - DNA, 319 bp, Zea Mays
gttgcatgcgaacaagaactgtagcatggcctccgggtcacgaagtccagagaagtccaggctagggcctgaaccgtcttcctcctcagaatcaaggcaccccgagtggaaggggagatcatcatacatgctagcgaaggcacttgtgtcgaagcatgcttgaaaggggatggggttgaacaccgatggttctcccctagcaaatgacggagccaacacctcctgacttgatgaagatggcgcatcctgacttataggttatggtgccagcaaagctggcaagattcgacccatggcacggggagctggtggagccgac

SEQ ID NO: 88201 - DNA, 833 bp, Zea Mays
gcgcttcaggtggtatcagagctgttaggttggccacaggacgtaacccttagcctgatcaaaagtttttgagtcaaaactattttcttaaaaaaatctttctctcatcccttcatttcaaaaatgctttccccctttccttctctcagaagtcagatggaggtccgctaccaaaccagcttttgccagaatgaagatggtttccccaagttgctgaaagcatgcacagtccgcctcgaaatcaggagccagccagagtatgatggtcgtgaattcatcgagcatggcacagagaagtgtgtcgtgactgtatacattggatccagtctgcaccatgtggaatggagtgtcactgctgctgggcacagattcaaagacacctgccaagtcgtcgcccgcaaggcattgagggccctgtgtcagatctatgaagaagaagtggccaacacaccgctcagattctttccgccctttcagagagaccgtcccatttggatggccaggatgcgtgcattggaaggacaacagttgcttgaggacgaccccatagtcgtgtacctcactgcatacctgctcaccctagatgcacagtatgatttcttggctcggcaccaccgtcagatgattacccgagcagaagatgcagagaagctcaactgtaagctccatgtggatctcacctcagctcaagcctgtgtagctgccttggaaagtcgtgaagccattgctgttgaagccctgaagcaagccaaggatgagcacgtccagaagttgatggaggcctacttggtaacccataaccaacgtagagccctgcagatccaagagcccgc

SEQ ID NO: 88202 - DNA, 553 bp, Zea Mays
gacggagtagctacgactaggctagtggtggtggactggctgtggacggaagccatgtgacatgcgtgcgcagcgcgagttgatagggcagtagccggtgacgagggagggacacgatcctagaacgcgtgggcccaactctggatgctgctgcaagctactgcgctcggaaacaggagcaatagctaaccgcgaatggtccttgacatgcaaatgatttctctctgttacgaggggatctgaggtaggacagagtagctacgactaggctggtggtggtggacttgcggtggacggacgccatgcgacatgtgcgcgccgctggagttgatagggcagtagccggtgacgtgggagggacacgtccctaggacgtgtgggcccaactctggatgttgctaaaagctgctgcgcgcgtaaacaggagtaatagctaaccgcgaacgggtccttgacatgcaaatgatttctctttgttacgaggggatctgaggtaggacggagtagctatgactaggctagtggtggtggactggcggtggacggacgccat

SEQ ID NO: 88203 - DNA, 648 bp, Zea Mays
taaatactagggacctgttttaaatgcctttctagagaggtcagactgagggtactatttgtataaaagtcaggggataaaatactaaagtcgggacctgattataattacttttgaatatggctggatggtgggtttattccatgaaagggcaggggctcttttgaatatgtgccaaggcttaagagttatcttcgcacctcagccattggattcaaaatgtgtggtccgatgatctccaaaccaaaccagtataaatgaatctaatttgatatatatatttcagattggagggccaggattctattagacgaaagggtatgcacataacctaatctggatcgttcatcgctggatcaaggaccatcgtatcatctccttcctctggccatcgaatacggtggcgagagaggcaaccgtggtggcttccattgccagagaacatgcttgacgctctggtgctcccacatcctacctgaatggtgctaagctatgtcaagaaaatggagaagtgatctagagctcttaccggagttactgagcccgatcaatcacgagggtctcagctcctggagaggatcccacatccgagctgctcctttgtgacctccagtgtgatggtgctgccacatgcatgctattatcgcg

SEQ ID NO: 88204 - DNA, 354 bp, Zea Mays
tgaactttgagctcgattttgaatgtgattcggtgactatttgatggtaagcattgtggcaaagttgaagatggattataggtgtataactttgatgcagaaagttgacttagccaccacataaaagttggagaaaattaaccctaaaaatggactgacagactgtctgatgaagccggccatggtacagtgccccgatggatcagaccgccagctaagctcgccgtcgttgatcgccgtccggattcgtgcacggtatgggagggataacgccggggaaaagggtgattcatacgtggcgacatctcctgagctcggccggagttttctcaccggcggtcgctgtgactcagc

SEQ ID NO: 88205 - DNA, 408 bp, Zea Mays
tatttgcctcctgttgttgctaacattttgcaggagtattttgatgtatttccatgtgagataccagaggtgctgccacctatacgagggattgagcaccacaatgatcttattcctagtgcatctttgccaaatcgtgcgccatataggacaaatatggaggaaacaaaagaaattcagcgacaagtgcaagaactactcgacaaaggttacgtttgtgagtctcttagcccgtgtgctgttccgattattttagtgcctaaaaaagatggaacatggcgtatgtgtgttgattgtagagctattaataatatcaccatacggtatcgacaccctattccacgtttagacaatatgcttgatgaattgagtggtgctatcgtgttttctaaagttgatttgcgtagt

SEQ ID NO: 88206 - DNA, 397 bp, Zea Mays
cagacatgtgtgaagcatctagaacccgagccaaaatgaagataaatctagccaatgtcaaggacaacaaaaacagcctcaagactcatctcagacatcaaggacacaacaacaaccctcgcaaagcaactttcgatcatcagctgagtcaacgaagaaggttacctttgatatcttgcacacctttgacaattatcacacttttgcacgaactccgctttgtctgaagctacctttgaccaatagaaaccttggtgaaatgtttttcctagtagagctcgagtgccaatgtgtgatccacatatgctagaatgcatttctcttatcagctcctgaccttcgtctctagatatgcacttgagcaagggtgagcagacaccttctttatacaactccc

SEQ ID NO: 88207 - DNA, 750 bp, Zea Mays
gttcaccttcgtcgccgtcgagtatttcaccaagtggatcgaggcaagagcagtatccacgataacgtcgaagactgcccagaaattcttctggcaaaacattgtttgccggttcggagtcccgtccgagctcacagttgacaatggcaaacaatttgacagccaagacttcagggacttctgcttctccattggcaccaagcttgccttcgcctcaatataccacccacaatccaatggcgtcgtggagcgtgccaacggcaagattttcacggcgatcaagaaaatgctcctcgacgacaagaagggtaaatgggccgacctgctacctgaagcagtctgggcactgaacacgaccgagtgccgggcgatcggattcacacctttttgcctgctatacggatcggagtccatgaccccgcaggaaatcaaacatgggtccccacggacaagtgcttcagccgtccccgacgtagacgaaccaacttccaaggatctcatcgacggagaccgtgtcttcgccctgcaggcccccaacaaataccaagctcaaacaaaagcatggcgcgaccacacagtcatcccgagagaattcaacgaaggggacctcgtactcgtccggacaactcggacagagtcatggggcaagctggagccaaagtgggagggtcccttcatcgtcaagacaaaggcgtcccccagcgcgtacaggctaacaacgccatccggcgaagacttagagcattcctg

SEQ ID NO: 88208 - DNA, 357 bp, Zea Mays
cagctcccagccccagctcaatcaatgatgcgcctgcacagcaaatctgagtcccgccccctctctcacactccgattcaggctagtccgtccgacacaagcattgcacgggaatggaaatcaaacaatcatcgtagtcatacacgaccaaataagtacactgctatttatatgtgtgtatatttgcacggaaatttcctcatcttatttgggtgtgactagacaacgccatgcatggatggaggatcctcatgagtagtagctgtgaaccgacggactttgactcactgaacactgtactctcaccgcaccggggtcggtctctgttctttttttgttgtagatatacaaatcgaa

SEQ ID NO: 88209 - DNA, 383 bp, Zea Mays
gctagaccgaacaacaccatgatccacgataagtcaccctctagtggcttcactattgcattagcatgcgtttaaacccaatagctcatgggtagggcatgggtgcatcggttgggtacttctccggcgaagcgccaccatggaggtcctgctagccgccgcggccaagtcgggggttagaagatgaggttgtggccgtggattgcgaaatcaacaacatatattagatcaatgcaaactggttcaaccagggtgagcgtggatcgtcgatcagtgatcgaacgtgtgcggttacatctcgtgacttagaaattgtgtccattggattctggggtggcggtcgagatcaaatgtagcgtaccctttcggctgatcgcttgtgg

SEQ ID NO: 88210 - DNA, 430 bp, Zea Mays
catttcacaacaaacaatgtcatagtttacatacacacagcgaagggccactggccacattgcacaaataaatactaatcgcattttgctaccctccctctttatcgcgagccgagggagggcagcgtttttgctcactatcgcaacacaagagcgagggcagcatacacgctacattggctcagccttcgggataaggcccgcctcacaaaaattaaataacatcatcttcaactcctcaccctcaaaaagattccatagatccccctccccaatacacgtcccggacgacgaggacatcaaatctcgttggccaccccaatttacccaaagacgggttcgttctatccccatccgacgacgtctaccacttcacgacatctcaccaacactatgcttcgacaccactcttcgccgatggtgctcatcg

SEQ ID NO: 88211 - DNA, 515 bp, Zea Mays
ttttcactctaggagtgagaggcatgtaccaaagctatttatgtgcaacttttgtcatcaccttctccccatcttcatttacaagctccatgtaccctgacttgccacattttaagcatttctactctctgccatgttccttccaaaagagcatgcagttgtcctggcaaacatcaaccttctcatactccataccaagaccttcaagatatttcttggactagtacatgtatttgggcatcttgtgacccataggaagaacctcacaaatcaaaaccatgagctccttgtaacaattgattgagaatgcaaacttggacttgattgacatcagccgaatcacgaatttgagaacggtcacattggtgtgcccgtgaagaggctcttataatgctttgagcaggtcaaagaacttctaaaccactggtgttgccgaatcatgatgatctggggccaattcaggctgcagatcctcaagcatctggtccatcctatcaacatcttcgccatcatca

SEQ ID NO: 88212 - DNA, 521 bp, Zea Mays
gcttctcactcttctttttatcagccttcacataaaaccactcatttgtccacccggtcgggcacttattacggtaaccaatcatgggggccttggtatcctttctgtatgcaaaattgtagcacccaaaattcttatgcagaccatcggttctagccttcatctgataatgaaggtcgtgcactcgacagaacccttcggcattggcactttttccttggcttcgaagagcccaaatgtacatactaagtctaacaatggcattgggggttagttgatgtaggtaaatcttgaactacttcaaaacttcaccaatcatctcctaaagggggaaccgaagtcctaccctgaaaaagcttgtgaagactacaacttcatcctcattcggttctggaagcacctcttctccagcaaaacgaaccagatcgtcatcattctcgccaaagtatcctagtttcttcattaaaactagatcctctgccttaactgtggatctcctgaattcgatatggctgggtttg

SEQ ID NO: 88213 - DNA, 814 bp, Zea Mays
atacaatacaatccttggcagagggactatgaacacctttgaagcagcaagtgcatgaagataccaggacctcgagaggtcatttcaatcttcggagaccaacaagtggcttgcaacatagaaagggacttcgtcccaaggtaatggaatgtccactaagtgggcgccagcatccagaaaaacactcctaagccacctgccaagatagacaaacaccaaaacaccattcaaagtgacgggtccaagaaagtaaccctcgatgccactctccccaaccatgcagtactgataggcgaaggcctcactttacaaaaagaagccagcttgcttaattgcctacgcagaaacaaagacgttttcgcctagtcatcattaggcctagtcggagtaagccaaagtgtcatcgagcatagcttacacgtcaacccctctgttcgccctaagaaacgaaaactttacaagatgtcgaataagaagacggaaacgaccaaggccgaagtctagcggctcttagatgcaaaattcatcaaaccaatcgattaccccacttgacttgcaaatattgtcatggtccaaaagaataatgggaaatggcacatgtgtatagacttcaccagtctaaacaaagtgtgcccaaaggacgaacccccctaccccgcatcggcaaaatcatcgattctgctgtaggttgcgaagtcatgtccttactcgattatttctcatgttaccatcagatatatctcagcgaagatgacaaagcgaatgccagcttcatcacaccctttggcacctactacattgtgagaatgcccaa

SEQ ID NO: 88214 - DNA, 464 bp, Zea Mays
cggatagtcttcgcggtagacttcggttttttcgcacttgttgtgctagtctggctgcacccttaggcgacttctgcgcggatttgtcgcacgcgagggtggctagcgctgagcctcgcggtgacctcgtattggtcgaatgtcgaagaccgtcgtcacggtcttttttcgacgcatgtttttgcgggggatttttcacacatatattacatggctccgcctcgttaaaccccccgggaggaaaagagtgcgggccggtataagattgtttttgcgaattacaagggcgaaatcagccctgatgagtcaaacaaaaaatttgcggaggttgtcgatgttccaggagtgctccaggtcttcgctgtttggcgttgtgagcctgtaagcgctgggggaagctttcgtcttgactatgaaggggccctcccacttgggctccagcttgcccctggactctgtccgag

SEQ ID NO: 88215 - DNA, 1246 bp, Zea Mays
ccctagaatagttgacttagtacttttcggactaggtacttgaaaggtctacgcctcgttcaaaatcaagggacgggtcccataaactctgcctgtcaaaaaatcggctacattgttcgatggaatgagtacaacaaacctaacatcctaagcgtacaaccgctaatcactattgctgatccattcttggaataccgtatgctcctaagcactattcctatgccaaactcagaagtatctccctggaccaaaagcaacccccacgactgggaaaaactctaggaagccttagcgactggggggcgagaaagaagaaaacccttgtcttcccataattggataatcatgagggtagaaccactttctttgtcttcatgcaacaatgatagtgtgtcgacaagcaacccactcaacgtgaaggctacaggcacgaagctgctacacaatgctgaaatttctggaacaagacacatgtatggccccattagcgggttcgtcgcctcacctgaggtgggcctcggggccactgtcggtaccccgaatatggggtacccactcttgctatgttaaggtgcgttcgggggccaccgttaaggatgtcgtgggaagcctacccaccacgaggctaaggcccaccgtatggagtgatgaccaggccagacccgccttctagactggaccactgtctccatcaagctccttaaagggaggaatcaacaacctcaactataggtatgggaacctgcaaataggacatggacctccctgtgtctcaacggatccctagccaaagggatccggaggagacatgggagaaggcactccctggttacaacaccaagtcttcagaatagctcggggcatgaaagataccatctaaaccttaggccaggtgaggttcggagtcaccacatttctaggttggggttccagtagcccggatctccctaggtgcgtctcgagctcatggtcaagaaagacttggaaaatagtgtcaccacttatccccacccagcgtggatgtctggtgctaacacgtggcatacttggccgcatcagtagccggtagcgtgtcccaggcgttaaatgcacacaacgtcttaggcctgtgacgtacatgttttactgttacctgcatgttaatgagacaagtgtttgacccaatgcaccatttgggcgccctgcattataactggtacatcacagagacacgaagagataggtggagaggactagacagtatcgc

SEQ ID NO: 88216 - DNA, 503 bp, Zea Mays
aaaattttcctattcatcactcatatctcttctctactatataaagcatcaggttccacgatttccaccattgtcgtattctcccacatttcaatggtaaaaaagctaaaaattatacataaatacgaaattgaactatagttgttggctttaaacctaaattcacacacacctagccaacaaaacatatatgtgcgtgacaacgctatttgttacctaagacggacaatgaatcaataatctatcacgtagatccgatcagacgcatccgatcgagttagtcacctacattcaagcaaggctcgagcatgctccaaatccaaaaaaacaagtccgatctacccatgtgatacaacactatgttgacataaatgatttagattcaggatataatgttttaaatggcgtgacttgaaatgattgccttagatttaaacctgcaatgataaaaatgacttagatacaacttataatgtcttacttcacgttaaaaaatgactcgg

SEQ ID NO: 88217 - DNA, 721 bp, Zea Mays
attgccttcggagatcttcaatctcggttttttgggcttcgatctgagcatggtagttagcttcatcttctttcactttatctaccaatgaaatcaaaattttatctttttccaagccttcgtttctcaactcaatcacctctgaacgaaggttgttgagtgctatggtacaactctcgtcttcagcattcttttgtgccctcaaggcattactaagaatcaagccctgtaaagaagaagaaagaatggagtatgacaataaaatacttcgtttccaacttcaaagttaacttttatacctttatgctattgtacgcgaggctatcagcaagttcatctttcgacagaaccgaaagaccttcttcaagtttcgaaaatcccatactcttagctatctcccgacaaacgaatatttctttgttgtccgggagacagtataggaagtcgtcatcgttagtgccgttaaacactaaagctccctttggatatttcaatttttgtgcatagtgtctggcttccagaacttcttcggacaactttttccccgaagcatgacgataaatataatcagcatcctcgacagcagcttcgggggcaggagattttgccctttctgccgcgtcttgcccttctgccatgccagcatctgaagcctgttggtcagttttatcttcaggcgtgacgaccttcgtctcaataggcgctgcaggctcagcttcgg

SEQ ID NO: 88218 - DNA, 332 bp, Zea Mays
cttcttctcatcgtcctccggcagaaagacgactcgtgtgtttcggcctctccagttcgttctcagccgaatctccattcaccaccccattagagagggggaaaaatgagagacagtgatggagaatttcgggaactgtcacgtttggaataatgtgctacatctacatgtacactcctttttctaaaagcgcagaccgtgtacgcgatcgatacagcaggcgggaatatattcttcgtttccttcggtacgaagcctactgcttctacgtcgtcgttacttgggtatagtacactgcattgctgtagcgaacttgctttctcctttttttt

SEQ ID NO: 88219 - DNA, 317 bp, Zea Mays
aacataataaacgtactagaccaagtgcgcaacgcctttatgaacatagccagatgcgtgaaggcgcacagcctcatcatacaaactatagtaacatacttacagcgagggcaccacacctcacatcggttcaaccttcggaatgattcccatctccctatagttaaataacattattctaagctcctcaccctcaaaaagacttcgcaactccccctcacctgcactcgccccagccggcgaggacaacaattcctgcttgccagccctgcccacacgaagtcgaccgccatccacctcattcactctatgcttcg

SEQ ID NO: 88220 - DNA, 316 bp, Zea Mays
tgtcatgacatttggtctgaaaaatgctggtgctacttatcagagggctatgaatttgatctttcacgagctgttgggaaacactgtggaagtctacattgatgatattgtagtcaaatcggttgagtttagttctcatatatctgatttgcgcaaagcctttgataaaatgcgtcggtatggtctaaaaatgaacccatgtaaatgtgcttttggagtgtcggctggtaagttctttggattcatcattcatgaacatggtatagagatagaccctgaccgaattaaatccattcggaatgtgggacctccgacc

SEQ ID NO: 88221 - DNA, 302 bp, Zea Mays
taaaacatcaactagcctaaggccaatgatcctcttctctaacgaccaatcagcattaatatattgaacaaccacactaaggtggtcttccttatcatttttagaccatataccggatgtaagagaaaaacatgaaacattagaccctaagcaatcgacaatctcaccacgacactcactaaatacttaataatgtctctagttgtggtttgcgtagagatagaagagaatctaggattatgagcctccctgatatactcctcaaatgcatcaatttcaccaatacacacacgaagatcaag

SEQ ID NO: 88222 - DNA, 632 bp, Zea Mays
ggtctcaggtggagattggaaggcgagggtgaagtgccacatcccagggacgacgatgtggtcgtgcttgcgtcgttacccgagtgagagttcggcctgcccctgcatcccttcatgcggaggatcctgcactattatcggttggagatccagaacctacacatcaatatcgtccttcacatagcgtgcttcattacgctatgtgaagctttcatgaggatcgaccctattggaagttgtggtagtatttcttcagcgtgcgggtgactccagcccatggcagacagtcgtttgccggctcggccaacattaaactctgctccagccggaaggcagagtactaaaagatcttgctcccctcctctatgcggtacaagggtgagtggttctatgccaaaaatgtgcttggtcgccccctgccgttcaccggatgagaggcggtatcgacagagaagtggcactatggcacggaggcgctcttcaagagtaaagtggagcaccttctgaaggcggacaatatgttgaagcaacgaggcctcacaggcgcacgtttggtgcgcaccttcatgcaccgccggattcagaccttgatgacctgctagaagccgatgcaccagtactctagcgacccc

SEQ ID NO: 88223 - DNA, 689 bp, Zea Mays
ccggcaaatctcctcccaaaggatccggcgggaaattaaggtcaaggccagccggtggcataggttgacccagaccaaaaaaaaccaagggaagttgctaaccatcttccggagcatgcgaaattgggtcctcgtcttgagcctgcccaccaagcatgttttgttggattatttcacacgggactatccaagaatctccaatgaaaccatctgcctccgaaaaaacaatgaactgagggacttcttcaagggatgtgacacggacacgaagcaatgtcctggtcacattatgtcgatcctcctcccaaagaatcaacctgccaaacgaaccaatagctgcctgcaggtactctgaggaacggtaatctagaggaaaacccagcagcatgagccaacattcacggttaaaaaagagagcccgatgattccaggcgtcattgtgacaaagagcagtgaaagtagcatccaaatattgttgggggccaagcaaaacaaggttatcacgctccaaaacactgtaaaactgcaccaacacctgccccaagtgagagcgctgaatatctctcaccccaacccttcgatgttccactaaatattccctaatcacatctctgaccgcagggaataagacctcatgcgcaggtaaaggatggatattaataatcgcccaatcctcatgcattggcggg

SEQ ID NO: 88224 - DNA, 519 bp, Zea Mays
acagcattcacaccaacttcatcatcaaatcctcttgtgtagcttcagcaagtagccgatttgttgtgctgtacctgtacgccacctaacctcgcaggacataacgactaacgagtgccagtactcagtaacgacagggcgcggttgggtttgagtccagtggccaatgcagcacaagggcaattccggtttttgtacaagtctgttgttttgtaaattctgatcatatgaaagttgatgtcagtttctctagtagttaaaacgacgagcgcaaaacgctgaaggaatcgtagtcgcaaaggcttggttaggttagacaaaaaggcaggacgtgcgtgcgtcaccgaccccaacagacagagacaagataaacatgctctctagcgctaattaagcactggattaaaattgatttcatatggttatgcgataattgtgctggccgaacaaggcgggactgggcagggcagtacagataaacaatgattagttccgaaaggagacagatcagcaatgatc

SEQ ID NO: 88225 - DNA, 607 bp, Zea Mays
ctggttagaccagtcgatacaaccagcgtcgtgatcagtttgatcggtaataatcgacacgttagaaccagtagcactatcgatcaagaacggccggtagcggctatcgtttgctggcatgatgtgatctgatttgtcggttctattttctttgtttgattttgaaaagttctccaaaaacaagaaaattaaaaatgaatccacttctataaatagagggggtgcttgggctcaatcatacaactcacacttagaatttatcttctgcctcctcatactcatgtcactcttgtttcattcgagcaaagcattgttgcaaagtcttcgtccaattcatacatcgacatggcccaagaagaggtgatagagttgcaacaaaaactataatgcaacaactgcaaagattgcctctgattcttccacgccaatgaggtgatcgaggcaacattggagatacatcgatcacgaccgtgtattcgtccataaccgattgatgcaagactacttcaacaactcatgcgtctacccaccactctacttttatcaaaggtaccacatgcgaaggagcctcttccttcacatcttggatagattgggtgagtactcc

SEQ ID NO: 88226 - DNA, 392 bp, Zea Mays
gttaattccgatccagctacaacatatgagctaatgatccaaaggcctcgaacaacaaccatccactacgtatctatcgtccatgctttgcatcaaaagccaccaaccatctctatttcgttctcaaccggcctagctctggcgaaacagtacacgctcagcttcgaatggagctacaataaaatgctcgccaaggacccttcgcaagcacgtgacggccttgtagctcctcactcctgaggaagcacttctcctagccactagcaatgacttgtgacacctcgtctctcttctctgccacagcgctcgtgacgatggcgctcatcatgctcatcggcgacggcagcactatgtgtcattccatgcaacatcttgctcatgctcccgtgccc

SEQ ID NO: 88227 - DNA, 582 bp, Zea Mays
ttcagatatggagataaatttgatgaaccaaatgacgactggctaaagtgtatcgaagctacaagtgatgaactgcttgggccatattccaaagcagaagataatgcattatccacatccttcgggggccggggaaaaaagagattgaacagagtttttgatgccattggttttgtttaccccgattactgctatccattgtggggacggggaaagaagaggaaaactgctgctttagccaagactgctgcttcggccactccagatgagcctacgccgaaaagcaaaaagttgaaagtccttacccaccggccacgctatattgaactagccgtggtgcctgaatttggcggggagacttcttcagctgctgaagcaaaggagcccattcctcctacgcagaaggctgaagatccggctatactgccgaaggtacccttaaccgagctagctgagtcgaagactgataaagataaggccgaagagccaaaaattgaaggaacaaaaatgttagaaattgtaagtccttcggcagaagtaatagtgtcgaaggcgcaaaaaagttttgcggcgactcccaaa

SEQ ID NO: 88228 - DNA, 356 bp, Zea Mays
gcatgccagaaggccttaagcaatgtttgtgctttcattggcacaagagatataatctaagagcacatagcctatagggtgtggccacttgtggatagctgggaaatgccgaaggaaactacttttgaatccagtgaaggtggcctagttcaattgaaatataccttcagatacagagagaagtttgatgaaccaaatgatgactggttgaaatgcattgaagctaccaacgacgagctgcttgggacatattccaaggccgaagatgatgccttgtccgcagccttcgggggttagggcaagaaaagattaaatagggtttttgatgcaattggcttcatatatcctgattactg

SEQ ID NO: 88229 - DNA, 274 bp, Zea Mays
tggctaagtaattagggaagtcttatgttgggtgttggttttggtcattggggaacggaggcatctgttatggctcctatattctcgctcagggattttggtacgggcgtcgtcccaaggctttttcctgagggcagaggtataggttttggtacgccagagggtctctatggaaatggtggcatctgttatggctcctataatctcgctcagggattttggtacgggcatcgtcccacggctttttcctgagggcggaggtataggtttggta

SEQ ID NO: 88230 - DNA, 525 bp, Zea Mays
cgctgacagagttctatcatggtggacctgtgttcccttctctttccccctctcccgctcttgacgtagccacctgctatctgttgctatgcttgcttgttgtcctatgcacctgccttcttggttgcttgcctctttgctcattggaccatcgattcccttctcggtcattgtcttgtcaatcgcctcccaccttggtccttggacctctcccctagggttagtggccgagcggtggggttaggagtagagggttggggtccttgtagagggtcgaggtccttgcctcctttagttgatggcttcgttagggtcctatacaatggccacacatccctgctaatgtttgcattgccaacatcaaatatgtacaaatttgaattatgcaatttagtagtttgtagcttgtagttagtggttagtagctaggtagtaagtacttagtttgagtttagaagttaggatctaggagttagtagttatgttagtagctagtagttagtttgtgttcaagatttaggatct

SEQ ID NO: 88231 - DNA, 399 bp, Zea Mays
ctggaaattggcgatgaagcgatgactaaagtcactccaatcgtcgatgcagtgccagggtagatgtcggagctactgcagtgcgtcttgccccaggacaatgggcaagtacgccgtcatcacgtcctctgttgccctggcggctcgggcagcagtcatgtagacagccaaccagccgcctaaatcctgcttaggctcgtacttgtcgacgttggagaccttgaagttgggggccactggatggcccggagacacggagtaagcgcggagactctgcacatgtcttcctgtcaatgttcgtgttgtcggtcccgaggaggggagtcggtagtatgtcgtctcgatcatccctggaacggcccactagttgaggctgcagccgactcaactcgggtggtg

SEQ ID NO: 88232 - DNA, 1603 bp, Zea Mays
atttcagaatacatggaattaaaattttaagacaataagtacaaatatgagttatttcagaatgcatagaattaaaattttaagacaacaagtacctggtaacaagttaatgtttttcatgttagggtcaagcttgcagctgtatgaagtttttttctgttgtattatgtctccatgactccatagagtgtcttttttcatgtttaataattacttaggttttattttaagaattcccacatcacacatttttattttgttttccctgttcctttttctcttcctttccattcaattaatgggatgtttgataccttacgattgcaccaacctgttcaattgtacttcagatatcatcttctttgattgtaatcttttgcatactcttgttgatggtgctaccatattcttgaaaccttccacattgtccatctgagcattcttctatctctggatttgtcccttaacaatcacttgctttgaggttccatttggatacacatgactagatccagtttaagattattgtatatcttttgttctagctatttctgttgtttttctttctatccatacattatcaatttgatgatcctgacgatgcccctgaggtgcatacgcatgatctcgcaacaggtgcagaaaatggcacccaattactgccctcgaggtgttgttagacttaatgggtcactacgcgaacagtcagtgtagttctatgcatgcatctacaataacaggttagtagtagtgtatttgtgcatggaccccatgttttccttttcattgaaaattgaaagcttgttctttttttactggaagatatgttctcttttgacaccatgaaatgtcgtagattgtctctcacttctgctttgcttcagtacctgtcttttttcccatgtccctaaattctaagctatgtgtggtgtgcgctgtgcctgcttccaacaattgggttaggttcagtgtcaagtatgtagattatacttaagcacacgacatgttcttcctctcctcatcgcaatatgttgattggattagatttcattttggcatatttttataatatttgtcttgctggcaacaccatctagaaccctttcgtgaaccagcatgagtggacaacactggtgggtagccacatgcacaaaagaggaaaaaatggtcttttttccttcatgatttaattattgtgccttcacatatatagggttgaaattgtcctccattaaaactcttttggtatacatgcatactgagaagttgtcatattttctataattttataactactaattatcgaataatgtcttagggaccgtctgtttcccttcactttgagaatcgaaatctaagtaatggaataggctatctttttaaaatgtgacattccataactacctgcattctttatttgaccgacaatcttataaaagtgtatgtagatatgtatgtagatgtttatgtagatgtggatgcattcttctatacgagctcccctctagcttgtaacttgtgtaaaacctcaaggtagtgagttatattttgtcttgattattgtacagggctacatgcacgttgtttcattactaagagagag

SEQ ID NO: 88233 - DNA, 553 bp, Zea Mays
atttgggctagcgaaaatatggaagtgagccttgagaaccctgaatgttgtctttacatcctttcttataccctcctggcatgcagcaaacgttcgctactttagagtctagggtaaaggaatagtattcacaaacagtggctatgggggtagataccatcagcaaggtagtacccttgtttgtaatcatgtccactcatcttgaagttcacatttggtgcttctctcttgagcacgttaatgaacaacgacgactggtgaacacgttgacgtcattgttcgactccactacaaaaaaatatgcaagatctagaggtcacacgaggaaaccgcttcgatgatggttggggatccaatgtaccccgtgtaaattgtcctctccatcaagtgggtcagtttccccatttctagtgcatgcaatctatacttcctatcatatcagaaaatcatctctcctcccctttagctaaagttgtctaagattgtcaacagtaggacaactactatactcctcgtcaaaacatgaaataacatccatatagaaatgttcaag

SEQ ID NO: 88234 - DNA, 913 bp, Zea Mays
gattattagcgacaggcaaaaatttattagatgtagattataagtttactccatcagttcacagaatagaacacttaaatgaaaactgggccaactaataaatttccagagtatgaagtagtccacttgaaggaagggcttggcccatattcacgtacgtgattttcatgttatgttgtgcgctagaacagttgaacaggcaggatttatcgatactagctaacagacagcatatgtttcatcacgtactaagctacttgttaactttaattcagccaaaataatgtaataattgcagttctgttcatttatcgatgaagaagccacattacttccggaagcaaaccagctagctataagtatgaccatggcaaataaatggtgggccatttttcaatgacggtgtacaatataaaatcactagcacaatatgtggctgacaagaggacaacatgaccttcgcacctgcagagacaacctcacttctgcatttgcaacactacagatatgtctgttgtctacacaaaacaaacaccatttatgagccattctgagcacaccagaaatttaaatctgagaatttttaacaaactgagaatttctaaatggacaaaacttaagtacaaacttatagaccctgcaaggttattgaaaaaaagacctgatgtgcaagctagacgggcaaggtagtaaattatccatatcatttcatcaaaacaaataatccaaaattcataccattgacaaatgagttgctggtgttcgcgtgttcaaaggttgttgacaggtagtcactgcaagggaacgggactgtcgaaaggggatctgaatgctcgccactaagggctgccagatgaggacggtctggtacctaaccttccatgagaccatgacaggatgcatctgctcgtcg

SEQ ID NO: 88235 - DNA, 529 bp, Zea Mays
gatatactattttagaaattggaagtcgctagcgcaccggatcagtcaggtcaacggttggagttccagacccaacaactagataacataacgactatcatggagagatctagtgaacctgacaagactactcccctttagaacgattacctgcaacgacagtctgacaaggtccgatggtgcaccggaccaatactgtgcaaggtctggtgtgtctgtagaaatgtaaaatttggcattcaatgccaacaactatttgagtgattggggatataaatacaccccaaccaactcattcaatccacaactcttgagcattcattcctacaagttacagaagcattcccaacactctatgtgatccaagtgccccatattgagtagtttattgtgatccatcctctaaagagaaaagagagtgtgcacttgtgatttagctgaaagagagtgtgtgtttggtgtggttgtgtcttggtgcaaggcacccattgagattgtaaaggctagcaagaggctccaatgttgtgga

SEQ ID NO: 88236 - DNA, 515 bp, Zea Mays
atctgtgtcccaactcccaacgcggtgagggtggaggcagccatgggcactctgttcccagctggttctctatcgcctcttcaattcccgacgacgtctcgtccatggccgagccaaaactgttttaccaaaagctaaagccctcacaaaggagaaccttttaataactaaagatggcaacgggtatatactagtcgtatattagcattttatatccgtacctatcacaaaaattcatactcttcgggtcaaccatatgcgttcgtgggtataaaattttactcgtacccgctatggtctcaaatactaataatcccatcactcaaaatatcaaataaatatagaaaaataagtttaacttgaaatataataaaccatatctctactactctataagaacctaacgtagatcgtggtgcacggttctgcctcatcacggcgcatacggcccacatgttagtgtctcccttcttccccgtgcgtgccctctcccctctatccatgcatccgcatgg

SEQ ID NO: 88237 - DNA, 597 bp, Zea Mays
attttctaattgaatttctgaatttcatatgattctggactgcgtctcaatttctatagaagacaggggccactgcgcaagaatctctaagacacagagcactatacaccggactgcgggtttaattctaaaaacccgaggggctcattagaaaaatagacaccgcgaagggtatcacgggatcagggccattggatcaattctagatggctccgattagatctaaccctctcctgaaccggtatgcactaatagtcgctggattaagatcgggcggcccagacattatgaacccctatccaccactcgttacgagatcagtggttcacaccatccggatccaatcccccgatcatcaccattgattaatcaatcaactgtcagattgctccctagcgaactgttacgtgcctacctcaacccaccgcttgattaagatccgacaccaaggagagctcccccaaactcccgacgacggaaagcggcagccgacaccgagcacggcggcgccattgccgaccaggcgttccccggtttatgcgcgctaagcatcaatccaaccggctctatacactacgacaatgaagacgaaagcgc

SEQ ID NO: 88238 - DNA, 880 bp, Zea Mays
cagcacaatgatatgaccattagaattttagaacttaaatctctttgaaaaatcaatgagccaggcaaaaacatgcatattccaaaatcagtgccaagctgaagacaaaacatatagcaagctcacacgacggatacgcagcttcgatcaaagttcactgccacgcccacaaatgcattcacatgtcatattttagtctggcttttgcgagcatgacaagcagggatatgggaagcaagagttgtgcccagccagttttgtttaactttgattatgagcgagaaccagcagggacatggggaaatcagagttgtgcccatatttaaactctcagtaagcaagcagatcgcgagcgaaatagcagagatatgggaattcagagtttttgctcacaaccatactatccattcctgagttaaaacttgcattgtgagttacatttgcagtgaaaaaccattaaaagaagctgacaaccaaaccatgagcaagatatatgtcaagtattcaacaagtcactaaatccagagaagcaggcatagcccaacataaatttttgaaatatatgtatgtactgttttcaaaacataaattggtcaagcaaagcatttaaacctcttcaaaagcatcggtcacagattagccaaaacaagtataaaacatatgtaacggaagcaatttataatgatactagaatgggtaacacaccccaaactcaccacgcaaacgtgcaaacgtggtttgatcgagtggtttagttagaatatcagcaatttgctgactagtatcaatgtatttaagctcaatatcacccttctcaacatgatccctcagaaaatgatgacgaacctcaatgtgtttcgtcttagaatgaagtacagga

SEQ ID NO: 88239 - DNA, 329 bp, Zea Mays
caaacactgtaggcacctgcgcccatacccgcggcctaaccagacaccaccggccacgtacgagaagcaaagcggtagagcgcaatagtctatggtgatacagtaacccgtccacttcgacccagagtcaagagggatagaggatcatacatgtccaaatgaccaacacgagggacagaggatcatacatgtccaaatgactgttggtcgggctcggtctgggcacgactaggatcggcacgacgggaactagctcagaccggtagggttcaatatcgtgttgtgtcggggcaaaccgcgggctaaatgaagcggtctaagggcctgtt

SEQ ID NO: 88240 - DNA, 454 bp, Zea Mays
gaaacggccacggtgccgaagcttggtgaagggaagcttggtgaagggacatcttccgtcacggagccaggacagtctgctcctgtcggccgatgcgctgaagaatcggctgaagtgccaaaggttccggcaaccggatcggctgaagcactgaaagatactgccgaagctaaaggaaaggcagccgaagagcgagaccgagaggaaacggcaggaccaccaaaaatcttaagtccgccaccggagctagaattgccgaaggtgtcaaaagctcctgcaataactcccaagaggaggaggatggcaagtgtgctggacgctgtcatggagtcgacaagggcattgactcttgcccctacaaagaaggttgccgaagctgctacaacttgcgttgaagcgaagctgggacctcagttcccactgaggcagtgcctgctggaactgagcaaagaac

SEQ ID NO: 88241 - DNA, 344 bp, Zea Mays
ttttaggggatccatgggggaccctaaccctagaatagtgggtggtctagattagattcacccaaggaatatcttccgtgccatagaatttgtgaatgaatttgatcagaaggattgtattctagatcttcaaattgaggacacccaagccccctttattccaggtcactttgacctaggcaaacataggattctgatttgcattttcattgttaccacatcggatgcagtcccttctgatatgatcaatatcattaatgactgtcatcatcagcttcaaagtgcacattgcaaatatgcattgcagagaaagtagagttgaccagagtaagtcttcctgccat

SEQ ID NO: 88242 - DNA, 502 bp, Zea Mays
tcgagatcaacggcgcagaccgaatgaggcgaagggatacgtgccgcactaatctgaaccgttcagaggggaaatctacggccctggtttaaaatgtcgtccactcatcgcgtccacacgatcacgatccagcggcgcctatcatttagccaaactggtacccttgatctaatcctatccgttcgccacagatcaacggaccaggtcacgtctcctacctctgccaaaatccaccacggcggcgattcttcctgcggccgcgcccctcaccggtgatagccatctggtgaattgaaacctaatcctatgttccaatacgcgcagatggtacaatgcgtcaaggtgaatacgtatgagcatcacgtaccaggaattgcagagtaggggtcccaagcaccgatgaactgcggaagcacggcagatgagcccgacggcgagaaattcccccacaaccgatcgcgaatcttccaccgggatgcgtcgagaaggcacaacaccacag

SEQ ID NO: 88243 - DNA, 335 bp, Zea Mays
acaagagtattactaagagttgcaaaaggatatgttacattatggtgtagttgaggactaggaggaccagaatgttagggttttgggggttgaggcatgagatttagggcattgtttattataagtaataccattctgtacaaggttgcttcatctttctatttttgtagaaaaggaattacaatatcaccagcagcagaagaggagccacacctttacaccataatagcctatggcatcggcaaaatcagcaccttcttcaagcatatgtgcgcccacacctccatccaccactaccacacacaacgctgcaccttctatgttaaacacattga

SEQ ID NO: 88244 - DNA, 357 bp, Zea Mays
gaatgagagtatgtttaaaagaatcaattagtcttgtgacatgtctagatgctcctgaatctattatccaatctctataacttctacatgaagatgcaagggcttgtgcctgagtacctgcgccgaatgggcgtagttggccatgttaccgaagtgctgggtggatgtagttgccacagaaacaataggagtgctagttggacacttagattctttgcccttatgccattcttcccattgtttagcttgttccccagtcagggtgattgagggggtgtcttcagtgaccgctacattgacacgagggccaccacgacctctacccctagcatggccaccatgcccccttccatagcc

SEQ ID NO: 88245 - DNA, 465 bp, Zea Mays
gtcacccagtttgactctgatttcaatcttctaaactggtggcagcgacacaagttgacatattctgtgctttctatacttgctaaagatgttctaactgtgcctgcttccactgtatcatcagagtccaattttagtttagctggcagggtgcttgaagaccggtggtgacgcctaactcctgatatggttgaagttttgtcctgcataaaggactgggagctcgctgacttgcatagtcagcacacggtggagaaagacaccaaagaactggaagttgtttttgaagcgatgtacctagaagaaactggtggaggcaaagaaagaagaagtggaggatctggtggagctggtggaactgcgggtagatgaactgtgtgacttatgttgctattactactatgttattctgttgtaacttgtgatgaactattaaactctggacttacattaaacctatatagg

SEQ ID NO: 88246 - DNA, 782 bp, Zea Mays
atcaacaacagatggagcacccacattgggatcagcaacagattgggtacacccattggggtcagcgtcagtaaattcagtcacaggcacttcttcagcagcaggaaccgaggtaccaacgtcccgatccaaactggatactcgccggaggcgtctctttttctttttctgctcatcagcagaaggatcaggttgactggctcggcaagggcgcctcgagcgagcactggcaggcttctgagtatccaaagttgtatcagcctctgggaggggtgccactaccaatgccccagcaggagcagcatcagaagagtcctcagccagcaaatcaagcatagcgcttatctctgcatcactagggttcaggggcacctcaaaatggacctaccgttcatcatcaggaatctccccgagcgaggcaaccaaggcactaacttcttcaacagagggccgcactctaaggcccaaactgccatcagtgacaggaggattcgacacaaaaagagtgaaggctttgggaggaggcaagttccaggctgagaatgccactggggcaccaacatttgacactttgcctctaaggatcatctcaagtcggttcaccaagtccatagagggaattcttctgttagtaacccgggttgagtcggctaggcctcgatacagataagctgggtatgccctgtctttcaacggctgaatattcttgaagacaaaatcaacaacaacagcttcagcagttagacccctctccttcagcaatccaacttcagccagcaaag

SEQ ID NO: 88247 - DNA, 771 bp, Zea Mays
tttctctatattgaatgcggggtatatggttcatggagacccaactacagtagtacaactgcagtggaggaatacacgaagtccaatttttctagagaaatcatgcgctacagcattagtggtagtgacatctgacgatgcagtctgtccatccaaaatattcaatatatgagatgacacgcaaatgcatactccctccatcctatagaaactattatttttagattggttaactgcatatatcacagagtacgatggattaagatactcgtgttacaagccttaatggtctaactcatgtataaaaagtcaattgagtttgcatgaacttgtttgttttgcatcagtggtcgtgagtaacgatttctgaatcgtaaatgcaaactgaaggcatagatttgcagcaactcacattgtatgcagcaccaaaaatttatttggacaaaacaacaaacaggtgccgagcgtttttggtcctccttttgcatgatctgtatatatacgattatccatcaccattcaaccacgcagagttctcaaatttgctcgatcgaaaaacataaaaatgatgaaccaggtggtcttaaattctaactgagctatgccattaaaaaagataagtaaacaaaccaggtggttgacaatgttggagccagaggtgttcccccgcgagttatagaaccacttgcggcaggagggcacgttgcacctagccacgcatgcaggattatggatcccacagtaccggcaggcgtgttccacgaagtctcc

SEQ ID NO: 88248 - DNA, 356 bp, Zea Mays
aactttttcatgtagaattcagcaagcttcttcttatacctaggatcaagaaagcatgctagtgcaagactcaaactagaacaactccaatatttctcaaacttgtcactcatagatattgccattgttctaattgtcaaatcttcatccacacaccattcatcaagcagttcctttatttcacagaaacctctatagaatagatttgcagttggatataaagttccggatagtaactcggtaagatcataaaaattttgcaagcactggaaaacttttgcagccatgccccattcactatcagaaggacaaatgttgttatacttttgacggtttgctgttttagcctaatgaaa

SEQ ID NO: 88249 - DNA, 396 bp, Zea Mays
gcaacgagtagggtcattttaagataccgaaccaaatttaagatagaatatgttgatttatggtgtactacctcttctaggcacttgcccccccagattaaataaccaccccaaacaactgcaataatagtgagggtcgaccttactcctttttctgggcggaaaggggaggcaaacaaaaggcaaggctaatcattgatggaggtgtttgcacaactcaaagtttttttcagcaggtttgctttcaaggagttcccacccgcgcactgtcttcaaaagcaacgcattgctatcgtatctcacttatctgtgttgattccctgatatataggccactatgatgccatgtgcacagatttggacacaagtctcccgtggttgacttactgaattaat

SEQ ID NO: 88250 - DNA, 405 bp, Zea Mays
caaaaacacacagtccctgcccaaaccaatttggcacctgcggacagtccgccctacaaggccagatggtccgcacaataatacagggactgtgccgagagcaaccttctctagtcaggactgcggacggtccggcccaaggcccggacggtccgcagtacaaatgacaggaacaacgatgttaacatactttggaccaccactggatggatcgcggacggtccgccaaccccataacttaacaacttttcaaacacgcttttgaaaagatttttaactcttgaaattggaagcgatgttagtcctcatgcaaatgcaaccactagatgctctatgaggcactaagtttgacacagacaaacgtcattgacccctcttaatagtacgaccatctagcctactaat

SEQ ID NO: 88251 - DNA, 916 bp, Zea Mays
gcaatttttttctcccaatatctcttcaacggaaatcccatttcatatgcatatcagctatagaattggtacgcctcgtccacattagaaaatgtcatcccgaccttcagtaccaatcgttgatctatactatcatcctaatcaattaatgaagtcatcatgcagtgcacatatacaaaataatcttaaagcatgatgaatttctaggacttcaaaacttgcacggacagtataacaaatatgcacaaattttgatattttcttactgaacttacatggctttgaagaatgtgtggtgtgtcctgatcatgatcaccaattatcctcatgggtatctagtgagttgctcccatgaaacttggatgacctgcgttgctgtcatcaactaatcctagcgcccttagccggtgttgttacagcacaaatattactctttccacgtccagattgatctgcatcggagacaaggctacatgtggtcgccggcactcgtataccttgtggcgagattctctacacaactgctacgacttccatgggcgtagctactcttcccccatgacgaccattagatccacagggactcatcgtcgatgtcgcctctcaaaactgcactgattcactaactgttgccatcatgtatacccctaccgctcctaggtcaccgatccaaccagcagtggtgtatagcccagtgttttttggaaagatatgatgcaaatatatctgaattaccctactatatttgtcaaaaccatcattgtcgagattcatggcaactgctcaaaaatctcgcgtgatttgcatgtcgtgagatttacgtacaagtcaatagggttacgattacctgccaattgtgttacaacatcataaacacacatatacccgtgtcacgcaactaccgggtcactacccg

SEQ ID NO: 88252 - DNA, 655 bp, Zea Mays
cctcgactgaaggggggaagtaagaaggctcccgacaacggagaagacgataaggacgacagcttccccgacgtgcataactgctacatgatcttcggggggacaccatcaaccttccttcgaggcaacacaaacaagaacactgggaggtcttctcggtcgaggtagcaaccccagtctacctagactggtcggactacgccatcacctttgaccgagacgatcacccaaactatatctcgagccccgggagatatccgcttgttgtcgatcccatcatcggcaacacatgcctcatgaaggtactcatggatggaggtagcagcctcaatatcatctatgcagacaccttgaaactcctgggggtcagacaatcccagatccggcccatggccgcgccattccacgagatcaccccccggcaagagggtgcatccccttaggcagatcaacctacccgtctgcttcaggaaccacgccaactttcaaaaggaaatcctcacgttctaagtggtggggctctgaggcacatatcacgccatgctcgggctgccatgctactctaagttcatggttgttccggactacacatacctaaagctgaagatgtcgaggccagcgggcgtcatcaccatcggccccacataccgacatg

SEQ ID NO: 88253 - DNA, 432 bp, Zea Mays
ggagggccaagttatagcatatgcttcaagatagttgcaccggcatgtggaacattatccaactcatgatttagaattgcaggagggccaagttatagcatatgcttcaagacagttgcaccggcatgaggaacattatccaactcatgatttagaattggatgttgtggttcatgcccttaaaatatggcgtcattatctgctggggaatatctgccatatatatacagatcataaaagtttgaagtatatttttacccagtcagaactaaacatgagatagaggagattgcttgagctgattaaggattatgaattagaaattcactatcacccacgcaaagccaacatggtggctgatgcactaagtcgcaaggcttcttgccattgtcttacagcaaggacctctaacaccacattgtgtcaagaaat

SEQ ID NO: 88254 - DNA, 902 bp, Zea Mays
gttttggtaaatatgataaaactgtcgaatgagcatgctgtgctgatctctaccaaaccgattgttcaaatgcaaacaaaattcctcccaattcatgcttctaatatgatgttccatagattgcagccaaaatactgctgggccctcgaagtacattattgcaaatctaatccacatatctctagccacagcgtagaaatcaaaataaatctcacatctatgtttccacagttttgggttagaaccatcaaaggtgggaaaactcatattaggcagcaatgatcccgatccctgagaccaattacccactgattggtttagcaccgatctccaattgcaaggtgtctgggggtttctgtgattcgtacctccgaatgacgagaacaggcgctgtccttccatgttcgccccaggcttctgatgggaatgtcccgctggatgtagggagccttgggctgacgaaatctcaacagatggaatctcctgcagcaccgctcccccagccctccttgctcctccacagccggttggttgatcagcgacctcttgccgagatactccacctgacctgaatatccttcaacgcccccgcaatcaggttcatcttcgcttccacctccggcttccacttctgaatttctccttgctcagcaatcacacccttcatcgtccactccatacttgcaatcgagctctgcaccaactccatacgcctgtgagtctcttgattcccttcctcaatcatcgccagtaactgagccatcggatcatccgctcgcgtcggcgccatctctctgttcttcgtctggaacctggtccggtactcgtgggaacctcgtccggtactcgttgggaggatccaggttagctccgaataccaactgttagacacgagtatttca

SEQ ID NO: 88255 - DNA, 653 bp, Zea Mays
aaattattcatcgacccatctagtctcgcttcggccttcgaaggccgaaggtggaaattgatggcaatgtcgaagcatgtcagagagcttttagcactgtttgtgccttcattggcacaagggatctgattcaagagcatatatccttcagggtatggccacttgtggaaagctgggatatgccgaaggaaagcaccgccgattctagtgagggtggtctggtccgactgaagtatacctttagattcagggaaaactttgatgagccaaatgacgactggctgaagtgcatcgaagctaccagtgatgagctacttggagcatactccaaggccgaagataatgctctgtccgcagcttttggaggtcgagggaagaaaagattaaacacggtatttgatgctattggcttcgtataccctaattaccgctactcgctgcgagggcaagagaaaaagaggaagattgccgcttcggtcaccccagctgagcctgagccgaagagcagaaaggtgaaggttctgacccaccgatcgtgttatattgaaccggccgtagtgcctgaacttggcgcaagatccacttcagcagccgaagcaacaaaaactgctttgattacacagagcgctgaagagccgaccgtaatgcccaag

SEQ ID NO: 88256 - DNA, 1026 bp, Zea Mays
cgattttgttattggacgagcgagcccttgtagacctagactagatccacagctcactgcaaacttcgttaaggtatatgtgttattcaatcttgaaggatatgctgcatatggtaagggcggagacggagacgactcttgttcgcgaaactcccattgggtcttccgaagtaatgtatgctaactttttttttttttgccaccaccaatgcattcgtaatctctcttaaaatctccttgtgtcctttctggtagtacatgcttttccctggtccttccgttccactgtactgctactgtaacagtgtctgtgtggccaagcagactttttccctggggtgggggtctggactctggagtactagcggggtagggtaggggtggtgttctatggtcagaattaaggccgcatttattatttctgttcttcattttcagtccttggactgtgtgcagtcctatgtctaataattatgttggcctgttcactgcggctgaattaaaactgttcggactattgtagctgaaatctttagagattaaaaccgcagattaaaacaaaagccggcagattaaaaccgcagtgaacatgctcgtgattcctgatttaacaaatagtcctaccctacacatccacaaacgttgctttagttttaaatatgctctgacatttctatatattaaagcaggaggaattgccgcttccacgtgcgtccacgtcggtaaaaaaattattggccgtccgatcgttcaccaatggtgacaacgtccaccagccggctcgtgtagtctccatcggcctgacgtctagccaaacgccacgaatattccagagaaatcgcattgccggcgacctctgcatcctctgtcttctcctcagcacaccggatgctgtcgcagtccacgacgctgtccgcgccccctagcccccagggcctgctgtccctgtcggcatcctcgttcgctccgcccgcatgggtagacgacctccttgcactcacgctcgccgaggggcaggggcactcg

SEQ ID NO: 88257 - DNA, 571 bp, Zea Mays
caacaacacagaggaacaaggttaaaggacgaagtcatagttccctttgtttggattagtcgtgaattcaaagatcttaaaatatattttgaaagtccaaggacttggatgaacatccaagatcagttgggtgttatgaaaatgtggtgtgagaatttatggacttgatgacatgttgagacaaatttaggtaccaaaaatgtattttgagaatctagttgacatcccgtaacaaatttaggaaccatacatgtattttcactcgtatcaaattgctgctctatctttatcagagaaagtgtaaaaagaaaatacgcatttcggacccttaactttgatacgaaggtcaagtttgtccctaaaattttagataggctaatttggtccctcggcttccatttttggacaaagtcatccttatgctgatatgttgcactttgttggtgatttgaaatatcgttttacccttggttcatgtagcccaacacatgtatgcgcttttatgctcccttgatatatacatgcaaaaatatatttgttaaccaacacacaatatgatttatacactatg

SEQ ID NO: 88258 - DNA, 588 bp, Zea Mays
taccgttagagctgattaaatgtcccaggtacgttgtctgccgttgagcaaaggagcgtttgcttaatttgatttttccagtgttcagctgctagcaaggacatgacttgatgcaagtggagcagatgtgattggtaatccgggctgtagaccaggatatcgtcgaagaagacgagaacgcaccgacggagaaggggcttgagtgtggcgttcatagcgccctggaatgtcgctggggcacccgtgagtccaaaggcaagcactcggaattcaaaatggccctcgtgagtagagaatgttgtcttgtgttcttcccccgattgaagcatgatctggtggaacccggaccataaatccagttttgtgaaccaactggcgcctgctaattcttgaaagatatcctcgataactgggattggaaatttccttttgaccgtcattgcgttgaggtgacaaaaatcaacacagaatcgccaagagttatccatcttcttgaccattaagataggtgagttgaactcgcttgtactgtgctgaatgatgccagaagacagcatggcttgcacttgtgtttcaatctcagttttc

SEQ ID NO: 88259 - DNA, 1207 bp, Zea Mays
gttctaaatatttttatacaaatattatgtagtagtaacacgtatgaactcgaactccgggtgcagaacgacatagatatatggtatatagcctgagacaccatacatacatgtatgataatgaataaatacatatatatcacaacgtaccattattgttattttttagtttgatttgattgattgaagctcatcagtagattcagatccaatgaactgcggtgtggtgtactggtatgacctcgtgacattgaagagaaaaggcggcgggcacgaggatgaacatgaccaacacgacatcgtggtgcacatgccagacaacaagcgtggcatgagtcagacgtaggtggctagaccaaggtcgtcacgtgagtctctagggcactcaacctggttcgctttgacgacagatgacgctggcaataggttgtcatgtcaaggccatcggagtagctccaatatgacatggggctcgttttgggtaactttaggtacactctaccctatgactctgtagaatcaccgaggtgtctcttcatgtggacgtggtgtttgacaacggtgcactttgcactctcatcaggcaacatgcaaactggtaggagcccaagcaaataaggatgacaattaaaagcacaacatgcggaactgccagaagacgaaccatgtcttgtagtcaagacaacattgccagccacttcccgtcactctcctaggcatcctgatggattaaaagctattggaactggaagccaaatcgtatcaaaggcaccatctttagagcagactgtagacatcaccagcgtgcttgtgcattgggtcacctctatgcatatggggaccaacaaggcagacacttatctaagccacgtgtgcaccacatagttccggcccaggctgcctgaagacactgcatgcgtgttgccatgactactcccgcatgaacattgtgtcatggtgcagtgtcagcatagttttgtactgtggccatcacgctatcggcctaggctgcctcgccatggttagcaacaccatgcacacgtggcatcgtggccgcaagttctagccacctcgatgtggtcgtatctcggatgtggctagaccgttaagtttaattccgcaattatttcggtcaccaaagcgattaagttttagaacagactattcaccccctctagtccatcatatagaccctatgacagcaacc

SEQ ID NO: 88260 - DNA, 526 bp, Zea Mays
aaaaaaagtaacacaacattctaatgagtatatcttaaaatagattccatgtggattgccaaaaaatgaatagtccaatattatttacttactagtatgacaactgaacatctatatatcgtcgtggacacgttagtagtgcttcttgtatgccacttatgagcagcttcgcaaaggtcattgaaaattaagtggcaccagtctgtctcatggaaacgatccatttcttccgtcagtaacacctcatggttagatatgccctagctggaagtggggaacaacaatctattgaataatataaaaaagaagcatctaatggagaggtcatcatcgtctccttttctcaaacggtcctgaagtgatgcaacaacgaactcatctttagacaaaccaagttcagccctcaggttattgcccgccactgcttcatcgatgcttagtggcttaccacccccggcattcggtaggccaaggattaggtggacagtttcttttgtaatctttagttccttgccttgaccggggc

SEQ ID NO: 88261 - DNA, 355 bp, Zea Mays
tttctcagctgaagctagctaaagggttcaagggcactgcttctacttccttgccttcgttgctaccagaattcagttaccctgtcaacatcctgcaaactcggggcatcaccaagggaactcgcctcgtccaacaggtactggtggaatgggccggtctgcctcgcgatttagctacctgggaagacaaggaagcgctccagcagtgttatcctggtgcacctgcttggggtcaagcaggacttcaagggatggggaatgtgagccctgctcccatgccagatgtgccgactcaacctgcacaagaggaagcccagcgtccaactcgtccacgtcgccaacgtcgtgccaatac

SEQ ID NO: 88262 - DNA, 638 bp, Zea Mays
atcatatggtggtaatacatttgagctccaatgtctagcaaagagaattgtgagcctttgttgttctgcttcaggctgtgagcgcagttggagtgcattttctaatgtatgtgtaccttacccaccttttgtttgcatatttttcttctcaaaattgttgtacttaggtagctaggttaccttctcgtcgttatgcaggtccataccaagaaaagaaaccggttagaacataaaaggctagacaaattggtgtatgttagctacaaccgaaagatggcaaatagattttaaagaattagagagttgggctcaaagggaaagaaaagcaaccccttgatcctacaagagttccaatgggaaaatgagtgggttcatgaaaatgtagaggacaataacgatgaaaattctctttggagggctgttgatgaagctgttggtgcaactgagcatctaaggggaagaaatctccctagagctgctgctggggctgttaacaaaacatacactagaacaaggaagcgtgttgctcatcctccacagtttggtgaatctgattctgatgaagaaatgcaagaacaaggagaagaacttgttgttgcatccactgaagatccaactgaagatggaataggctttga

SEQ ID NO: 88263 - DNA, 502 bp, Zea Mays
gtaaactctatctttgttttcagaaacaggagcaaaatcaaaaagttaaaatatatgaggggaagtcacgaatatattcaaaacatgggtaagaacataataagtgtatggcgtgggcttttggccatcgttagaaagaaggttggtcgacaccgtttaatcagtcaacagtctccattcctataaatgtagggttcatcaaagcccataaaggctacaataaatttcaccccactgaagatagacccatcgatacggtcgatcaagtctactgtcgtctggtccatcgaagactccgaaggctacaataaggacttcacccagacggcgaggtgaggaaaggtcttagcaaacgagatccactattcacatcgagagcttggagctccattgaatactatgggtgcactactgaggacatcatcgatttaagagtgacccagaagacactgaagaatttgtccatgtcccttggacaacacacattgtccatgacgaaggc

SEQ ID NO: 88264 - DNA, 743 bp, Zea Mays
ctgatgaggacatctaccccaacaaaggaatgtctaccccaactgaaccagcacaggcgccaccaggaccaatcactcgagcctatgcacgtaaattaaacctcatgatgattctgaagaatgaagtaccagaagttttctaaagtgcatgcgccatctatgctcatgatgaatctgcccagaataaagtctaggtgctgcgccacttatccgtcttttagatttggaaagaaataataaataaggtgctgctccacctaagtaaggaatggggatcaaggaggtggttgattgggcaccaattccctgccttatgggcaagagattgtgtggctaattgggcgcctatttcctgccttgtgggcaggagattgtgtggcagattgggtgcctattccctaccttgtgggaaggatggacgcacaccacctcctcactatttagctaggggctgcgcccttaagggtgggtttgctttgatagttttagccatcgtgcagactttctatactgcagttgtgctcaacggccacccagggatagcctagtgaaccccaactcgtgagtgattgatattcagttttgccaacatcttggtcttgcttgtttcttcgattgctcgcaagaatagaacttcgtgttcaggttgatttttccaccaggaatataaccattcggagttggttctatgactgctaaggcgccacgacctatttgttcgtagtcaaatcgcgagagtcacc

SEQ ID NO: 88265 - DNA, 417 bp, Zea Mays
gaatgctccaaatggggtgatgaatgcagttttctcctcatcttcttttgccaagatgatatgatggtatctagaataatagtctaggatggacaacatagaacagctagcggtcaaatcaaccacctgatctattctggggagctcgaagggatccttcggacaatgtttgttgagatcagtatattcgacgcacatgcgccaatccactttattcttttttagtacaagaataggatttgctagccactcaggatgtagcacttctctaatgaaccctacaaccactaagcgagctaactcggcgcgaatagcttctctcttgtcaggcatgaaacgacgcagcttctgtcgaatcggccttgcttgacgatagacttttaatttgtgctcggccagttctctcgggactctcgg

SEQ ID NO: 88266 - DNA, 1383 bp, Zea Mays
ttattgctccttgctttgagaagcactcaccttcagacctctcatagtcatccgcttgcttgctaatttttgtttgctcatcatcatcattgttcatcttccacatcacatcattgaacatggatctaagtctagcagcttgtctcctatctttatcccttaaagcaaagaacttgctcggattcaagtatagggctgctccatatagtttttgctccatttgattttcccatcttttttcaaagcatgatagtacatctgcttgcaatcttggcttatctttcaatgactcctttatggtggtttttgcaacatccattgctgccatgatttctagggttgctagtgtctcatctccatcagtaatccttagagcaatgaggagtggttgtgaagcccttagacagttttccactttttcccaaaatggcatagaaagcacaattcttgtgatttgcctcccttcttcagtgttgggaaacttagttaggtgccactcatcactgacaaataaactctttagaccatttctatgcctaagcatgctcgccaatgtcagaaatgaggtagcaaattgagtcacacctggcctaacaagatcaccacctagcttctctctcattaggttgtgaattctaccatgcttgtaaatgaacatcgacactttcttagccatattgatgcaactattgaagtccttgatctttccaatgtcctctaatagcaaatccaaacaatgggcagcacaaggtgtccaaaacaaatgggggatcctatccatcaagattctccctgcagctttaaaattggctccattgtctgtgacaacttgcaccacatgctctcttccaatcttgtcaatttgcttctccaacaaatcagccaacatgttagcattagctacctcacttgaagcatcaacagaagctaaaaagtaggtccctgccggactgtttactagaaaattgatcaagtgacggtgtgatgtgtcggtccacccatcagacataagtgtgcaaccatattccctccaagatgcttcatgcttcgacctcaactcgaatgtcctcttaacagccctctcaagccaaggcaccctagcttcatggtatgatggaccacaatatccaggaccatattgcccaatagactccaacataatctcccaacttcttgacttgaatacatgcagttgtatcttattttcataaagaaagtcagctacatggtcgtcaactatttgtttagcttcttttcccttttttgtgcagtgctctagagtagattgagacgttttggatttatgcctctctgcaactacctcttctggtgacttgcagagcatggaagcaatcgactttgaaggcttatgagcaattggtt

SEQ ID NO: 88267 - DNA, 470 bp, Zea Mays
gttgaggtcactagatccttggctatgcacttcgaccttatctccacccaaacacacaaggagaccagcagggagaggagatcttttcttcaccctgaatctaatccaaggttcagttaactaaattactctctccactatccccaaaacagtcccactcctatattttttctagtagtgagaggccttcagcacctgagttatccacttcacccccaccaacacttatccatatgtcaacttaaaaacataagtggagttcagcaaggtaggaagattcttctttagtttatcaatcgaacactgaatacaattcatcagcactgctgctccttttgctctcttctctgttcaattcctgatatctcacagttttccatagcaacataccaacctttctcaaccaaagttattccctggatatagctcattagctcttccactttggtatagcaccccaagatgggcaa

SEQ ID NO: 88268 - DNA, 478 bp, Zea Mays
gccgtgttccctgttggcggctggggaaagcaggaaccgccaccatctgtctgcggtctctcttcacctcttccacctgctggcagatgagcaccacgaccttggcctggccacgcccaagttctccccctggactgatgccttccgcccccataaccagcacgtaattggttcgggccgctgtactggaagccttgacgcggcacacctcttccggctccaacaccactgcctcgacctccttgcgtcgcctgctgggactcatcgcgattctccatgcctggctccggaagcgccctgaccgaatccgcgtaagaacgaaaccctaaggcgcagtagtttgttttgggggcacgccgcaggtcgggaattggaagagctctatcgaaaagagacgcaaggcctttcggaggcttgtatggctcatttcgaatattgcttctcgataacccgtcaccagctgggcccaccaacgatt

SEQ ID NO: 88269 - DNA, 1194 bp, Zea Mays
catgagtgtaatcttcttttggtcgaaagtatagaaacatgtttgtctaacctgtttttgcaggacatcttgtgatcggtatggctgttgtgtgtatatgatgcatattaatgaagtattcatgacctgcgtgtcatgaccagggcaatacggctggagccatatgtattgtccaaatttgatgtaatgacatgcatgtcaacatgtgatgattcaaagcgtatatttaatttggttactagcatacgttagataggtctcgaaggactcatcacctgaaggatggcatacctatatcatggagatggagatcatcatgatggacaaattattggagatggagatcaccatgtgacagcaagccataccgaatcacaactattgtgtgaatgccattcttaatgttctacttgttcatgttgcatatatgttcttgcgtgcgatgatataagtaggagaatccctcataaatatttaagctcaaatgcctctccaaaccttgcactatcatatgtcttgtacaatgggtggtgggtctatgaaattagggtgccaccagttttccttgactagataggtttgtatcggatacaaactatagaaagggttggttaacttaaacaaaattagctcaatggttaaggactttggggcataaggttgggagctgagagttgcttacctatctaccttgtcttccaacggtgatgctaaagctcactagtagacttgttagttgtgggttctgaatcattaagtatcaatcgagggatattgattttagtgggagtagattctattaaatgtttaatatgatttactcttcatggttatttttgtcttagtattttgcattattttgttgtcgataaatggcacctagcacaccaacatttactttgcgatcaattcttgaaaaggataagttaaatggaacaaactatatggattggattcgtaacctgagaattgttctcagggctgaaaaaaggaagacattctagacacccactaccagaggatcctggtgaaaatacaactgctgcagctaaaactgcttacaagaaagcaatggatgctaatcttgaagtgagttgcctgatgcttgcttgcatggagcctgagctgcaggtccagtttgagacaaaccatgaggcatacaatatgatcgtggcgctcaaggatatgttccag

SEQ ID NO: 88270 - DNA, 440 bp, Zea Mays
ttccttttgagtgtctttatggtaagacgcctaagtattttagtcttcgtttctttggttgtgtgctacgtgttgctttcatcatgtgagtgaaccaaattcacagctcagtttgttgagtgcgttttcttgggtacaatgctgagcataaggggtatcattgttgggatccagtcgctcgtcagaacagggcttcttgggatgtgatttttgatgaggctcatcctttctatcctcgtccccatctgatgcttcttcagcatagttggttgaccccacctcctttctgttctttcctgatgcccctgcttctattgtactggtttcacactcgttgtagtcttcttctgtatctttttggagctttcttctttgcttcctgattattccatgaagccttccgtaacacaagtttacacacactacacgatgattccttt

SEQ ID NO: 88271 - DNA, 727 bp, Zea Mays
cccaatatgtcatactcgatggtgtgggcacccacacctgccactatggcatgtcacactcttcgttgtggtagaatgaaggcatactccatatacggtgtaacaactatgataagataggagtagttggacctctgatgagtagaactcgttgttcatataaagatgtaactctctcatcccttgtgctataaaagagaggtgtagacaagcattgaaggggtttggcatactcttgatcttgctctcccttagcatatattggaatagcatataaggttcactagctagaccaaacatcatttgagtgtataagctgtgtctagacttgcatataatcatccaccacacaaaagacataagttattacgtttaagtgacctaaatctctttgtattgtggttgtgcatgaaaccttattgatgcttgattctattagccccaagcctatgctgagtagagatgttggtgcactttgttatgttgtgccaacatggatttactggcacacctagtcgttggagcagtggcctctatcactagctccagcaatattgacaatacactgcaatgagggtggtatagtggtattgtttggtccatccctctactacctcaggccggggctagggccaagtcgggttgatcttcctccttcggcattgtcaggacaactcccttggatggtctagtttaacaactcctcaatgggccacatggcattgtt

SEQ ID NO: 88272 - DNA, 978 bp, Zea Mays
gtgcagcggttgacgttttcttgagagaaaaaagaggaaaggtagtacttgcatgcacatcgtgctactgcggctgttggctggtagcgaggaaaagggcgatgacgtgcaatcagttgcatggttgagataaaaaaacgtgcatgtgtatggctccattcatgtatccgttatttatttagtcactcattcatttattagaacaaaaaaatgcagctaagaagcatcgttaacatctggcattatagatgtttatgcatttttaagccgtgaattcctgtgcacatcgcattagcttcttgagactattgttgatactaaattatttcttgtcgcaaataattagtagaaaaatacatgcttaaatacgagaaaatatcctttttacacctcatgtgttatgttcagacattaattctggtgtcttattttttctgcattaatattatttcatgtgttaaataattagcagaaaattattaaaatgcatgtgaaggttatattgtgtatactcaaatcgctctaaatatttgtgttgtgttgagcttttgaactcacgccgagcgattaaattgtatcgtgggtacccggacaagccgatcaggctaaattattaatcggctgagttatgacattagctgaatattgactgcgccctggcaacacgacgcaatatttgtgtcgttcgaacttggctgcgtcatgtgattgctatgttgcgctctctattaatcggatcgctcccgttgagtcagaccgccatcgctgagtcgcgtatttttcgcatgccctgtaggcactgtctgtctgccgtgatcatggagtcacaattgcgcctgttgcgcacgttgcgtggacttatcgtgtaccccaattaccgagtcacaactgcgcctgttgcgcttgttacgaaggcttgttgtgttgtggtagcccagatggccacacacgcgttgacatcagatacgctagaacttg

SEQ ID NO: 88273 - DNA, 575 bp, Zea Mays
cggctacgaagattgtagctgcggtccgtcatcttctgcggctacattatgcccctctgccgtcggcttagttgagagagagagagagagattaggataatgatctttcttgattccaactcaggtttggttacagaaatatataggccccttggcctaactgcatggagctaacttctccctaattctaggcatgcaaaaaacccttaattctaagcatgcaaacaacccttaattctaggcatgcaaacaaacttatctagtttctatccttaattctaggcatgcaaacaaacttatctagtttctatcctatccactagagatggtggttgttgcctcctgggcgcgctcacgcgcacgtcgcacatcccgggcacgtcgatgcctgacgtagggccggccgtacatgacatctctcccctcctcaaagaccagctcttcctcgaactggaacgccgtgtatcggccgtgaaatacgtcaaattcctcctaggttgccgactcagcctgccaccgtgccgtagttgtgcacaaatttgcggtagtagcacaccaaccgaggaagccatgca

SEQ ID NO: 88274 - DNA, 420 bp, Zea Mays
gaaatctccccctaatgcctggaaaagctcatgattcaagcaagcgtacgggccataaatagattctcatgaagagattctaaaacttaatgatcgacgaagaataaattctcacatagatccccagctttctgtgtgcccatacatgtacgctgcggtggtgagattgggaacatacccaatgtacgcatgggaaatctttcatggattcccacgtactaaaaccataggggaacttgtacatgcagtacatgcagttaatcacaagtcaggagcgtgcaaaacttcctgactccaaccataaccagttggaaatgacaattcattactgatggtcattaatgatctgaaattttcgaatctatcatagattcatcatatcctttatggatatcattctgaataccaagacaaacaatc

SEQ ID NO: 88275 - DNA, 544 bp, Zea Mays
ggagatttggtgggaaggaggaaaagagaattcaaggtgatttttgtgattatctcttgtttattggtgctgcaattccattgaatagatgttacgtatgcgaattgatagaggtgctgtccagaaatttagagggtgggcgaacagcagtagttctagggatttctgggaatttttcgtcggcaattagtggggatcagtggaagaatcatgtagaactttgtcatacctttccaacgagtacttatgcgctcgattcggaattatattttagaagatatcgctgtttgaatccgggtatgttgctgtaaaaaaacatatttctgcaggtgggcgaacaacagtagtattagcagtttctagggatttttcgtggaaaattagggataatcaatatgagatcatgtagagctttgtcatacctttctaacgagtacttatgcgctcaattcggaattatactttagaagatatcgctgtttgaatccaggtatgttgctgtccaaaaaaacagatttcagaatgtaccttgtggatgattttg

SEQ ID NO: 88276 - DNA, 459 bp, Zea Mays
tcataaagccgaagttgaagatcttcagaaaaagcttgccaaagctaatgaaaattttgaacccacaaagggaaagcaagagataagtgaatggacaagtgctaggctggaaagaatgtggaggagcgaatgagtcctaggagagatgctatgagaaatccttagattgcgccaagaaactgaaagacaactttgccaaggtgggtgcatactcatcggagcaaaagtttattcgaggagatcccgaaggagtcattaaatggatcagggaagagggtgaagcttttgaagaaattcttagcgaccatggggatttttgtgccttcgcctgtgctcgtggagttgcagcgattctggataaaactggttgtgaacacgttaaagctgcagcccaggcagaaaccgtcttctccatagacaacacgaaggagccttcgaccaaagctactttgatgggca

SEQ ID NO: 88277 - DNA, 358 bp, Zea Mays
tgggaaaatagtgttgccaaactagcccttaaattatcacatttagcctttgacttcctaatgatttgagtgtattctttaagtaagtcagctaactcatcataggaaggtgaagcaaactcatcatcactatcactatcactatcatcaataacatcattctcaatttgtaccttccgttcacctttagccatgaggcataggtgagaagtggatgagggtgatggtcgtggtgaagagaagtccccagcgatagcggcaattttttcatcattttcttcttcacttgaagaagacccgcttgaggactcaatgtcagtgagccagtcaccaataatgtatgcctttccatttttct

SEQ ID NO: 88278 - DNA, 785 bp, Zea Mays
cttcgattgtcatcgacgctggttgcccaggaaacaccccttcaggagcgataagaaaaactttataaagaacactgtggtcaccaaaggtccgcctaaacgtcttaacgcggcagaaatatatgctcagctgaacaaccttgtcctaaatgaaaagggggacaagtacgaaggattcagagtggaccacaactggacacatatatgtggtctctgggagctcccttatatgtcgtcattgattcttgtgcacaacattgatgtcatgcaccaagaaagtaatgttgctgaagccctcatacccccctgcttgcattttgaaaaaacaaaggacaatctgaaagctcgaagagatctagcaatgctttgtgaccgaccaacccaagtgctcaatgacaacggtaagccgccacgtgccttgttctgtcttacctctaaagacaagatcgaggtaatgagatggatgaaaaaaattaaatttcctgatggttatgctgcaggcttgaaaagatctgtgaatttgaaaacgggaaaactaactgggttaaagagccatgacttccatatattaatggagaggattatccctgtcatgtttcatggttatatgcccgacgccatgtggcaagcaatagctgagctaagttatttctacaggcagatttgtgtcaaagaaataagtaaaaatatgatggagaagttggagaaacaaataccagtgttgttatgcaagctagaaaaaaatattcccacctggattcttcaatccgatggagcatctactt

SEQ ID NO: 88279 - DNA, 556 bp, Zea Mays
gtctagagctatgtagccgcttagcctagtcccgtaccttaagcctgcacctccaccactctgcaacgggtgccctagtatttggagttgtgatcatgtatgttcgggcataaggcttggcttcccaggctaaatcctgcaggtcctattgcatgaataaaaggatggcagataccagacattgggtcctatgggtgtgctactaacacttcctagccgaagttgcatacaggtctaggtcccagtccaggctgcatcctgggggccgggtcaccaactaattttcccttaggaatactggtatccagcctcgacaagtcgagactacatcccaggggggccgagtatcagggaggagttaataacgctacacacagcgagaacaattagcatacagataagtgttgtttgattaatagttctcaagagtattgtacaaaaccaaaagttattacatccgccttcaagtggagccctagcctcatttctgtaggtatgaactactcggcatcggcagggtcgtgctggaagcgcgcggccaccgtctccatggcct

SEQ ID NO: 88280 - DNA, 363 bp, Zea Mays
ccagggaggtggtcttcgtcacggcggggatgatcgtcgaccgatgaacccgaaattgctcactggaatccttcgggcccgtggagccgctcgtcgtcgtgggcagtgccctctgcgctaccaaccctggtaagattcataccaacatacccgctaggatccaagcgttggttagcacctgtcgttcaaaagttctaagcactgttgcgtgggatggccatcgccggccatggctccgtcgtggggagctatcggcgccgccgcacctatctgcctgagttggggatgtgatcttgaccgttgatatcgcagcggacgttcgagattagaagggatgaaacgttttggctattgtgatgttgg

SEQ ID NO: 88281 - DNA, 541 bp, Zea Mays
cttcaaggcgtctgaatatttactggctattatatgtgtctctctgttaaatcagaagaatggttgttaagtgctaacctgtaaggccattaagggcaagaatcttgaaaatggagtaagggtttggtagagctccaggtccaaaaatctgctgagttgtttgtttgagcagttttccttctatcatagacaaaaattgtcttaggattcttaatttaagcacaaaaactccagatctaagatgaagcagttcttctagacaatgactaggaccatatcaccatatggaaaattaagagacaaggcaaaaaaaaggagcgtagcactggtaagactgttgaagttcgagggttgatgaaaccccctgtcacatgtccaggttcgaaggtctgcacaaacttcttaagggaaaaatctggggaatgtctcccccctgatcagagtcttttcttaggaagacaagcctattaagtgatttgataaaaccagttgctgaacgatgaacttctaaatggtaacatgttatagcagtagacaaaaa

SEQ ID NO: 88282 - DNA, 578 bp, Zea Mays
tacatcaaatttggacaatacatgtggctccagccgtattgtcctggtcacgacacgcaggtcatgaataattcattaatatgcatcatatacacacaatagccataccgataacaagatgtcctgcaaaaacaggttagacaaacacgcttctatatgttcgctaacttgcccttgattccaaatctctgaacacctttgtgtaggattacggggaggctacgctagcgcaaaacaaaattttcaaccccataataccaagaactactgcggttataggtcatggagttaccactagacgcgcagagcagcggaagacgtctcgatgtagacgaacgcgtcgagcagtgccgtgtagtcgtcggcgtccttcacgtccttgcactgttcgtcctagtgctccagatgcagcacctccgaggtatccacacgtacagggaggaagcgccacgtaccgaactgctaggttcgcgacggcggcttggcgagggcgagaggcgagcggctactcgtttgctggtggctgattaggttaagcctaaccgcgcccccgccccctcattatataggcgttatgg

SEQ ID NO: 88283 - DNA, 372 bp, Zea Mays
aaaagatgcattaggttgctcatcttcggcaacaaattggtgaggcatgacaagagttgcatcgtatgagaagcgaagaagagaaaatgcagcagcaaggtcatgacaagaccttcacccacaagaacaggaccatgatgctttcatctatgacaagacatctcctttgtaagtcgatctgcaagcagcaccatgcccagcttcgtatgggccaccatagctccccacatatgttggctagtctcatcttgttggttacttgctttggtttctaagggagatcaagacaaggcaacataattaaaaatatgggtgtcccttcaatttatcttcaatcgagaagcaaacagaatggaaaaggtcatcataatt

SEQ ID NO: 88284 - DNA, 831 bp, Zea Mays
gagagtttaggctctagcaatatccgttgtggagtgccaccttgaagaagccgttctagctagaggcgttgctgtgcgaactacctgagatcaatgttgtcaatgttgatgttgttcgttcaaatgaagcaccttctattggtttgttggctgggccagaggtaagcctaccaatacctcaagaagttgatgcattagtcgaccgccctattgatccagctccagccctagagggcgctctagcccctaagggtgctatagctcctgagggtgtagcggttggctcctctcctactattttggtggaagtccaggttgggtcgccattacctcgggttgatgatgttagggcaacaagcatcatcctacctatcgaatcataacaaggcggtctggtcaccttggaggttagtgatgcagacgtgggtaaagtcttactgaccaaaatggttgtggttgaggatgctatgccagaatagggtcctgaaggtgatgtggtaacttcaaccgatgtcgggattccaatgggtgtcacgcttcatctgggagatttagagtcttccgctcttatccctgcttcccttgtgtctcctacaaacgctattgcttctgggagggtcttgcctgtgccagctttgcctcttcctacattcctagctaacttataggtagttgttgtgcagttgcatttatttatatcttttctgatggttatttcattggctattttttgctccgcagggtgttttagaccatgtagccattcagctaaaggcataaacgactcaagttcctgagcagatatcttctttatcgcggtggtattctgct

SEQ ID NO: 88285 - DNA, 998 bp, Zea Mays
acaaggtttttggctattttaaatactctataatttcctatttagactacaaatcatgaaactatttttagtaaatactataggaaattagaaacctagcaaaattggtttggtatttttatcatttttctacaatattctagaaatttcctaagtcgagaataaaaataaaaggaaaaaggtgctacagaactgggcttaaactagcctgagtcggcccactactggaggaaagcgcgcgcgcgcccacgtgcaactttgcaccgaagaccctatccttttgaataacctaaagtggggtcgaagcactattcaactaagtcactgacactttacagaaacctcccttcacttctaattcttcatcgcgccaagtccacgacgtcgcacggcggagatccgagcaccggcgagccaagactagccggatcacgtaaagaccggtgctccagagtagcagacaccaaattcaagccttaaccgaagtttcccctaaactaatttcactattggcgcactgaaacgccctgaccacggtgaccgtatggacaacggatgaacatgggcgttcacggtgacccagggcggtctagttcaatcagaggggtcgaggatcttgaggaggacttaaggatgctagaacaaacgactagagtgtttgaactaacctggagcaagctggccacggcgagggcaaaccgagcggagttcttgagtgatttgggggaagtaagaaattggagctctctcatgaacgattggaggcaagacttggtggcttggtgcgtgattactctacgaacccgacggtgcgctcaatttatagagtccacgagcggtggccggtgaattagacgacgacgcgcggcggccggagaaaccagaagttactggcgcgcgcgattggtgtcctattaccgtggcaagctccccggtgatgaacgaaaggttactgcgagtcacggcgatgcggtggatgtaccaaggcacgtggcgca

SEQ ID NO: 88286 - DNA, 445 bp, Zea Mays
gccgatagcatttgtttgaatgtatgtgtggaaataagggggatagcgtttcccgctaacctcatagtaatgggtactcagggaatagatgtcatcctagggatgaattggctagataagtatcaggcagttatcagttgtgacaagtggacaatcaagttggtgtccccactaggagaggaagtggtgaccaagttagtcccgcctgagccgaagaaaggaagttgttatcagatggctgttgatagcagtgaagcaaacccaaatgagagtatcaaggttgtgtctgagttcccagacgtgtttccaaaggacttaccaggtatgccaccagagtgaaaagttgggtttgctatagagcttcttcctagcaccgcccccatctttaagagagcttacagagtatcaggaccagagttggttgaacttaagaagcagattgatg

SEQ ID NO: 88287 - DNA, 310 bp, Zea Mays
ctaataacttgggaggttctgccacaacaacccgacgccgcaacactcaggcaggttcttgtcaccttcatctcttccactagcctgttaatcaattattccaggagtgtgatcatcttcgtgcacatggacgagaacacaaccattaagtgtgtcaacattctcgggtgcagttgccaatatttttctcagccttacttagtgctacctctctcctccaccaaacttaagcccaacacattcgcccccttcattgcaaaaatagacaagtacctagctggctagccaatagatctcctcaattccatgg

SEQ ID NO: 88288 - DNA, 310 bp, Zea Mays
ttcatggatgatgatgtttggttttcctatctatatctgcatagcacttggcactactttttcagctttttttaaatcttttgcgcatggtccttctcttgtttgaatatactgattccatcttttagggaggatcagctatcagtgcacgaaacactactctcttctaattaagggtgaaggcaaaatgatccaatctatttgactgttaaaacatggggatacaagctttggtcttgtcaattaaccaagtcactgcttttaaaccatcaattagtttgatatgtggttgacacaacttatgatggag

SEQ ID NO: 88289 - DNA, 294 bp, Zea Mays
attggtgtcgttgtgctgtctctcgtgtgatggcgtgtcccccacgacgtggcccaacctccgagttcgactctgagcaggtgaaacttggatcacagcagctgctctcgggggctcatcaggacgtcttcaatcctatcctaggtcaactccctcacgtcacctctccttatctgcatgttgtttttgtttctcctatctagaatacgtataagtctctggaaatgttctatcatcctgtgtctctcaagccatcgatgccaaggccctctccacgcttctagcacatgccag

SEQ ID NO: 88290 - DNA, 449 bp, Zea Mays
ggaagtggtgaccgagctagtcccgcctaagccgaagaaaggaagttcttatcagatggctgttgatagcagtgaagcagacccaattgagagtatcaaggttgtgtctgagtttccagatgtgtttccaaaggacttaccaggtatgccaccagagcggaaagttgaatttgccatagagcttcttcctggaaccgcccccatctttaagagagcttacagaatacccaaaccagagttggttgaacttaagaagcagatcgatgagttgtcagagaaaggttacatttggccaagcacctcgccttgggccgcccctgtcctattcgtggagaagaaagatggcaccagaaggatgtgtattgattatcgagctctgaatgaggtcaccatcaagaataagtaccctttgcccagaatagaagatctgttcgaccagttgagaggag

SEQ ID NO: 88291 - DNA, 1355 bp, Zea Mays
atttttgtgccttttctcattcgaggattggccctgccagtttctcctttcttctgcggtcttctagatttttactctttgaacctcactcatctgaatcctaattctgtgctccaaaatgctatgtttgttcatctttgtgaagcttcccttggaattcttccacactttgggctttggaaatacctttacaattatcggcccgggatggtggagggcaacatcaccttgttgaaggtgcaagcttggaacttcgccgaggcaggaaagctgagtatctcaacattcctttgaaagacaacattaagggatggcgcctcgagtggtttactatggaaagtcataacaagtctctttctactcgatcagggagatagcccgacgttcaaacgcctagctgaacagaagtccccacagattcgaagcttgttgagtccagggtgctacttgcagagatatgtgtattgaaggatagaggcttgactgctaaaactgttgttgtcgactttgttttcaagaatattcagcctttgaagggcagagtctaccctgcttacctatacactgatgttgatgatcccactcgtattaccaacaagcgaatatctgaggaggatgtgttgagtcggattgattttatgctgagaggcaaggtttcgaatgtcggtgttcccctttcatattctgcctgaaatttccccccgtagaggcccttttcagagttcatatccaatccacctgttaaagagggtagtccaggccatagagtgcgaccttctccagaagatattgaggccttcattgctccatactagaatctccctgaagaggaaaggtagacccatctccagatgccaaggactgtcgatgaggctgaagtgaacgctattcttaatatgctagcaggcgagtcgtctgaatctgctcgtactgaatcggtgagcactgcaactggtcgtgtttttggcgacgatgaaggagcttgcagtcctaaagttgctcgtcacaaatgattgtgccgaacaggccacccagccgtgtctactgaggggaagaaaagaaaagaagacttcatcgttcatctggcttggagctgggggctgactatactgccccagtcccccttggtggctcggcgagcgccaacctcaaggatgacattgagagtcgtggtggcaccagagttggtggacgggtgtttgatgaggatgaagaggatgaagaagaagtttcccctttgattcacaagaactgccgtagcagaaacaacgacaatgtcccgattcaggctctctctggattggttagtctccagaggttgatgatgtctgccattgatcatgcactagaagaga

SEQ ID NO: 88292 - DNA, 1098 bp, Zea Mays
tgctcgccgagatatctgcactgaagaacataggcctgactgctgaagctgtcgttgtcgacttcattttcaagaagattcaacctttgaaggacagagtctacccaacttatcagtacaaaggggttaatgacccttctcgagttactgataagcagatatctgaggaggacgtactgagtcgagttgattcgatgctgaggggtaaaacttcaaaggttggcactcctccttcatactccgcttggaatcttcccctagtggtaagtaccgacatgtaagagtttttgtactgccacatgtggtgctcttaacgtgtcattttgttattgcacaggtcctttatagagttcgtgtccaatccacctgtctaagatgggagcccaggccatagagtgcaaccttctttggatgagattgaggccctcatcactgcgcataggggtttccctaaagagaagagactgactcacttctaaatgcagcctgttgttgatgatgccgaggtgaacacaattctagatgtactggatggagagtcacctagtctgctctagctgagttggcggatgctgttatcgggtgtgtgtgctgtggggagaaaagaatttgcagccctggtagcgctcgtcgcaagcggacacgccacgtaggctctccgaccgtgtccacctagacgaagaggaggaaaagaaaacattgtcgttcatccggcttagagctggaggctgatttcgctgctccagaccttggtgatgatgaggcgagcgtcaatcttgagagtgacattgagagttgtggcggcactagagctagtaggtatgtttcggaggaagaggatgtgccttctttggttcgtaggaatcatcgtagcaaggtcaacaacaatgtcccagttcaagctctcttggggatggttagccttcaaggaatgacaatgtccgccattgaccatgcattagaggatattattcccgaagacctcttgttggaactttctgaagctggaggtgccgacatccgtatggaggtcccggattgtgctccctccgctagttttctggctaggcaagaaataatcgtgccagttagccatgc

SEQ ID NO: 88293 - DNA, 289 bp, Zea Mays
gttagacctttttgagccccctccttccttgaggttggttgacgtctggactcccacacctgacgatgaggccgccaagagtaatgggcagcaggactaatggtgtaatagaagtagagtagtgtataataggttgaacttttgtataatgggtaatgtatcctgttatgtaatatcgagtctgtatcattactttttatagtaatgtaaaatggaaggtttctctggcacattatgtttacttcaaatgttcttgccacagatgccgaccaggactcgaggacaggat

SEQ ID NO: 88294 - DNA, 480 bp, Zea Mays
agataattcaccctcttctgtttcaggccttaaattgttgtgggacaccgaatatgcactaaatggatgtacacccactccatacaaagatgttattctgtcatgttttattctctgttgaaatgataatgattattaaaaaaaattgggtttcttcaatgtttttaaagcatatagaaaagatgtggaaccttgaatcctatcacttatgtatctaattttgatgctttcaccacatatgattggattgaacaacaaaaaagaatggtaggaataacacgtgcatcagcaacagtcatgaagagaaaatagatccagtttagggaagaccctaccttcatagacggaattgtttcattcctacccataaattcagccacagactcagcacgagcacttttagagccattaccacctatcaggtaagattaaaccattgagaactgagtacttaaacaacagccaattaagctatgagat

SEQ ID NO: 88295 - DNA, 384 bp, Zea Mays
aaccgaggatgctttttaagggattcaagcgcggtatgtttagccttagaggcggctaacgcagaggtgcgacgtctactatcatgattagtgactcttaaagatctgggtgaaggtaaactatcgaggtacgacctctgggctctcgttgctttctagatttttgactgctcggtggttcgtcgcaggtcctaggcctgaaacactggttttttcctatgcgtagaccggttacaagatttgtttatgcatgagggaggaatcagatatcgcgtctccttgacattctggagcgtgttcatgaggatgtggagtttgggattcaccatggcggagtgacaaccttcgccattacgtagcttcactgcggtggccgccttcatt

SEQ ID NO: 88296 - DNA, 497 bp, Zea Mays
actgcccccaaacactcgtattgcttacctattcagggatcttcattaggcccaaggctcctaaagtaagattggccaacaatattcgaaagcttgttctgtttgtgcaaaggaccaaaacacatgttgtaggacatgtgtttcctcatcggtggaggagccgaagtacatccctccaataaatagaaaccatctaaacccagggataaagtacgccattgcatatagtatccttggaaccctattgtatgcttccttgcatgccaagcattcccatacttgggagtataaactttgaaacccatatggaacgaatcaacatcgcacaaaaatgttgttatcctcatcaatgaggcccaatatgtgatgggctaggtaacatatcatgagttgagaatgttctattccccttatttgttagacatgtgtgcaattaaaccacttttcttatcctccatttgccatcactggacttcttgcaagcacataccctctaa

SEQ ID NO: 88297 - DNA, 639 bp, Zea Mays
ctcacgacttacaagattatgactacttcctccatcaatgatcacctttactactttgtcttgcacttttgctcttatttgaaaaagattatgtcgctgtccaatttcagcttctttcatttgaacgctcaatatttgtgtaaccacaagagcggtactatgctcaaattcacatcatgtatgttcttccaatttatcagggtcatctacatttcctggttcagcttcctcttcactagctgatgtatattctccatcatcactcacaaggatcacacgattatttggacactccttaatgacacgaccatgacctccacatttgaagcactgaataccactactcttggctgttgaacccactgatgtagaagtggatgctgctcatttagaacctatgattggagcagcagcgttctttccactataattgctttgaatgtgggaatgcaagtctctagttgaaccttttgacgctaagggtgcaacagtaaaccttgagcttcctccagtcatggttcgtgcaccatatgacaagggtttgttgttcttagcatcttgctgcagctggcgttcagctttggtggcttgctgtaccaaatcaataagacatcggtacggctgaaactcaacaatgcg

SEQ ID NO: 88298 - DNA, 1069 bp, Zea Mays
cacgcttatgaaccagtatcgaaccatggccgcccgatcgcgatccaacggttcgaatcaaatcatgcgaaggggggcgcatgatctaacctgattcgttcatcgagatatcgacgacttccacttctcccccacccttcaccgacccgaggcggcgccacccacccaccgcggccgtgacacgccggcgaacaccaaattgaagtcccccagcgctatttcccatgcggtttagggcatcgcgaggagcagagggaggaaaagctagtgatgggattataccagagtagtaggccgtgaaggcatctgcccatggcagggtgcggtccagagctgcccgtcgagctccggtgagaaattatttccccactacccaccaatcacgcccactggggaccccacatgctccaacgttcaccgaagaggcacattgaccaccacacgtggtccgaacgaccgcacagccgagctcgattcaatggcggccgcgcgagtacccaatttccacccacggcgttcggtgaagctcacaatggtccggttatggcttcagattgatggagaaaaggggtggtaaggttccagttatatacacgcgacaagggaacccaaggccaactactacgcgatgattccgcggattctgttctcagcggtgagttcgacccgaggagggagacgactgacgaagcgggcccattcgttagttagcgacgagattatgagtgcgcatggtgaggcgctggctggtggggcatcaatgtcagtgctagggcgatttgcgggccttggaaggaggaatgggccagcgggagaggaatataggttaagtgggccgaccgaaaggagatggtggcccaggttgacttctttttttctttttcttttttcctttaaattttcttgttttcttttcttttcttttcatttttgcttctcaaatctaaattcgaacttaagtgtgagattcatacttcgagttaaatgctcacattcaaatatcagtaggaatggaatatttttaattatatgtttattttctctattgtatacaatcttttctttctct

SEQ ID NO: 88299 - DNA, 283 bp, Zea Mays
ggtagcaacgagactagacatacttttgtgtttgtatgtatgtgtgtctctaagctagatttcaggcatccatgcgcacatcccacaaacatgtaatcttaaggatcatgagatacctttgcttaaatcttgagtttcgtctttagtattcctcttcttcaatcatgtcattgtgtgggtatttcggtacggattttgtaggttgttgtttggatcacaagttaacttctgagacttgccattttttgggttcttcattagtttctttgtcttctcgcaagta

SEQ ID NO: 88300 - DNA, 694 bp, Zea Mays
tgagactcaaaaataaaaggaaaatagaataaagaaaaagaaaagacaggtggataacttcctggggcgggaacaccatttttggcccattctgccatttgtgtgcacagcccaggctgttgcgtcgacaacagggccccactcgacagccgcacgctgcgcacgctctgtgctctcgccactgtcacacgggtcccacacgtaaggaatccctgtagatcttcctcacccccataaccgaaggtcgcttccgctgggatctcgcgtgcctgaccgctaccaactcggagttcacccgtcgccttataagtccgttgctcgcatcctccttcggctagagactaggcttaaaccaccaccgcataacatcgacgagatacggggggaaaatcgacctcgccacgggagggagaccatgccctcttccctccaccatggattcccgcctgtgtggccaactgggcactgggggatggctttggcgcttcaccggtcaacagggatcatgcccagggcccgtgggatgatgcgagtttgtctgggaggatggacctcaccgcggtcgacatttcgttgcagtatcggtgagcgccttcacatcagttaatcacgtcctcgattatgtttgacgctagatctcatgcggggctgggcgcgcgacacttatagcgtgcctcaccggcgtgggcctcgg

SEQ ID NO: 88301 - DNA, 648 bp, Zea Mays
tttgaacatagctttacactgatgtatggtgcgaggggtaccctaaaagatccaactgtttctgcacttctagatgttccatgccatgatcactagcatctccatggaccatgatttccccgactttctcctaaagtattgaaccaccagatgcgagtttgaatttctgagtggagtgacgccaattatatgtcagcaccttctggagaatccacatttaataagaaggtgcgaccatgtttcttctttttgtagaatgcaattttcacaagtgtaggagtctagctccatccctcttcttttgagcattgctttagtatttagcctatcttgaagcaccagccagaagaataatttctgttttggctggcatttggaatgccatagttgaatgaaagtgcggggtacatgaggagatgagctaatgatcttgtataccttctgtgcagaataactacctgaatcccagactccatcccatctgtctacttcctcctgcatatgaatttgttgcatattgatctccaaagctagaagttgacttaatgttgtagccgatagcggtagctagaaaagattctgaaataggtgttgagcaccaaaagtggcggacagtccggccctaggaccgagacggtccgcgacccc

SEQ ID NO: 88302 - DNA, 650 bp, Zea Mays
ggacctcgtagtcttagtctttacacatgcctagattgcaagtttaattttgaaaaactcaggggttcttttgccattctgttagccgatcctagtcattggatggccaatcaatggatctgattagatcctgagcacatactccttctatgaccgtggatcacgagatcgatggcatatgtttaattgattccgagatccaccgatcaagatcggacagacaagactaaccccaggcgaaccgttatgctcccccttctgatctgatccgccagtacccgaatcaacggccagacacaacgatgcaactatggcgtcggccggccgcagcagcgccattatcgaggttatcaccaccgccccccgactaccccaaacaccgccagggcgagtcccaaactacgcaggggtgctatcgcgactactggagtcctcttactcacggatctggcccacaccgaagctagccacggcaaacagcggccacgagatctgttccactcccgatgaacgcacctaacatgctagggctccaatccctgggtgctctaggtgcaacgcaaaacggagataacaacgaagcatcaaactgtttggggtagtcggggggtttgaggcggttagcgccctgtccgcggcgaaccaagcct

SEQ ID NO: 88303 - DNA, 541 bp, Zea Mays
aatgacagaagaaagattaatgaatcatcaaaactcacccaaaacgaaaagttcggaatatttctgccacatcagctcttcaagttcccaagtagcctcgcgctcagactgattagttcacaagaccttaacatacttaattgatctctttctcataacatgctataaggactccaagatacagaccagacgacactccagggtcagatcctgctgcacaacaattggttccatctcgatctgatggtccggatccctcaagaacttcctcaacgtagagacatgaaataccgggtgtacccctgccatggaatccggcaattgcaagcgataagccaagctgcccacccgggccaagatagtgaacggtccaatgcatctcgggctaagctttccggagacaccgaaccaaataactcctttagtaggtgataccctgagaaggacttggtcacccactacaaattccaagtctcgcctcctcacatcagcataactcttctaacggctctgagcggccaaaatattctgacaaatttcc

SEQ ID NO: 88304 - DNA, 341 bp, Zea Mays
gttctggtaggttgtatccagaatagcagtctaggaaggacaacatagaacatccagcagtcaatcaaccacctgatctattatagggagtccgaagggatccttcggacaatgtttgttgagatcggtatagttgacgcacatgcgccaatccactttattctttttgagtacaagaacaggatttgctagccacttaggatgcaatacctctctaatgaaccctgccaccactaagcgagctaactcggcgcgaataacttctctcttgtcaggcgtgaaacgacgcaatttttgtcgagtcggccttgcttgaggatagaccttcagtttgtgctcgg

SEQ ID NO: 88305 - DNA, 869 bp, Zea Mays
gggccacccataacaaggtcctgggataggggataccttggcgtaagcaggggtccggtactgacacgtgtccaggctttatcctgtgcgcttgcgctccccgctcaggcaaagacccgatgctgccacgtggcttgttgcccgtgacgtaagccagcgggcggagcctgacgtaaggcctctaggccacgcggtctctgcatttattgcgaagaggacgcgccgcctgtccaccctgctgataggcaatgtgcccctcagcatttaatgcgtcctatccactccgctggcaggcggcgctagggccatcctgcagacggcgtgtctgtccagtccattgtcaaacagtgcgcccgtgctgcgcggtgcactgtgtccatcatcacttatacgagaagcttcccctgcacgccgatactacgcagatctcggatgtcaggacgcaagaagattgctctagcagcgaacattagttgctccaagtactacatccgatatgttcctgggcccacatgtcagggcttagtacccttgtacgtgccccccttagctataaaatgggaggcatgcaacgttacacacagacatacttagactctcatctctcaagcttccatagcaatccaacacacagtggagtagggcattacactccggcggcctgaaccactctaaatcctcgcgtgttcctgagttcatcgtgcatctaccaacaggcaaaacgcttaagcccctccttatcttaggatttaaggagagtgcactccgccacccggtcggagaattccctctccgacatttggcgcgccaggtagggggcttggcattaggtttttgcttgttttctcgcttagcatgatggtgcaaat

SEQ ID NO: 88306 - DNA, 401 bp, Zea Mays
agaaaacaacatacgtcattgatgctcgaactagaatgttgggcacaccagtgaatctagagaagtgtcaggtgggctacgccaaaacagcaaaaggcccagaaagcagaatgtgcgggtattcgagcccaactaggtgaattagttggtagcagtagtattaatacttgtgagggctgtgtggagatggatgaaatgtaataacctaaacttctacttgtttcccaaccgtcacagtgctaccagcttcctcccatctctctattcttctatttttcctctgttctcatacatcacctctagctatctgttaacaattggtatcaaaactagctgttctggcctctgtggatttcgccgatctggatcttccgcccaatcacgactacgacacctgtttt

SEQ ID NO: 88307 - DNA, 722 bp, Zea Mays
gcaatagataaattcgttaccacaggttcctcagaacaaaccaatggtgatccaatgtgaacatccatagaagaagctaaagaggagcttggcccgacatcattgggtgctgggttgtcctcagcaccaccctcgggggctcggtcgccctcagcaccaccctcgggggatggatcgactttagcggcaccctccaaagctgaagcacccttgcttgtacccaaaggagctgggtgactctgaccagcgacgtcaatgaccaacgaagcgtgagaaaccgtctgggttacctcttgcccgacaagatcacctaacaaagggacatcatccaggacctctgaatggacgatggaactttcaacctcaggaggctctgataaaaggtttttagggataatttcttccaatgcatggtcaatggcagacattgtcaacccctggaggctaacaagtcctgataaagcctgcatcaggatatcactgctcctactgttgtggctgttcttgcgaatcaaggttatttcttcttcctcctcctcttcatcctcatcaatcacacaactgccaactctggcatcatcacaacctccaatatcgtcctcgagggtggtgctcatcgggccaccaccgaggagtgatgtcgagggaccaacatcttgttctaagcatgataaccgccgaagtcttttctttctcttcttctcctcattaggcgcgactgg

SEQ ID NO: 88308 - DNA, 296 bp, Zea Mays
gtgacatcggaaacagctatttccgaaggtgaagctgccgaagctgagcagattgcagatgaggacggaagtgatgatgaggctgaggaagactacattattttgagcccatcgaagccaagccacatcgaatttggaaaatctactgtgacagcagaagacatggttatgatgaaaaagtttggttattttgggggaagccgagagcaaacttgtccgctttgctggggaggaggtgtttccggagccaaaagaggacgaagttgttgttttcaagagcttctttagggcagggc

SEQ ID NO: 88309 - DNA, 367 bp, Zea Mays
ggagaattcatacgtctgaagcaagggggagattttgtgatgcagtatctcaacaaatttaataacctcaacccatacgccatcgatcaagtggacacagacttgaaaaataaaaattgcttcatgaggggactaaatgacagactcaagcgcaaaatggctacgtgtctggatctcacatatagcagggctgtcaacacagcactatcagttgaagccaataatgcgggacaaggaaagtcaaaaggatatgcgggtgaaagatcaactcagggacctgaaaagaggacaaggttggtaatccaacctttcaatttcaaattgtttttctcctcgtctgcctacataacccttcagacaacctgtg

SEQ ID NO: 88310 - DNA, 513 bp, Zea Mays
gtcaggtctctttgcaaggagggggacaaactatatcatgtccccttcgtgtatcgggcacacatcatagggttgtttgagtggggcctcttgttccctttacaggattcggcttagtgatcgaacttccatacgcttgtcctttgtggttgccaaatatgctcatttggggccaatgtctcgctaccttcctctgtgagcaacccaaaagcttgacactctagttatgttcagactagcactccatctccttgtggcgattgatgctctagtagtgcccttgaatcccgctgggccgacccccgtgtcccaaacatcatcgagatgggtcagttttgtcaggcaggagtcgcccgtgcagtctcaatcttaatgtgatcacagtcttctccgtggcattcgtctcgcttgcccccatagcacctatagaggtatggtccctttcttcctttgggttttagcttaagggtcctgaccttcttgatgggaatgagacaggcccatgagtcttct

SEQ ID NO: 88311 - DNA, 356 bp, Zea Mays
tggcaacctacttccatgtggccctgtctggaccagcccggacttggctcatgaaccaagccccaggatccatctgcacctgggaagagctttgtgcgcagttcatggcaaacttcgccagcgcttaccagcggcacagagtggaggcacacctccatgtagtgaggcaggagcccggggagaccctccgagcgttcatctcccgcttcaccaaggtacgtgggacaatcccccatatctcggatgcttccatcatcactgctttccgccagggggtacgtgatgagaagatgctggagaagttggccacacacgatgtggacgacgtcaccacactccttgctctggctgacaag

SEQ ID NO: 88312 - DNA, 490 bp, Zea Mays
ggaggaggctgtacaaaattataattgaattactgtaatagattagaatgagacctaaaatgtacatgtttctttgaatatacttcttgtcccgcaacctgaaattgagaactataggttactcttgtgttgatatgataataaacctgcaacctgatcattgcaaggattttggcatttgatttgctgatttactaattttttatattgcaacctgttcaatccttgtaatctttggaagggtttgtgcttgtgaataatctgttgattaacctaaccatacacctaaaaatgaaaatgatgccattttgataattttgttttactgtactatagaaccaactatcaaatttaattagcccatggactcattctataattttatatgcttctttagatacatgataagaattcatggcttctaccattctacataatcctgctccaaaacatacaaggctaggacaatgctttctttcaggctgcagaa

SEQ ID NO: 88313 - DNA, 601 bp, Zea Mays
atggcacgagacgggacgatcgataagtcaaaagccgtgaaaacgacgattgacggacaaatagagacatagggtgattggaattcaaattgaggcacaaaacgatatgggattgagccgatacttcacgaataggtttatataggtcaatatgagtgaagtgtgtgcttggtttgaatttaggcgaagaaatagggtttggggcacccggctcggaaacgatcgcgcaaaacgggaattttggtgaaatttaagcctgggatctcggattggcgtgaaatttggcaagtaggttactggaagtgtggtgaaggtgcctgaaaaatttgggttcaattggagcaagtttggctggtttgagcatttcaccgaacacttggggggcgtggatttagggttttaggaatatagccatttgaggtgggaatgccctcccgaaggagctaggaacctgcaaggatgcttaaggcacacaggggaacacatttcacaaaggaattcatcggatttcacagagattggaaggattagcaaaagggtggagttcactgcctaaacgacagagaaacgagagagagagagagggaggacagtgggctgc

SEQ ID NO: 88314 - DNA, 477 bp, Zea Mays
gttggatagtcgtatttagacgatagttttggaccctctgggtgttgtcgtggggcacgccggtgttgcaccgccgcggatgcgggtgacgccgccgcctgggtagggtgtcgggcagtagtcggattctggctgccgatgtgcgagcgaacggctaagattagcggcgggttaccgttttcggggcatagaatcgtgatcgttgagattagatccgtgggttccggtgagatattggcgtggtcgtatcttggctgtggatctcggatctagtggctgttagcgcaaaccgttttagttatgtgtcaatctaatctgggtcgcacgattttgatcggacgaccgggacctgtttatacccgttcgctgtgcgcgttttgcataagacacctcctgtttttagtgaataaacctgtcattcgtagacattataaaataatttcatacagaccctagattcttgtaaaccagtccctg

SEQ ID NO: 88315 - DNA, 301 bp, Zea Mays
agttagtgttcgctagatgacacttgcttggcaagcatctcctttcttggcgcttgttttgttcatccatcctcaagttgtcgaccgattttgccttgtggtcggctccactttacgccttcatttcacacgatcaacatctctaatgagatgcaagatgcatatgtatgaacaagatggaaaatagcacaagacactctaaggcacatggtagcgaactaaacattaaatcgtaagacaccgtaaacaaccacacactagcattagctatctacacgtcatcgagcgcacaacatcaaca

SEQ ID NO: 88316 - DNA, 441 bp, Zea Mays
taaataatatataaaggggttgacatgcttaagagatcatataagtcacctctcgcctctcttcctactattgctggtgcttaagaagtcggcgacgcctctcttgtgggcactcaagaagcaattgtcgcggcttctccctagggttttggatgctcaagatgtcgtcaccatttctcttactgcgaatgcggtgctagcacactgatgtcgtggtgttttatctacacacttgtggataccatagagataccactactgttgctaaggtgttaaggaggacggatgaacgtgctgctagtggtgatatgcgaggatgtcagactactactacatcgacacattcttgttcaaacatgctatacgtctagtggtaacgatctaacatgtatgctaacttggttaataattagctacaggcatccaaacaacctagctaat

SEQ ID NO: 88317 - DNA, 334 bp, Zea Mays
ggacgagtattggtgagggggatctgcagaatctttttgagggtgaggaattgaaaatgatgttgtttaattatcgggaggcggacattatcccgaaggctgagccgatgtagtatgtttggtgccctcgctcttgtcttgcggtagtgagtgaaaacgatgccctcccccggctcgcaataaaaagagaggaaaaaatgcgattgtatttatttgtgcggtatggttggtggcccctcgctgtgtgtatgtaatctatgactatctgtttattgtttgtgtaatgtggccggttacccttcgttgaatgagatgggggattcgtgtgttgtgt

SEQ ID NO: 88318 - DNA, 378 bp, Zea Mays
aaaaaaccgcagaacttgaaaggcggataggtattacctaattgcttttgactttatgttttatttctgtgactttgaacttatttatgttttgtatcgcagctgaactatctcctcccccggagcctttcgagtcattggccgaccccgaagcaaaaagggaagatgaaattacaaagatggccgaagctattatggacgaagctgtgactcaactattaaacgaagctgcagaagcagttttaaaaaaatagctattgttatagaaacatttgtaatattgatgtaatatttgctgaacaaagtgtgtaatattttacagttttaaatgtaatatataagctgttttgtaatccagttctttacgatgcatgaaac

SEQ ID NO: 88319 - DNA, 351 bp, Zea Mays
aaccacgattacaagttgggatgtataggataggtagaaatactggtacaattcagtgtagttacgtttccaaaatattaaatcagagctgattatataaaaagcaaaaatgccacgctagctttcattttttcagttgcagcagggttcgttttgcgtgcgcctttggtgatgaaaccggcgtgtttgggaacgcataatgcaggagccttttgtagccatcgaactgtagaattcttcccaaattaagttcgtgctaaaacctccattccaccattttccaaaccaaacagctgctctgcactatctctctagtaggtatagtgtactgtgcttggaggcaaataatta

SEQ ID NO: 88320 - DNA, 558 bp, Zea Mays
gtagaagaaagcaacagatgatcgaaggatgagtgaaaagaacaacggtgcaagcaggctatttatagaggccgggggtgaccgtccactttctactacgctcgccgagtagtcacaagtattgaataagcaattcaagccacctgaaaatgagtcaggcagtaggcgccgcttcgcgtaacacggcaccgtttggaccaaggtcaactactcgggcagtatgattacaccccacggtcacatcaagttactactctaggatagtgtgctaaatgctctgcgtaccaagacaccccttggtcacacccattgggggtgtagccaggaattttcaaaagattttctaaagaagtcatatccatacagtatacacaatgaatgtactacaacaaaaggaggagatcgacagagatcagaggaaatccaaatatagctattgaaccacaagtttaatcagcagaggcattgaagcacagagaggggtgatgtctagccaagagccatctaccaaatgtcaaatctatcaccgatcaaataaatttcagacctaacaaggcg

SEQ ID NO: 88321 - DNA, 536 bp, Zea Mays
ttaatagtttagaaatcccaaagttattaacgtgccaaaataggtgaaatgcatgtaagtgtaaaggtatgtaatcccatccaacacaagcatcagaacttagccctcaatccctcatgatgtagacgaccaaacatggagccgcttcagtaagatgctcctcatgctaacattaataggaacagctgaaaccccattccagcctctgcacacgaacgaaccaacgatagcaaggggagcaagtaacatggcagacagtaagacaagcaaggagcgagagaatgccgttgtacgtactgcaaagtggccaaggttgacgagcgtccatgccaatgttgggggcgcacccaaagacggagagggcgaggatccagaaaaagaagatgatgtaggcggtccagacctcggggtacatgaactactcagtgttcctgtttagatccggggcggcaccacctgcacgtacaactttgccatcgacacagggtgggaggggggctccgccacgatggccggggaagcgagcgtcggggacc

SEQ ID NO: 88322 - DNA, 669 bp, Zea Mays
aacaccaccagctggctggctgtggtggattactcaatttactagtacgtgccggatgctaaaacgaggaaacaacaacagagacagagcccccccagtgattgaacccaacgatggatatacaaacattatcagatgtcagtgggggaattaagtttgacggccaatcaattatcccacgcatgatgaactgcatgcgtcggcagatgttagctgtggtatacggtatttgattctgatgacgaaaaccatgctagatgaatgcgaatgtggtttagagccaataatcatgtttcgattcgaatccctatcatttgttcatgattttatcattttttactatttcaatgtggggaagcaaaaatggcgattgaaaacgtgaaaccaggaaaacttatgcttctaaaatatagtaaagaagagatgtgttatcatcatcggaccagatcagatgaactctcgtgcgtaaacttattgattgaccatctatctacatcgccatcttagcccttttgcttccgttgccgtagatcttactccgtatcacgttgttagttcaagtcactgatcggtgtgcattgttaaatggaaatacgtacagaaccaaatcttgtgtttctatagattctaaaactggacttacccgtcggctctcgcagagtcgcgggg

SEQ ID NO: 88323 - DNA, 706 bp, Zea Mays
gttaacgtctcttagaactaatttgaaaacttaaatcaagagctaatttagaaactcaaatctctttaggggtcggaggggattgaggtagaaacaaccccatgaagctttgagaagatttgagtttcaaattagcccttattgattgaaaggattgagggcattcccgtagtgtgttgctaccctgatgtgttcctagctgagctcccacgtattcctctagagcgtgatgctacttttgaaataaagttaattcctggtacgtaacctattcataaagctttgtatatgatggccccaaaggagcaagttgagttgaagcggcaagtagatgatcttcttgctttcattagctagcaagtctccttgggattttctagtgttatatgttgagaagaaggatggtagtaagagattgtgcatagactatcatgtcataaatcaggtgactatcaaaaataaatatcctttgccttgtattgatgctctttttgagcaattgagatatgccaatgtcttcactaagatcgatttgaattttggctatcatcaaataaaaatacaaaaaggcgatattgagaagacaacttttatcaccaggtacgggcaatatgaatatattgttatgtcttttggactaacaaatgctcctgccacttttatggaagcaatgaacaagatgtttcatgggttcttagatgacttc

SEQ ID NO: 88324 - DNA, 704 bp, Zea Mays
cttctgtgagatgttcgtgggggtggcagcctgcacttccctcttccgccagtttttcgtgctggtgaggtctgggaagggcgaagaccaccttggggcctattacttctagacaaggtcagatccaatagtgacctacatcgccacccttggcggcgcgaggtgggagaactggcgtaatgactgggtgatcgccagcgctgaggtcaacgatcgccttgcccttccgagcgacgggcccagactcgaccgaaagcaatggagggtaaaaccgtgcctcgtgccagagttcgggcccttactggacaggattaaggaactagcggttggtggtctgaccttgatgcacgtactcggcgatttcctgaagcgctgggtcacgccactgcaggggaggccgcgtctgtgttgctggtttaccggccctagcgacattggtaggatccagcacgggcctgggactaacctgtcctaggagcagttggaaattttggtgaaggggatcactggtgaggcttttatccccgaagctttgatacctccccaggggattttgccgctctgcgacaatccagggttgcggccagtggtgctggcccgactgtcgacccttgatgagagtggtgtggcgatccatcagaccgacggccgggacccccatcgggggatccatattcccggtgtaccggtcgaaggttcccagc

SEQ ID NO: 88325 - DNA, 445 bp, Zea Mays
agctttcctcaaaaagaaaatacctcttaacctcttaaagaaccttctcttctttccctgatattaacaacccttcttctcttgctaccagatggaaggctcctttgtcattaggacatcctactactcggaggtggaaggattccctcaccttcttcggagctgcgcgctttgcatggggatccacaagaagccagagtatgtctggaaagaataccactagaacgggattgagaaatgctctatggcagtctacctggatgaaagccgaaactacccaaatcaccctcctttccaaatcaacgccactatacaccgcttcccagacacctaccagatgctgcccaaaaagccctccaccagctatgccaaaactacagcagagaagtctctgagacaccccttctctactttccacatagcaacaaaaatactcctgcttgga

SEQ ID NO: 88326 - DNA, 635 bp, Zea Mays
actaggggagacccggtcaaagaaccggaattagaaaaggtagcagaatagccaaaggtgttgagctgcccaactgtgatagcattgccgaagctatcagccactgcaacaacaactctgagaaaaaggagaatggctagtgttttggatgttgttttggaatccgtgaacactcctgcttctgccagaacttctggtgggaaaattgaagataccagagaagtggtcactgcaagcatttcttttgttcatgctgaagcaggaccttcaaaagctgcgccagtaaaactggtgggagaaagccttccagaaaaacccacaacacctactcccgaagcacctccctagggtgatttgaattatatagttcaacatgcttcgggaaaacagctatcggcagagcaagttgccgaaacacaacattatgctaaggagctgaaatattcctaggggtccttggtatacggaggagacaacgaggatgacttcctctactgtctaccagacagtaaggaggtcaatgtttgccgtgaaatgatggacaacatgcggtatccaaagcttgaacttggcttgtctgtgatgacgaaggatcagcttgcagataaccttgcccacaacagcttgaaggtttg

SEQ ID NO: 88327 - DNA, 542 bp, Zea Mays
aatttttcttaaccccttatacctaggtttaggtacacaccaaaataaacaaatttttgtatagttagcgtggacaaatctaatgaaaactaggttttgatctatttttctctcgatgccttcactactcagtccactcttcacctgagccatttgattctcttctctagcgcaagcccactcgtggctcactcgcttcttcggtcatctactgaccagtaagtcggtgacctaacccgcccgctgctgcgcactttgccttctcatcactcatcagctcgtcgactcttcgggatcctacacacaacgttgatattttgcctcctagtctgcaccagcacatgggcaagctgttggtgggaccgtggcatcacttgtccctcgctaactcactagattcccaccacgccattgcaacacgacaatgggtgtcgcttgtcgtcaccatcatctatcgccacctcgcctcctgcactcgctcctcctacttgtcgtcgtctcaccaacgccatctcacgacaaattcgatgactcgccagaac

SEQ ID NO: 88328 - DNA, 791 bp, Zea Mays
gcaaatttcttctttaaaccttcaacctcggcttcatgagcttcggcttgtgctttcagcggagcttcgcttgttttcaaccaatccactaaggaaagcagtattttgtctttttcaagagcttcattccttagtgcaataacctctgatcgaagatttccaagcgctagctggcagctttcatctttagcttttttctgagccttgctcagaattaaaccctacaaaaataaaggatgagcacatactgaaaaggaaataaactacaaaaataatctgctttctaacaagtcaaagtgttcccaccttcagactgttataggcaaggctatccgtgagttggtccttcgtcattgcagacaaacctaactcatgcttcgggtatcctatattgtctgccttctcctgacagacatgaatctctttgttgtcaggaaggcaataaaggaagtcatcttaatcatccccaccatacaccaaggatcctcgagggtattgcagctccttggcgtaatgttgcgcttcggcaatttgctcttttgataattttttacctgaagcatgacaccctataaattccaattcctcagtagatgctccaggggtaggggactcagattcttcggtagccctctctttttctaatagtaacgaagcttcacggcattcgaaggtcttgtttcagccccttttcaatagcctccgttggtcttgcttcggcggtagccgagggcccaacctcaactgtaatctgtgtcatgccaacttcgacatatttctttatattttcg

SEQ ID NO: 88329 - DNA, 529 bp, Zea Mays
tgttgcatttgcctttgtctcgccgcttctcacatgtacgaactatcctcttctatcgggcttccttggattagaagtcattgtgtgttagggttgcttccttgcgttcctcttcattctcccctccatcattctagtctcatggaccacatcaacctaggtagaaacaaggcattattgttgttgctgcaatgggtgtgcgaacatgacacctgggaccatgccagacatcgtgttactggtgaggtccaacccttatagtgtggccagcttcgtggcactcaatggcccagataaggagttgatgctagccatgacggaccatagtgacaacggcaacagccctagcgcatgaagcagtgaccccaacagtttggtgctgctcgtccccctcacctcaacaattattgaggatggatggtcatctacaatattatttgcgcatattgagaacgcaccgactgtcctaaatttgtttacctctgtcattctgatctctaaactcgtaaatatgttatttagatcctca

SEQ ID NO: 88330 - DNA, 793 bp, Zea Mays
ccagggctccaggcagaaggccgtgccgacgagttccgccgaagcgctgactccctcagtccctcctcttcgagacgagcccctcctggattcccctccgcttccggtgagcacctcccctcccagcctcccttccccctagtgcgctctgcgttgtgcgctctattcctcttctctgtgactgttgttccgtctgttgtgattcatctagccatctttcatatactcatctagtcatctgaaattgattcatcttagtaggaaggagccacaccatcgggcaccatcgggcgtagaaggtggagttgacgtcgaggaagagcgatacaagagctcggatgatgggcacaacaacagcttgagcatggaggttgagcagcgtcgagagttggggcaggagcgtcgtcatctgcggcatcgttggagaagacgtcgtccgccagagaggagacggtagtcgttgcttgtccgtcggagacgagacggcagtcgctgctcgtcgatggaattaggatccatatgaacaagcacaaattgataataatggagtaaatcttagaagtattgagatgcacggtacccaaatccatgcatcaagaaatgagcaaaaataacttcattggtgctcgacataggatatgtctactaaccggtgatttttcactggtttatcttcttttcttgaagcaatcctgccacaatcgaagctctatggtccttggattcaatggtggaggcctcgtactcatgcggatgagacgtggtgttgggagccatgatttggcagaagcat

SEQ ID NO: 88331 - DNA, 669 bp, Zea Mays
ttggcactgcactaactgtcacagaatttcattcggctgagccatcggctcctgcattgtgggagcctgcgctagtggtgggtgaacttgctcattctttccacaacgcgctcttcctttgatctgtaatgtgaattttttttcctgttacactcataatccatgtttacagaatgtgacctaatcaataagggataaacggaagaatctaatttattttgaaccttgagactcagtactgcacaaagtaaagcttgaaccaaatcttgaaacttaatatccatctcttttcattaatcataaaggttttcttgggttacatcatatcagaagacttgactctctagcctagtacatcatgtggtgcccaaaagctaagctatgaaaagtacatcttcctaacatgtttgttactaacccatctaaccacgagcaatagaggcaacactagtctcaggtgaaggggttctccagagtgagcggtgtccatgctagaagctagctcaatctcctcagggtcctcctcctcctcgctatctctgactacctccatctcctgctgcatctcctagtggtgcatttccaagtgagcattggtctcatctagttccacatgtacatcatggagctggttctctaggacctaacggtattgtccctaatttccac

SEQ ID NO: 88332 - DNA, 839 bp, Zea Mays
ttcaaggcataatccattgctcagctacgaaaaagtataatctctattttaggtggatattcgacttgaatgtgtccaccaaaagacgatagtcaaacattagcagaacttagagcattttctacgccttgggattcaagggattgttggatttaattgggtttgtccaatttttattcagaaattaaattaaagaaaattccaagatcaaggttattgttaggtgtaatttttggggtcctttatgtggtataactgatagtgatgaaggttaagtgcatgataaccattatgtattggtggattatgatgacttttatgtggtagtggtttatgatgccttagtggttttcgttacatgcaacaaataatgacatgatgccactatcactttgtgtcctcaccctttgtcttccttgttgcagcataaaatgactaatccctgtcttcgcgtgggagaaaaaaacaaccaagaacaccacctcattgttgttatggcactcgggcatcctcgtcccaaattctacgtgtatgaggagtaggcctctaataaaactagtatcgctcacgagttcatctgctcaagtagatatttggttgtctttcaagtgtctgctcgatgttggtaaaaatgaggacactaacaaaatcgagggcaccagcttaaaaaacccacggttgcgacttcttcctgctacttttcgacggttggtccttagtgatggtgattaacactgcaaccttactgtacgacatcgagcggaacacctacattaacaaaggctatgtcaactagcacaagctctagtggcgttagatatgctattgttacaatccac

SEQ ID NO: 88333 - DNA, 670 bp, Zea Mays
ccacctcccaagaggacaacagtcagcactgtgcccccacctccccctccgggcacgcacccgccccatccacgagcaagctcttgctgcgaggcgggggaggttgttggcggctccctctgcacgcctggaggcgccggaggcacaaccaaggaggagcctaagaaggaggagcaagccctctgactcgcacccttcatcacccgtctccttccctaatcccactccatcgctgctaggtcctcctctcccactttctctgcgaccgcgacggcagcatccgcaccgcccaccaccaccacctcctgctctgttgaaccgattcgctgaaaggtccctaccatccacgccatgcccttctctagcctcgcatcgcgcccttgatgtgtctcattgtgtcgctgtcaggccacagattcgtcatccgactccgatgaggctgcatcctgtcgtcctcgactgttgactgctggtaagtcaccctagcctgtttaccattcatcctgatcttgtctctccgtgtcccgcaatcccagtcgcgaggaactccatagcaatcccagccgcaatcgacgcaccggccgcgaggaactccattgcaatcccactccatcgcaatcccagtcgtaatcgacgcaccggctctcgatccgcgctctcaagggaaggt

SEQ ID NO: 88334 - DNA, 895 bp, Zea Mays
gaaatcttttattgatgacgtattttccaattacagagtacaacgttgatccgatagcttttgaggtcttgctaagggtaaaactttctaagatgctctatgttccatgagttccccacttccataccatccatttgagtaagccgatatgatcctggccgagtgacctccgacacaatgaatggcccttcccatagtggtgacaacttgtgccgtccttccccgttagaatttggcgaaggaccaagtctcccactacaaaggatcaatgtcgtatagccttatcatgataacgcctcaaggtctactggtatctggctgactgaattactgtgttcaatcgctcttcctccagcacatcaatatcctctagcctggtagcttctgctttagctatgctttcgaataccagccttggtgccccaaacctgaggtcggcaggtagtactgcctcagaaccatagaccatgaagaagggggtgtttccatgcagagctcgactgggttcagttcttaagctccaaaccacataaggtaactctctaatccactttcctgcgaacttttcattcttgtcgaacactttcttcctgagtgcttccagtatcataccattagccctttccacctggccattagctcttgggtgtgctactgatgcatacttgatctggatgctccgttgttcgcagaaatcaaagaattcagagctagtgaagttggatcccaggtcagttatgatgctatttggtatcccaaacctgaatattatgtcttgtatgaattccactgccttggctgaagttagagaagcaatgggtttgtactctatccatttggtgaatttatcgatggcgaccagcacgtgagtataacctccctgaggtttcttgaa

SEQ ID NO: 88335 - DNA, 1140 bp, Zea Mays
ctcttcttctctttctcaagtagtttcatcttctccacggtgactccattgcactttgcacattttgatcactttactccttgtgacatgggtcagtgtatcaataatcttgataggatacttagaataagtcagatcatcttgaacactaagatcctccataggtagctgctcttcgggcacctgagacatttcttcagttgagatacatggaagacattatgtacatccgcaagataatcgggtaattccagtcgataggcaacttcttcaactcgttttaagatcaagaagggtccaataaagcgaggggacaatttccctttgactttaaatctcctcataccctggatcggtgacaccttcaaatacacgagatcaccctccttaaactctagcagtattctctgggtatcagctagctcttctgccttgattgtgcagttctcaaattctcacttatcattcgtacttgttcttctgcctcttgtattatttctggcccaaagaactgcctttcaccagtttgatcccaatacagtggagtcctgcattttctaccatatatagcctcaaacggtgacatattcaaactagcctggtagttattaatgtaggagaactccacatgtggtaagctcttatcccaactaccacgatgtttaagagcacaagctcttaacatatcctccaatacttggttggtcctctcggtctgcccatcagtttgaggatggtaggccgaactgaaattcaaatgtgtgtccaagaactcgtgcaacttcttccaaaaccgagaagtaaactatgaccctcggtctgacacgatcttcttaggcaccccatgtagacaaactatccgagccatatacaattctgcaaacttggctcacgtgtaattagtactcacaggtatgaagtgagccacttccttcagtctgtccacaatcacccaaatagaatcataccgtgcaggagtgcggggtagcctaacaatgaaatccatgccaatttcttcccatttccactcgggtatcttaagcgggtgcagtagtccagctagtctttgatgtttggcctcgactctttgacacacatcacacttagccacgtgtgcagccacatctcttttcaatccat

SEQ ID NO: 88336 - DNA, 451 bp, Zea Mays
aaggaaagccatcgtgagaaaggaagtcagagctgaaacgagtgtctcctccactggcgagggtaggtgaggtcatcgacggaagggtatcagatgtaaagattatggtggaagaagaaaataaaaagaacctgggtggtttaaaaggaagcgggttagcttaaatttttacttctttagtttctaatccctttagtttttataatgcatgcatgctggaaataacttctcctctccgaataaaagggtgctcttaggcatcctttaaaaagctaaggactagaccactgggcctatttactttgccacctatttctcccactatttctaaggcctttcgttctaggtctagcagtctagtcctgacgattcatactagtttctaagcaagttttagatttttgaaaattggtattcatggtttattgttcttctctgtggtggtatttgc

SEQ ID NO: 88337 - DNA, 624 bp, Zea Mays
cttgaatttcccacccgagccgagtcatccctggcaacatcctcgggggctgggcaagtgtcaacaccatccttgaggaccaagttctccacagtagccgcctctaagcctgaaggtccctcagttacttccataggaccaagacgatccaagtcagtctcctgaccctcaagaccgcgctctaaggtcgatgaggcgcgggacgctgcccgggatgaccccaacccggcgtcgagcacatcagcacaaacctccatcacaccatcatccgctggctctgataacaggtcttctggaaccatatcttcaagagtctgatcaaagtttgccagggacaattcttgtagaccaatgagggtagacagagcaggagaaggaactccactactttccccactggcgacatattgccgactgttcttccgagtcaaagggacctcatcttcttcctccccgtcgttttcatcagcaacacagacaacacacccattggggtcagcagcagatggagcacccccattggggtcagcagcagatggagcacccccattggggtcagcagcaggtggagcacacccattggggtcaacgtcagtaaattcaggcacaggcacttcttcagca

SEQ ID NO: 88338 - DNA, 280 bp, Zea Mays
ccacacaacattgacgtgatgcacactaaaaagaatgttgccgaggcactgtgggcaacaattatggatattcctgataagttaaaggataatgtgaagacaagagtggatctggcagcgttatgtaatagatcaaaactagagatgaagccgccaagtggcggaaagacgtggagaaggcctaaggccgatttcgtcctaagcagggcctagaggaaggaagtacttcagtggatcaagatgttgatgttccctgatgggtatgcagctaacctgagta

SEQ ID NO: 88339 - DNA, 746 bp, Zea Mays
gcaagagcaagttgaagtcaacaagtccatatgagctgaattgaatgaccaaaagtgcaactttgagcaaactaacataaacatgaggtttaagtttttcgataagttgcacacaccctactatatgtttctagcgctttgttttagctactaactcagttttgcaaagaaagtgtgttttggacacagtttcaggcatattacaaatcctagagaaatttggtgaaaaaggtatggtcccaacacttagtcaattgttttatgtgctaactatgtttgtctctaagtgctaggggacctctcaaagtgaatcaaaagaagttgaaacaagtttggctaaaaagggcatttttgggctggtttgggcaccaccggacgatccggtgtccatcaccggacagtcaagtggctatacggccaaaactcttcagcctcgggtatttcgctataattcaccgcagagtccgggccgatcaccagacagtctagtgtgttatctccaacggctacttcgacttcctccgcggggcccaacagtcgacttggagctccaaacagtctagtacccctaccagacagtctggtgcccctagaaatggaaggcaaccaatcaagcgatctggtgatcgttgtactatataatgcccggtgcacacacagacatggaaggtttaaagctttcaaataaaactctaatgactcctaggtccttagggctataaaagagactagctatggcaacgagg

SEQ ID NO: 88340 - DNA, 691 bp, Zea Mays
gtctaatttgcgagaaaaaaaagacttatttgtaataatcttagaacatcggttgatggcgggttaaatcacatagatctcagggtctctttagcaaaaaggactcgacctaaagggtatcctgctatctgggccactggatctgattcttgtgaccacgattatatcggacagactaaagtcgagacgctcatctcaagatcgacaactatgatctaatgaggcctatctcaaccccgactgcacgatccaagattaacagacctgaatcccccctgaacaatcattgctcaatctaatcccatccatccgaaggagaccggacaaccacaactctttctcctttctccgacgtcaagcagcggcggcgcacgacatctatggtggcaccatcaccggccctcaccacttctttgattcctccgtctaaactcaaacccgaagagcgctacgtgaagcagagtaaaggtaagagtatagaaggatcactcaccgagaatcagacagacaagacttctagccacaatgttgggtggatccacgacggcgagcctgtgccggcgagaaattcagtctgccctgacagctatcccttttcgatgcagcaacgagcacgttccagggaactatgtgaagccccccccccggttcggaccatgtgctccgaacaaccacgcacgcgagtggttac

SEQ ID NO: 88341 - DNA, 759 bp, Zea Mays
ctggctcctcagactaaactggtggtgatccgacatgaacatccatagaagtagccaaggaagagtcggagtcggcaccctcaggggctgggtcatcctcagcagcaccctcaggggctaggttatcctcaacagcgccctcgtgggctaaagcaccctcaatcgtacccataggagctgggtaaccttggcatgcaacatcaagaaccgaggtgttcccataaattaggctgccctcaaaggtcgaagaagcatgggaaactatccgatttatttcttgcccgactgaattactagttgagggggtgtcacctgggacctctgcacggatggcagcactctcagtttcaggaagctcaataaaagatctttagggataatctcctccagtgcatgatcaatggcagacatcatcaacctttggagactaaccagtcctggcagagcctgaattgggacatcatcactgtttttgctatggcaattcttgcgaatcaaaggggaaacttcctcttcatcctcgtcaaacacacgtccaccgatgctggtgccaccacaactctcaatatcatcctcgaggttggtgcttgtcgggccaccatcgaggactagggcagtagagtcagtccccagctccaagccacatgaacgcgaagtcttctctttcttttcttccccttggcagacacggctgggtggcccgttcgacacaatcgtttgcgatgaacacctccaggactgcagactccttcatcctcg

SEQ ID NO: 88342 - DNA, 296 bp, Zea Mays
aggcagcttgtggtgtattcttctcattgatgtctgcgcccctccaaaggcaatgtcttctgaatttttctataagcttggtcacttattttgggagtttgagtgtgcgcatgtaatatgtggggagggatgaaaaaactgcattgaccatttgtaatcttccagcctgggacaaaaaggtggaggttgacaattgtctcttttctattttctgattaagcggaaggaaggcttcaagattgggtttcctcagccccataggcagccccaagtatgtgaatgacagagacccaatc

SEQ ID NO: 88343 - DNA, 523 bp, Zea Mays
ttagatgtgtcaagttaagagagtaaaagtcgagaagaccacggaaggaaggagaaataggtgaacctaaaccacggatcaggaaagtaacgaagaccacatactcacgggtatcctctgtgggtatggtgatcccttgccaaacccgccaagaacacaattctttcgacggcaaaactctaatttcaactatgaggagcaagtcaggctcagaaacaatggaagcttagttaccgtagaagggagttgactatgggatcgatggggggaataacaggcatagtattcccatgtttcttcttcttgcgcaccataaggcctcgctaatgaacggaatcaagcgcaaactcgagggtgagtaggaatttcagggagacgtttgcggcggaaaaagcagacttagggttcgttcactaggaaactaccagcaaggatatatatgtgcgcgttaagtcgggcacatcacaacaggtgatgtgactcggatcagacttcaatcgagcgaagtaagtcagacagagtt

SEQ ID NO: 88344 - DNA, 1076 bp, Zea Mays
tggactgcgagttagttactgcttttctcggggtttctttagcaaattcaccatagagaagcattatcgcgcaaagctcgtcgaccgatcccaaacggagcgccaagattagaccgctgagggaggaaaagcggtacatagctccgaccaccggatcagcgatcaacgatccaagttctacataaccgggattgactcgcgctcatcgaattttagatctacgaccctaattgatcgcgtgaaggatcaatggttagcgcgccttcttcccccggtagcccgccaccatagtggacggtggcgccgcgacggcgaaaccccgccggtgacagcagactacgcaaaccagtactctaatcccctacccgaacgaggctacacgattataggagttaggcggacacgatcaacgacataccgaatgtggatgcgacttcggaagtggtgcccataatgttgcggatcccgcggcggtgacggcactctggtgaggaattcgcccgagaattcagtcagaactccgcccgcagacggtgcttgcaccttccccgattgacggcgactctccacggccacacgcggactccgtaggtacgatcgcagtcgacatccacaacctccctacgccatcgacccactcactcccgattagctccccacttggtcgcgattccgcatcgaagattgtggagatgggggaggaggacacccggaaccctgttacaccttatagggatatcacgatctgggatggagcaacagactcccacgtccatagcgcacctccgccatgcgtggtgtttctgttgggaggagagagaggagctttcgctgaccatgatggcccacagtcggtgagacgcctaggtagcgcgcgcacggaagatgcacgtggtcgtgtgggcccacaaaccattgagagggtgaggagcgagcgcacgagagagagagagactgaccagtgggccctatgtgtcggtgccacatggttagctggggcgagcagggaattgggcctagcgccaattttcctttttctttcttcattttctttttattttctattttcttttcat

SEQ ID NO: 88345 - DNA, 1310 bp, Zea Mays
ctgaggggctcgtaggttatgagtgtgtcgctgaccaaagggctacgcaggtcatgagtgcgttgcaggccagggctgcgcaggtcatgactgggaggcagaccggctctttactatgactcgatgttaggcgtagttaatgcggtcagctacttatggcgggtcagtctcgggctaagcggagaatccactcaagtggcttccttctggctcgtccggccccctctgcagctccgccaggcctgatcccgggcttggtgcctcgaggtttatccaggggcgggtgcttccaaggtagacgattcctctactccctcgttgacggggggcgctctgtagttcgaaggttcttatctcgtgcgctctctctgatcggtgggccacaagggttcaggatctttttcccgacacatcgataaatatttgcccactaaaacatctgtgatttttagtagtagtatattgggagagaatgtgtcaccaaattttgaggccaatcccgtgaaaaccatcattgggtggttttaaggctcaacatctaaatctccataggtagcatactccatacgcatgaacaccggacgctgagggtggcgattggacaccagacgctgaggatggagggcggagagcaagcagagtctggtgggtggaggaacggagttcgattggaggatgggccggtagaggttgggatgggtggacgacgaagatctatggcggtggtggcggggtgacggggtggaaggctgtctggatgaagtcgtgaagaatgggtgagccacttgagcacttgggccagatggatagttgggtagttgggttgtatgtgttaattttttttttttcataaacttggtatggcttaggccataatgggctctccgccaatgatcgaagatgatgaggagtccccgggccttggatgcacgagtgaaacaaccattttacacggacgaacaaaggcatccaaggagatggattgtggacagtaatgcatgttgataataattggcatgtcggccggtcacttgttctcatgcagggaaaagaaaagagaggcagataaccgacacgacgacagaatggtggtcgccgcctaatcgatgaatttctcttggcatttcatcccacctggtaaaagtttcgtttgatccagataagtcgcctcctttgctcgccgcgtaaattagttttaagttacacttcagttcactcaatatatacgcgtggattgagatggatacgagagtatcgaaacaaggcctcaataggtggcgagacatacgcgcttaagcaaagctttgttt

SEQ ID NO: 88346 - DNA, 418 bp, Zea Mays
cgacaagtgtgctttattgtactgcatgcatgtattgtgcgcatggattgttcttgctgcggtgctttgggcaggctctccttccaaaacacctcggctgtagtgaggagaggggatcaagcaggtgcctttaaaatgtgggagctcctcagcagcagccagaggtcagagccatatgccagagctcaacgcagctgccatccagatctctatatctctttctctctctataggacagacagttatgggaggattggaggtcagatcctaaatccttctcctatcctatcctatccttcacagcagaggttgatctaccttggtaagcttgcttgctcatcctctatctcattctctctactagctacgcgcatatactgttccacccctggacttggtccgcgcatttgtctcccgg

SEQ ID NO: 88347 - DNA, 958 bp, Zea Mays
attttgattcaggtagtgaaattgaacctgcatataatcgaaaacagtcgcaacaaaggtgtgaagggggaagacaaggcctcacctgtgaaaatgaacaaacgaaactgcataactaggaggatgagctgaggtttccttggtgctgagggctagccagttgccatcgtccaacatgccacgcctatcaagggcccgaatgtgctcctgatccaccaagaatctacaccagcttgccataggggatgcggtggacaacccaaagagcgaggaggaaggctaagcaaggaagatgggacaacaagggggccaagagcaaagtgaggacaccagggagaatggcacaattaaataaaggccaccctacaactctctatcgcttgatgcctaggtgaggtgactcgtctgataacgaaacatgcctggcccatcgatggggtagaaacagaccagtgcataccccaccgcccctcgatcaatggtgcaagtggtaaattccctctagtaaaatagggcaaggaggaaaagaatacacgagaatcaatagagattccctaagctacaatgttccttgcataaaagggcaccaagccttttgctactacaatttcggactcaggggctggccgtggggccatacaaccaaaagaaaggggaatctatgactatgactataagaagggaggtcatagtgaccccctccctattgcgccaattggtatgactacgagggtgaaagtccgcgttgggaagccaaaggacgattagtgaaaagggccctaaggatcccaacgcatcaagcttggaggtgtcgatttgaagtcccttgcttggtgtggtttcctccttttcttccattgccttgaatgcaatgggttgcggctcgggtgtggaggtggcgctatggtccatgttcccgatgtgtttggagtctttgaccataagttcaaagttcaca

SEQ ID NO: 88348 - DNA, 342 bp, Zea Mays
gcatgagggcgaggtcgtgatagcggtcgtaggtagaggaaattgggtcgaggatgatggggactatagaggacgttttgaacacccgctgcctaggcatgaaggttggcaactatgacgacctcgtagcctgaggggagggttgacgactgggggctccggggaggatccatgtagggagagccaagcagatgccacttagccttagccaactgcttggcgagggcattcgtcgtggtgtgttcgtgctcccaggtgagggcgcaacatgattgcgctcttgggctacagccacaatcgcgttagcagctatgagggtcgtgtcgccgtgaccaaggtgga

SEQ ID NO: 88349 - DNA, 557 bp, Zea Mays
gaatataatgaaaagttatcacaagatatataaagatacactgtagcgagctagacacttaaatttaagacaccgtaaacaaccatatgctagcattagctatctaccaccggaaagatgacgacaaatatttcttatatttactcaacacaaacacaatatcacgagcacaagtatttaccacattcactttaattacccattagttaccttacattaaattagttaagtacacaagttcgctacgacttatatatagatagacttagttgaaaaggaactagacacttaattgggcattaaaattattcactaggcaaacacttattagaccctcactaatttggttcactaacttagcgagacgtatacttgttgcttatataattaggcccaattgtattagttatattgtcattactgcgggttcaaccaatcatcaaacgaggaaacagtcaaacacaacagagtagagcatccaccaaacataacaaaatcaggacagcagcacagcaggtgcttgtttcagtcataactcttcaaatattaatccaaac

SEQ ID NO: 88350 - DNA, 890 bp, Zea Mays
ttccaaatgaatttctatattttatcccctaactggaccgcgtgcacaaatgaaccaaaggccaggggcttctgtgtgaaaaattccgagacacaaggttaaactacggtggacgacatgttagtttagcgaaaacagagggtcttatatgcataactgtcgcggccgaaggggtacgagtgtttttcggctgttggatctcagtcagatggcacagattagatcgctacacgctacaaagcggtttggaactgggccatcggatcaacgttcaacggttaagatttaaaatacgcccgatccgatcctgcccttacgtcgacgatcctatggttagcacgagatcaagccgaggcggtgcaatctccctaatctacaccgtccatcccaaatcagacggtccgaggccatctccccaaacgatcccgacggcggcggcaccaaccccttgcacgacggcgccctggactggaaatccaatccgcgccttgaggtggccattttttaattcggcctagctacacgatgccccatatctgacgaatgcagtggaaggtcaagtacctcacgatttgatacagaagaacccgaccacatcaagcggcagacggttgagctccagcaaaggattgcttgcactccggtgagtctacgatcaccgcgatgccacaccagtattctccgcggaaaaacgaagccccggctctgaattccgaaggcgaatgcggcaacggggacgatgttcactggtggcactcagcactccctatggtggctgtggcggctctggaaattaggtcggttgcggacctagtggagctgcgagaagtggcgaggtgggcagaaaatatctggatgaatccatttatgagcctggaacgtgcttggtc

SEQ ID NO: 88351 - DNA, 570 bp, Zea Mays
tgagaagtggaggaacaaagctcattggtctctatgcaagagcattgggtctagtcaagagaactagtctgatggacgctataatcacgggaaaactccagtggtatagagttggccagtatcggagcttaggcttgaggccaacagccaggcgacagttttgaacgcctaaattctctgaacaagtgcgatccaagagtctctcaaaaggtccaaaggaacacataaatcctctagcagtgtattcgagaaggcactagggaaaagataccaacgatcatcaatggctctctcgaacaaatttctacggtgacttagcggaccttctgcttttctacttgagcaaaaagggaaattgaccttattcttgtcaacccagttggtccaagtgttggagagcttgcttcttttctctttcttattttcttccctgcctcattgcactcacatgacttgtagccagtggagcacaccatggttccttccttaccaatctttttcatgccactgacactgttatctaggtcaagttgggcttgttcactcttgccattcaacaaaatcatgtcc

SEQ ID NO: 88352 - DNA, 467 bp, Zea Mays
gatggggtcggaggtaacgcacgagcaagtggtcaacttcgatagaagcagaattgcaattttccttctcacactcatcgcgttgccacaaaatcaatggctcaataccaggtggaagaggttcctccttttctgatgaactatcagaagcaacaactggtgactgtggaagatggtgtataatattaattgcaaatgtctgtgttgaaccccacgggacaaatctcttacgagctgaaaggcgtcgagcaagctgctcattactgtcactatatccattttggcatggaggtttgaatggcttacgaactattgctgctgcatcagaaactgaaagaatacgtggaatgagtggttgcctccttacaaccaggttgcccctgacagaaaccaaaaatatatataagtgaagtcaaagacaatgatgttaatgtgaagtcagattagttgccaattgtctgtttcct

SEQ ID NO: 88353 - DNA, 390 bp, Zea Mays
tattttattcatcattctagatgattatcatcaatcctaaaatggtttcacaaaaattaaaaatggtttacaaattaataaagatttgtttaccaatttcagggtgggggatcaggtgggtgctcctacagtcaacaaactataggtatttgtactagatcatcaagacatcaacactttggtgtgcaaagattccagcaatcgttggcaagtaccacgaaaatacggcaagcagtaaaacaccttggcaggtagtctgatgcgtgactgccacacgtacatactcatcaactgggttgagcgggcaactgtactatcggacctcttgctatctctattcaaaagaatacaactcggtgctaacagtgttgctatattaatcattttttt

SEQ ID NO: 88354 - DNA, 488 bp, Zea Mays
ataccctttttttttctccccccgacgaccttttcgccctctttgatctctcctgtgacatctactactcacctgtatttcagttttacagtttctagttgtttatgtcctctaacaaaattaatgactacagatagtgtgctccactgtttattttcctgttttcatcctttcttattacaccatcacccggtgagacataaaatcaaccggaataccaatgaagaatcttgagttttctaaccggtaattaatttgtggtagtttgtagctttgtatttggagttagcgacttgctaaaatccaagcgcctgaactttagtttttgttttcaggctatgattagtacatataattcataatgaacttatgttttcggaaaaaaaacatagaaacatttatgagcggtgtcatatatttgtgaacgaatgtactaatagtttttaatccacataagaacattttttttgtacgacatattttattat

SEQ ID NO: 88355 - DNA, 309 bp, Zea Mays
agaaactctctcgtttccccctagaaaggctataaagtcccagatcttggttgacttcctggttgcactacaaaatgaccccccttttagcaacacatatatgtgttggtacaatctcatataagtgttactagggtctataccaacgcataattatgtgttgcttatactgctgttgctagagtctactgcaacacttatatatgtgttggtatgtcctccaataagtgttgctaaactacaacggataactatgagatacatcaacacttacatgtgttgttcccgcccatgactgactcatcgcca

SEQ ID NO: 88356 - DNA, 732 bp, Zea Mays
gttccacatacactaattcactaatcttaccattcaagaaggcgctcttaacatccatttggtagagcttgatattatgagcacaagcataggcgagaagaattcgaatggcttccaatcttgccatgggtgcgaatgtctcaccaaaatccaatccttctacttgtgtataaccttgtgttactagtcttacattgtttctaatcaccaaaccatcttcattatgcttgtttcgaaatacccatttggttccaataacattgtgattcttcggtctttcaacaagctcccaaacttcattacgggtgaagttatttaattcctcatgcattgcattcacccactcaacatcaagtagagcttcatctacacggttaggttcaatataagatacaaaagagaagtgttcacaaaatgaagctatacatgatcgagtttgaacacccttacttatatcacccacaatttgatttggtgggtgaccttttataattgaatgatgaattcttgacgtaatttgaaaataactagttgtattttgaggaggaattgcatgacccgagatatcttgaacatgatcatcctcaatttcatcattatgttggctttgttgaatttcctcattcatagttgaagaggatggaatgacaaccatactatcatcatcgtcttctattggctttatttcaccgatagccatagttttcatagcatttctcaaatgaactccac

SEQ ID NO: 88357 - DNA, 300 bp, Zea Mays
ttcagagtcttagtctcagttagtcttagttagaatagtttgcttgtcatatgtcttgatgcttgtcgtgatgaacttgtaatgaagttggatctttgtaatgattgtcatcaaggtgtgggcatcccctgcaacttggtgtagttattaataaagtcagttatttggttgggtaatccctttatttccactttcctctttatctgagaaactgttagtgaagatgatcaattgttcagtgctatgaagattttctatacatcttttcttatgctgaaagactgcagagtcagatctgat

SEQ ID NO: 88358 - DNA, 758 bp, Zea Mays
aaaaatcaatgaaaccaggcttaatgcacaagccgaaactcacaaagccgaagttgacgatctaaagaaaaaacttgccgaaatgaatgaaaattttaaagttgcgaaggcaaagaacgaaataagtgaaaggaccagttcaaggataaaaaagattgttgaagagcttcgtgattccagggagaggtgttatgaaagatccttggattgcatgaagaagctaaaagatagctttgcgaaggtgggtgcttattcctcagaacaaaaatttattcgcggcgatcccgaaggagttatctaatggataggtgaagaagtcgaagctttcgatgagatccttagcgatcgcggagatttttgtgcttttccggtgcccaaggggttgcggcaattctagaaaaggctgggtgtgaacatgtcaaggctgaggcccagccagaatatattctctgagttgacaatactaaggacccttcagttgaggcttctacattgggcggcaaattctactccgatgtgtggatgaagggtggtcgtgagatggctaacgaaaccattaaaaagactatgaaagaatctcacgatgcccgcgaggaagctaagcaagctgaggaagctaccgaacgcgccatgattataggcacttttatttaaaactttttgccctgttactcgtttttaccttcgaaattcaccatcatatattttttatagccgacctctctccgccaccggagccatacaacctcgaagctgat

SEQ ID NO: 88359 - DNA, 616 bp, Zea Mays
tgggctttgaaccagcttctccttttcttcatcaactttgacgtaaaaccattcagtcttccagccagctggccacttggtacgatagctgataactagaaattttgcatctttgcggtaagcaaaattgtagcagccgaagttttcgtgtagcccatcttctctagcttttgtttgataatgaagctcatgtattcggcagaagccttcggcaaacggttctacccctggcttcgaagggcccatatgtagacgctaagcctaacgatggcgttaggagttagctaatgaagataaatcccaaacttcttcaaaacaccagcaatcatctcattcagaggaaatcttaatcccgctttaaagaagcttttgaagacaaccacctcatctttttctggcttcaaagtaatttcctctccaccaaaacgaaccagatccttttttgcttcactgaaatagcctaacttcatcagcttagacatatcaccttcagtaatggtggatttcccaaactccaggtggctgggtttagatggcacagcgttgtaatcatcttcagattcaatttcctcaacatcaacctgctcagcttcagtgataggtgcatcttccgata

SEQ ID NO: 88360 - DNA, 1076 bp, Zea Mays
atgggctcgggggtcggtgggctaatgcctacgtgttgtctgcccttctagtgggtttcatcgtaatggtcggtgggctcgaagaggtcggtcatgaagacccccggtgggaccgtcattcgtcccgacctcatcttcgtgagggcgtccgctgcttagttgtcacatctgggacgtggttcaactcaaggccataaaatctatcaagttgtagtacctatcgacaatatactgtcatcctaggtcgtgacattccaaatccttcatcacctatgctatgacaagctgggagtcccctagacttcgaggcattggatgcccaactctacgacgacgcataggccattcacgagggcttcatattctaccacattgttggaggcctagaaactgagttggacggtgtaccgcaactattctcctgagggtgacgtgaagatgaggtcaccacctgccccttccttgacgtcggcgaggacttgtgatttaatcgccgtttgtggggcataggaaatctcgtatcccatcaactcgagggcccatttagcaacactccaagaagcctctgagttatggatcacctcccccaggggaaacactgttactatggtgacgaggtgtgattcaaagtaatgcttaagcttccgcttcgtaataaggacagcgtaccagagcttttgtacctaggggtagcgggtctttgcgcctgttaagacctcacttatcaagcagatggggcattggagcggatgtgtgcttccctcctctcgctttttctgaactaatcacttgggtagtccctgtctcataaagaagaagaggatccttgtcctccgatgggaccaggatgggggcctaggttatgagagtcttgaggccatcgagggcctcctgtgcttctgttatgcattcgaagcggtcagtctttcgcaacagcttatagagcagcagttattgctctccgaggcacgaaatgaagcgcttgagggaggccgggcatatcatgactcgtcaaactcctttaaggtcccatatgggccccatgttggtgatggtcatgatcttttctagtttgg

SEQ ID NO: 88361 - DNA, 579 bp, Zea Mays
ttggcattcacgactttgtcatatcaattttggttgtgtctcgcggttagcaaatttaaatttaatcctgaaatttgatttagtcaaaggttctaagtgtgaagtgtgtctaagcaacctcacaagcatcataagaccgcgaaggtgaggaatttggcaccagtggacttaatacattccgatttatgtgtgatgaatggaatattgactaaaggaggtaagcgatattttattacttttatcgatgattctattagattatgttaagtgtatctcttaaaatcaaagatgacgctttgcattattttaagacctacaaaactgaagctgaaaatcaacccgagaggaaaattaaacagttaaggtctgatcgtggtggataatattttcgagtgatttttcagatttttgtgtggaacatggtattattcatgagaggacactgccatactcaccacaatccaatgaggttgctgaaagaaagaaccgtactctaactgatttggttaacgccatgttggagacttcgggactatctaacgaatggtggggtgagacgatcttgacggcgtgtcatgt

SEQ ID NO: 88362 - DNA, 420 bp, Zea Mays
gtagtggggaggtgaaggggtgaaggatggtacaaataatattgtctattgaatttgagtgagtaagggagagagaattatctagcggtctgaaccgttttttataatgtgttaagtttgtgtgcaatttgtttgatggatctagtggaggttatatgggtgtgggggtgatctggttgggagggcttagcaaagttcaagctcatggattaaattactcacatataattagctacattgtcttgtacgtatccatgcatgaattacgttctaatacttgtctatttcaattagaattacttgcgcatgcggaagagctagctctgctggttgatggactacggtgacaaagtaaaaaagaaactctttggaccagctgaggaaggcaattgtttcgaatctggctgctgcgtagccaga

SEQ ID NO: 88363 - DNA, 297 bp, Zea Mays
gccattcaaactggaaacaaataaaggtccaccagagcatgaagaattgttacatgaaatgtttggtgccattgttgtggatggatctagtgcatgcacacccggtgaagtgtttggagggaatgatgaagaagaggttgctatggatgttatggtggagatgattgtgatagatttgcatcacctgctactagttcctatactctaaaaggaagtttctcccgaaaccgagcaactactagtactactacaagtccattgaagcccaagaaccaaatggtcaaagtgatatagaat

SEQ ID NO: 88364 - DNA, 335 bp, Zea Mays
gaatatgtatcgtttaatggcttttagcttcgtcatttgttttcgtggcttcgaactgattgattttttctatcgcagctgagctatctcctccaccagagccgttcgaccccttggccgacccggagacaaagaaagcaatagaaattatcaacatagctaaatctattgttgacgaagtcgtcaacaaactgcttaatgaagttgcggagaaggttctgaaggaagaacagtagttactgtaaaaacgttcttaggtgattaatgtaacatttgtcgaactaagtctgtaatatttgatgtgtatagttttgaatctaatatgtaaactattt

SEQ ID NO: 88365 - DNA, 926 bp, Zea Mays
tctatgtgatgaaactccaagctttcgaatttttctttgatcttcatgaccgcagtgcagtaattgcccattgaatcagtggggtagtcccaatccttgttgacctggctgatgacaactagtgagtctatatacaccatcagtcttttgataacgagtgacacaacaatgtcgatcccatgtatcaaggcttcatactctactacattgttggaggctgggaataaaagttccaatgcgtacttgagctgatctcctccatgggaaatgaagaggattctagcccatgctccttgtagcttcagtggcccgtgaaagtacatcttgcagaccttgattgatttagggttttcaggaatctgctgctcagtccattctgatatgaagtctaccagagccttagttttgatcgccgtccggggtcaagactctatgtcatgagctccgagtacgcacgccacttggttgtcctccccactgcttctgtgttgcagagtatgtctcctattgggaaacctgtgaccagtatgactttgtgatcgtcaaagtagtgatgcagctttcgcgcagtgagcagaacaacatatagtagcttatgaacttaagggtatctgatcttggagggctcgaagacctcactaatgatgtagatgtggtgcttgactagatatgcgtgtgcttcttctgcccacttgactaccaatgtggtgcttaccacgttagtcgtgcatgagatgcatagtagtagatcttcggccggtcgactgacagtagctcagtggggtggcttgagaaccagcggggtggccaagaatttttgagttcttcttgagcctctagagtccacttgaatctgtccaccttcttgagtagtttatagaatgtcattcttctatcaccgagtcatgagatggattgacttagtg

SEQ ID NO: 88366 - DNA, 733 bp, Zea Mays
cctagtccgcgcctcggcgtaatcgacctctcggtctctcgcactcctcggtatataatggggaactaagcctcgcctccctcaatccatagtcgaacgccatcatcaccgtgaaccagagcaaagagggagagagatccaccgccattgaatcacgcgtccacactcgtcgaggtactgttgtagggtctgggagcttcgcccgatccctaggaaggttgggatggcatcgcgaatgtggatgggtccacggtgtgccttgaattgctcgtcggtgcgtgcaggtcacctccgaccgccgcttgtcgtggctgggaccttttgcaacacatcaagcggtatgtaacggttcatcgcgttcatatagcgtagagcatcgtgtagtactcttcgaatcaaagattggtgcgatgtgtcgggattcagggcaactccgaccatgggcgccgtcgcggcagggtctgtgtgccgtcgtgccctgttggccgaggaaggagaggcgtaggtagccgttgatcccagatcgacgactgtgatcatatcacgcataccctttcgtttggatgagtaccgaccgtcgatctaatatcgggcgggtagaattaggtcgtgcttcatgaaatctgagtcgtagatgttagatcctaaggacttcattgcgtaccagttcagcgcttggatgtctaaatccgcgtcgtgcatcgctgatcctgcggtcatctgtggatatcgg

SEQ ID NO: 88367 - DNA, 481 bp, Zea Mays
gtggtgtattaaaaactttggcatatcattttaggaaacaacctgtgtttaaaggcccatgcaccgactagttgataagtattgaactgatatgcaatgaatgttaaatagggttatgaatgtgctggggttttaatacccccactactcgaagtttgcagaagaagttgacgttggtgtaaaaagaaaaaaggactattagcatcttaaaaagagaaggtatcaggtcaaagaaagccaagaagcaaaaaatggctagaaaaccaaaggtgactgaggccgatgacgaagggtattcgcactcagagtcaaaaaccccaacttcaaagaggaagcaaacagatgcacctgtcgataaaagcgaagaaagaccctcgaatgcaactaaaagggacattgggagtgcgtcagcttcgtcacctgggctacaaatatattggaggtaatgacccaacctttacctttcactactttaagccct

SEQ ID NO: 88368 - DNA, 367 bp, Zea Mays
gcttgctgcgtcaaggactctggtcggaaaggctttcagatccggtttctactagccaactgcgaagagcgatgctgccgagttagtccagaagtgtgaagcgtcccaattcctatcaaaacaacaacacttgcccgcgcagcagctgcagaccattcctgtaacatggccttttgcatgctgggggctggacatgatcgaatctttcaagaaagctcaaggaggctatactcatatactggttgccattgacaaattcacaaaatggatagagtacaagccaattgcctctttgacctcagccaaagcagtggagtttatccaggatataatattttggttcaggatactgaatagcgtcatcact

SEQ ID NO: 88369 - DNA, 493 bp, Zea Mays
aatactcacaatggtaactcacctcttagttaggtggaatctgtttgtgggagtggggcttttttgggtggctatggtcctctaggaaagggatcactagagatgttaggaagggtgtcaagtgtgttcctgagatggttaaagtttggacaccacacttgtttctaatgaggggctcttggaggttcaacaaacagttcatctctcacaataggggtggcagatttgggtggagtggttttgacaagtttggaatggctgaaggtttctatgaggggctcaaaccactggactcatcaaccttgccaaatcgagcatcactcctagccctaacagcaaagcctaaccccgtccgacagttcccctccgactgaccatcatgcccaattggggctcactgctaaacacctagctcaagactgatcgaaggtattgttttcctctttgatccttgtcttgtcgtgtttgcaagatttaagagcagactgcaaac

SEQ ID NO: 88370 - DNA, 336 bp, Zea Mays
gacggtggggatggacgcaatcggacggtcgggatagaggcgggggcacggttgtgcctggtctacactatcgtcttaaggattagtagagataaaatttagagaccattgtcacccatatagctcggtacttagaaccccgtggaaggaatttcgactctcggcaacactcgcaaaatcatgtgaagagttttaaaatccgtacatgctagggtaatattaaatttgtgcccgcattcgtcatctacgacgtgcatagtcgcacagtatgacgtctacatccacattaatgacgcacttgtcataaactcatggacacacccatgtccgaaaaat

SEQ ID NO: 88371 - DNA, 421 bp, Zea Mays
ctatgttttaggtgtttgctatttggtttctgagtttcagctgtttcctttgtgaggtgcagatgtatgttctggctgaaccaaaacaaatgttatatgatatgtgagttggacctgttgtatggtattccatactaactagaattatgatgtttaatgtacctaaagaactatgatgaaatgacttcactgatgatccctagggtggattttgtacactttctaattgagtcctcttgttatgttgtctacatgtatcatttatgtattctaaatctgtgtgtcaatcttattttcttctagtttttagtataacttcgttgctatgttagttttttcactgttgtcatatatgctacgttggggtttttcattctggtatgaatgtgctccaactaaagggattagatgatgtttgtca

SEQ ID NO: 88372 - DNA, 442 bp, Zea Mays
ttattttctgatttttccaaccctctggactgggcgccaaataccagagaagacaggggccaccacgtaagaatcccgagacccagcgcacatcaacattggatcgcgggttagttactgaataagtaagggtctctttagtaagataacctggccgaaggggtttgagcggttgagagccgcaggatcgcaccgacggtcaggattagaacttatactactgtgaatcggtacacactgcgggccgttggatttaaattctctggtcaggattttaatatattgcgatcgagcaccacccgccaatccaacgatctacggttgagatgagctgggtcgaaccggtacacaacatctaatcctaaccgtcaacgcaaagatctacggttcaacccttctcgtccccagtcagccccagggcggcggcgcccaagcttccccc

SEQ ID NO: 88373 - DNA, 603 bp, Zea Mays
gaagaggggtggccacggtgtgcgcgcgcatcatttccttctttattgccgccctgtctgtgcctgcccagcccccatgcattattattactactccgttacgattagtgttattacttcgcctcataccgacacaaagaacttttgctaagaacgcgataataataccatgccgccatggatgctttgttgtacggcaggggctaaatccatgcttccaagtgacgtttatccagcaacgaaagccattaccatttccctccacacaaatgttgcttaaggccaaggccaatccttcaccaactgcccctactgtctgttcctcttggtgatgtgcgttccctaatcattctccttttgtgtgtgtctaccagctgcccacgtataccaccatccatttcttttctttttttttttactctgctgtgcctttcagtacctaggcactatgcgttcttgctccttttttttctttgttctctcttctagtgtaacgacttaactgccactgcgtttaggtgaacatttatgcagcgtacaagttgctactactcttactacttaggctcggtttgttttagtttttttttagcttctggccac

SEQ ID NO: 88374 - DNA, 457 bp, Zea Mays
aagggtagtggggcccacctacaagtgtaagggagagagaaaaaggaatggggagaggcatgcacagagggatgagctgggttggtggcgaggcgaatggggccacgggagcgagggcaacacgaggcgggggcaggcggaggcatatttggtgtggacgctgacgctactctcttaatagagtagtatagaaatagggaggtttggacccgttataagctagtttttgagttaatgccgcaggtttagctaacaaataccacaagaaattcggaaccctaactgattttgagcacgcgcggacggtctgcgccactgtggaagacagtctggaccacggaccgtccgaactcagggccaaaccgtccgccaagcacttttagtgctcaacatatgcccctgccttttggtggaggttaacaaactaaaagcctatgtaccgccagcacccttcgag

SEQ ID NO: 88375 - DNA, 1031 bp, Zea Mays
ctgaaaacagtctgagtcagcccacgaacgagaaaacgcgcccgcacgcgcgcccgtgatgctcaatttgcatagaggatcccggccttttgaataactaattaagaatccttgcacaccattcacatgtgtctctgacactcgcaccgagacctctccctttttgtttctttgcaaggttaggtccccgaccaccgacggcggtgaacacactctccggcgagcctgtaccggccggaatacgcaaaggctaagctccttactaggtcgacaccaaattctacccctggtgaccctaatccctcaactaattgcacgaatcctggccaaaatctctttgcccacgacgacggcgaaaatccaaggcaatccgaggtgttcacgatgatttggtgcggtctagcttaatcgaatgggtctatgagcaacagggggcttgaggaaggctagaacaccaatcaaagaggcttgaactaacctgcagagggctggccacgacaaagtgttcacggtggcacgaaaaacgtatttgggggaaacacgaaattgggaggctctggtggatgatccgaggcaagggttggtgtgttggatgcgtaattacctagcagaactcacgggggcagcaatttatagagtcctacggtggtggcgtctaattttgagaaggcgcgctggcggtcggagataggagaaatgcactggcgcgggtgatcgtggctttcatcatggcaaggcctccggcgatggacggacttgcttcaacagtttattgcgacgtgttaaagcccctaggtacgtggcgcatggtcggtaagcggctaacgtcggcgaggattatctcgcccagccggagaccaagtgggtacggtgaacccaccagtgaccagatctgaatcaatccgggcgccaagatcttttcaccgccgagcgtaatccacttatccgaggcatgaatcgtggtggccggcgtgaatccaggcgcggggtcaccggcggcgaggtgcactgcatctgctgatctttttcag

SEQ ID NO: 88376 - DNA, 450 bp, Zea Mays
cggctctccttccggtgtagtggccacttgagtgtaataaattcgcccagtcttcttcacatatttgcccgctgaattatttgccatgttccctttgccttgatttgagctccccgagttctgctgattggtggacttattctgcctcggatatgggcagtctttgataaaatgaccaaacttcccacagttgaagcagccagttgaggaactagggatggcggggaaatgagcaccaggggcactcggctgatttgtagaagtgggggcagtggcagggcgaatgaaaacaggctgtttgaatggataggagggtggacgagacgaagaacgattttgattgaaaggtcggattaccaaccttgttcgcttctcaggtccctgattggatctgtcacctccaaatcccttggattttccttggcctgtattcttggcttctactgccag

SEQ ID NO: 88377 - DNA, 318 bp, Zea Mays
cggattcactgcctcactacgggtagctatctggtgatagctttctttccttggttcagacaaggtcaactccaccaacacttcttctcctatcaaggacaccaacctcacagtcctcttatcacaactaaggcctgcttggtacttggtcaaccaattcatccctaggatgacatctatgtctacatcccgagtacccattaccatcagatagcgggaaactctatcccccttatttgaaatcttgcacttgggcaaaatttatctgtttgggtcctcccaccaactaaaaaaccctcataggtgggtacatgggtg

SEQ ID NO: 88378 - DNA, 300 bp, Zea Mays
atgaagttgctttgcctcggtgcacctgaaagtcgcctagagggggggtcaataagaaaaacttgaaagttacaactttaaacacaaacttcaaccccaggttagcgttagaacgagaataagaaagatcagagtgcgagggagagagttcgtcttgcgccaattgctcaaatgatcgcatattactttgtgagaaacttaatttgatatgaaatcaagcacaagcaagagaactaaagagaggagggaaatgaagaagcaaatcacaaatgaggataaaaaacaaagatacaaacaaat

SEQ ID NO: 88379 - DNA, 298 bp, Zea Mays
ttcggttcctgctgctgaggaagtgcctgtgcctgaatttaccgacgctgaccccaatgggtgtgatccatctgccgctgatcccaatgggtgtgatccatctgtcgctgatcccaatgggtgtgatccatctgttgctgatcccaatgggtgtgctgtatgtgttgctgatgaaaacgagggggaggaagaagatgaggtccctttgactcggaagaacagtcggcaatatgtagctagtggggaaagtagtggagttccttctcctgctctgtctgccctcattggtctacaagaa

SEQ ID NO: 88380 - DNA, 787 bp, Zea Mays
taacctctaaagtaaccaggccaacaagagcagtagaatgattaaggctcgtcaccgcaggttcctcagactaaactagtggtgactcaacatgaacatccatagaagcagccgaagaagagccaagtttgggaccctcgggggctgggttatcctcaatcgaaccctcgggggctagataaccatcgcacgtaacagcaggaactgaagtgtcctcacggatcaggccgccctcaaaggtcaaagaagcatgggaaactgcccaggttatttcttgcccagtaagaatgctagctgagggaacgtcatccaggacctctacacggatgccaacacccccagcttcaggaagttccaataaaagactttctgggataatctcctccaatgcatgatcaatagcagacatcgtcatcctctggagattaaccagccctgacagagcctgaattggaacatcgttgctagctttgctatgacgattcttgcgaactataggggggatttcttcctcatactcttcctccttagatacacgcccaccagctcgtatgccaccacaactctcaatatcatcttcgagatcggcactcgccgggtcaccaccaaggtctatggcctggactgtcgtcttgaacaggcgggttgtatgcaaactttgaaaaagacctctgcagcgacaaaatgacacagtaaggacactacttatgacaaatacaggaactcatatgcaacaacgcttaccacaggggaaggttccaggcagaatacgaagggggagcaccag

SEQ ID NO: 88381 - DNA, 274 bp, Zea Mays
ggagatagtcttaggtgcgtcttattcttcaacagtttgttccatgactagctgccgttggagtgttacaaagaatgactgatgcagacctgaacttggtgcgttaaggtgccatggctaattttgcgataaatacccatctttagtatgctctgaatgtggcctggactacaagaacatgtagttaatctacactagttggggtttacccagcggtggagtgcctgatatggctcacgccataccttcccttcacccgcacgccgcaccgcac

SEQ ID NO: 88382 - DNA, 527 bp, Zea Mays
gcagagttctcgtataataacagccatcaggccagcatcaagatgtcaccgttcgaagcattgtatggacgaaaatgccagacccctctcatgtggtccaacgtaggggaaaaggcactggaaggacctgcctttgtcaaaaaggctgagaagaaagttgccctgatccgcagaagattacttgaagctcagagttggcagaagagttatgcggacaacaggcagagagaactcagatttgaggaaggagacttcgtctacctcaaggtctccccgatgtgtggtgtcagaagattccaagtgaaagggaagctagcaccgcgattcgtcggcccctatcccatcattggcagagtgggacccgcagcgtaccgtcttgaattaccagaatccatgtctgatatccacaatgtgtttcacgtgtcccagctccgcaaatgcctgcaagcaccagaaagtcacatcgaagaagaggcaatacaaattcagaaagatcttcagtaccgtgagaagccagtaaagattct

SEQ ID NO: 88383 - DNA, 277 bp, Zea Mays
ctctgtcagcgaagcggaggaagcagtcatcggtgcggcaaatgacaaagaaggtttggctgcaacagcaggagatgggccgtgtcgggccaaaaggctgaggaagtgcaacccaaaggtctttgggccggcgtggctaaacagcacaaagtaatccagccgattattaaataagggttcggcggcgcgtagggtttttaggctgtaacagaactctagactctagttcttcttcctttccaagtactatctcaactactctgttctccgtctctgc

SEQ ID NO: 88384 - DNA, 636 bp, Zea Mays
gccccggcatattgaggaccatatttaaataatggggtggccatgaacttggctagccctggtcgttcgacgatggcgttgtaggcgcagttgaagctggctacctcaaagtggaggaacttggtgcgaaagtgcttgggcatgccgaaggtgatagataggcatatgtgcccaagtgggtactctgctaacccagcatgatgcggaagaaaggattgttcgactcgtggagctctgcggtggagatctcaaatgctcgtaggctcttcgggaaggtgatgttgatgctgcttccatcattaatcagcactctcttgacttgactcttgtcatccatttagctaacaagcaatggaaacttgcctgatgatcaaagttgatccattgatcggctcggctaaaggagatcaggcctcaaaccaccgatatggtgtcagggggggtcaatcatggctatcaggacctagcggttatatagcttttgctctctcttgtttcctaggagccatccccctgaaggttaagttgacttctctgttgaccagaggggacagatgatcgttgtcttcccactggtggccgctgctggggatcatgattctgccttggaggtggcgatggtagctcttggaatgg

SEQ ID NO: 88385 - DNA, 575 bp, Zea Mays
gtaaaacttgactctatcaggatataatttaggcaggaggtgatttgttcgtgccttcgtgggataatgggcaggtagtagaacattttggtttgtagtaggccctgcattgtggcttggttcgttgtattgcataacttctaggctaaaaaaatcgaggtgcttgttgctttcttttatgaatatgctcggctccattattgctcgctttaatgatctaagtgatgttcgagctattgtcagtcttaaattggttgtggatgtctattacattgaacaacttggctggatatggttcacactttataactcctttctaaagaaatattcattggtctggatctagacttttgcaaatctaacgtgtctctgtcttacggctccttttatggccagaaaggaagggccctgattgggtatattcgtcttttatatactcaactaccactttttgttttacgagggatatgataggggaagcctcactgttacatactgacatcaagagaataaatgcatagtgaaaaagttaaaacaagaaacaaaagggaaatcagaacatggaataagcttga

SEQ ID NO: 88386 - DNA, 678 bp, Zea Mays
atgatacagaaatttcgacacaaacacatattaaggctaacctcaacgttcaaaagtcatattcattcatctaaaccgacactaaatcctcgataatactaatcagtacaacaacagctaaggagcacacgagtcgtaggcgagatccactagtctagaggctgatgtgatggcgtcagagcgtacctgacaagagcatcgacgttctgcgatttcatctccttatcgggagccgccacgccgcgttgcaggccccgaagtggccgcctgacgttgccaccgtggtcgtccccgtcccagccctcgccgcaatcgctgctgcctccttcctccgcttcgtccccgccgctcgcgtcactgctttcccccacgtattcgtcgtcgtccgcctcggccccgcggttcgcctccgactctgattcctccaggtcggatgggactgaaatgatctcgtcctcgtcgccatcgctgccgcggcggtcgtactggctcctcgagggcattcgctgcaacggacggtgaataaacggaatggggatgaatggagctggctctgagatgcttcgattgctgtttcggctttcgggactagcaagtggagaggcggccgcggtttcgattgggagttgaatggattttgggcaaggggatgcaaaaattttggcggtaggaaaggga

SEQ ID NO: 88387 - DNA, 851 bp, Zea Mays
ccctcatactggttctatcagtgcaccagatgagtggtgggctaagcaaaatgaagtaagtagacaaaaatttttgttttcctagtttaacaatagtaatggacatctgaaagtaggaaataacatttactgcaggcaatgccagggtgtattatgttcaaaacagccccccttgagaatgaggacgagcttaaggttatgtttggacccattgtctgcactaatgaaacaacccttgttcctggagttgaggatgcaaattcttcatcagatgaccacgtgcaagccaatttaggtgggagtgaaaacagcacaccagacccctgctaaaatgcgacagggaagcgtaaggtgctgcatgattctcctaaacctaagaagaaaaaagatacgaaggatgaatacatgaaacgccttgtggaggcttttgagtcgcgttccatgaacactaacaagtccataacatcttttgagatcgacccagtacgtgtagaggttgctgctcagttgcaacaagtaattgaagatggatcagaggaaggcagcgacttacatttctttgccactcacttgttgatggagaaacggtatagaaatgtatttgcaaccctgaagccaaagaagggaggaacgcttggctgtgccgtgctttcgagatgaatgttaagtccagttagatggtgctcgtccgacaacgatgctgctatgtccgaactatgttgttgctgctgttagagtttttaactgtcgtcagtttgagtcttttttcgtcgtgcagtcatgttacaaactattatacatgtcgtatgcatctgttccgcatcgcacaattttccaattattcgagttga

SEQ ID NO: 88388 - DNA, 588 bp, Zea Mays
agaaggtttgattggacccttaaactatcagctacaaagccacaatttccccaatttctagactctgcttaacaaggcgattggcgtagaaagcaaaagaagggaattatctgatcacaagaggaaattccaaggatagtctagcagaaacacccaacaaaacaactctcaagattcttagtttcgctttggaaatcagagtggaaacaataattatcaaatgcaacgctctagatagcaaggacagagaaacaaccaataccagaaccaacagaggaacaattctcagatcgatcaaaggtctagtggttaccaacagaatcatcaaggaagcaccgtgaacacaccggcccgaaataacaatacaactactccagtccaacctagtggatgtttcaagtgtggtgaacttggtcattatgccaacaattgccctaagcacaacccatagacacccagaggagcaacagtcaaagagttgatcaggatacacctgctcgtggtactgcacagaacaagactctgcagaaccaaagtaagggaagaattaatcacgtgacaatagaaacagttcctgaggatgccgac

SEQ ID NO: 88389 - DNA, 304 bp, Zea Mays
gaagtgtgtcgtgactgtatacattggatccagtccgcaccatgtggaatggagtgtcactgctgcagggcacagattcaaagacacctaccaagtcgtcgcccgcaaggcattgagggccctatgtcagatctatgaagaagtggcagacacgccgctcagattctttctaccctttcagagagaccgtccagtttggatggccaagatgcgtgcattggaagggaagtagctgcttgaggatgaccccacattcgtgtacctcactgcatacctgctcaccctggatgcacagtatgatttc

SEQ ID NO: 88390 - DNA, 385 bp, Zea Mays
gaaattggtcattatgccaacaactgcccaaagcgcaacccatagacaccgcagaggaacaacagtcaaagatttgatcagaatacacctactcgtggtactgcacagaacaagctccgcaaaaccagagtaagggaagaattaatcatgtgacaacagaaacagttccagaggatgacgacgtggtgtatggtatgtttcttattaactccatacttgcatcagttttatttgattctgaaacatctcactctttcgtaacaaagtcaattgtgaaaaagcataatataccaaactatcctttgaagaggaaactattaattagatcaccaggaagtgaacttagagccactcacttatgccctcaaactaagcttgagattag

SEQ ID NO: 88391 - DNA, 944 bp, Zea Mays
tcaggactggaacgctaaatctaggatgaaaggccttaagaatggtggggtagataggtggctatgtaaataggccataaaggccaacactagggtattagtgatgccctaggagcacccctctaatcgatgagaggatgttcattcaagcatgcatgcattacaaaacatgaataattaaaagttaaagaaaatgcatcgaatcatgacccctagcaacattagttaaaaatgggtagcaagaaaatgagttggaatagataaatctaagttgatccacctcctttaaacgtaagcacacttatctccttaccgctaccttagcacttacacttaaccctctttcacagatgtcttcacccacctccgccgatggaggagacacccgctttagctttactacctttcccacgagggctatccctctatcttgtgggaggtgctctgctccgctggataccccacaccccctctatacatggtgcatctatacgaggagcatcgggtgccatgttgcagggtttggctgaccctggagtctcaccctctgcagcctagttggcgttcccttgattccgagactatcaggttcagggcggaagacaccattgaggccgcagcactaaaagctctgatgaccttctgaggatatcaccccctagagatgatgatgcacccacttggactcttccccgccgagaagagggatgacctaatgtggtgcaacagagtgagtcacaagaaggatgtgtgggccatgcatcccaaccaggttgggaggatcacgtccagtgcatgagcgcactgtaccgcctgcaggccttgcaaggcgacgccatgacacacctcactggactcgctcaggctacaaatatcaccctcgacaatcaggatgacttcgtagtcgacttgtcttcagaattggtggagaaagatctataggt

SEQ ID NO: 88392 - DNA, 717 bp, Zea Mays
ccgaggtcctggaaaagctttgccaccgcatcagacagctcgcttagctcggccaccttctgctccatggtctatgacagggtccgagaggtctgggctgcggtctccagatccttctcgaggcttgaaaagaggacaatgacgtaaagtcgtggctaggaaaagagatcgaacccaaacaatgaggcaaggcttcggcaagatacctcctatccgggctttcaaagcccagccctcggaccgtttggcctcctagtgcttggagagggagtcgacgcggagggaagcttcgtcccgctccaccatcagtgcctgaaggtttcccttcatctgccgcatctcctcctcgtgatggtccgcctctgcctttaggtggcggacttcatccctcagccaacatacactctcacgatcggtcgcaccctcttcctttagtccctcgcaccgagacgtcaagtccaccacttcggcgctcctcagtgctagctgctcgttggaacggagcagcgaacccgatggcgctgcagtgaggcccagacgtcccgttcatggtgaacgacgatggacttggccatcgacctcatcataacctcctacagaaggacaaaactctcgtcatcacactgtgaaggggcaaagaattcctaaaacaaaggaaagcaacacccttacttgggtcaccaccctcaactcgcccatagcacctgctcctcaatg

SEQ ID NO: 88393 - DNA, 815 bp, Zea Mays
tggattataggaaacctggtatcacaaaatgtcatttgctagcccaatgacgtcttcatccactagttgtactctaataccctcacgtgcaattacaatgcccttgacatctaggaaacgtcttttgtggtataaaaggtgatctattgttttgaattctttatattccaactttttagcaattgtacggtggaaaaaaggtgccttacaaccttaacctatatttggacagttctctcacgcaatttggctaaatttcccatggtctttattttactttgagaaatagtgtggcataatgatgtatggtgttatatttgagtggacataaacaccatctaggtatgccttgaatagaggggattattggaaacctggtatcacaaaagtcattagctagcccaataacgtcttcatccactagttgcactctaataccctctcgtgcgaatatagtgccctcaaaatcatagaaacgtcatttgtggtttaaaaggtgatctattgtttgaattctctatattccaactttttagcaacgatatggtggaaaaaatgtgccttacaaccttaacctatgtttggacagttctctcactcaatttggataaattttccatggtcattattttattttgagaaacgatgtggcatattgatgtgtgttgttttcttgagtggatataaaaaccatctaggtatgccttaaatagaggggattataggaaacctggtatcacaaaaggtcattagctagcccaataacatcttcatccactagttgtactctaataccctctggtgcgaatacaatg

SEQ ID NO: 88394 - DNA, 1023 bp, Zea Mays
ccaggtcggtacctctccctccctcccttccaccagatctcttgatcccagcaagaattttcttggacctatcggcgagttcatcgactcgtgatcagaacacggtagcaagaatatatcttctgcgattacgcgctgatggctctactccttggctccaggtgttcccggagccacaagcatgctgtcccccgacacagagaagaagaggaagggcatgtggatccagatcgatggcgtgcacgaggtcaatcggttgttgcaccttggagaacggcgagctcgtcggcgtgcataaggtcaatccattgccatgccttgttgtctgaccagcggcagtgggcatagggcacgccgtaggcatagatccccttcaacaaccggtcacctcggcagcaaacttcggcggccacatcggtatgtctctgctcaaccttctgtaagttcgttaggctacctatgcgcaagtggttcattcccttagtcactatacgaggattgtgaaatggcttttgtcacacttacgaatgaaagggaggctcaacagacatttacgggaggagtctgatgtgagctaggtagcagagtgctcctagtctgttgacccacacttacgaaatactgagaacattgtagttgcatgattaaattttttttgctctgctttgcagtttgcaagcacaactcgatcgccccccttcgcttctccgagttcttaataatggtgcgcggagtgcagtaccaccagacggccgtggtgccccgggagtccatccttaagaccgaggcggagtggctcaactctatcaaggccgaccttgtggtaccaatactatgatcactgatcgttaccggtttatgttgtcactcttctgtctgaacatctctacacaccgagtagagcttaactgaacccacttgagcaaacactggcaggtttcagatgttgtacccgtcgtgtgtagggcagctacagatgctggcattcgatccgtgtgcgtcacgaatttcaggtaagcggcg

SEQ ID NO: 88395 - DNA, 445 bp, Zea Mays
agctatccgatcaaagcatgaggattctagggcactcttctaggatgatgctttcctagacgactttgcttcatgaagttgatgggctagagcccgaggcaaggtagtaccgtgtttatttgctttctatattccaagttggtttacttatgtcgccagaaaacatcctctgctggaaagtggtcatgcacgtcatagcattgtgaattgtttgcaataatccattatgttaacatacgagatacacttacatatatgaccacatgtccggtgatttgcaactcatcaccctacacttctcatatgtatctcaaaaaaaagtttcttgagacaatagatgttgcaatttgtagctagccggcccatattatttcacacaggtgaacacagaaggggtcaaagtaaaatgctcatgtcatatactacactacttcatctcccaacg

SEQ ID NO: 88396 - DNA, 435 bp, Zea Mays
agaccggtgggagtcattgggttattagtagtggatgcactcaacatatgactggcaacccacagatgttcacctcacttgatgagaatgttgatggacaagataaaatcacttttggggacaattcaaagggaaaagttcaaggacttggcaaggtggcaatttcaaatgatctatcaatttcaaatgttctcttggttgcacctttgagcttcaacttattattagtaggtcaactttgtgatcttggccttcaatgcttattcactcatacagagtttattgtatcaaaaatggatgatgagtcaatggtgttaaaaggatttagatatagcaatatctacttagtggatttcacctctgaagatgcagacttaagaacctgcctctttaccaaagcatcacttggatggctatggcatagaaggcttgcac

SEQ ID NO: 88397 - DNA, 318 bp, Zea Mays
caatgagcctgacttttgcatttggagtcagctggtgaagatatattttgaaatttttcagtacttcgccaatcattcatacaaagggaaccgaagcccggtgcggaagaagctcttaaaaactatcacctcatcatccttcggtttctaggactattttgtcacacgtgaaccttatcaactcatcatcattctttccaaaataaccaagtttcttcattagaaacatgtcatcaggcttcacattagatctaccaaattcaatatgactaggtttgctcggactcaagataccatcatcatcttcgacatcatcac

SEQ ID NO: 88398 - DNA, 419 bp, Zea Mays
cgtgcagaagtcgcctgagggtgcagccggattagcacaataagtgcgaaaaatcgaagtctaccgcgaagactcaccgtgcagaagtcgcctaagggtgcagccggaccagcacaataagtgcgaaaaaccgaagtctaccgcgaagacttaccgtgcagaagtcgcctaagggtgcagccggactagcacaacaagtgcgaaaaactgaagtctaccgcggagactatccgtgcaaaagtcgcctacgggcgcagccgggctagcgcgataacaattacacctgtccgtgcaacagtccgcgcaaagaccgactacacgcacaccagtccaccatagcaattacacccgaccaagtgcgtaacgccttcgctagcataaccgaatgtgcgagggcacacaacttcatcatacaagcc

SEQ ID NO: 88399 - DNA, 528 bp, Zea Mays
agttaagagattcaactaagagtacatttgaaatggaatgatcatttgaaatagcaattttacccaaacctttaacatttcctttgtgattgtctctaaaagtgatgctatcataggttgagcaaccttcctcacccatttcggtgaacattccatatcaccggtcatatgttgagtacaaccactatccaacacccaatgatttcctcccgccttgtaatttacctacaaaagggaatcaatctcttttaggtacctaaatttgtttgggtactcagatgttagtgaccaaggattttgacacccaaatttctttctttttggtaccaacaattgaagtgccaacaaacttagcatgtacaccttttgcattatgtgaaaggacatagcaatgctcaaagcatggcaatgatacatttttgaatttaggacaatttctcttgaaatgtcccttcttgtggcatttgtgacacactttgtcacatctttcacaaacatggtcttttgctttacaaatgcattctttcc

SEQ ID NO: 88400 - DNA, 3327 bp, Zea Mays
ctcttctacactacaactaaaatactgtatctccaaacaggtgttggattggacgatgtaaaatatagcacagttatgtcatagcatataataaactatagttgtgggtttgagaaacagagtttccaaacagacccttattatgtgtccaaatggtgaataacaattattttttcttgaacagcgcaggagagctgtgtgtcatttcattaagaaagaaagataacagttcatcatgaggggaggcatgtgtactgcccctccccacaccaacagtttagagtgcgccacacgcaatgacaaacaaacggccctacatgacaaacttacgtgtccagtccagccttcgtgccccaccgagtagctccttgagtgtcgtgttaccagcaagacaatagagctcggtctccttaccaacttcttggcagactaaagggacactaggattaagaccctcaaacacacacgcattcctatgcttccaaagagtccaggccacaaggatgactagggaattaaaccctttcctcttctcctttggcaaactgctggctgcccaacaccaccaggcagagaaagttcgcacatcaggttggggagcaactgcctgcagaccaacacacataatgattttggtccaaacctcccgggagtagacacaagaatgtgatgtatattctccacatcctgatcacaaaggaggcaaaggcagtggtgcggcagcccatgttttgacaggtgatctgctgtccaaaacctgttcttgattgctaaccaaatgaaaaacttgcatcgaagaggggcccatgttttccaagtcattttccaaggtgcaaacttaactgaacccaaaaagaaggcgttgtaagcagatttagaagtgtacagccctgaatttgttagcttccgtatgtgttgatctgaaacagcaggctgcaaggtaaaatcatcaactacttcccagagcttcaggtattcgacaagcacctgtacagtgagggcaccctggatatcagcagtccaagacctgcagcccaacgcttgagaaacagtgcgttgtctccttgcccgtttaggaattacctgaaagagattaggggccagctcacctacagtgcaaccgtgtagccaacgatctgtccagtatttagtggcctgaccatccccaaccttggtctccagggcaacatcaaagaaagcatgggcattacggggtacctgaaaaggcagcccttcccaaggtcgagaagaatccgtttttttagccacgaccaacggatgcacaaggcccaacccattgattcaaggttgagtatcccaagaccaccatactgtaacggcctctgaaacttttcccaagagacaaggcaattacctccattagcattttggcggcctgctcataagaatccccgccgaagtttatcaatgctctaatgacccacttagggagatccatagccatcatatggtggataggagtggcagtgaagacaacgcagaccacaaccagatgcccagctcggctcaacagagaagcctttcaaattgggaggctagctgctattttatctatcaatggcagcagatcagcctttgtcggtttctgaattgtgggaggtatttcaaggtatttgcatgtaaagcccttgatctcgcaatccatgagcccagaaaggagcagcaaatcagcatcagtacagttaaggggagttaccgagtttttactgaaattaatccatagtccagaggcatgaccaaaagcatctagaagctgagatatgagagataaattatttcgagttggactgaggaacgaaatcacatcatcagcatataaagaaatccggtgctttgcttgaagaacatccaatggttctaagaaattttcatgggcagctttggtaactaaagcatttaagactttcatggctagcagaaataacattggtgacaaagggtctccctgcctcaacccccgttgatgcaagattggactacccggctcaccattaaccaggacatgagtggaggaggtggagaggagaaggcataagaggttacaccatttacgaccgaagcccaaatattgtaagacctcgaacaaaaaaagcccaagacaccgaatcaaacgctttagtaatatccaacttgaggaggatgtgaggttccttcttcctgtataagcatctagccatttgttgcacaaacaaaaaattatcttgtatgcttcttcccttgacaaaggcactttgattgattgacaccatatctggtagctggggcgccaaacaattggctaatagctttgtgaccaacttggcaaaactgtggacaagactgatgggtcggtagtctttaacttcacaagcatcagctttcctaggcagtaatgagatgaaggctgaattaagaagtttaaacttggacacacatagcttaaagagtcgccaaaacatcgccttggatgatctgccaacaagacatgtaaaaacggccagtaaaaccatcagggtctggagctttgtcaagtggcatgtccttaattgtgagccaaacttcttcctcagataaagcttcctccatggaactcagatcatgctgctgcagctgcaatgcagcgagattcagcgtgaactccctttgttctgctgttccaatgagtttctcatagaaataaaaaacagcagcatgtttttcttcttgcgtggtgacacatcgaccctcaacctggaatttaggaatgaaattctttttcttgtggtatcttgcgtgctggtggaaaaaggaagtattggcatcaccctcccgaaggtgaagtatctgtgatcgaaggcgggcaatagtgcgctgaagggaggcaagtccaagacaatgcactttgagttttttcctctgccactccttgccactagagaggtgttactgatgcatttgtaggctgccagtaccagaggcgtaggcgccaggatccagcaaaaggagcagcagaatcaaacaaggaaagtgatcagaaaagtggctagcaatcgggttagtaggcaagcttttattacagggagatatgcattagtttgtttccagagtaaaggatatgcattagtttacttccagtttcagttatttagttccttttgaagaggtcgcctcatactataaaggcagacccgtagtttgtattaggatcatcgaggaataaagtctccctgcagttgggcgggactatctcggtcatcgtggctcggcaagctgccagccgcgatgacgacgtccgcctacctagccacagttcttaccctctcagatctgttcttggttctagcctcc

SEQ ID NO: 88401 - DNA, 629 bp, Zea Mays
aaaatgtgggacaaggaaagtcaaaaggatatgcgggtgaaagatcaacccagggacctgaaaagatgacaaggttggtaatccaacctttcaattcaaaccattcttctcctcgcccacccacatatcccttcatataacccgtgtttatttgtcccacccttgcccccgcctagaccaatcagccgagtgcccctggtgctcgtttccctgcccttccgagttcctcgagtggctgcttcaattgtggcaagtctagacatttcatcaaagactgcccctacccgaagaagaacaaatcaaactttcaatagacttatgggaacacaaatcaaggaaagggaaacacgaccaaccctctagcaggcagaaatatgaagaagactagacgagtgtattatacccaggtggctactacactggaaggcgaaccggtgatgatgggtatgtttctcgttgccaaccatccagtagctatcctttttgattctggttcatcacatacctttatgagcaagacttttgtggataagcattgcatacatagcactgaatcgagggatttgttatccactcacctaggggtcagatatttactaaggaagtagtcttccacgtgcccgtaacct

SEQ ID NO: 88402 - DNA, 1376 bp, Zea Mays
tgaaaatggcaaacaacagatttctaatttttcctaccttcttctttgtgcaacaacaatcattctagaatttggcaactttttgcttaaggaaagagggggtagaaattcttggattatatgtcctttttcatggagtagggggtaatgggtgttatcttatattttgaataggttttgtttttttctctggtggtctacttcatcaatagttgggtaaaaattcatttgcctactgttgcacaattttagactttcttatgatttaattagaacatgggccaaaaccatatttgaattgtttagctcacttattatgaggggttggggtgtttattatttttgtataggtgttctagcagttaggagtctactaaatttttcttaccatttttgaaatggtccttatatttttaattatggcttttctggatttcttagtgcctaataaaataattaaccttgggttagctctgggactagggttctttgtatttttcccaggttcctcgtcacttaagtatactaggaaaaatatgctccctctctatttattattttccactacctttcttaattttctaagttttggacatatatagtttttaatagcaaaacttgatttaatcttatatactggggtgcttagtatttttaaacagtgcctaagttgggtatgtatctctacaaattttcttaagcctagcacagaagcatctctatttttatttatattaatatggtttgggaagtttccctatttaattcaaaactctaaaaattaatacaggaaacatggggttcaatatttttgtttgaaggttcatattattttaaatccagcaaaattggtttgactaattttggataaatattcttcaagttatgaatttcctaagttctctgttcattaaaaagaataatcagaaatggttaaatggaaactaactttgcatcggggtccctggcgattgttttaaaattcccttacagactagtcctcgggtcactattcaaatgtgccactgacagttcagaaaaccccctggggttttgctaaacctaacccgaggtccttctcccaaataaacagtacccgcggtagaggaaagggcggaggggcttaccggcggcgagattgctccggtgaggtggtcgagggcgtaggggaggtcgtgacggtcacgccgatgtgtggatcgtctccggggatggtcggagtacgccggtccacgtgcgcgggcggtggagctcgtcggcggcgagggctccggcctatccagggcggtagagttcaattaaactggtcagtgagcttcactaggtgctagggaaggcatgcgcgcgaggaattggagaatggctcaccggatagc

SEQ ID NO: 88403 - DNA, 368 bp, Zea Mays
ggaggacgaaactgggcgtggttcggctgcgggcaatcgtggtggccgcaccaacgggcaaggcagtttgatgaaccacaatggctttagaagaccgaactttgaggctcgtcgcgggggttacaaccgtttcgggagaggtcaccgcaataagcacagagaaggcatggggaggtatgatcgccctagttcttcatatgggtttcaaggtggcacaggctctaggaatgcagctaacttacctgtcattccatctctgaattctgctggagttctgggggcgtcatccgtagacacgcttgctcaggcagtggcacttttgagtcaggcgttgggacatccatcagagaatttggcagtacctggag

SEQ ID NO: 88404 - DNA, 363 bp, Zea Mays
tggggagggtagccgccgaaaataactaagtcggcgactagggagttggtcgccaaaattacacactttttcggtggctatctgtatggacaccataaattaggtcatccgccgaaaatgcttggttttcctacagtgataccactgagtacctatgccttatcgactgcctccagcactcagtgcatacccgatcaaacatcacctttgttgtcggctatgttagacggtcatggagaactccaccactgagcacctcaacatggtatcagggacatgattgtctacgactactctacaagtgcaacaagaaagacttgaagttgctcgggtacagtgacgctgacatgggcagcgacgttg

SEQ ID NO: 88405 - DNA, 745 bp, Zea Mays
taagggccttggaggcttatatggttagatgccctatgacatgatgggccctaatggttaatatcgataggtgccttaggacatgagcgaccccgagggcttacatcgacatgtgcctcaaggtgtaagggggccgaggctaataccgtcaggtgctctagagcacgaggggccctaaggtaaatgccctaggacgcaaggggctccgagggcttattctaatatgccatgttatatggtctagtaggcctagttaggagcacccttgtataaaacgagttagtgttggtgttgtctgttagtcaagaccaaggaaggcccttggtcatggggtcctgagagtaactacccttctattgtaaggctcggaaatcagtatttcgggcaaggatccttgaacgtgtcttggcagcaactcggggtataaccttcctcaggcgctgataatgatagagatacaaactactattggtgactttgatatttttatcgatgtattaagaagtgtacaagcttccccctagtgctcgttggtgatcctcacaaggattaccatgtgaggaccaagctctcggttgggtacctccgtggatagtccaggccttccccacaaacaagtgtgtctctaaaatagcctcttctagaccactccccagaacatagtcatctctttgaaccaaatatagaacacaggcgggtggaaaacatggctagacataaccatatatatatatatatatatata

SEQ ID NO: 88406 - DNA, 487 bp, Zea Mays
agacatcctcgaggcgtctacccaatgtgacccaaagaagggcaagaagaagaaggcacagtagggtccacacgaggccctcaccatcgagcttgtcgctgcgaccgaaaagcgtaatccttgagcccattaaggggccaggcatctttgacaaaatgttgaaggaatcattcccttaccacaagggcctagtcaaacactccctcggcgaatgcgatatgctccgacgcttttacaacaagcccgacccctcggcagagggaggcaacaagaaggctccaggtgatggagacgacaagggtgatggtttccccgacatacacaattggtacatgatttttgtggggacaccgtcaacctttcttcaagatagcgaaagcaggaacgctggagggttttttggttgagatagcgacaccaatctatatagattggtcagaccgcttcatcaccttcaaccaagatgaccacccagattacatcccaa

SEQ ID NO: 88407 - DNA, 382 bp, Zea Mays
tctggttctagataccacttgcataggttgtatcctaaagactatagttctgcattgatataaaaagcttgattacttgcttcggatgattcacacgatcacaaccaagacgacaccttacctagagattgtggtaacttccaattcacctgttctttttggattggtgctgaatttatttcttgcaaagtaagtttatttctcctagaacataagccatttaattttacctttttgcaaagaacaatctaaaacacacacctctgaatttactgaacaacagtctaaattgggtaccaaatttgaggcgccaaatctgaggcaccaaatttacattttccatagaatttggtgcctgacacctctaaatttactgaacaac

SEQ ID NO: 88408 - DNA, 424 bp, Zea Mays
ggagatgatatgaagctttggggtgcttgagagagtccattcaatactcaataactcaagctatcaatcttcaatgatctatatccgtgattgacccaaggttatttttcaaattgctatgtcttaaactcatatcatctcgaggaagatattatatgttgtaggaagtgaagagatatcatgtgcgaaaaatcaaggcctacaacatggaggaaagccaaaggatggtaacacttatcttttaagtgcaagtattttagaatatcatttcttatgtgtagtcacatagaaaaattgaagcacttcaaatgcctttaaatttatattaccattctttgaagaatttcctatcatatggtagattgcatactcatcatttccatcctatggcaatctacatgctttaaattattggaagtaccac

SEQ ID NO: 88409 - DNA, 897 bp, Zea Mays
tgaggcagacgaggagctccaaactgaggtggtcaaggagcggtcggtgcaggagtaggcactaccaagtattgaggaaaacctggaataggcaagtactgaggagtcccgggtatataaaattgctgctgaggggtggtacagaaaattgttgctcagtggttgccatcatgttgacagtgccctacgaagaggaagaagtcactggctcccatttaagtttcccatttggattcctcctacacaccacatccttgttatcttggttgcaaatagagcacatgccactccagtgacactcagcatgacaatccgcttcaccgcaacgaaaacataccaaccccaacccaggcttaggtacagcccgatacctctgagtactcccacctgaagtacccgattcagaggacttgccacgataggggtggtggcactggtgtggaaactttcccttctagtgggctaaaccctcaaggtagcccctccccgcagcctggccacgaggctggtcaacactggaagtcttctgggactcatttgtatactgatgttgcatctccacgcccaaagcctgctccacagtagttcgaaaatccaccagcggaaaggcgcccaaagcatgcctggtagaaggtctcaggccctgacgaatctggctcgccttttctaactcattgtaggccacatgtggaacaaagtggaccatcttgttaaagcccacttcatactcagtaaccgtctttttctcctgcttgaatgattgcaagtctatcttcatcttctccaggaaagtgactgggtaaaatctcctttcaaattgcctgacaaaaatatcccaggtcaggtaacccggtgaagatgaatgagctgcccgcatgcctctccaccaaatctgag

SEQ ID NO: 88410 - DNA, 397 bp, Zea Mays
aagtacccctcgacattgatctccctaatcacgcagtactgatcgatgaaggcctaactatgcaagaggaggccagcgtgctcgaatgcttccacaagaacaaagacgttttcgcatgatcatcatcagacttggtcggagtaagacgaagtgtcattgagcatagtttacacatcaatcccttgatacgcctcaagaaacaaagacttctcaagatgtcggacaagaaaacagaggcggccaaggccgaggtccagtggctcttggacacaaaaattatcgaactaatcgactaccccacctggttggcaaatgttgtctggtgaaaaacaagaacgacagatggcgcaagtatatagactttaccagtctaaacaaggtctaccctgaagatgag

SEQ ID NO: 88411 - DNA, 462 bp, Zea Mays
ctcattggactgggcgcattattatcagaaacagcaagggcaagagtgcaaaagtgtttgtgactcagccacctccacgcaggacagcggatttatatcaataaaacatagggactcttttgtaagttgggacagcgaaggggtattggtcattactggccgcccaatcaaatatcgaaggccaggattagatcttggctttatcgaaccggtacgcaaccctatccattggatccgaaatcgacagtgttgatttcaagtgactgagatcccttcagaaacaaccgatcaggatccaagggccggattaaaatacacgatggggcacccagtcatctaatcctagccacacatccaacatcctacggctaaaaatccttcttctccctcgatgaccatgaggcggcggtggcactcagaccgcggtggaggcaacgccggagcacggtgggttcacggtcc

SEQ ID NO: 88412 - DNA, 392 bp, Zea Mays
tattttaaaccatgattttaccataccatgatatttttgggtcaaaagaccaaagttttttgtttgcacatagttgtggtcttgtctcctcctacattacaaccgaaataatgtctccaaacatgtgttagattggattgatgtaaaatatacaacatagatatgccatgacatataatgaactgtaatattataaattgtggttttgagaaacatagttcccaacataggtccgggtcctaaacttagacagaaaagttagacaggttatgacgtcttaggcagcaaaccaaatggcccttagtgacttagtgacacgagacttatctatcataactcttttgatacgagcggattggatcgtttatcctatgaaattgatttggttaaat

SEQ ID NO: 88413 - DNA, 705 bp, Zea Mays
agtgacgccaaaatcaaaatgctcgatccaaattaagcactcgatcgtctgtcatctggacgccggttgtttttcgttcgtcacaccggttcgagttttctcataggtgaatcatcgctcaaaaccagggatattttttgggtttcttagcttagaagcaatccttgcttctcccctaagtgagctcaagggaaaccctaaccctagagcttctctataaatagaagtgcattcccttgcaaattgaaattttccattcccccctagctgccacagcccttcttcctcctcccggtcaccctcttcttcactgcatctccatgcttgccccccagccgagctcgccacttgcctcactagtgccggttccaccttggtcacgcctgccactatgagctccccacgtcgccatctatggcagccacttcctcaacgcctccctctcgccccagcaccagatttcctccactcggcaccccctacaggtgcagcagttgagctcctccatggctgcgtccaaggtcggctccagcccccctcctctctattccttgcgtagaggaacttcttctccaagaccagcgctttccccctccctgcacctcccctccatgccggttccctgcttccctcgaatcccaatagcgtgagcaggcgccttcctccaagcgcctccatgctccaaaatccggtgaaggccttgcc

SEQ ID NO: 88414 - DNA, 480 bp, Zea Mays
ggccttggaaggaggcaggttctaggccgagtatgccattgaggcaccaacatttgataccttgcctctaagaatcatttcaagccggttcaccaagtctacagcgggaattcttctgttggtaacccgggttgagtcagctagacctcggtacagataagccgggtatgccctgtccttcaacggctgaatattcttgaagacaaaatcagcaaccacagcctctgcagtcagacccctctccttcagcagtccaacttcagctagcaaagcccctgccttagccacctcctgatccatgggggacttggtccaactcggagtgcgaacatccggctgtctccctgaccgtgggggagagtatttccgtggttctcaacaataaaccactccaagcgtcatcccttgatactatccttgagcgggatttcaagatagtcagtcttcctcccacggcgcatctccaaactcgcaccccca

SEQ ID NO: 88415 - DNA, 604 bp, Zea Mays
gtcattcctttaatggtagaccttgatacaggagcttctgcccaagataggtcggggtctgctcctgttctaaaggatggcactgcttgactacttgccctctgcgtattgtgtttgttttagtgttgttgaatacttgccctctacgtaatgcgagcatatgaatttccttcttttgaaacaaggagcttaggattttgctttgttctatgtgggagagcatgtagtcgcggcttgagttgggcgcccacttaatccaattgctctattggtagaaacttttgatttaactggtgggtacatgcaacttaatataatatcagatctgaaggtctggagtttgaatcttggtcattgcaattaaataaaacaattgttgtttgcaccttatagaatcattgtattttttatcaatcttaaaaaaatactggtcatgaagtgtattttgcgactcttgaagatgttctaatccttgttccttaaatgttgtttgttcccatgatggacacggaatgggataagcgactttcagaagccaaagttcgttctctaccactacattacaccgtgcagctttttatgttataccaatgagcgatatttt

SEQ ID NO: 88416 - DNA, 597 bp, Zea Mays
ctgttggctcctttcctagatacgtcgtcccaggccctgtaacaaacgtcgcgggttgttgcgcatgccaaacccatcgcgcgctgggcatcgatgtcgttgaccgcgaaaatctccaacggacggagccacctccccagcaaataaataggaaccgacgcccccttttattttacccccacatcatgcaactccatcgggcatggcgggagagagaaggccgagagggagaggtagtgaaggtacccggtatgacccgctggtgtctccgtcgtcgatctgctcctgcaacatcggaccagtcttggtcggccgggtcggcgctaaccttggtaagctttgttttcctctctgcggtattacataaactatcaaggtttccattgccggttggctggggtagtgttgggcgagcgcttgggatttagacaccactggcggattctcgaggtggtctgtgccatgggcacgtctgcctgtatggcgcacagccggccccaggctgggcgtctggaggtagaagaaaggggataacggctcatcgggaaatgaatggctaggatctgatctgcatagcgaattcacgatagtgtatcg

SEQ ID NO: 88417 - DNA, 502 bp, Zea Mays
ctgtcatcgagtctagcgaaggtgacctggttcgactgaaatacaccttcagatatggggataagttcgacgaaccaaacgatgactggttgaaatgcatcgacgttacaagtgatgaactgcttgggccatattccaaagcagaagataatgcattatccacatccttcgggggccgaggaaaaaagagattgaacagagttttttgatgccattggttttgttaaccccgactactgctacccgctgcagggacggggaaagaagaggaaaactgctgcttcggccactccagatgagcctgcgccgaagagcaaaaagttgaaagtccttacccaccggccacgttatattgaaccagtcgtggtgcctgagtttcgcgaggagacttcttcagctgctgaaccaaaggagcccatttctcctacgcagaaggctgaagatccggctataatgctgaaggtaccctcaaccgagctagctgagtcgaagactgataaag

SEQ ID NO: 88418 - DNA, 664 bp, Zea Mays
cgcaactggaatgggttgaaacggacttaaaatgagcaagttatggattttcaaagttatagaaattatttttattccaaaaatcaatttccagggttttattcatttattatgaattaaaatggactgcgggtataattagtaaagaaaacagggtctgaagtgaaaggttacaggacccgcttgttatgaatcttaaaggtggaagggccgcgggttgatttataaaggttccaggggttcttttgcaacttgacatacgcgaaggggtatgaagcacccagagtcgttggatccacgtcgcacggcccagattaggttggcgatgtatcgaaacgttatcttttaatctctaccgtccgcagtggatcgaacggtccccggtcccttcatatagaccagcgcacgatcacagccgcccgacacgcaaccgatggctcagattcacccaaccacatccgatggctagcccaaatccgaacagttcgacatacgatcgacgatggcgcgatcatcttcatcctccagcagccaagctcggccgcgcacaccacgctcgcagcggcgcgcccatgagcgactgcaatggcccaccagagcaccacgccgcgaagcccgacgaccacgtcgaattactcggtgtaaaaagtaattggaatatggg

SEQ ID NO: 88419 - DNA, 544 bp, Zea Mays
attatttcgatctcttcattgttcagcaaaaagagaagctttggaatagaacaaacaaggccaagaattcattttatctgggaaaaatcaccatataactatcttttgatgaagcaaatgatgataactgcttggcaagaatgaaacaatactggtatccacctaggatccatcttcaacaacaaataatactgctctcatacgaaggagtcatcatgactagggagaatgcaataggtctccataagagctttatatttttatcataaattatcaccacttacaatctcatggtcaagacctatggctcttctagtgccaaggaccaaggacatattgcctaatttagcttcaagctctgtgttgatgtgggatttcatggctatttttctactcttcttacttctggtagatcatatatagattatggtaagcatgtcaaggggtgaaatccaatgtagttctgcaacataaaccccaattttatttccattcagtattgacctttaccatttggcttactgtataccataccagtcaaagg

SEQ ID NO: 88420 - DNA, 343 bp, Zea Mays
ccgcgagccatataactgttgtgcacccctttccttccccctctaccctcttgcgttgacgcgagcaccgaagccaactcgacgccgccgcctgccacgaagtcctagtacctgcgccggtgtttggggaccaagaaggggtcgggcgtcctcgtcatcgagctcggagcgtgtgggagggtaatcgcctccggtgttcgtcccaggcgtccggaattgctcgccggactggatttccgccgccgtgccacaaaccatcagtgataggattctgcaccacgcaatacctccgtaagaatccactaccgcactcccgagtttcttagctacgtttagcaccccg

SEQ ID NO: 88421 - DNA, 515 bp, Zea Mays
aaggcgtccatgaatccgacaggtggcgaaagcgtggaggggaaggagggtgaacagggcgccataccgaatgggcgaatccgtgtgcacggaaagacaacgtagggcccatgacaacaggagagagccatgccatgtaaattgagccatgaggctgagtcgtgggacatgtcgcatgttatcgcagggacgtcacccacgaactcgccatagaaacatttgcgatggatggcgccataccagaagcactacttcgcacgatcctaaagggggcaccacgataactggaggactctttctctctctaaaaaggcggatattaatgtaaggtatgtcccttgggatataaaagggaaggtcatgccctctctacacacctgttgtaacacgcttcaagcaatactacaatcagcactacattggagtagggcatgagcctgaaccagtataaacccttgtctcaaacccctcgttgagtccgagtgattcaccattcggaatgagtccgcactagc

SEQ ID NO: 88422 - DNA, 794 bp, Zea Mays
gtcgtcgtgactcacgcccggttgaacgtggataacgatcctcggtgaaaaatcgggcgctggggatgagcttgggacactgttccgccctggccgctgtacccacttgcctcacgatcggtccagataacctcgccagagttggccacctgccgctcatgtgccatgttcctaggtgctctaccacatcacagtgaatcaccttagcttgtccgttcatcaccggtggttatgccacggtgaaggccacgataaccctgcgccagtgactttccccctctccggtcgctagtgtgccattccaaaatcaagagccaccgcccccaagcactataaattaagcatcccattagcttcgttgggtcatcacgaagccagagcacccgctcctgcctccgattagccaccagagagctccaatttctttctcttcccaaatcagttttccgcacgctgtgaactaccgtgtcatggccagccttccgcaggttagttcaagcctccttgattgatgttctagactccctcaagtcccctagtactcatagacccattgaattgaactagaccgccctagataaccaagaacgtgtcggtttgctcttagttttcgccgttgtcgtggacaaggagttctcaacccggaatcgtgcaattagttaagggattattgtcatcggggttagaattaggggtcaagcaaagaaggagactagccattgcgttttccggccgcgataagctcgtcggagccactgctctgtcgtccctggtcgggggtctcgacttgtgaa

SEQ ID NO: 88423 - DNA, 590 bp, Zea Mays
ggagaggatagcagaagtacagggcagtctcctttcaatcctttgaataagcggtaaaaagtggcagattccaggttttgacaggcctagagggacaccaaggtaagtgaaaggcatatatcctgtctgacaatttaaagttctggctagaatctccaaccgtgctgggcaaacattgattgggtacatacttgatttatgataattcactttgagccccgtcgaggtagcaaaagagtttagaactgctctgaggaaaaataattgtctggggcaagcttccaaaatcaatagtgtgtcatcagcatactgtacaatcgggaaatcttgaccacagttctcagtgaggggcagctggagaaggccctgctgtctcgcattattgattatactttgaagcagatctgccgctagaacgaataaaagaggcgatagggggtctccttgtcttaccccacgcttgcaatggaaagttttgcctggaacaccattaaggaggaccgaagacgtgccagattggaggatatccctaatccagcccagccatttgggcccaaatcctctgaaggacaacacctggaggatcagat

SEQ ID NO: 88424 - DNA, 461 bp, Zea Mays
ccgaggcagcgtaggtggacagtggcgtcagggacacgtgagcagacagagtcctgaatcccctatcacctgcatccatcaccctgacttggatgcgagtgatgtaatagcaagcccggggaggctcgctcactcgccttgtttcatacagggggcggacgtaggttcctagcgcgtgcagcacttcttgtagcaggttggggaagtgccccgtctcaaacattgatgtataatgttcgacaactggaccgaaccccatgatgttgtcctgctgggcatagtcagcttcctcgtggacgtgttcgtctccaccttcttcgtcgtcgacatcctcgtcatcgtcgtctctggagtcgtcgggatcgtctcctccgggtgcaggtgcttggaaggctggtgcaggcggtgatgacgtcgatgacccagctgcgaaggctagggactctgccaacagggtaggc

SEQ ID NO: 88425 - DNA, 387 bp, Zea Mays
tgaggttgtgatagaaaacttaaaatcccaacaacctcacttttgcacaagtattcaaattgaaactatattaccatgtgctaatgcttgttgtccgtcgacaagcaaatcttcctttgagctagaatctacaggagcaaacgatgatacatatcaaaagctcaaagaggaaaatgagaggctaaaaatgaacttgacacaactaaaagggaaatgcatcactcaaccttcaaaagataaccgtgatcacatggtgaagaagcttgagacgggaacaactgtggcatgcactaaatcccttgaagaaaatatcaaggacttgaggattgccaagaggaggaagcaaaagaagaaaatcaacacctcttccaaaggcctcaaccatgc

SEQ ID NO: 88426 - DNA, 293 bp, Zea Mays
cacggcaccgccgtgattccctactgccgtcccatcatcgccgatgagctcgccacggctggggacacgtaaccacgacgccagacctcttccttatctccgaccgccacacatcgccgttaaaattcccggccaccgtcgaagatgcctataaattggagcctcgaccagtgccgctaggtaattgtgcgtccagagaacccacgcgcagctccgattacttcccacagctctccaatttcacgttcgccccaaatccactttccgccaccaaagaatcaaactcaccgcgg

SEQ ID NO: 88427 - DNA, 550 bp, Zea Mays
gtaattggtactcagggaaaagatgtcatcttagggatgaattggctagataagtattaggcagttatcagttgtgataagaggataatcaagcttgtgtccccactaggagaggaagtggtgaccgaattagtcccgcctaagccgaagaaaggaagttgttaccagatggctgtcgatagcagtgaagcagacccaattgagagtatcaaggttgtgtccaagttccctgatgtgtttccaaaggacttaccaggtatgccaccaaagcagaaagttgagtttgctatagagcttcttcctggcaccgcccccatctttaagagagcttacagagtatctggaccagagttggttgaactcaagaagcagattgatgagctgtcagagaaaggttacatccggccaagcacctcgccttgggccgcccctgtcctatttgtggagaagaaagatggcaccagaaggatgtgtatcgattatcgagctctgaatgaggtcacaatcaagaacaagtaccctttgcctagaatagaggatctgttcgacc

SEQ ID NO: 88428 - DNA, 770 bp, Zea Mays
ccgggtttggaaatctgacgctgtgaatgaagttcctcactattttagtctcttcggagttagggacatagaccaaaatgtccctatcgctcccatagagtatagttgctcctgcatgatacccgagagctttggcaatgtcttccagatcatcagaatcctcggcttcatgttctttcccattaatgtgtttgacattaaaagttgaattgcccctagcctctttttctgataaggatattgcttctattttctttttgggctcgagggtctatgttatttcctctatggggcaacggtagagatttcttcacactactttaggctaggacttttgttgttttccttggtagaaggagtcccaaagacaatcctcataataaattttatgtgagcaaccctttttcgtgtttttggtcctattttccgtagtgttttttcatgatggttcttcttttgatattgcagcggccgaagtagtaaccatagtacctttgtcatcattcttaccctttgtagtaagtatcaagctggtcaggttcgaccccagaagacgtaaagcgataacagagagaggctttgtcattacctctagtatctaggtggcccaagtgttgaagctgaagcactccctatatctttcatactatgtcccacttatgtcaccttcgtaggcctctcctctaccctgctggtagtaacttcagatttcttcctttttgaggaaggtggggtccttgtgtctgattgagaagacccttcaatgtcac

SEQ ID NO: 88429 - DNA, 527 bp, Zea Mays
agcccttttactctgttgcgccaaaaacttgcccgagccaccagtctgtcattctgcgcctgactcagtgtgccaacctatattcttgtcgacgctttcttggcccttgaatcctatttcttgttttttcctccaccgttttctagcatcctgagctcccacatcttttcacattttgttcttgagccacactgtttgaaagatcgtgatggcgcccaggaagaggaaacatagtgctgccatgcccgtcatccctctgatcgatcctgatagccaactcgcttttgctggtaatcacgtctctgttgtttctgaagctgatctcttacatcttgttgaaatcggtgttctgccgcctaaggaactatgttcttggcggatctggcggggagttaccgtctcgacggaggatacccatgaggcggttattttcgtgccttttctcatccgaggactagccttgccagtttctcccttctttcgtggccttcttgacttttactctctaaatcttacgcatctgaatc

SEQ ID NO: 88430 - DNA, 408 bp, Zea Mays
aaatcaccaaaactcacaaaagggatgaatgcactttcaaaaggtcttcatctcatgcttttagaaatcatccttttatcttcgtcgaatgctttagaattcagcattatatcatcagctttatgctttagagatcagcatacggttttgcctttgagatcaacaacgcggtctacccatgtcttgctaggtttgaaatttatttgatctgtgacagattggacgtccggtagatggctcttggctggtcttcatttcgcttcgtgcttcaatgcttctattgattagacttgtacttcagcagctatttttggcattccttcgatctctatcgatatcttccttatgtcttgatacattcattgcgtatactgtatggatgtgactgcttgggaaaatctattgaaa

SEQ ID NO: 88431 - DNA, 350 bp, Zea Mays
gaccaactcataatgagttggttttttaagcttgtggaaatacttcccctccttatataatgaagaagacttcagcttgttctatgtgcatttcttgtttttctgccgttccttttgcagtcagtcgatcgattgtatttgtgcttaatgtagccgttgttctcggaggtaatgctcgagtaacgacttggaattgttgagtcgcattttaagtccgtctgcatattcgtagagaaaaaacggctgatttactgtcagtatcttcagaggtaatagccgaatggttttttgcgacgccagcgctttagagataacaaccgagtccttttgagccacatcagcgttttaga

SEQ ID NO: 88432 - DNA, 660 bp, Zea Mays
ctttgattggtgcatttaactctaaatttggagctggaacacggatttgaattttgaatttatagattcaaattgaaaataaaacagaaataaaatgaagaaaagaaataaaaggaaaggagaactgcagatttgggcccaaactacctcggcctagcatacctcgtgcatgcacaccagcccaacggcacccggcgccgacacctcggtcccgcatgttggtggcttagcacgcgttaggatgtgtcgaccagcgggccctctccgtcagctgctcagcacagccctatagatattctcaacggatcaccgccaaccccgtggtcgcaacgtccaccgccgtgatctactggccccagctggccttgccaaccgactccccgcgtctataagtgtggtgagtccccttggccacacgtattgcaccccaacgccaacaaaaccattgccgctcgctgtgggagaagggtaggcgccgctgcaagcattaccgactcaccgtcaggccagcctcgtgaccacgcgtggagaaccttgtcggggtaccatcgaagccaatacggtgattgcccatggctagagttgtcccgcccagcatgaattgctcgccggagcgattatccaccgcggacccaccacgccacgatttgtccccatgac

SEQ ID NO: 88433 - DNA, 327 bp, Zea Mays
gaaaggcatgacgatgagcacaaaacaaggggaaaaataacacggcaaatcatcaagattcaaaacaagtcttaaatgcagtttatacagacaacttaaatgttattaaaaaccccgcagggcaaaaatagtttatgcaactgagggcggggaggcatcaccctcgacgtcgtcctcaggcaccgcagtggattaggacccaacaccaggaggcgacatttgcggaaccacctcctccttgaagtggtgctctagcatcgagcccagccccttgacaacatcggtgagccgttgcacctctgcctcagcgaggtcatcctcgtccga

SEQ ID NO: 88434 - DNA, 537 bp, Zea Mays
tgaccattgaatcattccagtcctcgcttccaagcacccttatcttgttgactagaaccatcagccaatcaaagagtgactgtagtgactcaccctttatccaatcataccttgctagttcactttccagggactcaattcgatatctttttgctttaggatcaccttcatgtgacatcttcataatactctagatctcacgagcatcctcccgtccctgcactttcctgtactcctctatactcaagcttcctttaatgatgctcatagcttgagcatttcggtgaagatcttgcatcatctctgggtcatcttctcactaaacctaggcttgcatacacctaattcacaatctcccaaagacttggatgtatgctgattagatgagacttcatcttatcgacatactcatcataattcaactcaccaagggttggaagtgttctgagtggtgctgaagagaagtttggtacaaaatttctagaataatcaaatgaaactttattgaattcataactcttactattacttggtgac

SEQ ID NO: 88435 - DNA, 532 bp, Zea Mays
ctacaagtaattaatgaaacgcaggagtttgttcattcactctctcatgcaagccatatatttcccaaccgagccagcctatttaagtgactaaatggacaaatataatgattgaatgaatctctgtcataatgcacgaccttacattaacaagatacatctcataggcatgaagtgctcagtccgactatgaaggttatatctcataaaacattaacatacaaggaatatgtagatcgaacctctaatattgtgacaatcccacttctaaaagcttgtcgtaatgaagtcagttccacattgattaataatcaagatatttccaaattgttaaaagaaatgtgtgtggcactacaacaggcagataatcggttaaacttagtgtcatgacacatttcacggttaaccctgatcctattatatgttccaagcaatgaaacatgaaaagagcgtccataataagctccctttactaaagtagtaagatatcctacccaagcctcatgtagaagtgttaagtgataacaaggtg

SEQ ID NO: 88436 - DNA, 350 bp, Zea Mays
agaatttttctgcctttgatgttgagaaattggttaaacttgctggacattatcctcatgattttcaatttgaagagaaggcacaacttccttttcaacttaatcgctatattgaagatgtgaggaatgatgaaaactttaaaaatttgaaagtcctagcaaagttgtctatgatgcttgttaaaacagataagattctgaggtatgacattgtctacaaacttcttaagttggtgctagttctccctgttgcaactgccggtgatgagaggattttttcttcaatgaactacataaaaaacaagctaagaagcaagatgggtcaaaaaatcttgaatggatgtttggtc

SEQ ID NO: 88437 - DNA, 1650 bp, Zea Mays
gatggctcctctcctttctagcagctcctccctgagaaaacctccggcaggtcctcctccctgaccaactccggcggctcctccctgatcaagaaccagcgctcctccctgaccaactccagcgactcctccctgatcaagaacacaggaaaaaatcccatctggggtccatttccatgtgatggagtcagcaacctctggatgaaggtgaatgtgctgaattctaatccaaagggaaacaaattcctcaatttgcgtggatgttgtaactttgttcctgagggcctctatccaagcattgttggaaagcccttgtgcaactatttgttcttcctcttcactagctcaaagaggtgtggggctaaattttggggggcttctccatccaaccaactatgatgccaaaaccttgcctttgagccgttgccaggtgccactgaggtggaagcctgaaacagaaggttgtctacattgttacaaggcacttgcagcccaacccagggcttctcttcattggtccactcctgctaaagccactgaaggcggaggtcccgactaaatttgtcgaggtcaagaactcctaggccgcccaaattctttggtctgctcactgtaggccggttcactagacagtggcctccgtttgcttgttcctctcccttccataggaaggatctgcgaactttgtctatacgcttcctagcccaagctgccagtggaaatatggataagtggtaggtcggcatggaggaaaggaccgaggagacgagcgcgaggcgacctgctctgttaaggagatgtcctttccagccagcaagccgctgtccaatcttgtcaattaacggatgaacatggattttctgcagtggccgagaatggagttgtaggtcgagatagcagcaagggaaggttttgcagtccccggggaaggactggagggcgtcgtccagctccacaccatcgcattggatcgggttaatggagcttttttttcaaaattggtggatagacccgatatgttaccaaaagtgataagaatgcacttgatggcctgcaattcatcacggtatggatttatgaagatcgccgcatcatccgcatagaaagaggttcataattttgtcgttgcgagtgggaggggctttagaactccatgttgagtagcaatgtccaagatcttctaaagagggtcaatggtgaggatgaagagcataggcgagagagggtcgtcttgtctcacaccacgcttatgagcgaacctctccccataagtgccatttacgagggtgcctatagagctcagttcctaggctctcatacacgccacaaggtcagccacatctggacaacaaggtctgagaataaatgcaaactatttacatggattcttatccaaaataagttgctcacgactgacaacctcgcatgtcgtggctagccgcaccaaacatcctgctcactttgccatgggcctctagaaagtggactccacctttgtttgaagtgccctttcgcccaggaagtctggaatcaaattctcatttggaaggattgacaatgccacagcaagcaaacccatcaaacttcgatagcattagtgtgtggtgggaatcggcggcttctcacatcacgagagaccgtagtagagaa

SEQ ID NO: 88438 - DNA, 360 bp, Zea Mays
ctaatcagccattaggtcagcagtcaacgagcacatctcaatttctgcatatgcatcctcacgagatgctacctgctcaaggtgctcaaaacacgacctggcaagcttacgttaagaaaagtgtggcaacaacttcacaaatcgtgccttctagtgaacataattcgtcaattcatgcacctgggagcactgttcttccatctggttcagttcagatccagcagcctttgcgccaattcaaatcgggcactgttctatcatctggtgcagcccagatccaccagcagcctctgcgccaactcgattctcagagcagtgttactccgagtgaaaccgttccaagtactctctaccttccgc

SEQ ID NO: 88439 - DNA, 543 bp, Zea Mays
atcgtgattcgtgcccagggggatggatagcgtcgcggggtgaaagatcttcgccgccggtgagctggacgccactccggctagccgcggtacctctcccctttattcatcgccctcggataaggattttcaccgccgttaagccgtcgccattgtccgccgcgtgcctctcactttccaccgcatcgtcgtaatccttagcggctccccgttgatcgttggagcaattgccacggtgctagccacccagccactgcgccagtaacttcttcctcctccgaccgtcgcgagtcaccgttaaaattcccggccgccgctcttgcgccctataaattgagccctccaccagctccacaaggtcatcacccacccagccaccgcgaatcgctagcaatcgttcgccagagctcgcgaattttgaattcgccccaaatcagttctctaccaccccgaaacccacctcaccgcggccagccccattccggtcagttcatcctcccctctccctcgtttaagctttctcatatgtctacgatgcttgcc

SEQ ID NO: 88440 - DNA, 350 bp, Zea Mays
gcaacacttcccatcacactatgcgatgcatcagcccattaatacaaaatcccgagcctaggaaagctttccggtcccgcctagaaggccggaaaggaacgatcaatcctattagtcatatagggtaaatggcaatgcaccacatagcttaaaccaatggggggaagacaacacgctaatatctagccaaccccacctatgtttgaccagagagccggtggtctcgcaccggctgccatcgatatagtgagggaggaaatagccggggcgttccgagataagctcggagtaagcatggtacctggggggcaatcatatcggaaaccttacgccaaccgatttgatcacca

SEQ ID NO: 88441 - DNA, 537 bp, Zea Mays
gcgtaatatggatatttattgcatagagtgggaacttactcaaattctacacagaggtggcgttcttccaatggttcctctagtacggtccttcacagtaatttctcaaaaaaactgtaagagaagaccatttatcaggaaggacggaatgggagcatttaaacgccacaacattaaaatgtccaggagcccatttggaataaacttttcatctggctaagaatcagtttatttgagtatagaaagtacaatccaattgttgagaagcttagaactaaaaaaatgatggaaaattgttcaaacatccaagttatatctgcaacttattttagggaaatgtttttttggttgtgggaaaaaggaacaatatatcaagcacacagagtagcgtaccattgaggtgtaggttgaggtggtcgctgtttagcagcaaccccgtgctcacagtcacgtacctgttaatgagagaaatcattagttggaccttatcgtcatcagtattccaatagatgaatattggagatcaggacataattt

SEQ ID NO: 88442 - DNA, 333 bp, Zea Mays
aagataggcaaattaactctaactaagactgactagagtaagacactgaattaagcattattacagactccgactctgtcgatctaggaatccaaatctatccgagtcctgcagtctggggtaccatagccgaagcgaccacggggcggtgaacggtaatggagctgaatcccgacatgggcgggagaaccaccatccaaatagtggtgtgctgcgcactcagcacgcaattccgcaacctccgcccgaaccttgcccaactcgtcaagggcgtggtccaactctgtgttgagcacgacagccaggttgaccatgttgttcagcctgggattg

SEQ ID NO: 88443 - DNA, 361 bp, Zea Mays
caaccgagtttgtcatagtctggagagttggttggtaccgtcgtcgtctgcgacgtgtgaccatggccgatccgatgccggttcaccggagaactgtgcgacggtgtcggggccgatgcgttgtgaaagaaggaaagccgagggggttaggtgcatctgtcagtgacacgagtgaatcgtggatcgagcctcgggttaattcaatcggagtgtggggtcctttttgcaaaacagcatgtgcgggtgtgggctcccctgacgcgggccgggtctgtccggtgttgagatggcttggctggttatggcccaaaattgttcatggtttggtcttttcttttaacagaaaacttgtaaattgtgc

SEQ ID NO: 88444 - DNA, 569 bp, Zea Mays
tggtttttgtgttttttgttaactttcattttagtagtgtatgtacgttgttttgcatgccatgaacacatttacaatactctgataaaaacaatttaggaacgagtattttgggtgctatttagcacaaacagtaagccatcattagaactcctaaaatataagaaaattgtgagactgtgctgctgtcacggacacggtacttgtagtgccacaaatatatgcatttattcgcatgaatccacatacagtacagagcgggaagtacacagaaaaatactcaagaatattcttgtctgattgaagtattaaacaaacattggtagtttcactctgcattatcacctacaaaccattggggcatacgtgacctgtactctacttgtggtagggactcgtacagttttttatggataccagatgagattatcaatcattcttgtcactgtcagacagggaacaatctagtcaccaagaagattgtgaggggtcccagattcccagttgttgctttaagaagaaaaaaacgagctaatcttaaaccgaaattttggtgctgtgaagtagta

SEQ ID NO: 88445 - DNA, 1179 bp, Zea Mays
tgacaatgaccgtgaaaatgaaacatggtactcacgtacatcggaccactaaaccgaaaacatttcggcatcaagcatacactgcaacagccaggtcatatagtatcggctgcttctagttcacgacttgtcggtcagagtctgctcacatcatacatcacagtgacaggcacttattccacacatgacacatcgacgcgtccatttctaaccttcaccggtcatacggctctgtccgtgaaacacaggcagaattggagtgatatagtgtgttgactgttcaccagtacatcattgtatattgtatgattggaggaatgggatcttatcgttctggttccagcggcgaatagagttgatctttggccatccagttatatccactctgacctagctaattgccttcggggtgatactgaaggtaatcacaaatactccctccgcttcaaaaacagtactacctccatacttttaaatctgacaccaaatagtacaaattgaactacggaacgtcaaataaaaaaatagagggagtagttgttttagctcttagtttttatgtctatacctaaatgagagaagacaaatctagacacgtatataaaatacatccatcaagcctttgatgaatccaccgttggcctaaaacaaattttatttaagtacagagggggtatcatttagctaattggtggaaagtgtaaatatgctaaaagagtatggagctctaggtattccaattttgaggatttgaatatacaatatgcttactaggatcctagattaaaagggcacagattagaatattacttcccactattatcctttagatatccgaaattaactcatactttattttttagcctagcccatattacacaacaaagaacaaaccctaactcaatgaacccaacacctaacgcctaatccctcattgttgaccgccctttctgcccatgttggcttcctccgatgtgcctcgtgcatccttccatgtcccataggttgtagcaccatcgatgactccacggctggtcggcggctacccctttcaagctccagtgtccctggccattgctcgcaggcctttttgtaatgatgtccctcagttgtcttccattagtagggacgtctcagatagcgagattttgatacattttgataccgatactcattatc

SEQ ID NO: 88446 - DNA, 1276 bp, Zea Mays
aagtttgagagccagtttaaccttgatccagagagaatctgtcttggagtgctataataaagatgtagctgaattgtagctctccaactttactgcagagcatggaatatgttaccatagggatttgtgagcaaatcgagcctaattattggctgtcaggccaactgaatgagttagccgatggtacagtaacctgcttgggttcagaacacttcaccgacgttgatcactcctccgccgcgattcgtgtcgccggcgttaggattcgcgctcggggtgggtggataacatcgcgagatgaaagatctttgccgtcagtgagctggaggtcactccggtaactcaccgtcacctcctcctttctgtttggcggctgagcagataagctcgccggggaaccgtcgtcgcacagccttgcgccacgtatctgagtacctccaccgcatcgccgtgcttcgttttagcttcccgtcgatcaccagagtagtcgccacgacggttgccacgagttcacttgcaccagtaaccttttccctctccggccgccaccgcgccatcatcaattcaagcgccaccgcccctggaatctataaattgagcccaccgttagctccgcaacctcatcacgcaccacaccgtctagtatcgctcccaatcttgcaaccgtgagctccaatttctggttttccccaaatctgttctgaaacgccgcagggtcgagctcaccgtggccagtcctccacaggtttaatcataccatccttgttcttgttttagcatctctgtgtgctggtgatgctcaccaactcgcccaattgagctaggatcccatgaatcaccgggaacgtgtagattgttagttcatccgcgcgctcaccgtggccagagacattgatgtagttgtttatgaaattaacttggggaaaaccttcactcggccctgaatttggtttagaccaacgtagagcgccagtacttgcccccaatcggccggcctactagctcgtcggagctccacagcgcgctgccatcgtcggggactccaccttgcaaagggatagaactacggggatctttttgtaaatggtcagcgacttggttaaacagtagtgaaacccgtttccaattattcaagaaggcaagggcctctgtgaaactcgccgcgcgggcgcgcgcgcaggcacgattcccctctaggctgggccgtatgggctgcttatggcccagcactgtttaacctttctttttcagtagaactttgaaaacctatagaaaa

SEQ ID NO: 88447 - DNA, 465 bp, Zea Mays
gttaaagaagtgcgggtgtccgtggattagggaatcgacggtcgcgattgggcatgagcgtaccatttcacggagtaatccaagccgctgatcccataacgaccgtattggattagatcctggcagatttgatgttgagcgtcggatcagttttgggcggcgaggattagttgggggatattacttcgcccggacgcgatctggagcattgatccaccatcggacggctgtgaaaaccctgatcgtggatctcaatatcaacggtcagtaatgtttaccgattcatttaatagttaatctaatctgagccctaggtcttagatccagcgacccacaatcagtcatacctcttcgccatgtacatttcttaaagagaccctcagttcttagggaattaacccgtagtcctggcgccagtcattctgggtctttggaagttttacaccagagacccctgcacttccc

SEQ ID NO: 88448 - DNA, 580 bp, Zea Mays
ggggggtgttaggtacgactatgttaatttgattgcttggtattcttggagtaggagttccgctgagattgaaagaggggatgttgcattgcatcatgactgtttggactgtgatttacaccaatgttcgttgattaccatgagatttgtagtgatggtggatttttgtgttaatgctgctactgttggtgggcttgaactgtacctatgaagtttgcactgttgtttcagagcaaatttgtgcaaacgaatgtatggatgtgaagcaatgctgataggttgtgaaactatgagggcttacttgattgatccattgatgcgccttgagctgacccgacatttttcaagtacacagcttgaacactcctgtagcttgtttgcttaggagttctatattttgaattttgaaggtgtgaaccctgactgattccttgataggtagcaaagtgggactcctcttgttcgaattgtaaagtgatacagtaatgctatccatattgtgttcagacatcagagcctgctcatcaacttagggatcactcatcaaattagggacactcgaagttcaatccaaaatcac

SEQ ID NO: 88449 - DNA, 708 bp, Zea Mays
gcggagtcatggcttcagctctgtacatcaatctgaataaggtgaagcctgttgcgtgggattcagttgtgtttagtgccctatgcacttcaggtgactggtctacccacttgcccttcttgtcctcgaggagtcttttcttgattgctgtgaagatctttccatttgtgcgctctatgattctgttggactgtgggtggtagactgatgcgaaaacaacctttgtccctaaggaggcgcaaaatcctgaaagtcttggttgtcgaattgttttccattttctaccgttaattcggagggtacctcgaaacggcagacgatgttttgctagaattttttgagttgtttttgctgttatggtggagactgcccccgcttcgatccacttggtgaagtactctacaaaaataaaggcaaatttgaggttgccctgcgcggtggggagtggtcccactatgtcgagggcccaacgctatagaggccatgtgtgggcgattagcttcgtgagctggaaggtgtcctgcatcgggtgtgaaaatttttggcaagctttgcatgagcgcactatgcggttcgccgtgcatacaatatctggctagtaaaaaccttggcgcatgactttggtggcaagggctctagggcccgagtgacagtcgcatgttcctttacgcacctcgcgtaggaggtcgacgccatcgatcaccatga

SEQ ID NO: 88450 - DNA, 574 bp, Zea Mays
cgcccagagccgggggaaagggctaagactccgaacgtcccctgggtctcctgacggtcttcccaaacatggtcgtgatggcagtccctgggaggcgactgacgttaagtctcatgtagcctctcccgagtcgatcgccctggttctaggatgctgtggattccgtcctcgccgcgcggctacatgttggtgcatcgtgatcccgatcatattcttcctgccgcctcatctcactttcatgccgacgatcacgcaaagcattgatgttgctcagcgcgtctcgctaattattgatgacatggcgcatgtccggacctcgatgagcggggggaataagatggttcgtcgcctaggtaaggatctgttagtagccctccgtgtccgaggtacggggcaggacatttgcgatttgagccagaactccgctgacttcactcggcttgtgcatggctcgagcaaaggcgggtaggaggttccagggaatgagcgagttgtcacgtcggtgtttggcatcgtgttccgctcgttcctactcgcgcttgtgggcgtggcgacgatcacgacatcgagaatt

SEQ ID NO: 88451 - DNA, 891 bp, Zea Mays
ggcgagacggctgctcaatgtccatcttcagcgcgacggggctgagcagatggctgagagcgctagggaataatgggacgccctttgttggcggctaggaaggagcagagagcttcggcagcggcagttcgcgggtggcgagcgcggcaacaaagtggagagcgaagagcgaggagagagcagcaagggcgagcaaggagaagagtgaggcgaacctgcggcactgcagatataggcaacgagaggagtggagaggacgccgacggaggagctcgaccatgactattaatggcacgacatgagtgcgggaaacggctagcagtaaaggtggtgccgagtggaaggagagagagggcgcggacgtttcggctgggctgtgcggcaacgtgaatgccatgggcaggagaaccggcggcagcgcgtacgtccgatctagcagacgagcagattgagccgtgtctgtgtgggagaaaataattaaggagagagaagaaagtgatgaggcccacatgtaagggagaaagaacgaggcatgggatttagtgtgcgggcttggaagctgagcgttggtgtcaaatatgtatatattgttttcaatttccctttttttatgccgcacggtgtgtgtgttttgcttttatgtttttttattttaaatattcgaatatatataggtcaaaaattccaaaaatatattatcataaatagaacacatttctaaaaaatatatttatcaacacattatatttttataaaataaaatccacaccaataaatccaaataatgtgtataaacataataatatcacaattatttataaatcgatgcatgctcttaaaaattatttaaacaattttttattagtttcaaaataagatttttacaccaac

SEQ ID NO: 88452 - DNA, 291 bp, Zea Mays
gcgacggctgctgcgccggagagtggaggagaggcttcacgcctccgaggtagcggcgatgcgcaagatggaggagggagggggcgcgcgcccgtgcgtttgtttgttccacttccactccacgaccacgatggtttggtttccttccactcgggcggagacgaggtagggggagaagggaagggaacacagctgcgtcgaaggagacgctttcttttcttctttcctcccgtctccttttgcttcctccgctccgccgcgtttacttcctcgctactgcgccgtttcgcc

SEQ ID NO: 88453 - DNA, 517 bp, Zea Mays
aaagaatctcgtcctcgagattaagagtcttctgcaaaaagctaaggaaattttgctctgagttcatcttctctttgccaagtcgcttcatcttctgagtggtggttcctatgaactttgcacatgttgattactttactctgagtaattctgtgagacgtttccaatattttcactaggtatttggaatatgttagatcttccttaatatcaagttcctctagaactgttcctctagtactcttaggcacttcttaagttgcgatatgtgaaacacatcatgcacatcatatagctgtgcggacaattctagccggtatgccacttcacattttctttccaggaccgaaaatggtccgatgtaacaaggtgatagttttcccttaaccttgaatcttctcatgcctctcataggtgaaaccttgagatacacatagtctccaactccaaagaccaaatctcttcccctattgtcagcataactcctttgtcttgactaggcagttttgagattttc

SEQ ID NO: 88454 - DNA, 299 bp, Zea Mays
gggtggggaagaagcctcgctgtccattggatcatgattgtgcgactctgattgatccgggcgtagtgtttcgctaggggggttttaccaccgtggatcttggatcctacgggtgagggcgagcgcaggtttatcagggccgtggatcaatcggtgccgttgatcacatatcgcacggtcaggtagcgtaccggttcaattatgtgctggtttttaatctgggccctcggttctggatcggatagatctgattaccccgtaccccttcggctagcgtagtttgcaaaagagaccccggg

SEQ ID NO: 88455 - DNA, 375 bp, Zea Mays
gtcagtttgaattattgtagcttcgacttctgcctatttaaagcttctgaaggcccaactttggtttcagtttgaattattgtagcttcgacttatgcctgttttgtttcagcttcggttgcaccttagaagctttggcaatttttctggcaggagcaggattcaaggtttttgccgtttctaatacaacatctagcacatttaccatcctccttctcttaggagttgtggcagaactcttttgtgtcttcagcgctgttgcttctgttgaagggcttaaaatccctagcatctttgttacttcttcagtttttgacctttcagccttatctttgtcaaccttcgtttcaactagctcaaccgaaggtgccttcg

SEQ ID NO: 88456 - DNA, 438 bp, Zea Mays
cagagtcattatctgttgtacacaatgtgttccacgtatcacaactaaagaagtgtcttcaagtccccaatcaaactatggatatattagaagttaatttggaaccacacctaacttattcggaatatccgatccgagttttggatcaaaaggatcgatttactcgaaaaaggacactcgagttctataagatacagtggaaccaacatacggaagagcaggctacttgggaatctgaagatttcttagaaaagcattttcctaagtttctagcttcttgtaaccttttccttgtaagagaaaataggaaataaagttgtgatgcatttccttttccattacttacccaggagccttaaatctcgggacgagattcttttattaaggggaaggatgtaacacctatgatgttatgagatctgaaacgttgggatgaca

SEQ ID NO: 88457 - DNA, 343 bp, Zea Mays
tcgaattcgatttacaagttcatttcatgatatgtatttagggttcgtctctcgaagcggataactctaggagctatgaatgagcttcgagtccatcaaaactcccagcgaaagagcctgaaccacttgacagctctactcctcgaccctacactacaccattcccggatcaaaagcgacgctggaagtttatccgagccgcattcgttcgagaaccattagtgatccatgtcgacttcttgacgaggataaggtaggacgccgtaggccggcccacaccatgtttcattcacccagaatttaacgaggataaggtagctaggggccgcacggcacaatttca

SEQ ID NO: 88458 - DNA, 646 bp, Zea Mays
gaaggtgctgcgctacatcgccggcacgctagactacgactgctactacaccaggaaaaaggagggtcagctcgtcgggtttagtgatagcgatcacgccggcgacgtcgacacgcgcaagagtacatcaggcactctgttcttcctcggcgacaatgcgatcacctggcagagccagaagcaaaaggtggtcgccctcagctcctgcgaagctgagtacatcgcgggcacagcagctgcctgccaaggcacttggctcacacgtctcctgtcagagctgagaggcaagaaggagggtgcgatcacgatctttatcgacaaccagtccgccatccagctcagtaagaaccctgtttttcacgaacgcagcaaacatatagacaccagatatcacttcattcgtgagtgcgtcgaggaaggcagggtgaacgtcgtctccatcgacaccaccgagcagctggctgacattttgacgaaggcgcttgcgcgggaacgtttctgcgaactgcgcgacaagctcgggctcgtcaagattaagcagagatgcaaggcttaggaggagatttgttggataagcctcgcatgtagttagttgcatatttccgttttgtcgcgatacatgcgcacgagcgccggattgtggctg

SEQ ID NO: 88459 - DNA, 398 bp, Zea Mays
cgagctcgtactggtcggaataggcaacaactagtgctctagcttggctgacacttaatttaacccctaacaatcgtttcccctcgatcaattgcaaggttcgagttcttaatcctgctgcccatggagacagcgcgagtaatggatgaacggagacgttcccggtgatcctacgggttctaactcaattggatgggttgaggagcataaagggtacatcatagtactaaaacaagggaacaaagggtgggaatggacctgtaatgcgctggccacggtgagagtctttcacgacggcggaaaatcgatttgggggaagaatgaaattctccggctatagtggctaatcgagggcaggagtgggtgctctggcttggtgataacatggcgcaacagac

SEQ ID NO: 88460 - DNA, 442 bp, Zea Mays
ggttaaaaaaaatacaagcgttcgtgtttgttagtttacctacctaaagctatatatattgtcagctcataatagagaaggataaaacctcaatgcaacggcgagaagttgtaaggctgtcttcaacaatctgtctaaattttacccaaaaatattgttttgtactattctgcactgtagaatatactgttcgtatagtagaatttgaatataggtgtggatatgggtaagctgctagagatagcctaatgaacccacataaatatgtgcgcttgacatgggatgaaatcgatcggcacaacacaatataggatgcatgcagctagctccgtatatcgagattgtagtgcgggccaaatgtaagagcaataaggtaaatagctcgcataaatctctggtatagtagtgaaacacacctacagtacttgaataaaactttcac

SEQ ID NO: 88461 - DNA, 449 bp, Zea Mays
gttaaaaattccttgaaaattctgagttgagagaaatagtatttgtaaggctatctctaatagcttattcatcctggtctctcattttaaacactaatctataccatctataccatataatccaccagtttaacctcgacaaaatctacccaaccaaatcactgacatactcataatctttcactaaatccgacaaacaaattgcaaccgaacttaacacaccatcaaaccaacatttcagattgttggataacctctatcccttacccactcaaatccaatagttaatattatttagatcatcgcacatccctcctctttcccctctcccgtcccctacatccctctctcattcgtgtcatcgccgtcgaccctccccttccctgtgaggccatgacacgtgacacctcttccctcacgtcgccatcatcaacccttctccttccctg

SEQ ID NO: 88462 - DNA, 400 bp, Zea Mays
tggccgcgtggccgacgctggtagtggtgaccccacatgacatcaactatatcatgtaataaaagcacacatgattttcgccatgcctttcagctaggaaagcatacccatttacctttctctagttcctccagtcgagcttccaaaccatttgagttggctcattgtgatttgtggacatctcctgttgttagcatgtatggtcacaaatactacttggttatttgatgatttttctcattaattatggacctttgctccgcgtttgaaatccgacacattcactactttgtcccagtttttctcatgtgtttccactcaattcggttactccatccaggccatccggtgcgaccatggcacgagtttggtaatacttacactcggacctttatccgct

SEQ ID NO: 88463 - DNA, 776 bp, Zea Mays
tcaatgggatcttagagttttgagatagagatcaaggtgaacgcgctcatttttggttcaaaggctgaaaattcagaaatctgaatttcagatttccccattaaacctccacttgaatggcttgcttggagtttttaacaaactatttggccaaacttttataatctttattgtagcttagttagtgtatttcaatttttataattggcctaagccatgatttcatgtttttcatggtcttttatcccttttctccctttctacttaagtggcttatttagggttggtattagggtttcaacattttcccctttttgaaaacctcatttgttttagacatgattctttagatgtaaacttagtggatcttttattcttaagttgatttggtgcttcttgctcaatttggcttacatgaaaggatggcactagagttagcattgagaagaacctaggtgacactagggtgtaacagccttcccccattaaaggaatctcgtcccgagattcaggtcagagtcctcccggggtgaagcgaagggtgagactcgcttgaagtgggtgctttatttattaaggcaactgctcttcgaatgtcattctctttgcagctttagaaggaagtcgtttttaactttagtcttataattaactcattctattttaagatcatatttcttatgttttgatttgaagggtagcggaggagttgggcatgattgcgtaccaatttccgtaggtagacaatcgtgaaagatggaacgcagaaattcctt

SEQ ID NO: 88464 - DNA, 392 bp, Zea Mays
gccgaaggtgcctatagtcgggtcagccgaagccaaagatgatgcggccagagagccagagttggaaaaaacagtgatgctaccaaaaattctaagtcctccggcagaggcagatctgccgaaggtgacaagagctccggccacaactcccaagaggagaagaatggctagcaagctagacgccgttgtggaaacaacaagagcactaactcctactcctgtgaagaaggttgccgaagctgctacatcacatacgaaaaccgaagctgggccctcagtgcccactgaaacgaagctcaccacaactgagcagagggtcgaagaagaatctccagatactggcgtagctctagagaaaagtatggccaaagaagccaaatcccctgctcccg

SEQ ID NO: 88465 - DNA, 302 bp, Zea Mays
ctcttgggcaatcagacgccttcaaacggagatgaacccacaaggacgaacatgaggaggatgaacgtcgacgaggactaggaggccggagccccgccaagccaagacttagctaggactccacctaacagcttctaagctccacttccaccccgataaagagatttgggaccgtctcctccctctctcaaccacttgtaaccctactacgagtttgatcatcaatgatgctggtagtgcaagccatcaatgtctagaagtagggatgttctgcccgaaccactataaacattgcgccctat

SEQ ID NO: 88466 - DNA, 953 bp, Zea Mays
cagttcttctggagccagcgcactctagagtccgacaaggcctaactggcatcgtatcacctcaccggccacacacatacgtggttctggcagatggaacgtgacgagtgtgaggtcacgtggccatagttcaagatcatgtgccagtagtgctttggttccctcgcagcaatggcgacttctgctgccatgtttgtcgttccctcatcgtcgacaccgcccccatcatcaggggtagccatcaccgctacccttgaccccaagagcgatgtacaggagagggtggttccttcgcgacagacgacggcagtcgtccacctgtaagctgcaacacgcggtttcctagcgcgtcggtgggtgaagcagatgatgggggtgctccattgcgggggtcatagctgcaccaacgtgcccgagcaacatggtggttgttcaccttcgcgtacaagaggctacaagacatggcgcccctctgcaacgctctgtccggtactagccttcatctacggcgacagggcaactaccacgactactctccatcgtacaagggggtctgctggcctcgccaccatctgctccagccacaccaccctatgcgcgctggtggccgcgggaccatgaagggctacactgcacgtgattcacttgctgcaagcaacaccaacgttggcctccacgggcctgcctctaaaggatgatgtgtatttaccttcatggttccagctcgcgccctcctcttcattgtgcaatgtttctttgggacacaggatgatgcttgtagttacagtatatttagaataattaaaagatgagtcgagatgtaaaaggttatttttcggtgatagattaggtcattacaggtcgtttgttggatgctgcagctcgaggacgagctgtttgtccagggggtgtagtgtcagggcctaaggaggcccatggaggggctacggcag

SEQ ID NO: 88467 - DNA, 280 bp, Zea Mays
ggaacaagcctttcaagagttgaagcagcacctggtgtccctgccaatactggtagctctagaacctggggagccgttgtatttatacatcgcagcggctgtagaagcggtgagcatggtgctggtcgtcgaaagaacgacacaagaaggccaggaacctaagggctcgggactggctataggggtccgaaccattcagaggccggtctactacgtcagcgaggtcctccatgaagcaaaggccaggtaccttgagacgcacaaacttctctatgttgtg

SEQ ID NO: 88468 - DNA, 584 bp, Zea Mays
aaaaaataataatctatgtgaggtgcttctatcaatcaagtgtatgcatatgaggagatgacctatggggtggaatttagggagagataaaggggggggggtggttaggagattagggttccaaacctcaggttgaaattttgggatgttacaaatctaccccacttaaaggaatctcgccctcgagattcagacggggctcgagaaaaggtaagggtattccctcctcaaagagtcctcactttcccaggtagcttcctcttctccttctctgctccactgaactttatagagtctcacttctgagttgcgggtctttcagaatgctgagtcaagaatctttattggcttttcttggtactgaagatctttctgaatctggattgcctcttcttcgatgtgactttctagtacttgcaggcatttgcggagctgggacacatggaacatattgtggatatcagacatggattctggtaattaaagacagtatgctgcgggtccaatctgccaatgatgggataggggccgacgaatcgcggtgctagctttcctttcacttggaacctttggacaccatgcat

SEQ ID NO: 88469 - DNA, 332 bp, Zea Mays
ccgagacctgtcaacttggaatatcagagcactggtcaattaaaacaatccaaccaaactatccaccattcatggttggacggtccgcacatggaccacttaccgtccgactaaaaacaccggacgtccgtagagcaaagactcaaaaacacactttccctgcctaaacccaattaagcttatgcggacgtccgacctcctggcacggacggtccacgaaaggagacagagacaaggcgccagcagacttctctggcagagtcacggacagtccggcctcctggcccggacgatccgccgaccacagagttgatatttttacgctttttcga

SEQ ID NO: 88470 - DNA, 433 bp, Zea Mays
ttcagactgacagtgggattggatgaacttagggctcaattttaaacaagatcctgtgactttttgtgggtgcacaatgtagcaaagttggagctggtttattagcctataactttgctacagagcattgacctagttatcatacaaaattgggaggaaattcaccccaaacacggtctgtcagactgactgatgaagcttcgcgatgatacagtaaccggattggatcgccagctcagagacctcgccgctggcgaccacgcgcgcggatccgtgctatcgccgtgattcacgctgaattaaacatggataacgatcacagggtgaaagatctcgcctcggatagggctagaatgtactgtgtgcttgatggttcatcagtgcacaccgacgacgtggccgagcggcaatcaccagcatgttcaccgttcac

SEQ ID NO: 88471 - DNA, 729 bp, Zea Mays
atcactatcttcgtcgataaagcctgaagggggtggcgaaggaggatccacactgaaagctaaaattccatcagaatgaataaccaccacagaaacagggaacgccaacgtgcaaggagcccagctcccatcctctccaaagacaatcggctctttagcaaggagatccaccaccaccggcagcagctcaggtgaccggcaccagactttcagtatgagaacagacatgtcttcctcctcgactgagccaggaaataatccatgaatcaaacagaaagcaccaagcacagcctcaacagcctcaatcccctagagatgtgcaggaattccacgtagctcaacgctaacgggcacgtggctgaccacttccaaaagtgaaagcctgacgagaccaccttcgaatatgcaacctgagcggagggacatgaagagattgccccccaaccacccgatcagccacgtcaaatgaggggaagaagacgaggaaagaattaggcgcatcacgacgtatgcggagcgaccctgcttcaaggcaaaactcgaggcgatcgcatcacgcacctccacggcgcagccagaatcctccctgcctacaacactgacgatcagtggccgacagagttcctcctaaggctgatcaattcttccacgacgcccgacaaagctcaccgccctagctaggccgaaggcaggcgaaggaggcaactgcccccccagcgctcgacttcc

SEQ ID NO: 88472 - DNA, 403 bp, Zea Mays
gttcaattgtgcctctggtcacgcttaaatgtgtgtgttttctttaaacccgttgcatgtgatagataaattagtccttccattgtgagacaactatacaccaaaaaatgttatttgttcaacatacatatttgtattttaattgtctgagtgattatttttgagacaactatagtttcatttatactatttgtttcatagataaaaacagttttgttgtttaatgcatgtttttgagttaatggcacatcattgagactatggacatctaattttttcacttggccctgttgctttagttattcatgccatggcatattatttcatatacgatgtttcttcctttatgcagcaaatgtaactatggtgagagatttttggaacacagaaagttgcacctaag

SEQ ID NO: 88473 - DNA, 371 bp, Zea Mays
cctatttcattaagaaatagtaaccggacaaaggtttttacaaggccacaaccttaaccaacagccaaaagccgacaagactaccacaattatcagctacgcaaggattaagcccaaataaggaaacgcagtattccagaaatacttgagagacagactccaagtgactgacgaacagccaaagtgataaactagagacaaatcaaaagcagtctggaccagccaccagcagtgacgaccatagctaagtttttatctaacgatgaagataagctgaatacatcaaacaggacagaacttagaaagatgcatcagcagccaaaatgtcactgaaggcgcctatcgaccggcttccaaccatggactttgtt

SEQ ID NO: 88474 - DNA, 632 bp, Zea Mays
ttttgaatgaacgcgttttgggcagtgaagacgatctcgttcattcttggcgcaagtctatttgctaaaatcttggttaaaattttcatgaaactgttgatgagactgatcggtctaaacatgtcgatcttgtcagccccctcccttttttgtaaaagagtgatatttgcctcattaacaagatgcaggcttttacatctatggttataaaaatcatgaattgcattggatagatcatctttaatcagctcaaaacaacacttataaaatatccctatgaaaccatctggacccgacgccttttcagagtgcatccccatgaccacatttttaatctcgtcatcgttgatcgtagtatctagatctggtaactcaaaaaggctataccctaagctgtcccaccgaacaacacgttgtctagtactcgtcctgccaataacttgagtgaagtgattatgggcctcatgtaatttatcttcctgactggttagcagtctgccgtctcgaactagtgatctaataaaaaaagttcttcttctgttatttgccatcaagtgaaaaaaattgtgtttgcgtcacccaggcgcatccagacgagtctagaatgttgtctagctcttgctgtcactagc

SEQ ID NO: 88475 - DNA, 442 bp, Zea Mays
catcgtctggtatctgccatcctttgattcatgcaacaggacctgcaggatttagcctgggaagccaagccgtatgtccggaccccctggatcacagttccaaatactaggacacccatcacagagtggtggagcgtgcaggcttagggtacgggaccatgctaagcggctacatagctctggaccaccccaggagacgagtgtccactctcgagaactggaccccaggttgccggacccacaagatcgcagctccaaatactagggtacccgttgtagagtggtgaaggtgcagtcttagggtacgagaccagactaagcggctacacagctccggaccactccaggaaacgagtgcccattctctagaaccggacccgcaggttgccggaccccctgcagtagtataggggtcccgaactgcaagcctggcttactcaat

SEQ ID NO: 88476 - DNA, 348 bp, Zea Mays
ggccatgaggccccccttagataggctagaccaaccgaagggccgatacgggatcaaataaggaaggactcgataagattttcccagtgggtcgaacaccctcagtgggatcgttcaccgaaagataccctcgcaagaagatgatcggatcttacttggatagcccgcttgtagctcgatggccccttcccccgcaccaaccaggccgaggaaggaaagccctcccttcagaagaaatttaaaaagaaaagacctcttggggggaagcacgttgacaaaagacaaatggaaacaagcccaggaacgatgatgaaacaacaacaaatatgggctcacgctcaatgtttt

SEQ ID NO: 88477 - DNA, 1078 bp, Zea Mays
aagtgatatctgatattgttttcacatttctctccttttgattttcagttctgaaggttttatgaagtatatgatggatcagcaatgttaccttcctgagaactcccactttgttggaacaacatcacatttcacaactacaaatcagaaaaatgagagcccaaataacattgagagtgatgatgcaaacaaagatgttaggaccgagcaaaggctaatctagaaaccggaagaagatgagagagtggtacttttgtagcctaactttatgtatagattaaattgattattgtagctaaattcataatttcacgttatgtgcagatgagtgcttggctgaaacactcaaacgatccaattagaggaaacaataagaagggtgataagtgctagtaaggcgtagcaaaagagtacaaccttacaactgcaaaaagtagattcaggactaaaaaacaagttaaggaaaggtggcataaagtaaacaggtggataaactcattcaatgattgttggttgaaggttaggaggatttacacaagcgggtactcagatgagatgtggttagagaaagcacacatgctatatgcgaaggcgaacaaaggatcacatttttcgttgatggatgtatggaaaatggttcgtaatcaaaccaagtggagtgcttataatgaccagaaccatactaagaggaaggatatggaaaagggcgacacgaccgaagatgttgatcttcctcgaccaatgggacagaagaaggctaaacatattgttcatgaaggcaatggaaaatctaaggagagtgccatcaacttggaaggactagacatatttgaaaagattcaaaatgaagtccatgttaatcgtctcaaagctcttgaaattgcagggaagattaatatcgacaagatggagacaacaaaaattgctctcgaaagagcaaaggaggagaaagaagctaaattaattgaaacttattctagcctgctgaaacaagacacgtcggtaatgcctgatgacgttaggattgaacatgttactgcactaaggtgtttgaggaaaaagttatttccggagttac

SEQ ID NO: 88478 - DNA, 527 bp, Zea Mays
gttccgagggaggccatcagagctgcacgtgtgaatggtgcctttaggagtgggtgggttctccgtgtgaaggcgcttgctattgactactccgtcgtttttgggtgcctcttagggaacttcggtgacaagggttgccttgcctttcttcttggcgagggctgccttcgtcgcatcgtccagagaggtggtggccttggaagtcgctttcttgggagccatcgcgggattcctttgtcgaagcacaaacagtgggtgccaaatgttggaaccgactgacacatagtcaattgggcccaagcactaggacacgggagtattttggtgctcaacaaaatagtagacggggaactatggtgtttcgttaagcatgtcccatcagtgtacagtgtgggggtatttataggtaaccaagtgggtaggcgcgcccttctatgtgcaattatgcccccggttacctgctacagctccgaaatattcccctcttaggggtcattacaggtcattacagtgaggttaagtacagt

SEQ ID NO: 88479 - DNA, 323 bp, Zea Mays
tttctttggcggcgagtatcattccgtattgttctcagatcaaggtgtggggccgtcactaggctcgacgagttgatgggagtcagagagagataggccattgtttgttgtgatgacgccgaggccagtacgatggcctagactgactggcttatgtagttatgttggctccccactcctacttcaactatggacgttatcgatcgctataggtcggtatctatctctatttttaaagtagttagatctcgtttggtttctttagtcgactaaactttaatttatcactaaaagtgcacttgagccacggagggttatggttg

SEQ ID NO: 88480 - DNA, 389 bp, Zea Mays
cgtccggcaggacacaaacggtgctcaactgttggtttattttttccattgtttataccacaaagagatggactttattgatttctcgtctacctgttcggtaccagcatgcatatttttgttttccacggcgaacacgcgcagcattttctaatgcacagtcattttcgctacttcatcgccattgaatataaatggcagtcatcatcacgtggttatcagccctgatccatgacgccgttggaaggaaaatggcagtcatcaattcttgctcatcagttctcacgtatcagtcaccgtgtcccttacctgagtctgtgactgtgagagtgagacaaaccatgtcgcacgtcccacctcgtgttaaacgtggtaggtgtgaatagtag

SEQ ID NO: 88481 - DNA, 598 bp, Zea Mays
gatggatataaggattgctggaaataagctgcatcctgttctacacattctgtgtcagacggtctggtataatgtgcggatggtctagggacatacttggacggtccgtgtgtatagccagatggtctgagcgtgtctattacccagtgtgtggagtatggtggtcctgacatggctctcgatgattcgttgcaagggatggagccaaccatcgttggattagatggtctgagctcagccttgacggtctggacatgcacatggtcgtgggtttatcttaaatcggtggaggaggttgtggttgcccaatgtaagagttcatcggctaccataagatggttgggtttgtgaaagcccatttgtagccgataaattgtgtgtggtgggcgcaacctcattatcatacgtcaaaaatttatgaatagtagatttctcaaatgctcgtttagttttcctaacatcttccgccattctccccatgcattgtttcatttgatctcgttgttcatctatataatgtctaagagatcgaatgtcatagttttacttacattaggggtgggtgcagtgggtcgaagagatgacaggtcaaactctt

SEQ ID NO: 88482 - DNA, 686 bp, Zea Mays
ccactcacttttccagccggttggccacttggtgcggtagcttagcaccggggccttcatatccttgcggtaagtgaagttgtaacagccaaaattctcatgaagcccatcttctctggcctttgtctgataatgtagctcatgtactcgacagaaggcttcagcatttggatccattccctagcttcgaagggcccaaatgaagatgctgagcctaacgatagcattaggagtcagctgatgaagataaatttcataattattcaaaactcccccaatcatgtcatgaagcgaaaatcacaatccaactttgaaaaagcttttgaaaactagtacttcgtcattttttagctctggggtggtttcttcgccagcaaaacgaagaagcttcttctctgtctccccaaagtaaccgagcttcatcatcatcggcacattggcctcagagatagtagatttttcaaaaatctaagtggctgggctttgctgggactagagtgttatagtcttcctcttcatcagcattttcttcctcaatatcagcttcttcagcctcagcagtatgtgcacctttgtcaatagtcccctttgtaacaaccaatccagattgcttcataacttcggaaatcagggctgtttcggtggcttcagcctcctctccttcacgggtcactctagcagttgaa

SEQ ID NO: 88483 - DNA, 505 bp, Zea Mays
tgctcctgcaataggatttgtgtgtgaaattgataaggatgcttttgtgggaaaggtctatcagaggcgcaggaagataagggcatgatccttagtttgtttcagtttaaactgttagcattttcagttgcagaggatatttgttaagtttagatctattagattggatctgttatccatttagattggatctgttaacagatcctgagaacctctcggtctatataagagacgctggcagattcatcaaaatgtcagcagctctccggtgatcttcctccttcctacccataccagcttcgttctcttcctcaatccgcttgtgttttgcactctccctggcgcacacccccaaggaagtgacgcccacatcagaaattgtgttgtccctggaactacacagatcacgttatcactatggctaggattgtggatgctccttcatcctcattcccagtgaaatcccatccagattatcaccgtcacagtgaaggtagaaaactgc

SEQ ID NO: 88484 - DNA, 674 bp, Zea Mays
gttacactcagggtgtagcaggaggtgatgccgcacaccttgcagaaggtgtgcttgcacgtgccgaaggtgttggtggtgacagactcatcggtgttggcctatggctcgaacttggcgacggtgacgacaaagtgcgtgttcccgcacatggagcagtcgtagtatttgcaaatccacgccaccacgctcacgaaggactcgatgtgccaaggcatgcgtcggaagtggcacccgcctatgtgcaccacgtcgtcgaggatggggctggtcatgttgtaactagcattaaacaatctatgtgatgggactaaaatttagtcacatggaactgggtctagtgagatattaagaacatggcatgagaatctagataaggaaccaaacactatgtattttacatctcgggcatccaatagtgtgtagagagaatcccatccaaccggatagtcttgggtaatgggaatagctagattccaaaaatgtgttgcgaaccaaacataacctaagactataagcaacaacggattcttctatatcatcgccataaccttactttcaccaccctctaaaaatgatcccctaaatttcagctcccacagtgcccgacatcaattacaatggaaattattccccaattatgagtggcacgacgttccgatatctaatatcac

SEQ ID NO: 88485 - DNA, 753 bp, Zea Mays
ctcggtttcaagcatcacctagataggttcatttgaaggccgccaaaagatttctaaggtatttgatgcatacccccaatattggtctatggtatcccaaaggtgcttaatttgaattgactggttatttggattctgactatgtgggttcgaaggttgatagggagagagcacctctagatgttgtcaatttcttgggaggtatcttgtttcatggtcttctaagaaacaaaactcggtcgctctctctaccaccgaggcggaatatatatcggccggtagttgttgtgctcaattattatagatgaaacaaactctattggattatgggatttcattcaagaatgtacctcttatgtgtgataatgagagtgccgtaaaattagttacaaatccggtccaacactcaagaacgaagtatattgatattaggcatcacttcttaagagatcacgttggaaaaagagatatctctatttattctattgacacagatgatcaattggaggatatatttacaaagtcgtaggatgaagcaatgttttgcaagttaagcagtgaaatgaatgtgatagatctctcaatcgttgcctgaagttgagtacacatgtgttatattacatttgagctctagaatgcgctctctaagctatttattgcctatttttgatgtatttattatatttcaatcatcgaaatgatttatgtgcaaaaggttagtcactcaagtatattatgtatatatgcatgtaa

SEQ ID NO: 88486 - DNA, 847 bp, Zea Mays
ttcggtagttgtagataatatgaagggtgctggaagactgtatgtgtcgagtatggttaactagatgttatgcgcataataaatggtaggatgatattgtgtagaacgttgtggagatgtttttgcctctatggttgaaatgttcggtggtagatcgtagtttggttgtgttcgcaacaaagaatttgggtaggcatcttcagtgtccatgacatattagattaagctttgtttatatgataaaactaaaaaatgtaaatgacctatgtagtgtttcgattgagttagcccatagatttaatatgtgtcgtttacaataaattatcagtagggtcaaaatgttgagttgtgtgaactgtgttagcacccttctgagataagtagatttaacctatgatgtgttgtcatacgaataacctagaaaggtggtatatgttaataattgaaaggcagtcggtcaaattggtcagtacaattaagaatgattttgcgtgtgaggtgaggtgatgacatgctgtaagtagtcatcgcttcctctatatccttgagtcgggtcaatgtgcattatgtgttcatcgagatacacttcgcacatagtgtagggatgtgttcaagacgccgagtagacgcttcaagtaatcaagtaggttcgtgatacaagttgcgtaatggagttagtttgttttaggataattattgaaatgctctgttcatatgatacacatgtatggttaccgatacgatgtcatgtgatgatgatatttgtgattaaaagtaggtgtcctatatttttatagtgaagcttaggtttaagttgcaagcgatgcagaaatgttttggtaatgat

SEQ ID NO: 88487 - DNA, 963 bp, Zea Mays
atgcaaatttcaattctgaattagaatctaaaaatattataaacttacctgttatacatgtcctatgctgttacaggcatgctctcaagaccaccgtgcatttctgaaacataatccataatacaatgttgcgggattcaactctcctgcattgaacttatgaactccatgtattcaggatcatgcgtcttgttgcattgtaattgattcttttctgtatccttcttaaaaaattcatgattatgatccaagtgcaacagatcaatacacactgatataactatctctttggcatcatcataattttttgaactttcataccggtcttgcattgcgtccgctttgagctggtattacgtacctttgggtttgatatttcccttaccacactctttccttccaccgagcaatttaaccacttataatttttccgttccctatacttttcaatgggaagccaacttcatatgcatacctactataaaattgatatgcttcatccacaccactgaatgtcataccaactttaggtaccaacctgggatcaattgtaacttcctgtgcaaataaataaaatatatatgtatgtacaaataacaataacatgtacgctgtatggtttccgacctaattttccatcgtatgcacaatataacatgtcataccatctagctgcataatattaccctcgattcaatttttctatcatatgcaatctaatatacactaatgaaaatccaaaacagttataaagtacttacgtgtctctgcagaatcactagtgtgtcctgttcatgctcaccaatagtttgcatagtactcagctggtgtcctccttgatttatggccatcctcgacgcttctgatgtgttgtgatcatcaacccccggcaccctcaatgctgctggtggagtaattgcccctccggtagtttctgtttgcccatgtgcatctgcatccgag

SEQ ID NO: 88488 - DNA, 347 bp, Zea Mays
aattgtatatgggttcaaacctattgctccattagatttgttgccccttccattgcaggaaagaactaatatggaagcttccaagcgtgcggtatacataaaaaagatacatgagaagaccaaggaagcaattgagctcaaagcaatgcgcaaggctgcaagcatgaacaagcataggaagaaagtgttatttgaaacgggggacttggtttggattcacttgcgcaaggagcgttttcctgagcagcgcaaatccaaattgatgccacgaggggatggtccatttcgtgttcttgccaagatcaatgataatgcatacaagatagatcttccaccaagctatggtg

SEQ ID NO: 88489 - DNA, 619 bp, Zea Mays
gaagaggagtgatcgttgtttgggatctcggctcaataatggcattgcaactattttctccatgtgttgtgacatatcctctgatgtgcatgagctagccaggcaccaaagggagactgatgacaacgtgcaccttcaagctgcttctctaagtgtgcatattcctcctcgctctcaggatgtgccccttcactagccttttggaaacaattatcagtggcaccagcatcattatggtgttccctttatgcctgctgatgaggaagaatatgagtttgttgttggggatgaaggagttcagtcaactccttctcccttccctggtgatccgtgcccctcctcttcttatcctcgtccctaggatccttttggtagtactcctgctccagttcatctaggtgatcaatgctttgctagggaccttgctgacaagctctttggtcctcctagtggtggctctcttggtaattggtgagtgtgcttctttttcctcccgtttgttgcttgttgcaaaaaatggggagaagttgtattagctagcttgttgttgggtggtaggtggcagttggagaggcagctttatttatcagtttttatttatcctgttgaactcttggtt

SEQ ID NO: 88490 - DNA, 1178 bp, Zea Mays
gcccacctggccccttgctcgttaaccctccgtcacatgtggaaatatgtccctgatgagtgggcccaggcacccagctccttagccacccgcaaccaactcgtgtgttggccttgcttttgaccactggttggtgggccccctggtcagctgcaacctctagctgggttgttacgaacacgcagtcgcgattccctcaagccgtgcgtagaaccatcgggggttggtttctgatccaatcccatcaccaacgggttcgccctgagcataaatatagacccgccgtgacttcttcgccaatatcgagagctccattgaaacagagaggtggcgtgagagctgagagaagaggtggcggagggagaaaacaagccgccgccaatgtattccgcccggactgacggaccgtggccggagtggggtcgtgggccatcagcgggtcatgggtaacctgggcgcggtgtcgcaggaaccggtgatcaatcccgttgtccctaattcctcatcggtgtcgggggtctgccgttgtgccgcatggagtcgtgggcagcgcctagggatggcaatttgatccgtggatttggatatccgtcggatatccgacccgacggagccagatatggatacatgttttgacccgtgggtcagacccgaatccgacccaaagtcgggtgggcacagattaggatattacattctacccgcgagttatccgttgcatatccgaaatcgacctatagtgtatttttttagcctagcccttactacatagtaaagaacaaactctaacaccttgaaccccacgcctaacgctcctaatttccagtgttggccgccccttatagccttgctggcttcctgcgttgtgtcccatagccccttccaagtctcatagaccgtagcaccgctgacggctggctgttgcaagctctagtgcccataaccgaggcccacaggcccataataattcttctattaagttctaattgtgtatgatggtgaactgggaagaaatttgactaattatgctattgaattgttgaataaatgattttatctgtcatatctgatggatatccgaaacccgtccgaaatccgatgggcacaggcatggataaaaatttctacccgcgggtatggtcgcggaccgatattggttgcaaccacgaatatggttg

SEQ ID NO: 88491 - DNA, 725 bp, Zea Mays
gttaaatcgaagatgacgatgagtttgattcgaagagtttgtggaattagatttttaggaacaacatgaacaggagaacattgaatttcataacatggttgggatttccgacaatattggttgggatgtagacaagtcgtgggatcgtatcatgtgactcctcttttgcgatgtctattaattaaggcttcatgatctatgtgctacttgtagtaaggttggttgtgtaaggtcgtctatgtgtctccttgtagtgaggataagctcaaattgtagtaaggttcaaatgcaacttgtagtaaggtagtcaatgtcagacttcatgtaaggttacctatttaatgttgtctatgtgagacttaatgtatgcttttgtatgcttatgatgagatgattttgtatgcttatgatgagatgcttttgtatggttatgatgagataattttgtatgcttatgagaagatgcttttgtatgcttatgatgagatgattttatcatgatgtgcaagaagttgattgccaataccacctaaaagagaatagacatgattaatcagtaactgaatcatacttcctcgggcaaaggtgcttctacatcaagcaaattaatttttagttgcttcaggatatgaaaattcatgcctaatacaggcatcatcgacgactctggaaccaagcccccattaacagttagcaatcttgtgagtatttctattgaaggtgct

SEQ ID NO: 88492 - DNA, 725 bp, Zea Mays
aactataatcgatattacactataaatagatatcggcttattcaaacttgttaccacaggtattagagtataaatcattatccttattatttacgtttcattttataaactaaacggcacctgaatgcagaatagatattctcacgcacacgaatggagtggaggttcaagctggagccctccagcatctagccactccacactccagtgcgcgcgaaggccacttcagcagctgaaagggcacactgtcctccacttcaaagctccagggctcaacacgcgtcggcgttcagcgaactagccgcgcaacagcaagagcggcgtccgtcccgtcggccccttgaaagaaacctatcgcgatcctgcagatgtttcagtgcaagcgttttttttagaccttttcagtgaagaactgcgcataactacgaggacagaattttcagagtccatgcacattcatttatgatatgccgagtgccaacctcgcataacatatattttgatcagaggaaaaaaaacagttgaaggtgataacccttaaggccttgaagccgtcgccatggcactgatgtcgaccagatagcttgtttcgccgtatcgcaaatgatcaaatgaacccataaatactactactacggtcatgtttcaaaactctagaacgaattattagttagctaataagttattagctgtatttagctagttgggctgaaacaactagcaat

SEQ ID NO: 88493 - DNA, 393 bp, Zea Mays
taatcgatgcacatcctcttcgtgccatccttcttctccacaaacagcactggggctacccaaggcgaggtactcggtttgatgtagcctttctccaacaactcatcaatctgcttcttgagttccaccaattctggtccggacactcgatggtctctcttggaaataggggcggtgtctggtataagctctatggcaaattcaaccttcctttcaggtggcatacccggtaactcctcgagaaacacatctgggaattctgatactacattgatagcctctgatggtttaatctcttcaatatgggcggtgacttggtgacaacttccttttcttggtccagacaagaccaactccactaacacttcttctcctgatagggacactaacttc

SEQ ID NO: 88494 - DNA, 512 bp, Zea Mays
caccaaaataaaagtttttgtcaggtacgaagctaaagtacttatgaagatgaaatatgacaaacatacatatacgtctttcgcgctctgcggtttctgcaacttttctcgcttcttctaaggcaagatgagactcttcttcgctttgcctgatagcttcttctgctatctcttggccaccgttcatccacactttagaataaaatttcccacagggtggtagcttcggctaaaaggttctttaatgtcattcattgaaactgaaaattctagctgaattacagccttcgcatgttcatagccagctttttcaagcagcgacacagccccctgagcgcctacatagacacaaaaatcctccctgctagttagaactttgtcaaatgctttgatttcaccctcattccgaagtgttataacctccgagcgcagattcccgaaggctattttagtgctctcatcctcacaatctttttgtgccttcaaagctttgcttaaaataagaccctaat

SEQ ID NO: 88495 - DNA, 803 bp, Zea Mays
ttcaagactattcgatgttgtggaaaattatttccattcaatgtattcaaaaattcgacggggtataatagatcataagagtcatgtgtattaggtgctttgattactttgtcgcagcttaagtactcctttgcttgctcagggataagggaaacaacaacatcatttgtgggtgttaatatggcacgatcttttagatattgaaggtccatgtaattagtttgcaggtcttcatatacctttttaactatacatgcagttttgtcaccttgaggcattagaaggaattcttcgggtatttgtatccatgttggctcatcttcgccttctcgtgatgtagcatgtatcttgccttctccaatgtcgagcatccatttgctaaactgagatagttcttatcgattttcttgtgacaatgatggtgacgaaagcctcatattatgtgtaagacgtaggatatggacatgaggccaaagagaagagttgattattgctgaatttacaatttgtgaacggttacccccctcaattactggcaaaatctgtcgtacatctcctccaagaacaacaacttttccaccaaagggtaaattggtagccattggagacgaagatgctaagatatcccgtaaagatctatcgaatgcttcaaatgcaaatttatgtgtcatcaaagcttcatcccatattattaaagatgtagtttgaatcagttcacacaacattgttccacgtttaatgtcacatattgttccttcatctaattcacatggtattttgaaacgagaatgtgctgttcggcc

SEQ ID NO: 88496 - DNA, 532 bp, Zea Mays
gcaaggcctgtgtcatgctccctagtaaaaagaaatggtatttacaatatttgtacaaggtaagtagccataggccttgcaatcccaagatgtcagctccatggtcacaaaattccaaaagattattatagggtagaagtgtcgatagtcatataaagatatgaggacgacatgctaaagattcctaggccaaagttattgagacacttggataggctatcaaaaatttcatcctttagccttgaagggatgtccaattggttgagccaccaccatcatccactcataccctccccctaactcaagaatcatcacatgttgaaactattgccaacaaaccgtcatcaccacctcaatcttcactaggtaccgagtctcttccttttgacctgccatcaccacctcctcatcctttttgtaaccgaccgtctccgccaccgcatcgccattaagggctccaccttatccacctcctcctctttgaaacccactatctctgccaccagcatcaccaataaggaatccaccttct

SEQ ID NO: 88497 - DNA, 654 bp, Zea Mays
caagaaatgagctgtcttggttagcctatccacaagacccaaatagaatcgtggtgccaggaggtgttgggcaatcccacaatgaagtccacgctgaggtcctcccatttccaagatggtatagggagtggttgcatagtacctgctaccttcaaacggcttgctttgatcctttggcaagtgtcgcactcagatacatacttagcaatttctcgcttcatcctagtccaccaatataaggatctgaggtcattatacatcttgttactcccggggtgcatggaaaacttagaaagatgagcttcatccaaaattttcttcctaagtttggggttcttgggaacaaccagtcggtcttcaatccataggacacccttgctgtcctgacgaaaacatttgtacttatccactttttgattgagcatttccttaattacttgaacacccttgtcactaatctgtctcaagattatctgctcttgtaaggttggctcgactgagatataattcaaggtacctggggaaacaacttccatgttcagcttgcgcaatttgtcacacaaggcggcgatcttagagtcaatggttatacagttgcactgggtttttcgactcaaggcatctgccacaacatttgccttgccaggatggtaa

SEQ ID NO: 88498 - DNA, 479 bp, Zea Mays
gtggaatgggatatcgataacgaacagtgatgttattaatagcacgacaatctacgcacatacaccatgacccatctttctttggaacgagtaaaacaggaaccaagcaagggctaagagactcacgaatgtaacctttatcaagcagcatctgcacctagcgctggatctccttcgtctcatctggatttgtacggtacggggtgcggttcagaagagaagcgccggggatgagatcgatctgatgctcaatgccacggagcggaggaagacccggcagtaggtccgtaggaaaaacatcagcatactcctgcaaaaggttaacaacagcagggggtatatccaaagacgatgcatcatcaagtggaacaagcatgcgcgagcatacaagtgcataacagggcatacaagcttcatggagatcatcaaaatcagcacgtgtagccagtaaaacaggagagtgcaacttgatttcagat

SEQ ID NO: 88499 - DNA, 389 bp, Zea Mays
tttgagtggaaaatattgatgagattgtggtaggtccataactttcgtaaaaagatgtatataaaatcatagtgatatctatatttgggtagatgaaagatgagactttggtggcttccaactagtggtggagcacaaggtaaaatcaaggggggataattacagtagaagcatctgctgctgttttttctaggatccagagatacagtaaaaatcaagagtgccgtccaaaagtgcatacaagagaagattgatgtaatggatgagctcataggcttgcgtgttttagacatattcagaggactttcatgtctacaagtcaacacaagatttatgtgatgagagagctgggagaaaaaatgcagagatttgtgccatgcatgttcggg

SEQ ID NO: 88500 - DNA, 996 bp, Zea Mays
atccaacttcatatgcatatcggctatagaattggtacgtcttgtccacattagtaaatgtcataccgaccttcggtaccaatcgttgatctatactatcatcctattgaattaatggagtcatcatgcattgcacatatacaaaataattttatagcatgctgaatttctaggacttcataacttgcacggacagtatatcaaatatgcacaaattctgacattatcttactgaacttacatggctttggagaatgtggtgtgtcctgctcatgatcaccaattgtcctcatgggtatccggtgagttgctcccaccaaacttggatgaactgtgttgctgtcatcaaggaatcatggcgccggtaacgcagccagtggagttacagcatgacgaccatcagacccacaaggtaacgtcgtcgctgtagcctctccacactgcaccgatccactagtcgtcgccatcgtgtataccctacctctcctaggtcatcaaacaaagcggcgacggtgcgtagcccagtttttttggagttatcctactatattcgccaaaaccgtccttgtcgatattcatggcatgttccaaatatcccgcacgattcgcatgttgcgagatttccgtgagtcgacacggttacgattacctgccaattgtgttacaacaccataaacacggctcaaccccacgcgcgaccccaccacgatcccagtgaacaagcatggcacccccactacccgacctcaccacacacgacgtgtcagatggatatgcagctgttatcgacaaaaaatacaagcataaacgccgaaccacaccccgaccgcgtcccgaccacaccactatgccaatttacgcagctgttgccgtcaaaatacgcatgcataaacgcgtgaccccaccatgatcccggtgcactcgcgcggcacccccactatgcccatttacgcagccgtttccgtcaaaatccatatgcataaatgcggaaaaacc

SEQ ID NO: 88501 - DNA, 742 bp, Zea Mays
aaattctctaagtctagaagaaaaagaaaaagataaagtatgaatagtaacgggctcaatctaagcccgagccggcccaagacaggcgaaacgcgcccgcggtgtccattttgcacaggggtccctggtcatttgaaataccagtaaagaatcctctccactgtttctctgtcttactgacatctgcacaaaggcccctcccctttctgtttcttcacaattcgagatccccgaccgtgggcggcggagcagcaactccggcgaacccataccggccggaaaacgcaatggctatgcttccccgttgcacaatacctaattctacccctaacaaccatttcccctcactcaatttcactagcgaggctctaaatcattcggtccacggagacagcgcagacaacggaagaacatacatgttcccggtgatctagggcaacttaactcaatcgaacaggtcaagaggcatcaggagaacctaaggatgctgaaacaagagagcagggagcacgaacagacctggagcacgctgaccacggtgagatcactttgcgcggtgctcgagattgatttggaggaaatatgaaattggcgagctcgggtgagcaattggaggcacgacttggtggctttggtgcttgactaccttacggacccgaaggcacgttcaatttataggcttcgggggcagtggcgcgtgaatttggaatggcgcggtggcggccggagaaggagagttgca

SEQ ID NO: 88502 - DNA, 350 bp, Zea Mays
tggacaatggagcgcaattcaactctaaagctttccgtattttctgtgatcaaatcagaacaaatatacattttgcatcagtaaggcatccagaatctagtggcctggtggaacgaacaaatggtgtcatccttatagggatgatgaggtcaatcttcaatctgccgaagggcaagtggccagatgagttggtaaaagtggtatggaattacaacacttcagtttcaagatcaacaagctttaccccaatcaagctcctgtttggggacgaaacaataactctagagaggcaaaaacagggtcaatatgaaccttagcttcggcagatggtgaagattcttgtagaattt

SEQ ID NO: 88503 - DNA, 883 bp, Zea Mays
ttagggttttccagggtccttattagggtttttggtatttcaagggtgtgaatgccacttagatccatccttagtaatattttatgatcattttacttaagctttagggttttctctatttgggtcttgttttacccttcagatccctgttcagggttaagtaccctacaccagggttctatttgcaaaatgtcataacaatacaacttgtttgaaatttttgcctagtgaatgcactctaagtgtgtcaaacatatgaaatgctaatgctgatgatgttatgctcaggtgttattaacagtaacaccaggggtgttacatccttccccccataaaagaatctcttcccgagattgaaagtcctagggtaagtaatggaaaaggaaacacgtcatatcttaatttccttattcttggtacatggcaggggtggtttggggctcactcctttacaacaattgtatacactttacaaactacatgaggctaaaaatcctgggaaattcttttctaaaaagtcctgagtttcccatgtagcctcatcttcagaatgttggttccactgtatcttgtaaaacttgagagtttttcttcgggtaattctgtccttttgatccaagacttgaatagggtgctcagaatatggcaagtctggttctagggcaacatccgttacgtcaacggttcgatcgggaacccgaagacaattctgcaattgagacacgtggaacacattatgtactgcagacaaggtttcgggtaactgaagtcggtatgccactggtccacactgttcaagtatatagggaatggaccaatgtaccggggtgcaagcttccctttaactccgaaacgcgatacacccttcgtcggtgaaactttc

SEQ ID NO: 88504 - DNA, 629 bp, Zea Mays
tggagaaccctacctagtgcatctctttgtgagattgagtgattagcatgtaatcaagtgatagagagaggtgtattagctggagttcttgtgcttagagcaagagagctatgtaaagagctaaaagagctagagtaagagcttagaagagcatagcaacttgattaaagtatgtgggcttcaaccattggctttaggcattcaccggagagcttccaaggtgtggaaattatcaggattgttgtaaaggaacaagaaggtagtgaaagtcttagtttatcacaagtggtgataatcttgagcaaaggaggagtgagttgaaaaagactccgagccaattagatacctccaacgtggagtagggaaatatttgaggcttcgctgaaccacgagataaattatgtgtcttctcacgttcatgcatgatcttgacgtatcctaaatctccttcgcgttctccaagccattcaccttgttgtattcttccctacacaaagaggcaagtaatatcgtggtggcttgagtgttgtggtggatgatttgttctgcctccaccggattgtagtccacatcgttgttatctagtgtctccattcctacctcaactaatgccaaatacttggatcgtg

SEQ ID NO: 88505 - DNA, 639 bp, Zea Mays
ccgtgatccatgaaactaccacttgccaaatccgattacactaccatctgcgcctctactttctgctcgagttcgggtgaagattgatatcgccatccgcgcgtgttggcgacagtctcggacgattggagtcattcggtgcctattgattcctcgctggagttggcgctcggccgcatacccgccctgtgccgtgaccagccctcgatgtccgcacaagccgtaggcatgacacgctgtacactttcgcccagtcctatttaccgcgttgtgccagtccaatccatggattggtcaccagggagggagacgccaatcaccggtgagcgcgcctccgcgagcgacctgggccttttgccgctcggcctcggtcggggaagaagttccctagccgcagattcaaggatgagcggtggggattaggcgacacgcgtcccttttcgctaaattcatctcggcagtaggatcgtgatcggagggttagggtcggatctcgggatcgtaggatgttggccattggatctagatccaatagctctcgctgtgtaccgtttcgttaaagacctagatctaatcccgcgcgtccgtttggatcgggcggctcacgggagccgataccgcttcacgtggccaacttgc

SEQ ID NO: 88506 - DNA, 522 bp, Zea Mays
gccaattccaatgctaggtaaattagatgacatcgtcgtgacaaaaatgtccatgacatatcattttcatgcaaaattgcagaaatagaacggaggaaaaacacaacaaatcttctgctagtgattcaaccaatttagagaacacactcgaagcactgctactctagccacccacagatcaagtagaacccttgagtagaagagcaactgtggcttttttacaaatagtgacatatcaagctcaaaattggagtgaagatcctctaaaataaatgggtcaaaccatcccaaatctaatacctctacctacacagtgtagaaggtttgatcatatggatgagcgtacctaggagccagaccacctttcctgttttacaataggaaagcaaaacaataatctcagcaagagcttggaattacataaggatattttcaatagaagctgtacataattcttactctgatttgatctcgacggcaaggcggagcggctgtagcaccagctcgggaggcccgtcgagc

SEQ ID NO: 88507 - DNA, 825 bp, Zea Mays
atttggtggaagagtttattgcgtgcggggtgtggccgcttgctcatggatgggatttgggtgcagtaaagctacgctcgatgcccttcttggataatcggatagtgttgagccccgccttcgccatcgagctacgggggcgagatgcggctgctttgttagggaggtggaagtggaggtagtgagaattattggaaagtactcagcgaagacaaaactgacgagaagttgggatatacggggttcaaatgttaggctgaatcgtgtttttgaattgaatgacctttggtatggcccatatcctaaggagggctccactgatgctggggatgatcgaggaaagaaaaagatggtgacccgggcaggcgaaggctgcttgaaggggaaagatgtagttgtggcaacgagaaagagaaaagttgaggtgaaaggtatgatgaaggcattgaggattttgagggcctcgaggggttttgttgaggagttggcggagacgtgtgctgagcctatgtaggtcatgactttgcccgacctccggcaatcatcttcacgaatgttgaaggtgatcgagggtaagtggcatagaaaagaccctgtctccctggcctccagcgaagattactttacgccccgtttggcaaagggacctaccacaactactgtcatgcctcctccagtggtgcctatggcggtagccaggagggtgccctctccttcgcgggctgacgaggtggtaggggtgaagggggccgagactggagaggccgacgaggagttgtctgtggatgactacatgattgaagatgttggcatgttcgacactaa

SEQ ID NO: 88508 - DNA, 478 bp, Zea Mays
ccacacggatgtcctgcacccgcaaggcagcctcaccctccaccaccatggagaaaaaaattcccgacttcctggaccaatgatctgaaagcaattgcaacaacaaggataacgtaaacattggagaacttcccaagaataccacctccctacccaacggcgcctgcaacaacattgtcttccaaaaacaggatataactgcgcgatactgagataaccaatccatacccaagataacatcaaatgcccctaaggaaatcaccacaagattagctgaaaagaccttgtcagcaagaatgatggaacaaccctgacaaactgaacaactactaatggagccattagcagaactaaccataattgggtgacccaacctctgcaccgaaagactagcctgcgacacaaaattcttcgcaacaaacgaatagctagcgctagagtcaaaaagagcatgggccacaaacagatcaactaagat

SEQ ID NO: 88509 - DNA, 383 bp, Zea Mays
gtttcttccttctgaaggtgacgctcaatgctcccaccctctccctctgttatcccttctcatattcccttcccgaagtcacggaggtcttggcatcgaccttgtcgaacgccgatttgatggtcagaatatccgtcacgcaccgtccggtagtcggcgtgccacttactcccactgttcgcccatccgtgtcctgcgccgtctattcaccttgcctcgctcgctccttccggccgttggcgtctcacctactaccgtcgtccgcccctcccgtcccgtgcgcagccatttctcagtgggccacaggatcgtgcttcctcgcctcgtgcacacatcggtgtgcaacttgctactgtcgtccgtctttccatccccgttccgcc

SEQ ID NO: 88510 - DNA, 454 bp, Zea Mays
cgctggctccagccaaaatgatttggtgtatctgaagtatacctttcgatacaggagccagtttgatgaaccaaatgatgactgactagatgctatagaggcgactagtgttgagctgcttggagcatattcaaaggccgaagttgaagccatgaaaactgccttcggagctcggggcaaatagaggttgaacagggtattcgatgtcatcaggtttgtgtatccagactactgttatccttcgcgaaaccaagggaagaagaggaaagttgctgccttggtgacttcaagtacgtcgaggtcaaaaaaggttaaagtttcgacgcgtcaacccaggtgcattgaagctgccgacatgacgaagctaatcgagggggccgctcctatctctgagccaagtcgctctgtgcttgtcgaagctaagacaaatgcgactgaagagccaaaagtggag

SEQ ID NO: 88511 - DNA, 747 bp, Zea Mays
caggacgaccattcgcttcgggggtattcatttcatcgttaataaagagggagatatggtgagggccatggaattgaagccttgtctcccttggcaagcgacttgcccgacgtagctgtaagtctcggtgacctctaacttgacccacctcaggagtaccatgagccgcagggctcgccactacctgatcgtactgtggtagtgggagtactagaccacgtttgggagtcattcttggatatcctcttatgagggttggaagatggactcaagtcctacctagtgaggcaagttgcgaccctggttaggaatgccttgcagccaataccactagagatcacttccccgacgtggggagcccaggcgagaactggcccaacatcatggagcacaccgcggtgtccaccttgctcagctcaagctgcctcccaaagagctatcgtaggccccgagcctctcgcggagtgagcagcaccccacgacaaaaagacaaggaagcctacggaggcatagggtgacaacatgccatgacgacaaaggcttgtcctttcctggtttatggcaggggcgtagctctgcgtttccctcgggcaagccaaaacgtcgctgctgctgcgacacttttggataagctccccaaggcgggaacaccaagcgaaaagaagacccaccaagagagccgggacctcctctgtcatgttgtgcagcaacaagccaagagctccatgtcccgacgttgtgaaccag

SEQ ID NO: 88512 - DNA, 731 bp, Zea Mays
cgtcgcccagcctcattgccgttgaaccgagggtaggtcgagtcacgtcggtctcgcagccgcctctgcgatttgtcgtggttttcgttgctcggatctctgcgggtgtccgcgtgggtctaccagaagctgggtaagcggctcgggtcttcggcgggttgcgatttgggccgaggaaatccgccaattgctcgccggagggagtgcttcaccaccgcgtcgtacttcctcgtggtcggactcctccgtcgcgctggtcatccgtggacgactcggcctgcacatcttgcggcggtaaggttatggccttggaattcgccgtcattcctatgctgcgtagattcgggtcgcgctccaaacggtagcttagtgctccgccgattgccgctcgtcgggcctgaccaaggcttgatcgtcgcgcgagctcagggtagaagaaggtgttggcgccgctaatctcaagatgaacggccaggggcgaattgtgctgagagaagttgagaaccctagatctttgattcaatggtcgtgatctcttatcggcttataacattaggagaggatctgggccgttgatcgcgtatcctgcggcttggattgcataccggttcagcgaatacaacttctaatctgggccgtctgttgtggatcgggtggccgatattaagcgataccccttcgacctgcacttttactaaagagaccccaaactttacacgaatcaacccgca

SEQ ID NO: 88513 - DNA, 542 bp, Zea Mays
cctggctcctcatggcccaaataaaaatccccattctgatgatagcctcaggggtgagttgatgaaggaatatttcaaaagtcttcaaaacttcaactaacaatttatctaaagggaactaaagtcccgctctcatgaagcttctgtaaacaactacttcatcagcgtcaggcaaaggggcactgctatctcccccagccctcacaatagaaatatcgcggaagtaccttcccttcattgcatcaatttgactttgtttgatggttgatttcccgaagatagtatgacttggtcgccatggccaatcttcggcacctttgttcccactctctatgtcaaaatcttcattgtcactggaatttttagatattctagcaagtgtctcacgcacaatcttttctgcgttggtctcttccataactttgtaaaacccggaaagagctgggtcgtcagtcttcttctcaccagccatcaagtcttgttggaatgccgaagctcacaattcaatcaaaactcggaagagcaagaaaatttagaacgat

SEQ ID NO: 88514 - DNA, 396 bp, Zea Mays
gttggccccacctgtacgccacaatcccacgttgtttgtttttcctttcttgcatgcgtgaggccgtgctttctttcctgcaccacggaaaaggagaacaggcccacatccactccatccgcatgcacgtcgcattcaacctaaaagccaaatgcgcatcagaaaatggtcttccccgcatgcatgtccatgtgctaatttttctattagttattagctaggaaggatcctttatgatgaccctctttgtggtcctcattgtggccattttctagccatagaatcgtgccacatcgtcgttaatccaagattaataaatatttgattacttttgagttataaacctgattttatattcgtattagcgtagtctacatgttaatactaatgtttcac

SEQ ID NO: 88515 - DNA, 370 bp, Zea Mays
gagagcctgatcaaagttagctatggacaattcctgcagaccaacgagagtagacaaagctggagaaggaatatcgctactctccccactgactatgtaacaccgactattcttccgaattaagggaatctcctcttcttccacttcgtcctcgtcaacaatacgaacaatacccccattggggtcagctctggcaggattacacccattgggttcagctcgagcaagatcacatccagtgggttcagcatcatcgaggtcacacccattggggtcagcgtcagcagggtcacacccattgggatcaactccagtagaaagttccactggcacttcttcagcagcaggagcagaagggccagcttcctgg

SEQ ID NO: 88516 - DNA, 471 bp, Zea Mays
caacataccttggtcaaggcatactctatcactttcatcacacaaagataccaatttgaatatcaaatgaaagattgacttaatctaacaatgcatgcctcaagaagtataacattttacgagcaacctagacatgcttcatacttgacaatcattgcaccacatatactaattgaaaaacaacacgatcatgcatataaagcgcaaagtctaagcacatcataattaagaaggttccttagatacaccaaaagaatcaacattataaagaaggagcacctaagccaagatactaccaattcagaggcaaaccatagctgtgatcacaattaatggaacttcaagattttcaatgaaattgcatagttccattctccatacctttgccttttcctgaattgctatgagagcaccagttgttaccacaaaccaactgaaggttccctattatttatgcacttcatagctcga

SEQ ID NO: 88517 - DNA, 544 bp, Zea Mays
gaggaattgatctacccactaatccacataacctgagggtaattagacaacaacaagaagaagggatgaatcctccaaatcctccacccgctggaactgatctagtagttgcagcttagatgcagatgatgcaacagatggctgatacaatggcagagatgcatgcgcagatgaggcaggaatgccaagagatgtgtcaggaaaggcaagatatgcgagagcagatgtgtcaagagagtatggggcgacagcagcaagtcccattgccaccgcctccaccaccacttccaccctgggacaagcaccaggaatttatgagccacaagccgcctaccttcaccagttctctagatcctctgaacgccgatgactggttgaagtcagtggagaagatgctaaacattgcccaatgctctgaccgggagaaggttctttatgcttctgatcgtctgactggttctgctgctgattggtgggattcttatgttgctgcccatgatgctgctgacactattacttgggcgaaattcaccacacagtttag

SEQ ID NO: 88518 - DNA, 380 bp, Zea Mays
gaaacccatatctctcaaatgtttagaccaaacatggtgattaagcatcctatggaaagatgaagaaacatactacaaaacattctagataagtgaagcctgattcagcctccaactaatttaaaatgcctcctgaaaccaaacaacacattatcaacaataaaaaacaatataaaatgaaacccaagtcattggcaggtgcaatcaacactaggattttccactaccaaactgggatgcaactccacaaagtctttaaataacactctaccaaataggttagaacactaagcacaacaatcaatgaattcaatagcctcatttgttaatgccactaaggtcaaacatccatgtatcgacaatgtatgaaacacctgaca

SEQ ID NO: 88519 - DNA, 474 bp, Zea Mays
gtcaagcaggccaatttagactaattcttaatgggtagctatatagcagcaatgctcggcttccctatgacctccctatcacgagaggttctgatccaaggtaaccagacaattactgaatacatgagcaagatgaggtctcttgcagatgatatggcttccgctgacaagccaattaaacatgaggaattggtgtcatatatcctagcgggattgggtattgattttaaccccgtcgcgactgtcgtggccacttagattgaaccaatttcagttggcgaattattctcgcaattgctgagttttgagggccgcatggatctcttgcaaggtggagcacagggttctgccaatgttgtctgtcttggtcgtggcggaactggcgctactttgtgtggtcgtggtgcaccacgtgaatggtctggcgacccacgcggtcgtggacctttgctaggaagatgtggaccacctgat

SEQ ID NO: 88520 - DNA, 1138 bp, Zea Mays
cttttctacattggaagtcggcttcgacaaagtcaacttaggcagtttccagtccactcaaactgctaggattcggaccaccgcaaaaatgatcacacttacctcttcgtaggcatatcatgcccatctcaaagctttgagggcttcgtcatcatcaaattctgctctagagctacccaaggacgtgccttcaaagccaagctacattgaaattggtcgttccactttgagggagaaatacctccaatttatgaaaaaaaaacttggttatttcagcagcaaagtcaatgtgcgcctccctggaaatgaggcgaccccgataccgagaaaggacgaagttgttgtgtataacacttttttcaaggaagggctttggcttccaatgtacaagatgaatgtgaagatactacaacgctataaggtatatatgcaacaattgactctgaatgccatagttttccttattgttttcatttgggctatacgaagctagggggtcacataaatgctgatgttttttgtagggtgcatgatttgcactatcaaacaaaggccaagggtaagacatgccttcataataacttcggatgctacaacttcgcgtatcataaggatacaactaggtcggtcctcgcatatcgaaccaggtacatggggtctggacaaaagagtgggtttactccaaagttaattctgaagaacacgaagacttcaagagcatgtctatgagtcctttaaagattatcttcggtctgaaacggtagaagtgcaaactaaacgaagctcctgaagaatgttacaatgcttttcatataattgttaagaaaattaggtctcaagatttgattcaagaggcacttgcctataatatttatccaacttggactgggtggaaactaccgaatgaggtgaagtcggaggatgaagaacttgttacgctagcttttgatttcaaggaacaatcttcatacaaagctccttcggttggatgactcagaatgatagaggaaaaatgcaatgagatacgtgggaattaccttaccatagagcacaaagatatgtattctatctttggaagtcgggggaagcttcagcttaataaagtcatgaatgctattgggtttgaatacccagatta

SEQ ID NO: 88521 - DNA, 335 bp, Zea Mays
ttcttttaccattctagcagcttgcctgctcagaacactaacaatccttttccttttttgtccttcggcacccttgttcaatcgctcataatcgggatattcgaagtttagggcatccatcacacgattcaaccttcgcttcggccgggtgccgaaggctgcagtcatcagctgatcttctttttagtgtaattttccaaaattttgttgcacatggtttctatcatttctaaccattcttgacatggccctttgaactgtttctcgaatttgaacttataaggtagtcgcacaagttccttcttctcctttatcccctttagcttcggcatgtt

SEQ ID NO: 88522 - DNA, 696 bp, Zea Mays
attcgaggtcctctatggccacaagcccattcactttggattatctgtcacagaagtgacggtcctctccgacctatcatcttggctaaaagaacgctccctaatgcaagccttagtgtgtcaacacatctgttgcatgcttagcaacaaatgaagaagtaggtcgataaattccacttcgattgttcatttgccgtcgacgaccacatttatcttaaacttcagccctattttcatttttcactctctaactgctcctgtcagaaattggcattcaaattctatggccctttcctatcctcgagaagattggtgttgtcgcctacaaactcgcattaccaccttcttcttcaatgcaccttgtgtttcatatctcttagcttaaggcgcaaaacaccgaccccatcaagtgagccatgtattacctgatctattggctccattgcaggttcctgaaaccattctacaggagaagatgtcatcccatggtgcatctttcgtgcatctagtgctggtaaagtggtcgtgcatgcatttgaatcggctacctaggaggacactaacagttatgctaagccatccctcatgcacctgcttgggggcaagcaggatctaaatgggcggaatgttactgtccctgcttctataaccatcccagtagtggagctgggcaagcaggatcaaaaagtgacactt

SEQ ID NO: 88523 - DNA, 710 bp, Zea Mays
taagtacatagcattggcattttcatttgcaagcatctcaaaagaatttaattttctcatagcaatatgatatctctcctcacgctcacttctagtcccttcatgtagagcacatatattcatccacaaatcatgagcatttcatggtttctaactctattaaagacatctttgcaaaggcctctaaaaagagtgtttttggtcttagcattccatttctcatagttaaactcttctcctacaagattggcgggatctctaggttcggggaacccttgtgtggcggctttgtagacaccaatgtctatagcctctaaataatcttccatacgaattttccaatatggaaaatcgtcaccataaaaaacgggaggaggtccatccccgccgaacatcgctactctagcggttaagctaatctaagagcaacaaggttctaataccaattgaaaggatcacgatgcccaagagggggtgaattgggattttctaaaaataaacaataattaaaccctaagcaagagcccaacttcaccccaacaactagcaataagataatactactacaaatacaacaatactaagacaatgcttcaactacttgctaaacaaatacacaaggtaaaatgcttgaattaagtgcggaatgtaaagcaaagtttaaaagactcctccaatttttctcgatgtatcgaagagttggcactctc

SEQ ID NO: 88524 - DNA, 652 bp, Zea Mays
ctatatttaagttccaaaagcttctcaagtggttcgtttgttcttaacaagtagttttgtttagaattggtgccaatatcaccatctgaaaatacaaggaaactaacttgaatcgtttgtccttacaaatgctctgtagccaaggtataccattaaaagttcagtttttttagtatggattattctttctagaatttagtgttcacttatttagttcacattattgggggaaacaaaatgaagagagacggattagattacaggattaaatatggagacaaaaggacacctgtcccatctcattatcgctattagtgaccagtacagcatctcgaggctcctctatatcttgtgtcacccccggtctgccaataaataagaaaacatagccgctaaatgagtttaaatttatagaatgcttcctctatgtaccttgaaactcatccttggaaagcaaatcgggtgttgtataccatctccttaactttgcccctatcaagatttgaaacgaacaactcagtcctggttcactctgccacattgacaatgtaactgatttctcttcaagaatttaaaatcccactatgctgattcagatgccacaaaaatgaatctgtctgcaccttcctgttgatcatctgctctctttttt

SEQ ID NO: 88525 - DNA, 677 bp, Zea Mays
gggaaaactcaaaggttcccaagactcagtaaacagtcaaaatggactgcgggttcattatctatttcttcaagggcttatttgtaaacatggctcagcgaagaggtacggtgtgatctgggccatcggatcatctttcaagtgcccagattagatcggattagttatgaacccgcacacatcctaagccactggatctaacatcaagggttatgatttaaagaatcgcaatccaatcgaatccacaccaccaacatccaacggtcctacttaacatgagcgaagagatactcgatcgtctaatcgtagccgtcaatcaagagatcaacgcacaaggttgtttcacctccgcccaagcaccccagcgtagaccgagcggcggtgcagtagcaaccacggtggcggccatggccggcgaatagccaaatcccgccagtgcgcacgaaactcaactccgactggttccaaacctagaacacgcggtaaagaaagggtaggaagggttctcaccgcgtgacgcacaacaggatgaccgtgcgacgaagcagtgcggaatcgcggcatgagctcgcatcggtgcgcaatcccgggtcaccaggtcgtcaatcccacaaggcaaagccgcaatccatccccggagctgcgcagtgaagcttcgatgacagagcccaagcgca

SEQ ID NO: 88526 - DNA, 1266 bp, Zea Mays
cgcgattacaccgtctgaatcggttgtgcgcctttttgtgcatgcttcctttttttctacccgcgattcagtacgcagtacagctatcgaaaaccatgaccttttgtctgcctgaagtcttatttggcttttgattgtgttgtgcagaactgagaaagaatataaagtgcaactaaatctggggaactgttgcctgtaattttatgtacatcagcaaatatacttgtcgatattatgtacgaagtatgctgcaaattgcaaccggtggccattgggactttgagaagaaagctattacgaactacacgaggacagtttgcgaatacaaaattccaacaattttcctagcttaagagtcagtttggataccaagggctaatcagtttcgtgcttcataattttgttagaaacacgactcaagtttcgtcacataccctgtaaagctagtggcgctcctgcttctttacacagaccaatcattcctctgattcttcccaactagaagtctggatgtgcaacgctgtgcaagtttacaaatgcagtgtcaagtgcggcgcatgggaactgaatctgcagcgaatgtgcaagaaatacacggcatcatatttcacagttcacaccgagcaacatttaatttctttttcctgttaacttacactaccgctgtctgtattttcattgaattactgtcaagaacaaactgcaactctagcagtttgagatgtgaaaccacccgatctgtaaacatgttgacagaaacctagaacccaaaaccatgtttttaaaaaccaattaaatcaatatttactctgctcatttatgtgccattttatctggcgtctgcttggtggttgggccttcaatagtgatattttggccatagggacggtccctcctgcatgacagaatgctttccttagcttgacagttagtcggagatcgacgcgacctgattgacctcgaaaagccttctgctgctgtcggagggacgcatatcctgcggcgatgccgacatgaccttaataattgggaagccatgcaagggctgcagaataaggacatgtacccgtggcaaaaaggaagcttctcctgctcttcctcggcaaggaaaagaggggaaggtggcactgcagattctgaacaggaatcaaccgcacggctcggctttgtatgttactactttttctgggctctgtgtgctgctgctgagaccatgttctcgaggatcaaatcacaggctcagaggtggaacaggcgaactgattt

SEQ ID NO: 88527 - DNA, 578 bp, Zea Mays
ctctctatctatcatgcacatgtcctaaaataggacaactaaaaccaactaaagtcagcaacatatgtatgatttgaaactcttctctgatcttatatgaattagcggtgctcctgcttttttttcaaaaaaaaggactttgacatgctatcgatgtatggccgagcatgcccttgtagtagttatttggtagcatgccttatatgaccaagtagtaggtgtacatgtagttgtacaaaacttcttgtaatagtgtaaaccatatatgcaagcatatggagcagctgcatccttagatcaagcagcatcactagtgttcatgtgtgtgctctctgatctcccctttacttttacccccagctgtgttagtgggtaaattaacaaagctggtactaaagccacagttgggcggtcatcggcattgttaggccaacaccctctcccccgtcaaccaccgcaacgataaccgtttgtggtgcataggacggtaatggaggttggaggaggaagtgcccagtaccccacgcttacccgcatcaactatggtgaccagtcggtgttcatgaaggtgatactcc

SEQ ID NO: 88528 - DNA, 532 bp, Zea Mays
acgcgcagacacgacggtgccgcccatcctgcggttccgccgccatgtcgagccttgccctatttgccacccctcatccttgactaaatggtgctacttgatcccgaggccacggcgatttgcgtcgagccataactactactctcgatagttgcgaacaccgtgcccacggattcccgcgttccgcagcggtgtcatgaagtccggcaaggaattcccccctcatcggagcacctaccctctaatccaccagtgctacgtgttgaggacataaacacgagaggaacagtggtgaattaccggtgaatcgatcggagataaaccctggccgtgagagcaagcggcacggctgcagtggctaactccagtgagcaatccgaaggcgcgtgattccattctggggttgaggaggtcatgagcgtcttcggtgagcacccacagccccaatcaccgagatcaatggcgtcttcacccacgtatttgatggctgcgctgcgcaccttcctctcaccagccgcccgagcggtctcgc

SEQ ID NO: 88529 - DNA, 626 bp, Zea Mays
taacatcctaggtgttacccaaggccctggcccaatacatgcacctatggcctattatcacatgtgttaaagtgggaaaaaggggcaccaaaactttagaaaccatggcttaattaagtaatgatcatgataggaggaatgccctagcctttcatgtatcttcaccttggaaaaagatgctaaaaccctagaaccctagagccctagaagccctagccattagacccccaagcattggattagtggaaaaactatgcaaatgaccatttcatgacttaaaccctttgccaaagttgaagtacatttctatatctacaagaaagagtaagggaattattccaaaaaggtcccacaaaacccccaaattcagccccaaatggagagaactatagaggaaccccaaattttctctaagtcaaaattcagccctcttctaaagatcagagatgttcacttagttgctggtgccaaatccataaggttcaattgaaaaaaggagccaaattacccaagtcacacccctgaaaattttgaaaccaaaccagaaccgtttgacaaggtttgacaccagttttgtcatgggttgaacagtgccgacacccctgacttggcgccaccatatctcc

SEQ ID NO: 88530 - DNA, 450 bp, Zea Mays
aataaagaagtcaccaagtatatacttaaaagtgtcatgatcaaaacaattgagtctttgaaaaggtaagaatgtgcaaccctaattaaaaaccctaagtgagccccatgagcaaaattgaagaaaataagagaaagggaatgaaaagtttaaaattttgacttgagccaattatataagttaaagtatatttattgagcaacaagaaaggttgagaaagcttagccaaaataactcaaataaatccccaaatcagcccttgatctatgaacccttagagaaattcagatttctgaatttctgaatttcagacctcttcccaaagatcctctgtgttctctgcttttcgaaactcaaagccaggagatccaaatatcaaagtcgtgccaaaatcccttgaacacgtcctggaaaagtttgaactcaaaccaaattcatttggcatggttt

SEQ ID NO: 88531 - DNA, 1297 bp, Zea Mays
gatgtcggcatcacagaagaattgctcggaggtcgttgaagcttcttggaggatagctcgtacaaagacattgtcacgggacccccgatagaagtccccgatcacatctgcttcagtgatgtcgaggatgtgattcctcattgatagaaaacacttgaggaatgagcggagggactcgtcattcttgcgcctgacaggtttgaggtcccagggttgtgcaggcttgtcggggagtgataggaagttagcgacgaactggccgtagaagtcagcctagttgtcaacgcactggtgagggagatagcgaagccattagagcgcatcttgcctcagcataatcggaagatacaccgtcatgacggcctctatcacccatgcagcctgtgcagatgtagagtaaatgtccagccaaccacctggatcttgtttggcctcatacttgtcgacgttggagaccttgaaatttggtggccactagaccgcatgcacccggggggtgaaggctgagaccccaaacacgccctaggctctctgtttcttgccccgagcatggtcgcaatgacggtccagcggcagcgactaatgttgtagatcttgtagttgcactcggagcgattgatgtggctccgagctgttcgttaaggcagcagcggagtccactcggcccaaagctccctgcaatggggcgccatgatcccagtcgtactcctatcggtgccttagctcctcctcgtgccgccgtaagcgcgacgcctcgatgttgctccgtgcatcacattgtctattgaggtggtggcgtatatcatcccccggatgagccagtggaagaagatgatttgctgctcgagtgatgatcagtcggtaacgctccatgtctggcgtgcgaggtaagtcgtcgcaatccaggccagtgcaccgtagacctggcttggactgtacatggcccgagtgaactgaggtcgtagattgcgggggagaggcagatgatcgtgtgggagcctagtgttgtgctcagccacctcgtgctctcgcgccttggcggtgtggcagttttgatggtgggcattcctttgtatgtaaacccccactcattgaaagactcatcatcctcggatgtctcatcctgggaaacatgctgggttggcacctgctccatggcggcgtggtgaagccagacattgtggtgtcggttctggtagaggcgtgtagatgaagaggatgtcggggtagtagagcggaggatccagctccacaggtttagtaactaccgccatgggctgagcaatcatggcggcgg

SEQ ID NO: 88532 - DNA, 778 bp, Zea Mays
gcggtatagcttaattggccgagccgacaagcatcacaagcaatcgtgggtgttgaaacacggacaaggagggcgagagcggacctagaggtggctggccacggcggcgcgcacaacagatttgggggaaacacgaaattagggtgctacggtggacgatcgggagcgaggagtggttcgctgggtccgtaacgagtaggtggaacaggaggtgcctccaatttatagactccagccaagcttatcacgaattttggattaagatcgaggttaccgtggccaggatattttacggtggcttgctcactgtggcgcgcgagagggaattggtccagggacgataaccagttgcttgccacaacccttacaacgcggaggagatatcattgcgtgtcacgaccagagaaatggtgagctccggtgatgccaacgcgactgaccgtggccatacacgatggccggtctggctagtgactgggttcacccctccctagatattttcaccccgtcccggtgttatctatctctcccgtggaagatcacccaggcgagcgtgaattgcggcgaaagatcaccggcattaggttcatggcaccggagatctttccggtcactgtgccatggctatcttcgtcagtccctctgtccgagcaacttgcagggccttgtcctcaattttttgtgtggcaactcactctcctgcctgtatcaaagttgttgtccaatgtactagctacaactttgttacaaagaccttgctcaaacatccactaaatcc

SEQ ID NO: 88533 - DNA, 670 bp, Zea Mays
aaaggatcttctctcctatacccgatattaacaaacccttcttctcttgctaccagatggaaggctcctttgtcattaggacatcctactgctcagaggtggaaggattccctcatcttttacagagttgcgcgcttcgcatggggatccgcaagaagccgtagtacgtctggaaggaatacagcgagaatggaaatgaaaaatgctctatggcagtctacctgggagaaagccaaaactacccaaatcaccctcccttccaagtcaccgccactggacaccgcttcccagacacttgccaaaatgtttcccaaaaagccctccgccagctatgccaaaactacagtagggaagtctccgagacatcccttcgttactttccacccagcaacaaaaatacccctacctggaggaaaatacttcaggccttgtcagggagagatcctaatgaggatgaccccaccatagtctacatggtcggatatctccacacccttgacaaccactatgacgaccttttctcccactgcacccacctaaattcctgggtggaaagcctagagcaacaaatcaagaaattaaaagaggaaaaggcgtccctccaagaaagtctcgaaatagcagaaggcgaagaagccaacactcgtgaggcctaccaaaccctgaagat

SEQ ID NO: 88534 - DNA, 478 bp, Zea Mays
aaagtgcatggtaatttagcctgtccatcatccgggatggtgaaaagaagatgggtcaccgaccttgcggttttgtagccatcctgtcttcaacggtgttcatgggagggttggcggtgtcatgtgtttctctattggttcttgtggccaggccgggctcaggcgagacttctctcgaggccgaggtcgggtcagcgcatgggtacgcaaccatgcctagagtggttggtagagtaatcaaagtggtctcctgcgggattcgtggaagagttggtggcatttaatgcgcccctaccagggcagttggccgaggccgagctcgggccaggcagagtttcctcctgaggctgaggccatggccagtcattacatgtcctgcctggagttgttgaaacagtgtccggagcgagggaatagtgcctggtattcgcgcctgtgcgtcatcgtgggtggtgaaagtatatttgactacggtcct

SEQ ID NO: 88535 - DNA, 801 bp, Zea Mays
gaaaatgcccccacagtgtccttcccattgaaaaacttggtggcaatgtcgaggaggtcggcggtagtttttggtcggccatagccgagctcgtgcacgagtgcctcaattgtggtgccgtaggtgaatgcacttacgacgctgacgtctgtggcattgggaagctcattccttttctaggaaaatatgtagatgtaatcccggagactctccctgctcttctggacacacctcttgaggtcccatgagctcctagggtgtttgtacgtgccctgaaagttgttgacgaaggcctttttgaggttggacgagtcgttaatggtgttgctcagcaagtgctcagaccatgccatgtgccccatccgtgaggtggatgaacaagaacaatatgatcaggggatcatccttgatccctggcatgcgatggcgaggcgatagtattccaaccgaacactaggattggttgtctcgtcttatttggtgatgttggtggatgtgtgcaccctggcgggaaatattgccttctagatcacgcaccggaaggcatgtggtcctagcctagttggactagagattcactcgcgccttcctttgggcgcacgtgactgctccacctcatcccgctcccgatgtcgattgttgaagatgtggcgggcgtagtggatgtcaccgaggtgggttctcatggggacccgtgactttatagagtgggagggttgtgcctccgtgctctatgctgatgtggagcgggtgttgagtccatccttgccggcagctaactaccggtcaatcttggtctgc

SEQ ID NO: 88536 - DNA, 324 bp, Zea Mays
attaagtgacacaaccctaaactttcatatgactactatatagcctgtgttacacatgatcccgaggagatgatcgatgatggcgatggtgcaagtgaggagagggggaagggaagcgatgatggatgattcaaataaagtagttcatggggaagggagatgagttatccaactagttggaccgttgattttgatagtgtgttaagtttgagtataatatgtttggcgcatttagtggggataatgagtatggggtgatatggttgtgtgacttttgcaaagtttaactgatggattttatagtggtaagagcataactctttt

SEQ ID NO: 88537 - DNA, 407 bp, Zea Mays
agaaataaatggtttcaaaaggtactaggtgttaggcaggcagtagggaggctcctactactttattgctgattagggcgtttaatgtctgatttataaatgaaaaggtagagaaattatgcttctcaggatttgatttatcgaaaattcgaaattctccttgaaccttaggtccttagcttcttgagacatgaattgtttatttaaatttaaatatcatatatatctgaatcatctccagtcacacgttaatgttatactgatgtattctcctttctgttctgcagcaatcgtctagctttcaacttgttattgttatttcctgtacttccatgtctgatttatttgtaaggtaagtaatggaagatcattgttatttgagctgccaagcatatctttgaattgtc

SEQ ID NO: 88538 - DNA, 475 bp, Zea Mays
ctgggcagagattccttccatcgcttagccaaaaactttgaatttacctgtaataaagacgtgttgcacacttgccatgcttgtcgccttcgcaaacacgttcgtctaccgtttcatgattctacttctacaactagttccccctttgagttaattcattgcgacgtccggacgtcacctgtcttgagtttttcaggctatcaatactatcttgttttgcttgatgacttcactcatttagtctggacgtttctttgaaaagaaaatctgatgttgctcagctcattatgaacttccacgcctacgctagtacgcagttcaacattcccattaaagcttttcaatcagataacgatggcgagtttgacaacaacgttcttcgctctttctattcttcccacggcatactcttgcgtctcacttgctcccacacgtcacaacaaaatggctatctccctctttaactcttacagat

SEQ ID NO: 88539 - DNA, 674 bp, Zea Mays
ccagggagctgtccggagccgagaggaggcccttcaacctgagaggtcgtagaaccttgaaccacacttccctactatacgaacatccaaggataagatgattgatcccttcctcgcaccgatcgcagaaagcgaagaggccattggtgatcaagcgaaagcgccaaagcctttgagatgtccaacatctacgatgcaaaaccaaccaagcaaataagcgacaccgacctggtgcccgcgaggcccaaaggaccgacgccctgtcgagatccgttcgtccctcaaagaatgcccgataggcgaacgacgtggtgaactgccccgaacactcccacttccagacgaaacagtcgtggtccagcgtcaaaaccgggcaagcacatcaacaggtcccagaccgtgatgaactcgatgatcatttgtgacgtccagggccccgacacatccctgatccaacatccaacccggagtgcctaaggcctccaccacagtacgcatgttgcgacgagggaatcgtgggagcaacatctatcctccaatgacagaccctgaagccatttgtctactcaaaacagggtgtccaagccaccgtcgaccacaaatgagaccgatgtcttgagcatggcctcctgagcggtgggcaaagcaacccagaccctcgaggcagtccgttc

SEQ ID NO: 88540 - DNA, 783 bp, Zea Mays
ctggcgccctgcccctctcccatgcgcgccccctccctttctctcatttggttttaccgcgcagcaacctcctctcctccacctctctctctccctgttgatgcacccagcccaggtggggttggtcgaggcccaacaaattagggttgcccggagcccaacagttcattaagcacacccaactcagggaaagtcccaatcgacccaaaagactagcccaatgggggaagggtggctctcccttttaaagtggcttcctcctcccaagttaagtgaggtgggataattctaaggctcacacggtcaccgtctgactacaattgggccaactgggccaattgcgtctttgccaacgggtaatagtggaggatgtcctcatcattcccaccttcttaaaatgggccctagctctgataccagatgatgcaccgagcccaggtggggttggccaaggcccaacaagttagggttgcccggagcccaacagttcattaagcatacccaactcagggaaaggcccaatcaccccaaaagactagcccaatgggggaagggtggctctcccttttaaagtggcttcctcctcccaagttaagcgaggtgagataattctgaggctcacacggtcaccgtccgactacaattgggccaactaggccaattgcgtctttgccaacgggtaatagtggaggatgtcctcatcacccgtggtgccctaggttttggagacggagatcgccggatttggttcccgaggtgagctcccctcccctctccctctct

SEQ ID NO: 88541 - DNA, 696 bp, Zea Mays
cggctcagctcgctctccaccaccgcgaggctgatgaacatccttgaagccaagcaccggtggaagagcgccgctcccacaaggccacgcaccgccagcggaggaaagacaagactggcagcaccaacccgctagggaggacaaaaggcatgaactctctggcgacaagttcgccggggaggatggcgccggcacaaatccttctgctgaacgccggcgcatcccatccaagtaggtggcacaccatgtcaagcacccgctcagtctgggcatgctcgagatgaacttacaaggccatggtaaactatggcgacacaaagcagaaaccttgaaggcaaaggggcgcagagagctcaaaggcgaaagggcaccgtgagtgggaaagaagcaagacatggctgctactcgagggatgaacccctttttaaaggcagatttccccgctcgcgccctgaagtgtcacatgcaaagtctcccccgatgcgcaccagggttcccttcctatgacacgggggccaggcctcacatgtcatacaattggcccgaagcgcgaagaaggcgaatcgacgcacaaggagcatgtcactgccccgcggtagtgcgccccttcatcttcgctacgaccaacggtcaagaaggcgaaccaccgcacaaggagcgtgctaccgccccgcggtagagcgccccctcgtcttt

SEQ ID NO: 88542 - DNA, 471 bp, Zea Mays
tactacttccagaaaaggccagatccgacagtgacctacatcgcttctcttagcggcgcgaggtgggagaactggcggcacaactgggtgattgctcgtaccgaggtcagcgaccgtcttgcccttccgaatgacgggcccagactcggccagaagcagtggagggaaagaccatgcctcatgccagagttcgagcccatcctggataggattaaggaactggcggttgtcggcctgacctcaatgcacgtacttggtgatttcctgaagctctgagtcatgccactacaggggaggccgtatttgtcttgttggtttacaggctccaacgacattggcaggatcctgcgcgggcctgggactgacctgacctgggaggagctagaaattttcgtgagggggattactggtgaggcttttatccccgaatccttgatgcctccctagggcatttcgccactctgcgacaac

SEQ ID NO: 88543 - DNA, 458 bp, Zea Mays
aacccgctcaagcacctccaaagcttcatatcatctcctttcccctgcaaagcttgtcaagcatattttggtccccatctcttgatgggtccatcaaggttagtcaataaagatctaggaacccaaatgtcctttgtgctagtgcttggtaaactcattactttttctagcacaagttgcaattttgggttgcctagttacatatgaatcaattgacaagctaggagtggaaaagttaccaatgggacaatccttgcataggtgtcccttctttcggcatatgtagcaaaggcgatcttcatgttttgaggatttcttctttcgttgtctctcgcttgcttggatgttaccttgtatggaggcacggttgaggcttttggcagaggtattgattttcttcttttgttccttcctcttgacattcctcaagtccttgactttttcctcgagggatcttg

SEQ ID NO: 88544 - DNA, 408 bp, Zea Mays
cagcccgagacaaaacccatgccaattcatgacaaatggttttggtttgagttcaaatttttccaaggtgttccttgggtattttggcgcccttttgtcaattggaccattttgatttcgcgtctgcaactatgtgaacacatgtgatctttagaagagggctgaaattagacttagaaaaaagggggtttttcttttgtgcttcccacatgggtgattaatttgaggattttgtgggacctttttgggaaaacttccttactatttcttgtacgtatttaaatatgctacaacttttgtgaatggttcaaggcatgatttggtaatttgcatagttctcccactaattcctttcttgttgctctaatggcttaaggagggtggtctagggttttgagcattttgctc

SEQ ID NO: 88545 - DNA, 411 bp, Zea Mays
gcggatctcctggctaaactggtgaaaacctagagaggaaaactaggagctctaaaacaagagccaaatgaaactaagccaaacaaatattgaactaaccaacccccctctatttataaagtgttatttctattttctaaactacctctatttacatagagtctatccactccgctaggggcaaaatagaccaaccccaaggttttttatctgacagtcaagcgctccacacgaagttgctttgccttgatgcactcttcgctgtgatgccacgtgctgccaccgatttcctttggaaccaccgtcaccgagttttgaggcccaaactcaggaaaaaacccgccatccatagtgcagggtcgttttgaggctcaaccaccaaaccttcgtgagtatcgcaccgcgtgcgcg

SEQ ID NO: 88546 - DNA, 439 bp, Zea Mays
gttgtgggctccgaccagtggctgagttcgggcgaaggttcagggagtgcgggggagtgacaccgagggctgggcggcctttataggcatggatgcgagtggatggagtcatagtcgaccatggcgtggaggcgcgcgtgcgcgtggcttggccgcgctctagtgtgcctgcctgcatccaacacgtgacccatttttgtttgcccgtctttacgctcgtgtagtcacccagccatggctgatctcattgagatctctgtacacagcgccttctcctctccctaatctaccttctttgtgtggtggccaagggattttgtccactagattgtgagatacggagcacttgagtcgggtttgtctaacagaccaaaaccaaggcaaaaccttgattttgtcatgtcaaagctcgtagtcccaaggccatcttctggtataa

SEQ ID NO: 88547 - DNA, 597 bp, Zea Mays
gtggggtttggcatctcctttcatacaaagcttcaaaaggtgacatcttgatgctggcctggtaactgttgttgtacgagaactctgcatatggtaaactagattcccaatttatgttgaaggtcagaacataggctctcaacaaatcttcaaggactttgttgactctttccgtctatccatctgactggggtggtaggtggtgctaaagtggtgcccatagcttgttgtagactcaaccaaaattttgaggtgaactgcgttcctctgtctgatactattcttcgtggaatgccatgcagtctgactattttcttgagatatatccgagcaagggtagctcctccacaggtagtctttactggtatgaagtgagctaccttggtgagatggtcaattatgatctagatggattcattccctttttgggtcctgggtagctcaatcatgaaatccatgcctatttcctcccatttccattcaggcactggaagaggttgcaacaatcctgcaggtttctaatgcggttcgctggcacatgtcacattgtgctacatgctgaactatgtcctttttttattcctttccaccagttcg

SEQ ID NO: 88548 - DNA, 539 bp, Zea Mays
agtaatattcagattgctttgcttggaattacacttaaatgcctggattaagccgagagatcatagagcatcggttgtctattaagtccggtttcagacctttcaagcagaaatatagaacatttcgtccagatcttctcccacgaatcaaggacgaaatccaccggctgctagaagctgattttattagaccttgcagatacgcagaatgggtctcccaatattgtgtcggtggagaaggagtcaggtaagcttagagtatgcattgattttcgcaatttaaatagagcaactcctaaagatgagtatcccatgcccatagccgacacattaatcaataatgcatcaggaaatataattattagctctcttgatggtaatgtcggatataaccagatcttcatggccgaagaggatgcgtctaaaacggcctttatatgtccaggcttcattggcttatttgaatggattgtcatgacacttggtcttaaaaatgctggtgctacttattagagggctatgaatttgatcttccataa

SEQ ID NO: 88549 - DNA, 403 bp, Zea Mays
agagatttgattcaagagcacatagcattcagagtatggccgcttgtagagagctgggaaatgccgaaggagaccatcatcgaatctagtgaaggtgaactggtccggctcaagtacacattcagatatggggataaattcgatgaaccaaacgatgactggctaaaatgcatcgaagttacaagtgatgaactgcttggatcatattccaaggcggaagacaatgcattatccacagccttcggaggtcggggaaaaaagagattgaacagagtttttgatgccattggttttgtttaccctgactaccgctatccactgcgaggtcagagaaagaagaggaaaactgctacttcggccactccagatgagcctgtgccgaaaggcaaaaagttaaaggttc

SEQ ID NO: 88550 - DNA, 327 bp, Zea Mays
ggagtttctgcctacacccatcctattggcagaatcactagccttcgcagctggatcatcatcttcagcaccgccagcaccagcagttcaagaccctgctcccggaggcgacgacccggacgactctagtgatgatgatgaagatgatgaataagaagaaggagagaacatcaacgaggaagccaatggtgaacagtaggaccacttcgtggggatatggcatgtcaacgaacattatacatcaatgttcgagacggagcacttccctaacctgctgcaggatgttctgcatgcattaggaacctacgtctgacccctgtatgagac

SEQ ID NO: 88551 - DNA, 1123 bp, Zea Mays
ctctatcacaaattatgatgtccactctctttgaggagatggtaaactagtgctcctcccaagtgcaatggaggccactagcctaggccatggctcttcttgatcggccataagaccccatccaggtaagtatgtttcaaggccgcacctctatgttcctttattgcattacccgctcgttttccctgcatgattagccgatgcggcactttccaatcggctaaacacatggtgcattcctcttgggcttgccttatcaatacgtataggcctgcctcggcccacctaggaaaagagccaacctgtggcccttccaggttccaggctccaagctcctactagaacaccacttgtgtggatgtgaactcttttgtctcgagctttgacacggaaagttccttgcccttcggttcatgcaacgctttcattagcgacagaaggtacacattttggtggtacctcatcacttagggagcaagggattgctacatcaaggagggcaacctgggggagatgaccatgtctcgacttttacctgattctacgcatccattcagaagctcgacacttttctagagcttatcaatgcatgagatttatgaagaacctgcaaggatcgagcttgatcacatgcatgcatgaccgagtggtaaggtcagaaaccaagcagaaggttgcaaaaatcttttataagatttaagcaagttttcaatgtgttcataaaagagggaaatgtcaaaatccaagaccatgcttaatttataagataacttgaagcaaaaatgaccacaaaaagggtaagcatgaaccaattagtactgccctcctcctagtcaagttctaacgtctttcctcatcaaacatggttacatattcaatctccatggcacgtaaaaggaacatatgagattgtccgtatcagcaggcacaacttgcagatcatctgtaatggcatgtctcgtccttcctcttaaaaatatcatcatctttggcttccggccttgtttgtctccattggtcaaactccaccgaaggaccaaaggttttccacatctgaaactgaataattgtatgcatgtgctggctgcaaattgcatatataggctggctgcaaagtgcaaac

SEQ ID NO: 88552 - DNA, 310 bp, Zea Mays
cgtcccaatgccatcttcaggtatgaggtagaggggttagttaagcacatttttgtcaatgggagcttagggttttgagatagagattaaggtgaacacgctcagatttggtttagaggctgaaaatttagaaatctgaatttcagatttccctatgaaacctccacttgaatggcttgcttgaggtttttaacaaactattttggccaaacttttataatctttattgtagcttagttagtgtattccaattttaataattggcctaagccatgattccatgtttttcatggtctttttaccccttttc

SEQ ID NO: 88553 - DNA, 355 bp, Zea Mays
tggtatcacaggcataggactggccatagaccgcaaccctggactaagaaggctttcctcaaaaagaaaaacctcttaacttcttaaagattcttctcttctttccccaatattaacgacccttcttctcttgctatgagatgcagggcagctttgtccttaagacatcttattgctcggaggtggaaggatttcctcacttcttcggagttgtgcgctttgcatgggaattcgtaagaagccagagtatgtttggaaggaatactgcgagaatggagtcaaagaagtgctctatggcagtctacctgggagaaagccgaagatacccaaatcaccctccctttcatatcaacgc

SEQ ID NO: 88554 - DNA, 421 bp, Zea Mays
gagggttgtaagcattctgaaaatacaagcaatgagatccatcgagaaggataaaaagaagaagttaccaaaaagatcgaaggtttgtggaaaaactgacattcctatgatgatatcgaaaccttcggtatccaagaaacagaaaactacggaatcaaaccgctctgaggaagagaaatcttctccgccgaagcatacggtcgaaacttctttggcattttccattggtgtgatagaaatcctagaggtaataactgaaccattgcctttcgccatgctaagtcctctaggatcagagctaaccagcttattacagccgaagaaaaacggtgctagggaagtcgtcgatgcagaaatcgaaaagggtccttcggcgcccagggggatgctagaagaagcgtcgcatgaggactgtgatgag

SEQ ID NO: 88555 - DNA, 296 bp, Zea Mays
tagttagctcatgaaccatgaagtggaggctcaacataatgaggacgtagtggtacggaaccgaacctcatggatatatcattcgttttctcgtggtttgatgtttgatcattactctcgtgctcactttcatactttgattgtgagtagtagtagtcatttgcgctgagctagagtgatagttgtagtgattagtttagttgctctcttttttatagctctctagtgtagctcttgttgatgtaccttgtgtgttgttatgaattagactagaaatcaagctagtagaattgtat

SEQ ID NO: 88556 - DNA, 582 bp, Zea Mays
aatttttataggggtatggatacaagatggggcgattgagatgttacgccggcatagaccgcgtaggatctcgacaacccggcgcgagctcagcggagaaaaaggactaacaacaggggcggcagagaacgcgagggcccattcgtcagccgaagcggtgcccccgctacggtagggccctctattgttcttgtggttaggcgctacgtgaggctgggagggaagcgaactcgataggagtgattttaccgtgaattgcaacacgacagattcagttcattcgcgatggaggaaggtgaagtacgattaggaattgaagctgccacgttggtcgatccattccgccgcggccacggatgccctccagatgatgtggcaaagccccatgggctggttacggaggctggagcaaggtgcaggcccacgattcatggtgctattgtggcttgggtttgattcacaggtcaaagaaagttgcggctcgatttttaattataggggcatggatacaagatggggcgatggagttgttacgtcggtggagactgcgtaggatctcaacaacccggtgcgagctcagcg

SEQ ID NO: 88557 - DNA, 521 bp, Zea Mays
aaataaataaataaaagtgcatcccatgctcatgttatttttgtgatgcattgaatacagaaaatcataacttaattttgcctcaactcataaatgaaaatataaaatagaaaataagaaaggaaatcctaatcaagctagttataattaaataataagtagaagaataattaataatggaaataggattcatctttacaatataattatatattgaaagttgagatctgaaagtttaaacagggatttgaatttgaatttgatatctgaaattgaaatagaaaagaaaaagagaatctcctgcgcttaggccaaacttcgcctgtctcagcccatttccggaatctatcccgcgcagcccaaactcccatctcccctatcagcccatgtctcgctcgggcggcccgcttcgcaattttcttccgcgtagcccatcactcaaacctggtcacttccttgcgggccccacctggcgggttcagcaccaaccttgcggatggacgcaatagtatcgcggcgag

SEQ ID NO: 88558 - DNA, 1052 bp, Zea Mays
gaaaagcggaaaagcgatgcctcaaggcgctcgccgtcgatctcatgtggtgcctcaacagccgtgccaacaccattaggcagagtgcggtggaaacctcaagcacgacacttgaggttaccatcgttgtcccttctccaggctctgtcattcttggggtcataggtgttgacccccgacagagcacgatggtattcgaggcggttattgtcatctaacagctaagcacgggtgaggcctccaccggcaatcggccgctatgctccatagtagatggagtcatctctgctgcccacgtgggatgacttgttctacctaccaatgagttataggaagctataataacaaatgctacgtatttgttaatatggcctcaccagaatctattggtaggtccccatgggccaggaggaaggctagcgcagttcgctgcactggcctatgttatggtccccggcacatatggtgactgtcgatggccaccacacaaactcatggtgtgctcagtctccaccatcgcccacgcccgaagggggtttaatcctaactcccttggtgtgctgatagagaccagcaagcaagcctatattgggttgcgccttcgacaacctcatcatgcatgaggtggccagccagccatggtgggcccatgggagctccccacatgcaccggtggctccaagacccagctcgtctatcacaagctccatggcgttcggagtagcagccaacaacccccaggcgctgcttaccctttgagtcagacgcgcaatggagctcaggcggtttaggtcggcctcgtaccttacacccaaaaggtagcttgagaacaaactcttcctttgtaataagatttcatttatatgttgtccagtctggtaaggtccaccctcgtaagcccggtctctagcgccatccgtggccagcccggtgagagccacccttataaacccggtctcaagtgtcatctactcggatcacatgcatcagattgtgaaggacaagttggttctcatccatcggtttcttttcctatttacacatgttgtttc

SEQ ID NO: 88559 - DNA, 966 bp, Zea Mays
aaatatatcactcatagaccggaagagagttctcaacgataacatacaacatcgccgggatatccgacaagtaaatttattatgcgcgttccgggctctcgagagtatacacagagggcgtaacatttatattagttcgagcagaacgcctatactttcaattgttggtggcttgtgctactaacatcattgataatcaaactcgtagtaggggttacaagcagtcggaagagggaggagagactctcagatctcttatcggggtgtaagtagaccttagaagctacaaggtggagtcctagctaagtctaaacttggcggggcttcgacctcctcctttttgtccttgtgggttggcatccggtcgtctccaagtccctcgatccgtcgttctcttcctcgatccccttgcgctgaggcgaccctgtcccttttataggttgggagagggatcgtccaatggtggcttctcttggaaggagtcgtaaggcagaggcaaaaccaacgttttacccccaggagaggccgcgtgtactcgcggggcctgaggctacctggttgtcatgtatttatcccggttgatgacatggggcggcgatggtcccaagcgccatcattctggctacgccgacccctagcttctgtagcccgaggctcggcgcaaacccgtcgtgtagtgccttgtgagaggtctgcgcactcaggcctagttcgataggtcataagtgcatcgcatgccgatgggcgcgtgggtcattaatgtgccacagtctggaggctcgtaggtcatgagtgcaatgcggcccgagggatccataggtcatgagatgggaagcagactagcgcccacgttgtggttcgatgccagacatggttaatgcagctagtaatttatggcgggttggttggggcctggcgcgggatccacttgagtacgtggttccctttcgacacgcccgacctccc

SEQ ID NO: 88560 - DNA, 365 bp, Zea Mays
atttaatagacgctaactacatgttaataaacactaattatatactaatcttaatcacgtaatttttttatttaaaatatacatagcatgtgtggtctagtttcgttcgtaaaaatatcagaaacacagatatgaaatcggttcggtaattaaatcttttaattacaagatataacaaaaaaaccaacaaaaccaacatctcgctgttggaagtggtcggccgctggtgcccattggcgttgagctacgtggaattcctgcgcatctctgggggattgagtctgcggaggctgtgcttggtgcttactgtttgattcatggactgttacccgactcagtcgcggaggaagacatgtctgttctca

SEQ ID NO: 88561 - DNA, 382 bp, Zea Mays
gcgaggggcgttcgaggatcgcggcaccaagccagggattctcggccactactcgtctacacaagatcgtcctcctccagttcagcaggtggggacgcacggcgaggcccatcggcatcgagatcaaggtggaggaacttcgatcgggcctaaccatcatcaggctcctggtatgaacgattggacttcttctcatgatcatccatcgttcgacacatttgctactcacaatcaccctccacctagagatgtgggtcgatcctttgagtcatcatccagtcagtatttgggaaatctaccaaagctccaggttccatcgtttgatggtgaacatcccaaattgtggcagtcgcgctgtcaggcttattttcgcatgtatgat

SEQ ID NO: 88562 - DNA, 556 bp, Zea Mays
gcgagatgtcaagtccaatatatctagtatgtcgatggaaactatggtctatgtcttctgcaaagggcctctggatacaaaattatcgtagcaactgatccaaaaggcttcgatgaccccgtttgtcctcttccaagtggtagaaaacacaccatgagcaaggagatgataaaacatatggccctttcaaaggacaagggaaagttggagcagaagccaaaccaggagaggagctagaagcgtaagctagaccactaagtttacatggcccaacgaaggactcaacaaagatggggcaacacacctcccatataggaacactatgacaacaagtacaaattcatcatggagggacgatatatctaccacccctagagcaaccacatgtcacaacattgtctacacatcacgggcttcacacagaacctactaaaggtgcttcatcctaaggcctcaaaaccgaatagcaacaaaaccatcaagaagggtgtctctgatgacatcgttggggggaaattccaaccacttaatcaagatattatgttcatcatcggtg

SEQ ID NO: 88563 - DNA, 506 bp, Zea Mays
gttggatcccaggtcagtgatgatgctattcggtatccccaacctgaatattatatcctggataaactccactgcttttgctgaggtcaaggaagcaattggtttgtactctatccattttgtgaatttgtcaatggcaaccaatacatgagtataacctccttgagctttcttgaaaggtccgatcatgtccagcccccagcatgcaaacgaccaggttacaggaatggtctgcagctgctacgcgggcaagtgctgttgctttgacaggaattggcacgcttcacacttttggactaactcggcagcgtcactcttcatggttggctagtagaaaccagatctgaaagcctttcccaccagagtccttgatgcggcatgcacaccatactgcccagcatgaattttatctaacaattgtctcccggtggccgagtggatgcatttcatgaagactgctcctgtgcctcttctatacagcaagcccccaatgatggtgtagttgg

SEQ ID NO: 88564 - DNA, 458 bp, Zea Mays
cagccaccgagggattgaagctaacccggaaaaaatcgaggccatcattagaatggaagcgccacgatcacaaaaaaggtgcaaaggcttattagatgcatgacagccttgagaaggttcatatcaaggctaggcgagaaaggcatgccattctacaaattgctcaaaaaggtggacaagttttagtggaccacagaggcactgaaaaagttcctgactacaccaccagtactcaagccaccacgccgagctacgccaaatcagccggcggaagatttgttgttatacatctcctgcacgactcacgtggtaagcaccacgttattagtcgagcgggcggaggaaggacatgcatacccagtgcaacatccagtctacttcatcagtgaagtcctcgggccctcaaagataaagtatcctcaagtccagaagctgttgtacgcggtactcctaaccgc

SEQ ID NO: 88565 - DNA, 542 bp, Zea Mays
gtcagtttccattgtttggtgcagtgctgacaaaccaaagtttggagatttatatttcaaaatctagctactgaatcaccctaatctctattgcaaagttgtagtcggtagagaggagaacatattggtggtgttggatgaagtttcgtgctcctgttttgtccctattgcgtctgtagctcgggcagatggtgatcgccaagtgtcgttcgcgtggacgcgtggagcgcccgtcctggcgtacaccgcgccttgtcccgcgcgtgggcaagctagtagctgcacctggcttcattcggtcgagcactctaccgcgccctcacactcttcctctgctctcacctcgctctcactcgccctcgcctcatcatttcttccacccgacgttgttcgccatggccgtcacgagctagttcgcgtccgtgcctccagtgaccaccgtagtccatgaaccaagtcacaaccacttcgtcgtcaagtgtgcaaactcggtgcccttgctcgagcttggagaaggccccgagcaccactgtcgacgccac

SEQ ID NO: 88566 - DNA, 375 bp, Zea Mays
cacgcgacggcagcctagataggcgcagacgtgccgatggcgctccgggcgagaacgctcgcgacggcagcccagatgggcgaggatgcgccgatagtcctccggatggcggcggtcgggtcgacggagatcgcggcctctacaggcggcacaattctccctccttggatcggtaccatggtcaccgtggggtctaggacattgtcaaggacatcggtcccggcggtgggtggcctaccctcaccaagaccaactacgtcgagtgggctacggtgatcagggtaccgctcctggttcgccacatgtgggaagcagttcggtacggcgacatcgactactacaaggatcgacgagcgctagatgccctcattgctg

SEQ ID NO: 88567 - DNA, 668 bp, Zea Mays
ccttagtgggaggacgaaagtaatgaatcttaactttgtcgccagaaatatctccatcagaaatcccaggatgtgagcaaacctcctgtagctcaccttataccagctgccttcaatatagaaattgagataaggaaagttataaggactttcctcatcagccagcttgatccaaagggtagaatagaattgagcaataacttcatcattccaatcatattggtatgtcattatgttcttcatcttcttcctctcgcaggccctcaacgcctatgtcatctctagatcaccaatagcttcatatccttcccagttaatataccgctgatgcaggattggctggtgcttcttgggaagaatcacagaattataaaaatcaacatgttggagggttcagaaccgattaccatcgatcttaacatcacgaacatgtaatgtaggattttggaagcggatgtcctagagaagggcagaccctccgttggcagtgaaatcagtgactggctcattggcagagcaacgggcctccgccctgtgaagaaccaacccccggataatgggtgcgttggcagaagggatgatatcaacttcatcatctttgcctccgtcatcatcgctagttgcctaccagggttgtggatttctcgcgggtcgagaccgaccggagg

SEQ ID NO: 88568 - DNA, 317 bp, Zea Mays
cgagcatggagaggtggatgctcctttggagtcaaacatagacaaggatgtagaccaaatggagaacatgcttattgacatctgacatgagtatgcagcactggagaccgaccgactcccgccataggaagtactacagttttacaagttgtcagaagccatggatgcaaaagtgcacgagggcaccaacgtgattgtacttcatgtcgtaacatgagttacgacgataaagtcaatgtacaacttctcaaataaatgctacaacgatatcatgaagttgaacattgatctccacccgccaaaccataagatgccag

SEQ ID NO: 88569 - DNA, 596 bp, Zea Mays
cttggcctccttagcctgaagaatcgcctcttggaggcccccctaaaattgggtctcctcctaccggaggcggtcggctttgacttgggcaccctctccctcagagcttagatggtccgcctcgatctcaagccgctttatcctggaatggagctcaccaagctcacactaagcagctcccacacggggctactctacttcccgttgggcgcacaacaacacctctaccatggccatcgaccatgcgaaaagacactgcgaaaggtaaacccggcgacagcgtaaatgatggtaagaaaacaaagagaaagaacagctacaaagtgacattcacctaactaaaagggataaaatcccatgtcatcgaagctcgggcaatcgaaatcacctccccaaagctaccgagtgtttcctcaatagtgcctaggctcatatcacctcgggatggggtcgactcaacctgccttgaatcctctgccctgaggcaccagggttgatgtggaggattggagaagagatggaataaggatgggaatcaaaaaacaaaaagaagatccaaagtaccaggaggaacgcttccacgtggtcaccttcat

SEQ ID NO: 88570 - DNA, 616 bp, Zea Mays
tgagtaataagtggaaatgtgttgttatggcaaaagatgttgattgctaaatgcttgataccatgtatgattagataggtacacacgcgcgagttcggtaggcttggcacccaccctgcccatatatattacctcctccctccttgtgcatctcattcttctagccaagattgtcgggccgacctcgaatcggtacaccgccaagactttgtttgggactgcgagagagggagggccgccggggtggttttcgcgggttcgtcgtcgttcgggctccaacaagtactctaggggcttcgtctgggtcccggaaaggaattcgaggcctcaccggtcgccattggttggctggaccccttggaattgctcgtcgtactaccgccttccatcgtcgcacggggtcaggggccgtcacgacatagctcaccgtaagactacactcatttggtccgccctgccctctggttcgtgtagcactggatagcgggggttttggtacccggaatcgccatgcgaggtttcgccggtgtgagcgctgccgcggatatctgctgcacccttggctaccgggaggttgatgatgtgttcgtggccgttgatgcggaatgggcggttg

SEQ ID NO: 88571 - DNA, 1228 bp, Zea Mays
agaaaatggacttgaagatgggctgtcagtcaattgtcagtctgaaattcagactcacagtggcatcggatcaactttagaaccaagtagcacctaatacagtggatgtttgatcaagatctttataataaaatcaaagctggtatgtagagcaacaactttgatacagaaggattggtagcttcccacataaaaatttgaaaatgaagctccttaacttgctttgtcaggcgcactgaatgaagtttccatggtacaataacctgaagaagatcccaggtgtagtgaatctcgccaccagtgaacccgcgcctcgatccacgctggtgttgcaattcgtgcccagtggcgcgcggataactgcttgaggtaaaagatgtcaacacggagaggagttggagcgttatcaccggactgttcaccgcaccacttgctgcacgatcggccgaggtgccctcgccagagttcaccgctctttgtagccatgccacgtgcttacgatcgttatcatgtcgcaagacgtcgcagtggacagcccatttaccaccagagtctttacctcaccgagcgccacgatcgtatactccggtgactcacctcccctccggccacaagttcatctcatcccaaattcgcaaaacactcgtgtgatcactataaattgagtgttcgacctgctctgctatcttgttacgaagccagtgcaccgctcctcactgtcgattagcctccagagcccccaaattcttattttcccccaaatcgagtcactcgcgccgccgtgaggcctccagtcgtgatcagtcattcccaagtctgttcatccccctctgttccatgttttagcatccttgaatgttaacgttgcttgtcagctcaactgattgaacactactgtgataggttatcgagaatatcacctcaccgccgcggaacacctccgagcacgtactcacatcgacccactcttccacccctgttctgttcaaattcacacatgtacccgacctctggtgaatcagtgaaactcaccctagcttcaatttagccgctaccgcatttagttgcttagaacacgctcaccggagccctagcgccgtcgtgaccgtgaacaagcatcgattaaggtcggaccagtccaattgagtgagggcttttgctcgggtagacttgcgcacgcttttcgtatgcttgttgcctactgtacgggtcgccgtcgtcatggaac

SEQ ID NO: 88572 - DNA, 447 bp, Zea Mays
tgaagataaatcccaaacttcttcaaaacatcagcaatcatctcattcaaaggaaatcttaatcctgctttgaagaagcttttaaagactaccacctcatccttttccggcttcaaagtaatttcctctccgccaaagtgaattagctcctttttggcctcactaaaatagcctaacttcatcaacttaggcatatcatcttcggtaacggtggacctcccaaactccaagtggctgggtttagatggcacgccactataatcatcttcagattcatcttcctcagcaccaacctgctcagcctcatcggcaggtgcaccttcgtcaaaaacatcttccaacactactatccccgaccgtttcatcacttcggaaatcggagcggtctcaacagtttcagcttcttctccgtcatgtgtaaccctagcagtggaacgtacccttgcc

SEQ ID NO: 88573 - DNA, 523 bp, Zea Mays
caaactttcggtctctgctctttaatggcaagactgtcttccaaactaaatctccaacatggaatgacttagtctttacattcttgttgtaggccttggaaactattgtcggagccaggtggtgccctgccttgaccacgggcgatggtgacgaatggagaaggttgcggcgagcacgaaaagaagagacacactcactcgagagatgattgtcgttgcactaatgtcgcttcctttttggtttgtcattgatgcatatatagtacacaatgcatggatacatgcctggccttgcgcccgagctctactccatgccacacacaaagaaacaaaaagaaccaggaaccctatgaacctagcacgcctctgtccatgtatctctccctaacctaacttcatgcaagtgcttgaacaaagaattaaagacatgcaatagtttatttcaacaaacaccttaaacctgttgcacctcaacgatgcctagagttctccttagttccaggaacctcaccggccctagttg

SEQ ID NO: 88574 - DNA, 551 bp, Zea Mays
ctagcaaccggcacacgttcaaggattgggagattgggtttgggtatccccaaatggcgcaaatggaatcagagaagctacaatgacgcggcatcttgaagcctgacaaagtcgtaggtggacactgctcaaagaaaacgagacgccaattatagggaggccgtcatggccatggaagcacatggcggacaggcacatggagtagaagcagatgtggacatgatgctggcgaagtggcgagtggctgcccaattttgacccaaattccgccacatcgcaatcttgagcaggtcagaccgggggaatctcgacagatcttgacctgtcccaaagacccggtagatccaacattgttacatgttgtgcgcgtccaaacattgatgtgcacaatactactagctcttaataacaagcactctgcaggttgctgtagaggacactgtccttcatcccccctagaccctgccatcaaaatcctcaccattttcacgtcaccttctaattcaagatggactgacacttcaagagatgtgagcagtaatataaaaagc

SEQ ID NO: 88575 - DNA, 591 bp, Zea Mays
ccttccgacgagtatccaacgaccagaaccccccttctccatcctcaggtcggagtagggcaacgacggcgagctctgcggtggagttcttcaccgacgaactacggaccatgtccctagcgctctaaaatcgaagcagatggatcctacgcagggcggaggtgagcgcaaaactagtgaaggatccttacatgctaggttggtgagggtggtgctaccagcaatgacgcctacggcggtggttctcctggccaaccgacgaggaatactccgcgccttgaagacccccaaccccgtctggttcggattaacgcttatagaacgaagggtgagagtcgtgcagagttctcaccgagatcgaaggagtggaagatcctgcccacggtgagacacggtccgaccgccgcccgtgagctccagtgaggaattggcggcgctcaggtgctcccccatacctccaactgccaccagagggtttgcgacgggttggtgatgctccatagtcatcatctccgcctcggttggtcccgccagcaacaatccccagtggcggggtggatcttctaatttcccgtgagatttccccatggc

SEQ ID NO: 88576 - DNA, 771 bp, Zea Mays
acatggtgagaagtgaccaactcgatgagattgggatctagagggacaacatgcctcatctgaaggccccataaactctaatcttgtctcgacctccataggttcatccaactcacgcataggagtggtagcctttgctttagggttggggccactaagggccctagcatgggtcgagggctctcagcattacttaagtcctctaggagatgtctagggtgctaagtgttcatgggagggcccgatagcatctaggggctccaagcttacaatgaccaggttggggccattgagggccagggcttcagccattcataagggggtcctaagtgttcataggaggtcccaacggttgctaagggccgactaaaatatatagggtcgagcagccttcttcctactaataaaatctcataagctaaaatgtgcacttgttcgaaaaattatgtaaagttattgcgaactaggtggccagattttggctgggtggctgttttgcttttcagaactttccaaattcacgaagggaacttattttgttgttgttttgcttttcaaaactttttgaactcaggatgggaacttcttttgtatcctacacacattagtttatatctatgttttctcatcagggttagtggtagggattgcaaattcttacggaaatgaaaatcttccattcaaaaggatcaaactcaactacttaattgaatgatgataaaatgtgaggcacttgattacaaactaaatcaaaactaaactaaacttgac

SEQ ID NO: 88577 - DNA, 939 bp, Zea Mays
cgtgagctgagaatctttccttacaggagaaatattggtgttgttgtgtcaatagtgatggagaaagatcgccaagatgcgtagcgaaagaagcggaaggcctctcttcggctagtggacccacgtcgagatacaaaggtggcatgacccagtgcgaagggggccgcttcgcttgcaacgatgcctccccccatggtgccagtcgccgctgcaaaacttccctcaccgctgtgcgtgacttagacggtgattttggggaccggggggacacgccaggagttgtcggtggacgactacctggtgggcggagtcaccatgtttgacgcctagactgggctatcgcctgctggtgagttgaaaaacttaattcttcttagccgggtgattctatattttctaacttggttttgatgtaggggcggaggctgggtagctggcggtggtaccgtctacggtgcccgccgacctggtgtgtgcaatgaagggtgacacagggacttcgctggacccatggttgaaattttgcgccgccgctgatggcagaagcgaacttgcctcagcagctgccacttctagcatagctgcgtctgtcacgcggtagttgtgatatgtgagtttttttgctgagttcggaaaattgtgatgtcaggtgacggccttcgccgaccaggttgcttcggggcactaacctcgcagctaatttccaagaggaaacgacttgagggtagggttgagtgccttcagacgcagcataccgaagcaatcagggacaagtcggtggccgaaaataagagccgaaaccttctcaacaaggtgacagtgcttgagaaggagaaagaggacctcggccgccgacttaatgatgaaaagaaggatgcagagtacgcccacgcgaaggcccaggctgcccgcaagtatgttgccgacttggagctagaa

SEQ ID NO: 88578 - DNA, 656 bp, Zea Mays
cgagcaactgactaatactgtataaaagcgtcatagtgagatcattaagcttgcggtaatccacacaaaaacgccacgactcatctttcttttgcactaacaacacgggagatgcgaaaggactaacactcaggttcaatcaatcctgctgccaacaactccacttgtcgttcaatctcagtcttatgaaaaggaaaataatgataaggcttagaattcactagaatagtaccaggactgagaggaatgacatgataaaaaactctcaccggtggtaaggtcttaggatcctcaaacacatccttatactctataagaaaattatgaacaaccaaactagtagcagcagattgagactgagaagtagaataaggggaaagaatctaaaagagccaaagcccacacttcattaccagaaaaccacttcccaattgtgctgctgacaactgagtcaccttctgatgcacagaaggtaatgatccttgcaactgcacccaagagccttgataagaaaatcccagaaatttctgattccagttgcaagtaatatgactattttgtttcaaccaatcacatcccaaaatagtatcatatggtcccaaatccaatactctcaagtcagtagtaaaagtatatccatcacaccaccattaaac

SEQ ID NO: 88579 - DNA, 401 bp, Zea Mays
atcccatgtaagcgatagacatgcagcatgaagagcttggccacactagctgccgagaacggatggcgaagaggaataaagtgaccatgttttgtgaagaaatccaccacgaccagcacgcgattgaaggaggataaccttcaacgaaatccattgatacaacctgccacgctgagctgggtaccgataatggctggagcaacccaggaagacgggagcgatccggtttggcttgctgacagacggtacaggcacgaacaaactgaagcaccgcagatttcatgccctgccaggcgaacaatttcttcatcctcatgtaagtcaccgaaaatcaacagagtccgccacacgacagagctgcacatgaagctcatgagaaattttacgggacaatgcgtctg

SEQ ID NO: 88580 - DNA, 591 bp, Zea Mays
cgatgaatcccttcggcggcggtagtggggtgatgtgaaggcgaatgtgaagtttcacggaaggtacgtagtgtggaaatatagatatggcccaaatagtcggatactctatttaggacttgagtcactgagtcctaaactagtttgatgaaatttaataaaattagacctctgttggaagttatttttaaccgtaagtcctatatttttaagacaagaccatgttttaaggccattgctgtagatgctgtaagacaagaatgtaaagtaactgatgaatagattaatttgatcaattggatgatgtctcaatctgtcgtacccctcgtatatgtaagaatggaggtctgaacccgttactaagagcttttcaatagattttcgagcgattaatcagatacacacgtacgggataagaactctcatctgaattaatctaataacggatcgtctgggctattctcgtggattgtccgagacacaaatcgtgcagaccacatgaccagaccgtacgaccatacccaattgccaaatctcgtgctcaacacatgtgctttatggtatctcgaaatgtaaagtagcatatctgtt

SEQ ID NO: 88581 - DNA, 633 bp, Zea Mays
tatgattagaaatctcagttagcaactgaaatgtgctacaatggattacataaagccatttggattgaaagataaggagcacagacaattgacagaccggaaggggaatttcttagaaatcatattagcatacgacttttacttcgtactgatgagcatgtagcattcaaacagttcggcgcgagctcataaataatagtgcaagttgcttacggaattgacaccaggtaatctagcaaaggaggaacagaaggtttaatgcatcatctaatgttgtattagtctgctctaatcagccaaaccagcagcaagaatggtttcagtcaactcacatccaattagagtttcagtccaacggctaaagttcttcagtagcagcattttccaattgaatcaaaaggcaggccgatggtgaaggtgtgtccaatgaaaaaaaagcctcgacgatcccaacagccacctatcaaggaaggagccaggcattaaaacaagtagctggcagggcagcacatgcaatgagcaggatcagcatggtgattaatattaatagcatgtctgcgattgttcctccaccatagtaaatggatcctccatgcacccgtattttacgatagactgtatctacaaatgtct

SEQ ID NO: 88582 - DNA, 321 bp, Zea Mays
atcctggcaaagccaatgttgtggtagatgctttgagcagaaaggcccagtgcaattgtatgagcatggatgcaaaagtcaccaccctgtgtgatgagttgtgcaagctgaacttggaagttgtttcttcaggtaccttaaattatatctcggtggagcccaccttacaagagaaaatagtcagggcacagattgaagacaagggtgttaaggtcatcaaggaaatgatcaagcagaaagcgaaaaaatacaaatgcttccgccaggacagcaagggaattctatggtttggagatcgattggttgttcccaaggaccctg

SEQ ID NO: 88583 - DNA, 851 bp, Zea Mays
atttcatctttaaagctgattggtgggtaccacaaatcccttcatgtacttcagccatggctaatatagcatcacctaggtccaagcatgtaagcaggacatcgttgactgttcggcggtagagttcattactcattaaaacatacttgaaagctatacaccgaatgttcttatccatcctaacactgggatttcatagataattaattatgtgtgtcctccattcgcttgcatcagcttcattaccagccgaatcaatcaggagaactttcctggtaaccccgcgcggtccggagccttcacccggactgtccgcgacctggggaattggccctgtatcggttcccagattttcagtgttgtgaaattttcctcgctttatccgataacctgatgcatcttgtgccaaattgttagctctatgattctcgactctagagatgtgtcaaatgctaaattcatcaaaagaaagaattatgccccaacatttttcaaggtatctatttagagtaccatcaaaacattgatactcttctaataactgttggacaaccagctgacctgagaatcaccaaatgccttcacatgttttactcccatacaatttaaaagttccaagccaaataaaagggcctcatattcggcttgattgttagtgtaataagtttttaatcgactagagaagtcgaaggagccattacttggtgaaacaagcacgatgccaattccttgtccttcattgcaaaccgatccatcaaaacataaagtccagggagtaacaatgtggtatgatatgtctagtttatgagtatcatcaatccgatgttctacaataaaatcttctacgacct

SEQ ID NO: 88584 - DNA, 305 bp, Zea Mays
gcatctacacattccatggtacaggaccatgtgttgaaatcaacatcctcatatccgacacaacacaatcttcaaacggagcagcgtcctcaccgagagataaatcaatctccatgatgacgactagggataagaagattagtagatgattaaacatgagcgtgcatttttactgagggggatgtggactgcgggcctcaccacgacgacgaagaagatctaaggagtcgcttgaattggaatcacatgagcggagacacaggatcaaagggtctccagtttggtagatgagggcaacgggtgtg

SEQ ID NO: 88585 - DNA, 471 bp, Zea Mays
gcttcgcggagtaccgtctcaatggcctaacattcgaggctaaaattgaggggaaacgggaaggtttagactggttcgggaagaatccttacgtacactatgagtgttgagtttgtagtgctttgtgttctttgtattacaggttggagcgctgagctctcgtgcgcgcgtactagacgatgtgtctattctcacgaatcatttgcatggtgccttgcctccccttgtatagtcgaggaggggataaaaagaaaagaaggggtgcctagcccataaagtttgacttgtagcgttgtggcagcgccgcagggcgcaactgatctagtttcttcgttgtgattatggccatcagggcccgcatgccgtgggtcgaccgaagccctctccctattgttgacacaaaaaaccgaccgacggtcatcccgcggtcagcacacaaacgtatggcgtgcggtggatgcgagggcatgc

SEQ ID NO: 88586 - DNA, 855 bp, Zea Mays
tcatcttggcatcttgcttcgtcctctcgacatcggaccatcactaccggctctggtgctccgtcctcctccctcgtccctccctccatctgtgtctgctactccggtactccctaaccctaaccctaacccctccggtctctggatccggtggttctagatttggtgtagtagcttgaagctgtgcagaacatatcttggtgctcgactgctcgtctatgtctgttcacttgctggtcgtttatctcgcttaatcccatctagatttggtgtagtacctgtgtagctggtggctgcctggtcgctgttcgcttaatcccatctgttctcttgctggtcgtttatctcgcttaatcccatatgttcgcttgctggtcgctgtggttgtgttatgcctgttcgcttgctgttcgtcggtgttagtgtgattcactgatgggtgatggttcactgtcgtggcctcctcaccgttgcttgtttggacatctatactcataactaataactcatcctcctcctgacctcctcactcgccctcctaattcctattcccatctagctgtctcccagtcccagactcctagcacctagaatccagcctctttgttgtcgtctctggtgctccggctttcaaaggtatgtctttagtctttactcgtctctggtgaatctagcctatttgtagaatttagtttaattgcagttttggtacattgcagtcgttgaggaaccggaggcgacagttcacaggtctagctggtttagctcctcgggcttgtggtcgaagtcggggtcatggaccttgacgcggctgcagaggaggaggagcgccggcttgaggatcacaatgaggcg

SEQ ID NO: 88587 - DNA, 407 bp, Zea Mays
ggctctaatttcacctccttgtgatataattaataatttctcttcaaaggatagtttaatattttatgcttttccccaaatgacttggttacaaaagaatgagatgctccagaatcaaataaaactaatgcaggtatggaattaataaggaacataccatacaccacgtcagcatcctctggaacaatttctgctatcacatgatttacccttcctttactctgattttgcgaagtcttgttctgtgcattaccatgagcatgtgtattctaatcaaatctttaattgttattcctatggggtgtttgtgggttgcgctttgggcagttgtttgcatagtgaccaatttctccacatttgaaacatccactaggctgaactggggtagttgggttgttatttttgac

SEQ ID NO: 88588 - DNA, 317 bp, Zea Mays
actatgttgaacagcatggtcaacctggccgacgtgctcaacaccgagctagaccacgcccttgacgagttgggcaaggcccaggcagagattccggaactgcgtgctgagcgcgcggcacgccactatcaggatggtggttcccccactcccgttgggattttgcaccattatcgctcgccaccccgtggtcgttatgcttatggcacccctgactgtagaacccagatagatttggagccgtagatcgacacagttggagtctgtaataatgtttaattcggtgtcttagtcttagtcagtcttagttagtatta

SEQ ID NO: 88589 - DNA, 1075 bp, Zea Mays
ctgccattgagaacctcctctttgggtaagtccatcctgtgatgtcaatcggatagtcaggatgagtatgcggaacgtcttctgtgtccatagagacactacccccagctaaagattaggcctctgagtcagtggttggattgtagtctgcatcgtctgcacgagggcactttgatttgaagcgaccggcaagcttcttccgaataccacccagaccactgcaataaatgtgagaaacatacataggtgaattgttgataacgccacaatcatagagaaagaaagtgcaactctctgtcagggtccggactgtccgcgctagagggggccagactgtccgcgcccacctggcggacggtccgcgaccgatcaggggcgattctctagaaccctagccgcctcaataattcaatcgacgattcggcagaaaatatccatctaaactcgttcaaatttttgcacaacattcacaatgagtagcactaacaatcccaccaatcagatttgtgaatctattgctcaattctagatcagagagaaaatccgaagaatccccaaatttgaagaaagtagatgaaatccatgagattatgaaataccgggatgaagacatgattgttgaacttcctgcaagcttccggactgtccgtgcgcaagttcacttcaccgtccgcatacaatcgacaaaagtgacctttaggcgtgtggagagtgtgagaggagaggcaatggatgaaagtgacaagttgactggctcagctcgatttaactgcctgcggcggacggttttcgcaggggcggcggacggtccgtgccctggtaactcagactgtctgcactgctgtctcggactgtccagatcctaatacggcggacggtccgcggtccataggcgaacggtccgcgacctgatactcaaatcttcaaactttgtccattttctaattttgaatttcaaatctgatttgatgttcatatatggacatttcgaccatttgaagggttagtatgcatgcacatacacattatgtatttgagaaatgcactttttcatatcaaactacttagatcaaac

SEQ ID NO: 88590 - DNA, 364 bp, Zea Mays
tctcggggaagctgtccaggggctagggcgaggttgggggttgttagaaaagattggtcgcgacggccgtgctcgggcagtgatggcgggcggtggcgcttgctttacacggcgaactccggtgatctttggctcgggcggggctttgggtgcgcgagtgcaaacggctaaggcctctggggcacttataggcgagggcaaggtgcagacgcgtggggcgggcgaccatgcacagggcgcgcgctgccgcggccagtccgcgcttggccggtcaggcaagcgatcgaacacgtggcctcgctcggtctggtcattttcaaacgctaattggctcgcgatcttctcgtaactctcccaaatccct

SEQ ID NO: 88591 - DNA, 555 bp, Zea Mays
ggaacccaagccaccttcctctgagcctccatcaagcagccgccgtcgagtgctaattcagcccagttcctgcctgatcgcgttttccccgcttagtctcgttgcggtgtgatcgcaacaaacaccggagatcacggagccgatctggttgcctgcttcaccctcgccctgggatataaaatcaatctccctgtgactccccttggccattagcaagttgaagcactgagagccatagccgtcggcgagccgagcgattccaggttgaagtgaaaaaaatactaaagccactgctctcggcgttcgccgccgttcggttgttgtggggcggtgaggccttggacagagaggttcagagcttattgctgttgtgcgtcgtgatcggttgagtcaacagcgactgcttgcccaatttgtcttacatcgttgccgatccatggctcgtggagggtagcttgactgacgcccagggtcgtggtaagatttctatctcgaagtttgctttgccctccggttcaggtagtgatggtcggatcgaagttcttgcgctgggtc

SEQ ID NO: 88592 - DNA, 663 bp, Zea Mays
tcgtcaagtgtcgaacaccatgagtgatgcatcgacctccggaggtggcatgaaagagagctctctgatgtcgtgacaattatgccgagtggtcgatgctgatgtagtgcaacttcgaggctctagaaatttggggcgtgatagattctgggatcaaccccaagcggtcgcaagatcgccacgccatgagcgcgctcctgcgctcgataccgaaggaaatgtggcaatcattcggtgctcgtctgactatgaaggaggcgtgggaggcagtgaaactgatgcggctcggcgttgatcgggtgaaggaggtgaacgcccagaaattgctccaagaatttgagaatatcaaattcaaagatggtgaatttgtcgacgatttcggaatgagaatcaccaacctcgtcggcaacctccgagcacttggtgaaatcgtggaagatgttcgcgtcgtcaagaaatttctccgcacggtccctgcacggttcacccaggtagtggtaacaattgagatgttttgtgatttaaaacaactctctgtggatgagttggtggggcgcctgcgtgcggcagaggatcgattcgacgacaaggtcaaacacctcgtcgataaggcaggtcgtctccttctagcggaggaagaatggctggagaagcacaaacacc

SEQ ID NO: 88593 - DNA, 559 bp, Zea Mays
gctaataattattaggacaaagaaaaattccattatgaatggtggatcctgactcatcttggtgattccgttttgccctttgaagacttgagttggtgcttatcttcccttgacgtggttggtcttctttggccctcaatcctggagttgccatccgagttgaggacatatggctgaggacatatagctaggatagctagggtacatgaggtagttaggtttaaacataattttactttgcttttgggatatctggattaggtaacctatgatgtaggttaggttgttgtttacggacgagttggtattagacattaatttaggttaggttatgtttgaggaagcagtgtctaacccatatcaccagattaactaacctgttaataactcactttacattgaatcatattagattaggtggtgatctagattagattggtatgactagtttgactagatatgatctaattaatttgcattagatcatggttgttaaactaggtggataagtatgcttattaggataagacagatccatgaagataagatagaatctttt

SEQ ID NO: 88594 - DNA, 474 bp, Zea Mays
tggggggacatcccgagatatccctcgcatagggcagcaaaagcggccatatgttaaaccctattgaaatttaggtgatacaactggatcttgtaatggtgcagcatccccaccaagaaagggtgaagagaaattatgaagacacactcgtgtaagtgcacgaacaacactacaaagccctccgactgatctgtaacttcttcgaagccggggagcaggtagtcgccttcgcggaggagcccgcgtgagacaagagtggccaagcgatttttatcggccagagagcggctccagaatcccatggtgggcacatcgagtggcggtggtgcgaggcgacggcaacgagggggcgaacaaagccataagaaagcaagatgagggagaagaccgaacaacaccaaacctaggacaatcgacccaccaggccacaatcattcgaccgaggacatacaccgataagcagcgagagatgat

SEQ ID NO: 88595 - DNA, 702 bp, Zea Mays
ctcttggttacctactacatcatatagatattctatacaatagtgtaaataggggcggttacaacccaagttttatatgaacccattcttgtaccttcactaggataacattatgattggtgctgacaaatggccttgttgtaggcactaggtggcccatcttatccactgcttaggtattactcctcgacctaaatgtggagtgccttatgtccaaggtcttcgctcgtatccctaaggttccacgttcgggccttgcctgcatgactagcgagcggcggtctccgcccctggtgaggtatttgtcatggccttttcgtctcgtgtcggtgaggcgtcgacgattatcagagggctccgcccatgatagacagtccctctagtcatccctatcgtcttggatgatcccttcgctctcgtctattcttcacagagtctgtttcgaagccccagcagccttagacgggagggtgacgatcggaggcatcatctcgcgccaatgagtccaattgaagcgaagtccccttaaaacttcctcgcagccttcaaccctctgctcatgatagtgaagactagcaagtgattagtcagtcgatcgagtccatgatcgaggtatagtttggccttctccccgacacatcacaagctacaattttatttaccaaaatctaacaaaaatagtttgaaccaggtccacaaacc

SEQ ID NO: 88596 - DNA, 301 bp, Zea Mays
ctagggatgaaaacgggacggatacagccggatacagggtcatcctgtatcctaccctaatgtatttctctcggatacgggaccagatacgggtagttaagattcgggacggatacaagacgggaccgggtaataatccggacgggtaagaaacggatgacgggtactactcgggtaggtacaggataattgtcgggtagttcatccgatgatattaaatgtccaaccatccataagttaagcaatacataatcatgtatatgatagatcagatgtaagaaaggaaaccagtaaaattgac

SEQ ID NO: 88597 - DNA, 800 bp, Zea Mays
cgtggcaagggcaggggcggcggcggcagaggcggcgacaggaggaagaaggaagagaaaggtacgggcgttgttctgcgcaccacctacgcaacctactacctcctcagtctccacctcctttctcgttgtatgcacgcacgtacgtacgtgcatggtgaagactgaagaacccttgttgttctgcttgacaccatggatggatggacggacacgacagacactgtgttgccgatcgcagtagcacttgcatgattgtagttttggctgcttttaattagcatgtgaatggaaaggggaaaaaagaaaagaagaaggttcttcgtttctttatacacgctgccttcctccctagctactaccgatcactgcaagcagcggatttcgtccgtctctgatgaaggatcctgtctctttccccttggagcgagcctggctggcgttgttgccacccaatccatggttattactactccttgtccttggccgctccttcacgagcgccccccgttcattcccgtgttcagaattcagttaggaggtagatgcagaagggtagcagtattaagcagctagtactactaccggcagtctggttgggtcatgcggtttgcaagggcggagtgaattgcgctgccgtacctggtttcagggactgggagaagctgtacgtttcgctcacctatagaacactggttgatagttgatactgagaactttggtttgcttcttgtcctttgcatgcagtggtgcccagcgtggtggacgtcacggtcgtcaccccctacgaatcccaggtg

SEQ ID NO: 88598 - DNA, 844 bp, Zea Mays
gaaattaatattacaaaaatttagaaagttgaatgggttactttggagttcatatgaattttctatggaataaacaagttataggatttattttgtattaaaaatcaatttctaaaattaaataactaaattctcacatctatggactgggcgcactatttacggagaactcaggggccttagggtaaactgtcctagacacagtaaacagatgaatatggacgtcaggttgaattcctgtttacgagggggctcttatgaaaaacgtgatcgcgaaggggtatttagaaaccatggccgttcagattagatccagaggcaatcattagatcacaattactttaaaaagggtcgcacactgactaccactggatcatgatcgaacggcgcactatctctcacccgtccacgaccgcaggatcactgatccacgacctaaaccgaaatcccgaatcagtaagcttcggttcaatcgtaactgtacaacccgagatcaatggctccagctctctcccctaaccaggcggtcaacccggcggcgccgccccgccaacgacggcgaaacacgccggcaatgccccaaactcgttcaccactgcccatacctcaaattgcgactacctacacgatgcggacaagaaggtgaaacagataatagctaacttacccctgtcacggcaaggtcgtggcctggcggcggcaatggcggacgcggcctccactgaacaacaccgacgcgaaatgggggaagcccacttgagcaccgctgtgaaatagattgcaatccccgtcgcaagcaccaggcggcaattccccagtccaccagagggtcccgagcgtccac

SEQ ID NO: 88599 - DNA, 576 bp, Zea Mays
gctgaatcaagaatcttcactggtttttcacgatactgaaggtctttctgaatctgcactgtctcttcttcgaggtgactttctggtgcttgcaggcatttgcggagttgggatacgtggaacacattgtggatgtcggacatggattctggtagttccagatggtatgctgcgggtcctaccttgccaatgatgggatagggacctacaaaacgtggggctagcttccctttgacttggaacctcctgacaccacgcattggagaaaccttgaggtagacgaagtctccttcctcaaatcagagttccctccgcctgttgtctgcgtaactcttctgccgactttgagcttcaagcaaccttctgcggatcagtgcaactttctcttccgcctctttgacaaaggcaggtccttctagtgcttttccccccacgttggaccacatgagaggggtctggcattttcgtccatacagtgcttcgaatggcgacatcttgatgctggcctgatagctattgttgtatgataactctgcgtagggtagactggattcccaacttctatcaaaagctaac

SEQ ID NO: 88600 - DNA, 564 bp, Zea Mays
taaagcattacaagactactccaatctaaaggtgcacaccaaaactatcagaactacaagaggctaagcactctaataccacaaccaagaaccccaaaactattaagtaacatcatccaaagactatagtacacttgatactcttgctcctctattcacacacttaaccaaatctttacttagggattaaccttctcttgcaaagaaccatacaaacttgatagggagggtattaatactagcaggagcacaaggaccacaacacctgtgtagctatccttggatagaactcgagggcagagaagaaactttcactgaaccaggatctcaaggtagctgaacatgggcaagtgaaactgaccttgcacacaaacacattggggaaggactcccagggtgccaacacaacaggagctacacacacatggcaaacatgcacacgcaccacaccagcccaagaacactaaacctggtcagcctccatagccaaaatatcatcctttgttcaacaaaacaaataggggagggagccgataaggcctccctcgtggacaggcttaaatg

SEQ ID NO: 88601 - DNA, 533 bp, Zea Mays
ttcaaattgtgaccgacaatggttccaattacaagaaagcatgcaagcaacttatacccgagtatccacatattacttggcagccatgtgccgctcacactattaatttaatgttgaaggacataccacaatgtgatgaggttgatgaactattgtatagtgctaagcggatatgtagattcttatacaagcataacaggtaatatttatattgtgaaattcttgtacaagcataatagttaatatttctatagttaatctgataatattctgattttttcaggcttcatgctatgatgaaagagaagataggtggagagcttgttagatggaatgccacgaggtttggcacactttttttgttcctacagagtttttgggacagacaagacaagttccaagcttggatggtgtctagcgattggaaaaataatgattagagagatgaggaagacacaaattcacatacgattgtttgatagataggatatggtgggagaaggttgaaatggtgctgaaaactgtgacaccac

SEQ ID NO: 88602 - DNA, 693 bp, Zea Mays
gttcacacggtcataattggaagagttcgagttgcttgattgcttctgcggatgcgcttcccccatcctcacccaaaacctaccggcaaaacctacagcccttcgtctcccacacgcactctgccactcatctctaggttgtgtacgatcatcagcgagaggagctccctcgcttatttgtctctgaaacagacatcattgcttcaggtattctccaggttgttgctgatgcagaatctatattttttggtgcttgaatttttatctctttttactaaattgacatttcatctggattgctcttacccaattgctgctttacaaacgactgaggaacaatctgtttattgaaaatacggaggagattcgatacctttgtattatgtaggcttagcatatttatgtgcttcccaagtccaaacaatcacgatcatctgtaattttccccacaaattcttaaattttatgaaccctaaaattcgtggatttgacttgtttataatattatattttgtgcacccccacattaattattgtctcatataaaggtgattttgtatagttagggaatgaagggagattccagcagacaaaatagcttagaggacaactcacaaatactaagtgcatttccaagggaaccaaagctagaattcctaaaaaacatcacgaaagacttctcaagtgaacgag

SEQ ID NO: 88603 - DNA, 932 bp, Zea Mays
gacacatttgagcaattacttaccaggccgtggcccgagggctggtccggcacgacccgaaattcaaaaggggcggcccgacccaaaatttaatcgagcttgggccgaactgggccaggcggtctgaatctttactatattaaagcatcagtttcgacggtcgtcccgcgtcatatttttataaataatcccttctattgtttgaaatggcccacaagacacattctcttcacattgatcgcatctaatccaatttgtctatccactcaccgtcctcaacggatctatgccccacacgtcacgcgagcgtctcagtcaaccacacaatgacacaaacccacacacaccatgtcttacgttcatagcaacagccggtatggaaagtgggcacgcgccaaatgcaccacgacacgagcccaacaactcatgcacgctggttcgtaggggacggggaaatcagtttcagcagacccacacatgccgtgtcttccatgcatagaaacgtgggaaagcggtctcagcagacccacacacgtcgcgtcttccatgcatagaaacgcggggaaagaggtttcagtagctacggggtggagtcattttactcatcctaatgcgcccaccaacatggctacaaaaagtcgtactaagacctctcaagggctaggagtggtggatctactcgcagccgatggctgacgctctccagctaccccgactcgcctacgtcctccaaggtacccatgtacgtacatctgattttctggctcacttactccacgggcatatcttcacaggcctatccaccgagttcgtgttgcgtttgtgggacctaacggagaccgacgctgccgggatgggggtatcgatgactaggcacgggacacacggagggcatcggtggcaagtcaccaaccttaggcacgacgacgggc

SEQ ID NO: 88604 - DNA, 447 bp, Zea Mays
gttaggttccatacaagatacaaaagagaaatgttcacaaaatgaagctatacgagagcgagtttgaacacccttactaatgtcgcccacaatttgataaacttggtgatctttcacaatagaatgatggattcttgataccattttagaattactagttgaagcatgaggagggaccgaatgacttgaagtatcttgatcatgagcatccacattttcgtcattttgttggctttggtgattttcttcatttagggttgaagaggatggaatgacaaccacactactatcatcatcatcttcttttggctttatttcaccaatagccattgttttcatagcatttctcaattgagctccaccaacatcatcaagattatcgttttcatcttgagacccatttgtttcatcaaactcaacatcatatgcttcttcaataatagcatg

SEQ ID NO: 88605 - DNA, 527 bp, Zea Mays
gccacttgcctagatctcacttacagtagggccatgagcacaacacttttggtggagaccgagaatttggggcagggaaagacaaaaagatttgggcgtgaagggggtgaaggatcctctcaaggatccgataagtggtcgaggttggtaattcgtccttttaacccaaatcgctcttttgctcgtccacccgcctatcctttcaagcaaccagttttcatccatcccactactgcccctgctcaaaacaatcagccgagtgcccctagtactcatttcccggccttacccagttcatctaacaactgcttcaactatgggaagtctgtacatttcatcaaggactgtccctacccaaagcaaaataaaatccaatttctaaaaggcttctggaagcacatctcaagacaagggaaacatggcaagcactcaaacagacaaagatcaaaggaaaactggacgagtctactatactcaagtggctaccaccccggaaggagagcctgtgatgatgggtacgttttccg

SEQ ID NO: 88606 - DNA, 397 bp, Zea Mays
gagagtctgtcccttgtaacgttgtgtgccttcccttttatagtttaagggaggcacatacaaggatgctgagccccgacatgtgggcccaggagcataatagtaggaatacattatgtgaaatagtaaatgcagacagtacacaaggatcctccgccttagtaatgtatgagcaatcagcgggagtcatgatgaccgcagtccatgcagcattgataggcagtaacccgcacgagtaatggtgagtgattgccctctatatagtaatgtgcgaatatatgtgtggcccacatatcgtggattgggcacgccgcctgtcagtggaatggacaggcgcacgccttatccgtaatgaatgcgaaggcgcgcgtagcccagaggcgtcatgccaggttcc

SEQ ID NO: 88607 - DNA, 326 bp, Zea Mays
ttcgggaggtggagagagttcagctgcattgaggtacaaacatctgtgagtgtcgaagctgaaaaacttacaaaaataagttaaaaatgcatacctataagtctagcccgctcggcagcttctttagctctttttgcctcttctaaagcatcatgagattccttttcatttcttttgatggcttcatcagcgatttctcgtccacccttcagccatactttggaataaaatctcgcacctagggtaatagcttcaactgaagggtttctgatatcatcagctgagaaggcaaagtatggccaagttacaagcttagcatgatcgca

SEQ ID NO: 88608 - DNA, 339 bp, Zea Mays
attttctcttaggtatactggtatccagcctcgacacgtcgagcctaaatcccatgggggccaagtaccagggagaggttggtaacgctacacacagcgaggacaaataacatacaagataagtgctaatattgcttgattaatggttctcaaaagtatgttacaccaccaaaggttattacaaaccgctccccagcgggacccttgccttatctatgcagattcggctactcgtcatcagcagggtcgtgctggaagcgctcggccaccagctccatggcgttttgtacgctctctcgggcggcgtcttcagtggcggcctccggaccagcgatcacc

SEQ ID NO: 88609 - DNA, 621 bp, Zea Mays
ccgacttgttacctgaagcggtctgggcgctaaacacgactgagtgcagggcgactgggttcacccctttccgccttctatatggatcggaggccatgaccccacaagaaataaagcatgggtccccgtgaacagttgcgtcagctgtccccgatgtggacggacccacttcgaaggatcttatcgacggagaccgcgtcttcactctacaggctctaaataaataccaagcccagacaaaagcatggcgcgacctcgcagtcatcccgcgggaattcagcgaaggggacctcgtactcgtctgaacagcttggacagagtccaggggcaagctggagcccaggtgggagggccctttcattgtcaagacgaaggcctcccccagcgcatacaggctcgcaacgccaaacggcgaagacttggagcattcctggaacatcgataatctccacaaatttttttgtttgactcatcagggccagctcacccttgtaattcgcaaaaacaattttattctggcccgcactcttttcctcccggggggtgaggtttttaacgaggcggagtcatgtaatatacaagtgaaaatcccccgcaaaaatctacgtcgaaaaaagaccg

SEQ ID NO: 88610 - DNA, 1111 bp, Zea Mays
tgtggtcgaagacaaataagcataagaaagataatttaccaataagaacaataaaaggcaagtaattgactcacctgaagattggagaggaacgatggtagacccaaggcagggggagctatgtcatggcttgacgggggaagatcagtaggaacaatttgaagggcattgtcaggagtgatctcagccccaccagcacataacatacttctcgcatctagctcgccaacctctaaggcgacttgtttgttcaaagctgtggaagcatgcatcgctgtcgccccatcggatcgaggtggagacgacccaacatggacgtccatggaggtgtgggaaggagagcccacctgaacaccctcgggggctgggttgcagcttgcgctacccaccaaagccggatcactaccggcaacaccctcagggctgggtaactaccagcaccaccctcgggggctgggtcttctgcagtagacacctctaaggatgagggctcctctgtcacctccatgggagtcgggcgactcgaaccaacgtcttggcattgaagagtgccctccaaagtcgacgatgcatgagacactgctcgagatacctccagtccaacgtctggaacctctgaacaaacagccatcacatcatcggcagttggctctgacagcatatccttagggacgacttcctcaagggcctgatcaaaatcttatattgacagtccctgaagactgacaagagccaacagagctggagaaggaatatcactcccccctcactacctctgtaatgctggctgttcttacggattagcgggacttcttcctcttcttcttcttcatcttcatcaaatatacagacaacaacttgtgcacgatcacaacccttggcatcaacctcaggaaggacctctgctagcacctcatcatgaaccagagcagaaggaccagcaccctggtccaagcatgacagtcgctgaagccaccttttttcttcttttcctcaacaggtgcagttgtgaggctaactcggcatggacgctttgggagagcaccgtcaggcttccgaatctccaccgctttaccaagctcttgtccatccgtgatagccatcggctcgg

SEQ ID NO: 88611 - DNA, 421 bp, Zea Mays
cacagattggagacaagggtgttcaggtcatcaaggaaatgatcaaacaaaaggtggacaaatacaaatgcttccatcaggacaacaaaggaatcctatggtttggagaccgattggttgttcccaagaaccctaagctcagaaagaagatattggatgaagctcacctttcaaaattctccatgcaccccggcagtaacaagatgtatcatgatctcagatccttatactagtggaccagaatgaagagggaaattgctaagtatatattcgaatgtgacacctgctagagagtcaaggccagtcatttgaaggtagcaggcactttcaaccccttcccataccatcttggaaatgggaggatatttgcatggattttatcgtgggattgcccaatacctctcggcaccatgatttcatt

SEQ ID NO: 88612 - DNA, 741 bp, Zea Mays
ggcatggccggcaggacggccctggtactttgtgttgtcttttgtgagatagagagtcgaggctgggtcgggagcacgagcaggcgtccgagcccatcgtagacaagacgtttgtcaaatcatagttgcttaaaacagtgctcgacatggcggaagagtgtggtgatctggtcctggcgtcatccgagatggcggagagtagattggacaccggtcttgttgttcctattgccatcctatcctcagcgaggttggcggtagagcacgcgacatcgcgcttttctccgttggtgcagttggcgaggcctagctcgggcgagatagagatttctcccgaggtcgaggccaggtcagaacactggtatgcaatcacgattggagtggttggaacaatgatcggagtggggaaatattgcctgatattcgcgccttgactgtcgttgtgggcaggcgaaagtagattggatcagggtcgtgtcaccctttgttgactttggcgcccgggcggggtaggtgttcgtacagactatattaaatgcacacgtcctcgggtctaagaagtcggtcgaggtcgggctcgtgccgagaccttgcgcgggataccctcgggcgaggctgacatgcgtttcccgcctgaaggtgtcctcggtgagtcgcaaacccacgcaggttgtaacacctaatattttattatgaaagttcagtaaaattctacataaagatttaagctaaaatatgttt

SEQ ID NO: 88613 - DNA, 486 bp, Zea Mays
gttaacaacacttctaaaaatcttaagactaccctaataatcattttaagtagaaattttagcatacttttggagttgctcttagtcaacaaatatcccatacccactctcggttgcgccaccggtctcaccaacaacgacgactaactccatcaagattgacaatggccaacaccctgaacgccatcctccaatgccgatgcacacccaggaacgcgttcaagccccagctcctctattccaagatctccttctccttgatttctattccatcactcctcccactgagccaatatgaagcatatgaaaaaactaaaaccaaagctctttctacgctatcctacacatcttttttataacataaggaatgagaaactacattggtacatgggtacagacactacccagaagagatccaactactcgtatcgtcatgtcgttgcggttgttctgtacactccacgttttcaacgtgccatagagcga

SEQ ID NO: 88614 - DNA, 529 bp, Zea Mays
ggacaatgaactcaagcataccagcacaacataatccaattatactcattcaaccaaaacaaaaaggtgagacgaggtttggaataagaaagatattatgacatcaaggagttgggtaagaattatcaaggagttagacaagacatatttgttggtggccaagagtgaaataagataatcatgaactattaaattcagaataaatgatacaaccaaggatataaagtgagttagggagaaagtgttatcaaggagaaaagtagagaggcaaaggtttaatatcaaggtagatattgcctaaggatggcaatacaatggcaaggaaacaaaagtataagaagtcaagggttatatagcaatattagggattagaaaatcacttataatataatattgacattaccgatctagtcgaaaatcttaatactaaagaactatcctatcaacctagccaagaagtcagataatagatccaagagatctataacaaaaacttcttgcggggcggggataagacagagaatggggc

SEQ ID NO: 88615 - DNA, 355 bp, Zea Mays
gtcagcaccagaaattttggtccatgatgagaagtgtatggtcaatgaggaccacattgaagcctactatgatgattcgatgagctctatgcttccgcataatggaaaaaaatccttagcgagcagtccgtccctaggctagtgcaccgtgactataagaaaagctccacctcaagcacgacaacaatgaacctcattccttcattgaggtagagggagataaggtccgacgtgtcatgatgcagcaggagatgcatgtcgtggagtgaaattggacatcgaagctgaatgatcttcctcttggccatcatgccatcactcttaagtgggtcttcaagctcaagaaggattagtc

SEQ ID NO: 88616 - DNA, 771 bp, Zea Mays
gctggctcctagagacacgaggtgccttgcatggacaccccgcacatcgccccaagaggcacctcttgcctcggccctctaggcacctcctacactgtccctggggcacctcttgcactagcccttaaggcacctctctcattgacccctagggcacatcagacatcgaccttggggcacctcttgctctgaccttggggcactttgcatgccagccttcgggacacctcttacccccgaggcacaccacacaatagccctagggcacctctttcttggccttcggggcaccctgctcatcagcctctagggcacctcttgccccggtctagtccactatcgatggctttctcttccacacactcggtaacctcggactactcgttgtctacgcaaagcaatcattcattcaacacatttggtaaaatgataaagaaacggtacaccaaccattcgcaatcaagtaaacacaagttcaataggaaaatacaaacacgagagtgaaatctaggttctagggcaggttaatacacctagaggtttggggttctcttagtattgtctatctcattggattatattacttaacttcatttatcttaataaattaattaccaaattaaagttattccagagatgggatcgtcatacattacatgagattaatttcacaagttaaacacttaactactcattagtgtttcctttctattttctttttaataaacaatccatcactttaaatcaacatatagcctagacataaaattt

SEQ ID NO: 88617 - DNA, 459 bp, Zea Mays
gagacactgctggagcaagttgaccttgccacatccttgaaggagcgcaacaccaccctctgggcaggagatgaactacatgatccatcaggtgatggcgcaacagtcagaggtcctaaactccatggagggggtcacaacatgagtggccaaatccattttggttcaaaattacactttatcggggcccatgtttgggtcacaccaaggagagaagttgttccatacttggccggcagagctgatgtgacacgaaggcaaaatttatcgtctaccaccctagagtaccacacgacatcccctcggtctacgaccaaccaccaacatacataatagagaggtttgagtgcaaactacaatacatgcctctacgtgagggggagcaaccacctcggtggccaatacatgccacttatgataaaaataagatcaacaatcctgaattaattaagtggcaag

SEQ ID NO: 88618 - DNA, 1012 bp, Zea Mays
cttcaacctcggctttatgagcttcggcctgggcgttgtatttcgcctcatcttccttcactatactcaccaatgaaattagaattctgtccttctccagggcttcgtttcttagctgaattacctctgatcgaaggttgccaagagctatcgtgcagctttcatcctctacattcttttgcgccctcagggcgttgctaagaattaagccctgcgaaaaagaaggataaaggtttagcatgagaataagactttattcccaagttcttaaactttaagtttacaatttatgtaccttcaagctgttgtatgcaaggctatccgtcaggtcatccttcgacatggcggaaaggccaaccttaagcttcggaaatcacatacttttagccatctcccggcagacagatatctctttgttgtccgtgagacagtataagaaaccatctttgtctataccattgaacacgaaggccccttttgggtatttcagttttcgggcatagtgattggcctctgcaatctctccttcagataacctctttcccgaagcatgtcaaataataaaatcaagattctcggacagtgctttgggaccaggagatttagcttcttcggctatttctttctccgtagctatggcaatacctggagattcttgttcagccccttcctcagttacagcgggcttcgtctcagaagacactgaaggcccaacttcggcttcagccttggctgtagcagcttcggcgactttcttcgcgggggcaggagttaatgcctttgtggtttctatgacagcatctagcacgctggccattctcctcctcttgggagttgtggcaggagcctttgtcaccttcggcagttctgcctctgtcggtggactcagaatttttggcagcatcactgttttttccaactctggctctttggccacaccatctttgactttggctaacccgactataggcaccttcggcactaaagtcgatccttcagtgctccgaacggc

SEQ ID NO: 88619 - DNA, 849 bp, Zea Mays
tcgtccaatgagtagcaaaaaattgaggatctcatgaagcaatgggatgaataaactctacaaccacacacttgggttcatgaagaggcgaaggagaagttcttgtcacacttcatagtggaccgacatagaagattaccaagtaaggggagatcaagctcgcttcccttgtaccttcgctccaaattatcaatgtaagtaattctaatggtgatcaatctattaagcattatatagatcagccaagggattagttaggacaactcatgagaggggtagaggagtcactcaagaaactcgcacgtgcattcgaaaaatctactggtcctagtttcccatcacatgaggctagcaccaagatatttatgcctaacccatcaactacaaataggcccttacaagaccagccattttatggtataccgatgaactcatatccaaggcaaccattgcccccataatccatgtgcgatatgttagcaccactgcctacggtcagaccgtctgagctcaatctcggactgtccggcatcaacctgaaccgtccgacgtaccatcacagaccatttagaggcccaccagaccattcgatgacctaccgcagatcatccaacataccacactcagattggtacagtacacacaacacatagtcacgtcctatgccatagcagcactaccctcctccaccttcgggtgcaccaaagccaaaacacaccgatacttagaaccgaatattgtacaacacatagggagttggagaggttcacaccaccacacacatattatcatcatatgaacaaccggtataataatgcctagacacctgagccccacgtctcagatccg

SEQ ID NO: 88620 - DNA, 679 bp, Zea Mays
gccggcagaagggcaagccatgcatatttctcaaggtactccaatgtggattcaagaaattgtcgccagctacagcgacgatccacaggcacaggacctgttgaccaaactggtcgtctccccggatgctgctgccccatacactctatctcagggagtcattcgacacaaaggacgagtgtggctggggagttcggaggctatacaacgccaagtcatttcggcccttcatgattcacctattggcggacactctggttttccagtaacctacagccgcattaagcaactgttctattggaagggaatgaaacaggcagtgcgtgtgtatgttcagtcgtgcagcacttgtcaacaggccaaaccggatcgatctcgttatccaggtctgctcgcacctctcccagtgcctccccatgcttggcactccatctccatggactttattgagggccttccgaagtctggtgtcgtggattgtattctggtggtggtggatcgtttttccaagtatggacattttctggccttatctcacccctttacagcacctaaggtagccaaactattcttggatcaggtgtatcgactacatggtatgcccgacaatattgtttcagaccgtgatcgtgtcttcaccagcgccttctggcaacaattgtttgcactgtctggcaca

SEQ ID NO: 88621 - DNA, 870 bp, Zea Mays
gtggtgttgagccctgcttttgcctcttcttgaggactagtcttttctacttggtcgtgttgagctgttgcccatttcttttaggaccaagctttactcgcgttggatgaactgttttggattttatctagcttttagtcgttcacgttgtttctcttcttcttcctcctcctttctagtatatatgttcatgtggtggtgccgacaacagtcagggataagatccttagtccctagagcccatcagtcagcaaggatgctaggaagaggtctcttgcaaccaaggaccatcgactatcaggaggagggaggaaatgtttacccttgaagcacccactccaaacgaaccctgaggcactgatccagggttcgggcatggcgaagctatacaaggggccaggcaaactaaagggaaaccactcgagtggatccctcactcggtccgagattcacccaccgtaagtgcctagtcgcattaactacgcctggcaccgagccacggtagaagcatcgggccaccacccacccatgacctacaagcccctcgagctacagagcactcatgaactacgaacccctcgaactgtggcacatttatggcccatgcgtaggacacctgcagggcacaacaagacaagccgcaccgagaatgagaccagagtgcgtaggccgcctgcagggcacaatgagacaagccgcaccgagatcgaagctatgaaggccaatagtcagagtagcttgaataatggcgtgcaggccccatgctgcctgcaccgtccgccatgaagaatacaagacgacgatatgaccaagatgctcacatgagaacatgacttcaacaaggtaaaacgctcggttttaccatcgccc

SEQ ID NO: 88622 - DNA, 1264 bp, Zea Mays
gagccacaaaaaaacctttactcgagagcatcatgaattgattctaatcttcaacccaaaaccactagagactccaaaacaccgaagcactatgcaaaacaatccaatattgattacctgcaccaaaaggttagaaagaaaccaattcaactatctgcagaaaaatcatgaacaactcaaaaatctccctattttgtaggaagcaagcgcagagggaaataagaggatttgtaaagtatgatcgtgaacaactcaaaaatccatgcgaaaattcaaaatgtcgagaagaatggggttttgttggggtcttctcaaacaaactcgaaatgggatgaactgtgatcacaaccaaaaattgtttgaaccacatgctcgtagtggtctaagaagtgatcttcacccaaggcaatccttaacacaaaccacaactcaaggaaatcaaggttctcttagaaaccaaggagacaagagaagaatcgagagcgaagacaaaattgaatcaaaaactgcagccaacacaaactgagcacatgatttgagaaaactctgtggatggatctgggacccttcctttgaatgatgaagtgaataatacaaagacacggatgtagagttcaaatcatctgttgatctcgggctaaacaactacaacctagataaataaaactagagttttctaaacaagagcctaatgaaaatagccaaagagatggatgtccacaacagcccacacatctatttatagaagagtatttcactagtctatactactcctagatatatagagcttatccacttagccgggtgcaaatggaccaactcctggaatatgcatctgacggtcatgtgctccaaatgaagttgtttcacctcgacacacccttcacgatgacaccacgtgccatctccgattcccgacgaaaacacaccaccgagttttgaggcccaaacatagcaaaatccgccatctgtagcgttgggtggttttgaggctcaaccaccaaatcgttgtgagtagcgcaccacttgtgcgtcccccacgtcctaggaacatgtgccgctagtccacgaccgtgtcagcgccacaatctgctctgccacgtccttgcgccggtgcatgtcctaggtatcagctaccatagctagccactctgcttctccagtccctcggtcaagtcccatcgctcgtccttcactgctctgggtctatcggcactaacctgcatgaccttcaccttcatcgttgacaccgtccctgtgctcc

SEQ ID NO: 88623 - DNA, 852 bp, Zea Mays
actaaccggctgcacaggctccggaccaccccatgaaacgagcactcgttcctcagagccgacccccaggctgtcgggtccccctgctttcgcatagaggtcctaaactgcaaccctggccggtcaatccagatgtcattatgcctggtgggatgggagctgggcaggtgggttagataaaacacgatcagaaactgcagggtgagaccgtggagcagtaggaaattgctatcatagaggcatatcttgagagggtagttttcctttatagctaatcatgcatgggtgcgggccaacagcccaggtttatgggggtagaccctaccgggttggcatacccgtgtgcactacctagttacaaaagggaaaaacttcgacccctcagacttgctctatagataaaacttatagagatatttcgacactgggggaggcattcgttcggtcgtagctagaaagttgcccttgggtcggggtacacccattaccatgaagggtccttcccagctgggggagtgttacggagccctgatttggtctggtacctttgtaggattaggtcccaaccctgggttcccatctgcatttgacgaaggaggccccgcctttggctgtggtcattcctggatgaacctatcagaaagctagacccgtggggaatctagatgggtttccggaggaaggcaggcttcagctccgtaggccgggggacatgggatcccgctggtggtccgcctagtcgtcgtcgtcggagtgggagtcttttgcgaagacgtccttcaggtccccttcgggtgactgatacccgaggtcctgttcagccgcagccacctcgccgtcgtcgaccttttc

SEQ ID NO: 88624 - DNA, 352 bp, Zea Mays
cccttgtagtctgatagagtactccattttgtaacctcaaactcagatcaataccatcaaaacaaagcatatggcgtagggtattacacattctgacgacccaaacctatataaacctttgtgttccttcgtgttgcacatgaaccatcgagctagaatcaatctcgtcaaccactaaaaagcactgtgtgatatatgtcgtagtgtgttgctggtactaaacatcgacatctagcgcaccagataggggaggcgacatcgacatcggttagctccatggacgtcgtcttcagcaacgtcatcaactttgttctgggtgatatatttcattttggatctatttcctacgtcg

SEQ ID NO: 88625 - DNA, 624 bp, Zea Mays
attatggcaaggaaagactccatcttgggtggtgatgcatctgaaaatatggtttgacttttgtccttccttgacgaggttgatattctcttctcgggtcttggtgttatcatccaagttaaggacattcggttttggtgtttccttctggggtttaggtatgtagatggttgtgaaatgtgatatagatgaaacatggtttttttggtttttaggttggactagataggttagaatcttgtttgaaatagattgggggcgagaaaggttatggtaagggaagatttcatcctggatggtggatcctgacttttgaagatcttttctggcttatgttcttcattgccttgatgaggtcgatcaccttcgatccctagtcttgacgtcatcatctcagctagggacatatagttaagatagcttgtagataagaacatatagctaataggtagatggcataggacgagtgtgctatggccaaacctggtctagttgctttgttaggttggctaggtacaaatctttaggaacatgtagattaggtgggtaggttagaatattttgttgtgaaatagatagtttaggcaacctaacaagaatatataggttaggttgtttgtgtat

SEQ ID NO: 88626 - DNA, 499 bp, Zea Mays
tgccgccatgggcggctgtgtcacgctgcgaggggggagtgggaaaaagggagaaacacatggcacgtagattagccgatgtgtggttgtgatcgacttgagataccagttcggctggagcacgctggcgcgtctgatcttgatccgataggtggcagtgatcttagacatttagaacctgtgccatcggatccttagccgatggtcgtaatccaagctgacccatatcgggttatggccgtgtgtgggccgttggtttctaatcgtatggcccacatagcataccgattgggattaggtcccaaccattgatctgtctacgcacgaccacgatcacacgataccccttcgccatggaatttttgcttaagagccctcagacttctaggaagtaaacccgccatccactagagatcaaagactgtaacataaaggtcctgaactttatgctttaaaccccgagcttcgggaaaattatggctgcagcccaaaggtcaat

SEQ ID NO: 88627 - DNA, 713 bp, Zea Mays
gacgcgctgaagttttacagctcagtgatcggtgttgtgccatccatagtggcgaagtcaccggagacggggcagacgcgatcgcggtgggtctcgggtcaccggcgagggctagaacgggtgaagaaggtccggcaaactcactggcagggctccagccacgagaacgagaccagagatgagagaacggtgaaggaaaggtactatgggcgggtcgggcaacaccgatgtagaatcccggccgcggagaaggtgtttcggccgtgctaaggcctgaactggcttcgaaagggtatggggaacactacggaccaacgcaaggcatagggcggtgctaaattggacagtcgccacgcgggctcggtgaaaccggcgcggccaaactccggcgaggccaaatattctaagaccacgcggaaataaggtaaaccaagcacgggaacgatttcctcacctcgggacggagctcgggacggcttgacgtggcttatggagggctggacggctggtagcgtggccgcggatctccggcgagcccgggcggcgacgacagagcgcgagagagggcgagagtgtgcgaaatgaggcaggggagagagagcgggtgcgggcgaggttcaaaaaggagctggggcgcatgggcgagcgatgtgggtggtctccacggcaagtgcacaaacgtgggtcagcggcagttgcagggaagacggagc

SEQ ID NO: 88628 - DNA, 468 bp, Zea Mays
ggacctttttaggccccctccttccatgaaccttgctgatgaacggtcttctgcagcagggaatgaagtatcaaaggatgacgaagactagaatagtatagtttagatgttatacttatgtaaaataagtactgaagtcaagttgtatgctagagtctgtataattacattttggtaatgtaatatgatggtgtatgctggcattttatattttcccaaatatttctttgcctcagatgccatcacagactcgcacacatgatggtgcggggacttcctgtggtcgggaagatactcctaacccgccaccagtaccaccaacgttggccgaggctatcgctgccttggtcaatgccaatgcagataatacgcgcttcttgcgcgaaatgataggcaatcaattccaacagcacggaggcagagctcctccgcaaggaccgcgtgaaactacatatgtggaattctctg

SEQ ID NO: 88629 - DNA, 388 bp, Zea Mays
tcgggctcttggatgaagcagtggttctatgtcaagaatgatctgagtgagagggaagatgtgagtggtataatccagcttcacataaggtcacacttcagcatcaggaggccatcgattgcaagtgggaacgaagtgcaagcatgtttgatggctttcaacacggtgtgtacttacattggcaccagggatttggttcaagagcatattgcttacaaggtgtggccgcttgtaaatgactgggagatgccgaaggagactgttgttggctccagcaaagatggtctagtttatctaagatacacctatcgctatagaagtcaatttgatgagccgaataatgattggcttgaggctgttgaagataccagcgaagaactgttgggag

SEQ ID NO: 88630 - DNA, 1712 bp, Zea Mays
gtggaaaacctcctcatcaaagacaacatgacgagagatgatgtggtgggtaaggagatcagggtagaggtacccctggtcaagggagtaaccgaggaaatgacagcgagtggagcgggggaggggggtagcttgtgaggagcagtggcggaggtgttgggataggagacatagccaaagactcgaaggtgcgcataggaggggttgttccatacagagcgaagtgggagtgggtgactcaccgccttgaagggaaggtggttgagttgatgagtagcagtgttcagggcctctgtccaatagctagcaggaagagacgccagcaaaaggaggtagcgaatcatgttggcggtggtgtgaataatccgtttgactcgaccattttgaggggaagtgtaggggcacgagagtcgcaactgaacgtcgtgggagagaaacaaggagcgagaggcggagttgtcaaactcgcgttcgtatcgcactggagggcatgaaccaggtgacagaactgtatggagacccaagaaaagaagtgcgagagtgtggaatgtaccagactttaatcgcagagcaaaagtccaaagaaagtgagagaagtcattcagaatgactaggtagtatttgtaactagagaggttgaagacaggagatgtccagagatcacaatgaacaagatgaaatgcctgagcagctctggatgtggaagtagaaaagggaagacgcgaatggcggctgagctgacatgcatgacaaaggttctaagaggggcccttggtccaagatatatttgagctactggagagtttggacatgacgtcaggtccaggatgaccaagacgacgatgtcaaatggtggaggtggtggtagtagccagagcatgaggggaggacacgtcggtggggcaagcagatggctggagcgtgtccagggcataggctagggcaacacaagaggagggaggtgggtcaagacaagagatagagtatagtggaacggagatgtcatatcgagcgagcacgacatgggtggtatagtgtcgtatagggagtccctagagatcgaactacataggacaacagttgtcagtagtgaagggacgaaccaagagaaggggttgaatcatatgaggggcaacaaggacgtcgttaaggtagaacaatcccggaaaaaccgaatcaactactgaggtgactaagagggtggaaccgttccccacaaagatcgaggaaaggatgagaggggtagggaggcgccggagtcgaccacccaatcggtgggaggagggggtggcgaagacatagggtgcgagaagagagccacgagatgtgcccctatagagccactagaaggtgggggagacaacaaggtctcgatcgttagggaggcaatcgtagcattggggaaaacaagcggcccaggagcatggtgacccgcctgggggtggagcgcgacgcaatcacggagaacagggttcatggcccgatcaaatgccatgaatgtgctctagagaaactagccgtcgtgaagggagacacgtgcacagtagggaggcatgggaaccgcaacggaggtaggggtccctagaagtgagaggtggggcgaagcaggaggtgccgagggcggtgggacacaataggatggcatcgtcagaaaaaatagaccgagggacatggtgagggagccctgtggacgagctcgaccacatgaaggg

SEQ ID NO: 88631 - DNA, 543 bp, Zea Mays
tggttagaatctgggtgtttggttcggctgctgtggagagaagctggtgggtagaatttgggtgtttggatacgcagattatgagattgtagattctgattgaaaaaagaaaacagataaatccagacaaccaaccggattattaaatatcagtttctgaagtctatatgcttaaatgtccaaattatcgtattgttaacatctgaacatgaggttttaaggtacacttaacaactgtaatggcagcagcgcatggttatactgttcgaaacatgagttaaaccttcatcagaaacatgtgtaattgcaacgctatagaaaataaatgaaatatcaattgccatcgatatactcaagcctaaatattttttggcactgtagaaaataagccgaaatatatcaatttggcactgtagaaaataaatgaaatattaattgtcacatgcaaacaaaagatacgtacatgcaaaaaagctacggacaggcactcggtcgcaggggtgcgcgcgagccaggaatcaagcgacttctgccagacgtgac

SEQ ID NO: 88632 - DNA, 1048 bp, Zea Mays
atgaggtgattcacggcgacgtagtcgaccaatttgggggaaaacccaaattcaacggctatagtggctaatcgaggacagggatagatgctctcgctttgtgataacatagcggagcagactgtgccgttaatttataagggcgctaagcagtggtgccaaattttgaaagggaaaggctggcggttgaagagagaggtgagtcactggcgtgaactatcgtggcgttccctagggtaatgcctcaggcgatgaatagaccttatacagatatctactgcgacgtggtagttcttccaagcacgtggcgcggctacgaactccggcgaactccggcgaggacacctctgtccaatgcgcggcaagtgtcacagtgaatagcccggtgataaggctctactcctcccctgagttgagatctttcattgccaatagttatccacaagccacggcgcacgaatcgcgacgaccgacgtcaatcgcggcgtagggtcaccggcagcaagattcactaaatccgcagatcttttgccactgtaccatctgaagcttcgttagttgttctgaccgaggatcttcagaggcatttttcttaaatttttgcatgagaacttgctaatctgtctacagcaaacttgtagccctacatacaaactacaattctgctatagagatcttgctcagttgctaactcctttgagcatgaatcaagcctaaagttcttcaaaactcactgatagtcaatattcagtctctgtattatctgacagccagactttagggccaattatctccactttttttgtataacaacaatgcttaatcccctaagcaaagttgtactcctagagtagctctagactttttatgtgttgaccctaggcaaaatctttgtatttttagatcgacagagctccaaagtcagcctggctcatcagttttcagacttagtcacatgagaggaattgagtggctttttgcaaataagcccaattcacatcttttgacttggaaatcctcaaaggtgtgaaccttatgctttgaggtg

SEQ ID NO: 88633 - DNA, 597 bp, Zea Mays
gaattatcacatgagatagcttccgaataagaaggttcaaatgaaacattagtttcttgagcagcaatgagagcataatgagccatactatcaatgtcataatatcaatgtggcaaaacagtattccttctaggtctaccttgagcaatagattgattgttactaataggaggtacaaaacctgaaattgactatgtaataggagtaacagaatcaatattaacagtacatctacctcaagattctcatcagtagtttcaggtacagatgtggatgaggaaccactatcagaaacacctccagaggaacaaaatgtactttcatcaaaagtaacatcacgactggcaatcaccttcttagaatcagcatataataaacgatatcctttaacaccagaaccatagccaataaaagtgcatttttgagctctagacacaagttttccattgttaacataagcataagcaggacaaccagagattctaagattagagtaatcaactagttttcatgtccatacctcctctagaattttaaaatcaatagctgaattggcagagtgattaattaaatagcaggtggcaaaagcaacttccg

SEQ ID NO: 88634 - DNA, 300 bp, Zea Mays
cacaagttttcaactcacgatcgttaaagtcagtgtctgcagtagtgaaggttcgtccgcctgtccaagtgctacagcagtaggccaagaacaacaatgaagatctgtccgcctttacacggtcgcgatagggacagacgagtggcttcacatgaggacgcatggagagtggcaaaggctagagctatgagaatatggataacagagatatgtgcatgcaacaaacctagaaacacaatattcaagaaaggaaatgtccaaccattgtaggactttccctttgaattagacacatcgatt

SEQ ID NO: 88635 - DNA, 673 bp, Zea Mays
gccttcttccgtatctgagctaagtcgctccgatccagccgaagctggggcaaaatcggcctgagagccagaattgaagacgacatcgaaggaaccgaaggctttgagcccattgcgagaaacgaagctaccaagggcatcaaagattactgtagtaactccaagaaggaggacaatggacagcgtattagatgttgtgatggaatttgtgaaggtacaaactcatgcttcagcgcctaacacagagggtgaaaccttaaagaaatctaacgaagctgctatggcgcgggctacctctaaggctagaccctcagctcccgccgaagcacaacctttggggactgctcctgtaatcaaggaaaaagaaaatgtccctaagaaacttaaatctcctgctccggaagcacctgccgaagagttggattttatcgtgcgacatgcttcagggaagcaattgtcgaaagaacagattgccgaagctaggcaatatgctagggatctgaagtatccacaaggatccttggtatacaacggcactgatgaagatgattttttgtattgctttctggataataaagaggtatctgtttgccgggagatggtgaggaacatgggtttcccgaagcttgagctcggtctatctgcagtgtcaaaggatgatcttgcagatagc

SEQ ID NO: 88636 - DNA, 561 bp, Zea Mays
tgcccacatagtggaggcgagcaggtgaacccaaccgagaggccgacatgcagggaggtgagtcatgagagggcaactcaacaggaaggtagtgtggtgggaaggtgtgtggtcagccatggcggagaggtacagtgatgatggggaggggaccacctgtggggaggtgcatggatgctcacaaagagtgttccgtgagagacgaaaagagatagaacgagaggaaggtaagtggatgtcacattgtctcaattgatagtcgacctcgatgctgagatccaaggcaccgattttggtgttaagatgcacaatattgagtctttgtctttatcagtgctagatcatcaccacgtccactgcaactccaagcaggttagcaccagtagtcaggtgtcgggacgtgttatctcgatgccatgattcacgatggtgagtctaggatccaaaatagaaattaaaacactcagatacctaaatgtatttttttgaaaatagtctaaaataaaaatttaggatggtgaaacaccaatatacaggatcaagtaacgtctaatctctact

SEQ ID NO: 88637 - DNA, 725 bp, Zea Mays
tgctttgaggtgaactcattagagtcgtttgctttgaggtggaaatgacttttctgatgaaagcataatagtgaggcataccatcttcctcatcataaccctaaaccctaaacccacccaaatatttgcaagctgtaaagcagacgtgatatttgtcaagaaaataggaaaatatttgcataacaaggtgttctgaagaaaactaacaaaagagaagaatgtgagtatttacagaagagttttcaatagcaatagttaatacatgttgatagataagtaatccatgtgttcttcatcgtagtctatcccttggacttgagcatacccctttgcaaccagcctagccttatgtttcacaattttccctgatggatctttctttaccttgaatacccacttcagtcctattgcctttttaccctttggcagatcatcagccacccaggttccattttgatgaatggactccatttcttcctccatggcctttctccagcatgcctcttctatagcttgttctatgttcattggctcatcagctgctaacatacacaccccactatattcaaaatgaagtacttcatttgttgagtcatacaaatctggaattgttttgtatctctgtggtacccctgctgaaaactgaggactctgctcaggaggagatacccaacctgtagctgtacttgacccctgactttgaggtgaatttggagcatgagagg

SEQ ID NO: 88638 - DNA, 743 bp, Zea Mays
cgtatattcgcacatcggccaaatcatacgaagcgtaaaccaccatgcacttactttccaaatcgtgaacacatacatgtttatcatatgaacaaagcatttcaataattaccccaaaacaaactaactccattacacaacttgtatcacgaacctacttgatcacttgaagcgtctactcggcgtcttgaacacaaccctacattaggtgccaagtgtatctcgatgaacacataatgtgcattgacccgactcaaagatatagaggaagcgatgactacttacggcatgtcatcacctctctacaaaccaaattgaattttctatctacccgatcaaaacttcatatcgtgcaatgcttacaatttactatctcaaatacaaccatatcacggcatgcacttgagactctttcgttcaacttaacgcaatcatgactacaatacacatgcgtaccactttctcctccacgaaccttcaatctacgccaaaacatactcgtgcacatacctacttacaaacctatgcacaatgacaaaactaatgaccatctcactacaacatctaacaagagctgtaaataaaatcacaaggagcatctcaccactttacttatccttcaaaacacgacgaggcgagagcaggggctgttcatgggtagtgacatttcgtcgaacaccctgcgggcatcagtggtgctgtccaatgtgacattcagctcaaacatttaaccgagcatcatt

SEQ ID NO: 88639 - DNA, 670 bp, Zea Mays
agaggaacccagttcacctccaaattctggacaagccttcagaaagctatgggcaccaagctagacttcagcaccgcctatcaccctcagacagatggacagacagaaagagtcaacaaggtcctcgaaagacctattaagagcccgtgtgttaactttcgatagaagttgggaatccagtttgccctatgcggagttctcgtataataacagccatcaggccagcatcaagatgtcaccgtttgaagcattgtacggacaaaaatgccagacccctctcatgtggtccaacgtaggggaaaaggcactagaaggacctgtctttgtcaaagaggctgaggagaaagttaccctgatccgtaggagattacttgaagctcagagtcggcagaagagttatgcggacaacaggcggagagaactcagatttgaggaaggagacttcgtctaccttaaggtctccccgatgcgtggtgtcagaaggttccaagtgaaaggaaagctagcaccgcgattcgtcggtccctatcccatcatcggcagagtaggaaccgcagcatatcgtcttgaactaccagagtccatgtctgacatccacaatgtgtttcacgtatcccagctccgcaaatgcctgcaagcaccagaaagtcacatcgaagaagaggcaata

SEQ ID NO: 88640 - DNA, 612 bp, Zea Mays
gtcgggctattaggatgtcttcatcgacatcaacatggtgatccacgacaccataaaatttagctatggctcggagattataattgaaggatctgtcagcgtgctgttcaagggcaagacaaatgagaacctccctctcatgagggtgtacttcaccctaagactgaccagcaacatcatcaaatttatccaacttaacaagagtggctgcaatgtccataccaagcacgacgtcctttggatccatgacgataaggggcacctgattgtgcaagtccaacgctcgggaatcaccaataccttctgcttgtgaatattgggtggtccttctgcctaactgtacgtgccggcaacaacatgtggttgtggattagcactatgaccacctccactttgacgccttgctcaagctcgagcagcagggcatggtgcatgggttaccccacgtcaagcacgtccatcagctctgtgttgactgcatcaccactaagctgaagttaagtctattcccattacaaaagaagcaacagatggaggtattgctggacctagtccatgacaacttgtgtggccccataatgttggtgacacctaccggtaagcagtactttc

SEQ ID NO: 88641 - DNA, 659 bp, Zea Mays
gtcctggtcaacgtcctaatcgtgattagtcgcctaatcggtcaccatcaacgacctggtgactaggcgacttgaaatccatgcacttcatcttcttcctccctctcatattgaccatcaaatcccacatttcatacattaagtgaatacatggtgtgttggtgcccaccatacctatcatttcatatatagtagtaatcctaagaatgtagttcacctcatcccaccgtacatcactaagtatcctgtccttcacaagttgggcagttggagcatcatctctgtagactgtagatgctgattgttggagggttgtttttacttcaacaaactgtttcaacatacatacaattgaggcaaatcttgtttcatgaatcgaaagtaacttcaaaaggctaaactcattgaacattaaaagctgcatgccaattatttatcatagcagcctcagttttaaaatagcaagatcgagggtatgcacaacatgtggtgtccaaaatatgttatcatattcatcttctattacgaccccagcacctttgcagtttgcggtgttgtctgtaatgatttgtaccgcattgttgacctacttcaataacacccccaacttatcagcaatgtattcttttgatttgtatttactcaccttgacaattatc

SEQ ID NO: 88642 - DNA, 485 bp, Zea Mays
aagcctctagtgaagagattaaagatacaagagaagtggttactacaagcactgcttctattcacgctgaagcaggatctttgggggctaggccagtgaagttaatataagaaagtcttccagagaagtccacatcacctactcccgaagcaccttcgcagagcgatctagaatatattgttcaacatgctttgggaaagcagttatcatcagagcaaattgccgaggtgcaacattatgccaaggacttcaaataaccccgagggtccttggtatatggaggaaatgacgaagatgacttcctctactgtctaccagacagtaaagagattaatgtttgtcgcgagatgatggacaaaatgggctatccgaaacttgagcttggcttgtctgtgatgattaaggactaacttgttgatagtctcgcctataatagcttgaaggtttgtacattttagcttcgtatttggtaatttttgttttag

SEQ ID NO: 88643 - DNA, 495 bp, Zea Mays
gatggatagcgcaataaagattgtgcaacacaatcatcaatgcatagagcacaacaatgtcaatacaacgtcaaagtggatacatatgtggcggtgtttgcgatctgacaaggtggcacaacaatagccatgttgcttggataatatgcacataatacttggtgatgtacatcaaaaggcgacgagaagatcacacatagatagttgtacgggctaagtatgcatgaggtggagtgacaacgaaaggagtttgtagaggcatcctgatcattgatggggatgatgaaccgacaatgcagatgtatagacagggtaaccgataagtaacatgggaaggcgatccctcggcatcacatatccgacctggtcgcacaatcaaagacatagattttggtttagttgatgctgaagtaggtatgctcgaggtctatgggtggtgggtgactcaatcctaaccaatgatctagcaaaccaaaggaagatacaagcaacaac

SEQ ID NO: 88644 - DNA, 554 bp, Zea Mays
aaactaacagaagagagaatttgcaacaagttttgaacccaagatttaactttgttcagtcgagactgatctgcacgtaccctttatatatacacacacatatagctagctagagtctgcatggcggtggcggggctgtggacacaagttggcatttacacctagctaggatgtccatgcagggaattcttcccatgcatgcatgccggtaatttaaggcatatgtgccgctgtttgctacagctaacacagtggaagtaacaactcgtgtatgtgcgtagtagtagggcgtgtccgccttgtgggtagggatagcagtaggtaaggtacccaatagacacacaaagttatactcatacccactagagaaaaaaatgtttcatatccatagccagtacccattataggtacagaattacgccatgctcatacctaccaagggtagaggatatatacctatcgggtacacatgtcaaataacattatagtagatatgatcatttttaatcgcaaaagtaaataccgaatacaaaatattgaaacctcatacctca

SEQ ID NO: 88645 - DNA, 741 bp, Zea Mays
cacatagcccgcaagtggagctgcctcttactcgttgcccagcacataccactctggctgcgagctatgggagcaggggcggagcagaccgacgtccaccagtgcctccaagtcctcgttggtgatggaggaaatgggccatggatcgtggggagggaggacgttgatcttctcagccatcgaaaaggaaaaaggagatgaaaagaaggcgaagacctctttgcatggaagaggaggatggtgtgtaaagcaggaaggtggaagcagcaaggtaaggatccaaagcgcccactcgggtgaatttatagggacgggtggagtcaccgaggtgcgggtcgcaacggctagtcagcggttgtttcgaatcctgcgcgcacgcgcgccgcaaacggttggctgacaggtcgcacgccctcctccctctgcctctctttcctttttcatcccctcacagttaatggaaagaaggcgtattctacctctggcatcccctcttgggaagaaaaaaaggcaaggtggaatactgttcagaggtttgaaggtttggcccttgggagggatcagtaaaaccacctcaggacgtcagggctccgaggccattactgatcaggggttcgaaggttggctcctcggaaggacttcataaccgccctagaacacaaagtcagggatgattgtgggtacccccgtacatggccatagctcgggttgcgacctaaggtaccctaagatatatctgag

SEQ ID NO: 88646 - DNA, 629 bp, Zea Mays
ctcggcattcgctcggtatcttgggcaagggcgttccaaagggtggcccggtcgattttcatttcctttggttttttcgagttcctgcattagtcgagtagacaaaagggagagatattagggcgaccatgcttgttagatggacatgaagtacataaaggatgcaatttttttgagacgctagccgtctggtgccttccctctccatcccctgctatccccgacccctaggtggtcgtcccaaggtggggcaggaatggtccgggacattgaggctttgttaggaggtagaagcatcgtagctgctcgatgttccacacattggcaatcgtctttcgtttctcatacttcaacttgtaggtgcctagccggagtacctctgtgattataaacgatccctcctagggcgggaatagcttgtgccagtgcttgttagtttggacccaccacagaacaagccccccacttctagagtcttcatccatatgtggcggctatggtaccatgccgaccataggagcgccacatcgcgggcttcgtcgagttggtccaatgtgtctctaaggtttgactcgttacctttgttcgcaatgacctcaccctcagggggtgcgtactctaggtcggtg

SEQ ID NO: 88647 - DNA, 775 bp, Zea Mays
tgacaacttgtgtcgtccctcccccgttagaattcggcggaggacgagatctcccactgcgaaggatcgacgtcgcatggccttgtcgtgatagcgtctcagagtttgctggtaccgtgctgattgaattaccgtgttcagtcgttcttcttcgagtacatcaacatcctccagcctagtagcctcagtttctgctatgctttcaaagaccaaccttggcgccccaaacttgagatcagcgggtagtactgcttctgacccgtagaccatgaagaaatgagtatttccatgcaaagctcgactaggttgagttctcaggctccaaacgacgtagggcaactcccttatccacttttctgcgaacttttcatttttattgaagacttttttcctgagtgcctctaacatcatcccgttagctcgttcaacctgcccgttggctcttgggtgtgccactgaagcatatttgatccgaatgctcttttgctcgcagaaatcgaagaactctgaacttgtgaagttggatcctaggtcagttatgatactgttcggtattccgaatctgaatattatgtcttgtatgaattccacggccttggctgaagttaaagaagcaatgggtttgaattctatccatttagtgaatttgtcgatcgctaccagtacatgagtgtatcctccttgagctttcttgaaaggcccaatcatatccagtcctcagcatgcgcatggccaagttactggtatggtctgcagttgttgtgctggtagatgt

SEQ ID NO: 88648 - DNA, 552 bp, Zea Mays
agaatgacctgagtgaaagggaggatataaggggattattcaacgtcctatatggtctcacttcggcattagaaggccatccactgctcctggaaatgatatacaagcagctttcaatatagtatgcacttacataggcacaagagacttagtccaagagcacattgcttatagagtgtggccacttgcaaatgggtgggagatgccgaaggaggctgctactggctctagccaaggtggtttaatctacctaaagtacaccttcaaatacaggagccaatttgatgagccaaatgaggactggctagatgccattgaagcaaccagtgatgaattgcttggagcctactcgaaggctgaagatgatggcatgacaatggccttcggggctcgaggcaaaaagaggttgaacatggtgtttgatgttattgggtttgtatatctagactactgttatccttcacgaaaacagggaaagaaaataaagtctcctacttcggcaacttctagcgcgccgaggtcaaagaaggttaaagttttgactcatcgacc

SEQ ID NO: 88649 - DNA, 329 bp, Zea Mays
ggatctggattggggaagggatctcaaccgttgagttttcctggcctgtattcaatttcgatgtcgtagccaaacagtttgctgactcgtgtgctgtgatatggtggacaatcgctgatcaagtaaatacttcaagctgaaatgatttgttcgaactgtgaaagctcggccccaaatgtaaggtctccaatgacgaaccgccttgacgagcccaattagctcgcgctcgtaggctggtaatttctgatgttgaggagccactgctcggctgaataggcgatagcaccatcaccctggtggaggactgtgccaaaaccagtccctgaagc

SEQ ID NO: 88650 - DNA, 753 bp, Zea Mays
gaaggacgaaaagggaaggacgcgcaccaacgcgtgaaacattgatcagttgcaataattctacttgtagcaaggccccaacactcccaagccgacctgctcctgacccaagaccatatgcctaagggctgaggggtaggaggaacaggaggaggggaaagtgcataagagagctagcctctcccgctaacaatttctgagtcctagtaggcgtgacatttatactcttctaattaaacatggcgatcaaatacctcccttttatttgttgtctacccgactcatgcaggggctcgagaaattcaaagggagcaagaaccgaccaagccacccttcgagaacgccctagtctaaggaactaggcgaacaccgaaggatcgctttccgacaaggatccgaacccgttcacgaacgtcaagggatcactttcggtaagtacctaaacccattcaaattcctttggcagggaccaaagagcaataaactcatggcaaggcgaccatgaatttctggagttcgaaggccggtgcgcgaagggatcacggtcgctctagcaaaaatagagtgaaggcagccgaagacaggcacactagcagccaggaccctgacgtataaaacgttgagggcatcatcaactcgtgttcaagtcttgggagggtctgactcatgatttatcgcggagagaggcaacgagccatcgatttcggtcaaacagagccgtctactatatgagttggtgcccaagagtatgag

SEQ ID NO: 88651 - DNA, 799 bp, Zea Mays
gtgaaataatgatgcgtgcccctaacctagatgggtgatgcaagatgacacaagtctttattctagtttagacaagagaaggtcctacttctagcagagggaggatgagacttatattacttgcacgtaagtgcttgcagtagggaatacaatccgagtgggagagggaaggatcctaagttcctggggttgattgaggctagtaccaatatcgtggtagaggagaaaaccgtgaagtgttcgcctgcctccctgaagccatagggcgtcctatttatagcctcaaggagggttgtctggagcactggagttggtcgcgtatgatgaggacatgttgttgtgcccctgtagatggtatggcctggagtatgctcctgtacttgctgtttgacttgtgcccgcttgatttctgttgagaaccgagtctagggccgagggttcagtcagtacccgggccccctggcaagggggttgcccatgccgtagtggttgacacaatactaagtatggggaaaagcccctaagtaatacatcagctctgtagtatatgtgacattgggcgcctttccattgtggatatcgaggtcagagccaggctcgggcgaggcagaagttcgcctgaggtcacggtcgagcccgttctaggattcgtagacatgcgcgccacaattgaaggagtggcctcctgcgggattcgcggggagcaggtagctgaggccaggctagggtgagacggagtttgccccgagactggagtctacttcgggcgaggcagagtttgcacccgagggccagcctg

SEQ ID NO: 88652 - DNA, 496 bp, Zea Mays
ttgacaagctttgacactcagtttccactgtaatcggtagctctaacaaacccaacttaaggtaatgttatttccttaaccaaagccttaatcacctcgagtcctatagaagatagatagagtgaagatcaaggaacatatcttagacagggattttgggaagataagtatgtttggttggcctagagaatgtttgaacacctacagaaacaaatggacacgtgttcgatgccggccctgcgcccttggcatgcactggccgcgcccacactcaacctgtgccatggatctccactccccaatgcccgctcctttttaagccacgcccaagtcgccatagcttctcctcgcctcacctgcttgctcttgcacctcaccgacttttctccacaccagagagcacgccatcgtccgtcgttgccgccagagctctgctcctgtggacacatgcctccggtcgtcctttgcctgaactgaggccaccaacagcttcacc

SEQ ID NO: 88653 - DNA, 378 bp, Zea Mays
ttcaacattcctttcaacaatctccgcaggccttgtttcggcgggagctgtgggcctagctttagtttcaacctgcgtcatgacggcttcggtagatttctttgtattcttgtcttccacgcgagaagcttccgcacaagcaggattagcgcctttgaggattccataacagcatccaatacactggctattctccttctgttcggagttattgaagcaatcttttgaaccttcggcagttctgcttcttgcaattaactcaaagcttttggttactccactgctatcttcgagattggctcttcggccgattccaccctggctttggcagtagagaggtgacttgactcaacggcagaagaaggcccttcagcaagc

SEQ ID NO: 88654 - DNA, 504 bp, Zea Mays
ctctgctcatccaccgcattcgttgtcgtcttctcaggtacgcggttcatttctccattccgttctgtatccgctcgtcgtcctcccccggctgcctcgtttcgaaaagctccctgaccgttgacgtcgccagggttttgcccgcgccgccgcaacttcgtccgcaaggttggactcctcccgtatcgcaactcgtcgtcaaggttgcactcctcccatatcccaactcttcgtcttcgcaggtacattcgtaacttccatttctaccctgtctcctcccccatgtgctgttacggatccggtcatcccccatgtactgattagggtttaggttgcatcgacgtccgtggttaatacttccccctgtaatcaagccaatttcagaactgcttactaacgattatcctatgacatttgatgttcagatttcggggagtgagtggtttttccctgttccatcagaagctccactcctacaaaggtgatgttcacatcattttcttt

SEQ ID NO: 88655 - DNA, 431 bp, Zea Mays
gataaatagtgacataggaggtttggaattcgaaatgaggcacgaaatgatatggaattgagccgagacttcacgaataggtttatataggtgaatattagtgaagtgtgtgcttggtttgaatttagtagaagaaaaagagatttgggcactcggctcggaaacgatcgctcaaaacgggaattttggtgaaatttaagcctgggatctcggattggcgtgaaatttggcaagtaggttactggatgtgttgtgaaggtgcctgaaaaatttgggttcaattggagcatttttggctggtttgggcattttaccgaacacgtggtgggcgagaaattaggtttccggtgaactagccatttgaggtgggaataccctcccgaaggagctaaaagcttgcagggatacacaatagagacatttgaactcat

SEQ ID NO: 88656 - DNA, 858 bp, Zea Mays
taacacatatatgtggaaatatgagtgacacttacattgcaaacaacgtcacaagttgcatgttgagtctctgaaggttcatcattaaccacatatcctcgaatgcaacaaaggccttttggtccgaatcaataaaagcaggtctggtatatgcacactaatggcgttaatgccaattgatgatgctagcatgtaccagtcatgcaaccttttaataccagcagagaccttcctcagtttctcaaaagttagtagaggtctgcccatcacatattattgaggcacatttttataatctgctttagttgggatctttacatttgcggccattgcctcagccttttatgcagactcctcgtgctcggccaaatcaacaatatgtgacgtgaggtcccgtgcaatccctttcaaaaatcgagttgtgccagcagtaatagctttactcttctttttctcgaatgtagatatcaattttggtatagggaatttagatttctttgattgtcgtgaatcccttgatggctgtggagaaggtagtggtgtcctaaatgttgatgcttgtggcggagacggtgggttagaaagaggatgaggagaagcatgcgaagattgaggaggtgatgatggatgtacaggtactaaagtttgaggaggcggagatggttggggatgagacgacgacggcgttggtggatcaaccaattcgacatccctttgaggccaaaggatgaaatttttgatggcttgtccaagtgtctcgattccttcgggcccagggatgtctagcatgtcgtcctcggatccttggacgaccgtcgtcacttctaccctgcaataatcatctggtatgtctcttcc

SEQ ID NO: 88657 - DNA, 423 bp, Zea Mays
cttgggaggaaggggtatgggcgtatgatcgagctacgaagacaaacttcaaaatgcatgtttggtaccagtactccatgcatgacttatcggcgtatgggctattctgtgcctagtgtgttcacggtaagttcccatgcccagtttgcaaggaagctcttaggttcatttggttgaagaagggtggaaaatattcgtcattcgataaacatcgacaatttctccctcctgaccatccattcctcctagacatcaagaactttacgaaaggtgtcgtagtgacagaccgcccacctgcaatgatgactggtgccgaaattcatcaacagatagatgtgctcgtggccaatccagaaggtggttttgtgggatatggtgagcagcatatgtggacacataagttgggcttgactcggttcccct

SEQ ID NO: 88658 - DNA, 904 bp, Zea Mays
atcgactgcaagggtaacccacaagggagatgagactgaaacgattgagatagctcccatctcagaaaagatgaggcgctctgggctgttgtgcgggaagaaactattgccgaagttacttctaatgccgaagctgaacaggccgtggctgaagctgaaagtcataatgaaagtgaggatgatgatagcattctatgtccgactaatcccagccatgttgaatttgggagatccacagttaaagttgaagatctagttctactgaagaagctaggatattttggagaaaatgatgatgaactggttcgatttgctggagaggagacaattctagagccgaaagaagatgaagttgtagtcttcaagagcttcttcagggtgggactttggttccccctttatgagatgataggtgaagtcttgaaaaagtttgaaatctacctacatcagctgacgccgaacaccattatcaggctcaacgtgtatatctgagctcttcgaagctaaggaaagagtgccaacgccaaagggttctgccgggtacacaagcttcattatcagacaaaggcaagagctgacggcatgcacaagaacttcggatgctacaactttgcatactggaaggacacaaaggcccccgtgataggctaccacactaaatggttgactgggtggacgaacgagtggttctacgtgaaagatgacgagaagaaaagggagaaacttatgagcatggtgatgagtccgttgagattgaacttcgggatgactcagcccttgtgcaatatgcagttggggtctccttgccagttggccaaagtggagttcagggtcgtggctgagcatatcagcactagagacttagtgcaagaatacctggtgaacaggacatttccgacctctg

SEQ ID NO: 88659 - DNA, 389 bp, Zea Mays
gtatattctagcaagaaaatggtgataaattgacacactacacatatatgatgggttgcttgctttcatatttctatgacatgaattgtcagttctcatttgtttttacttgaagttgatgttgtgctattttattttctcctgtggctgcagctatgccgcctagaagggctcgtggcagcccgcaagaaaataatgcggattctatttgtccgacaacaatgttagccgcgatgtaggccatgcagcaggagttgacaattctgaggcaagccatttcaattgcttttgctggccctgcttcggctgctggtgctcaaggtggtggtattagaggtgttcccgggggagttgtccctgcgggtgctgctccaggttgtgaggctgag

SEQ ID NO: 88660 - DNA, 606 bp, Zea Mays
gcaagtccctttcaggtctttctccggctttcgagataaccagcactcggttgtctgggattgggctcattgtgcatacagtcgttttgtattatagactgttccagagtgaagttttttttttttaaaaaaaaggaggtggaggtgagataagatgagtaatctgttggggatagtataggtgcaaagaggatatcgaggaaaagaaaggagtgtgttatttgtattatatgcattatggtctagtaaatgtatgtatacacatgttcaggcatcgtcgtcgcattgactatcagggcgatccctgagtcacaccgcagattcggcgaagtcggcgtcgtaataacggactgtctttaaattgcgtctctctagagtgagagagtttacctaacactaacatgccaacaggaatgaagccacatctcaaactgctgtccgtttgtagccgtgaaacataccttgattcacactgtccttcatagctggccccacttgtagacgatgatgtttcagagaagggtagggatcatgcacttcatcttccttctcagactggggtgcatcgtacgtgcatacctacgtcttacattgcatcatatcgac

SEQ ID NO: 88661 - DNA, 810 bp, Zea Mays
ccttttcctgttttaaatttacgcatcatgtcccctctacccctcacttggttcctcgcttctgttgttttcatgatatctgagttatgtaactagcttgccgcttagtttgggaccctcctttgatgttgaactgggtatggactactagggagtaggtctagggggaggtccatgttctcgggggtggtccggaaataggtagcctcttagactggttccgtaccgtaagcctacaccttccaccaccctagaacagctgacctagtacctcagactgggaccccaaaacatttgtacctcgtccaaatttaagggctggttcccgaaactttggcaaggttcagttacatgttcggcaaagtaaggatcctgagggtatgctactaagcatcggacttgaaccatatttaggaccgacctctagttgatggtagcctcagacatctgacacaacctcctagagaaccaatgtactagggggccagcaaaggggaaatcttgccttttgtgacaagcagcacttacgcgaggtccagtccggaggggtctatccgcattaacccaagctactagtgtgcatcgcgtagctcaagtgtgcaaacccatgaaggaagttatttgctcccagttttgtctttgtagtagtggcgaagcgtcgtgaggcaaacttgaagtaaagcgcagtagtggccccacttgtgggtttgctacctcatctgcggtgggttcgggggcctctatcggtacctcaagactagggtacccactcctgctaggtcaaggcaggaaccctgtggctacccatag

SEQ ID NO: 88662 - DNA, 435 bp, Zea Mays
gttgaagacgaccaacctctagctctaaagattggtacatctaacgaggaagaataatatatcatttacctagaagatgcagtatgtctcaaaaaaatgtgtcaaggtgttgcccctttaaggatttgtaatagtgctaagtaatatatgaataaatttggataatctttcgcacctattgtgttttgcctctttataaagagaataaagtgtggtgtcatctgctatatgcaaacaatgtgatgctctattctagttgccctaaaagtccggctcaagtctttctctcaatttgtcctcaaagaaatactcttggatcagaaagatgatttggatatcatgctctgaaatctataaagttcaaaagatctttgttaagggatataacacctgtaaactcttgtagtatgatgaagctaggcggaatcagaaatc

SEQ ID NO: 88663 - DNA, 876 bp, Zea Mays
tattgacaaattcactaaatggatagagtacaattaaacccatgcttctctgacttcagctaaggcagtggaattcgtacaagatataatattcaggttcggaataccgaatagcatcataactgacctgggatccaatttcactagttcggagttttttgatttctgcgaacaaagaagcatccagatcaaatatgctcagtagcacatccaagagccaacggtcaggtagaaagggctaatggaatgatattggaagcactcagaaagaaagtcttcgacaagaatgaaaagttcgcaggaaagtggatcagagagtttccgtatgtggtttggagcctgagaactcaacctagccgagctttgcatggaaacactcctttcttcatggtctatggttcggaggcagtgctacccgctgatctcaagtttggggcaccaaggctgattttttaaaatatagccgaagcaaagctactagactggaggatattgatatattggaagaagaacaattgaatacagtaattcagtcagctaggtaccagcaaaccctaaggcgctatcatcataaggccatacgacctcgatccttcatagtgggagacttggtccttcgccgaattctaacgggggaaggacgacacaaattgttgcctctatgggaagggccattcatggtagcagaagtcactcgtccaggatcatatcgacttactcaaatcgatggcacagaaatagggaattcatggaatatagagcatctcaggaagttttacccctagctagatttcaaaagctatcgggcagcattgtactctgtaatcggaaaatacatcatcaataaaaagacttcattctcaaaggcactcgaac

SEQ ID NO: 88664 - DNA, 528 bp, Zea Mays
gtgtcgttgataacggcacaaatccgcttccagcttcggcaagccaatgcttttggaaagggttctaacaattttagcctcggtgcggttccgaaggcatcttagtttcccttcgttcaccccaccaaatagcatagcgcctgatttatatccgtaagatatggcatattttttcaactcctctttctcagcgtctgttaactcttgtccaagtagatcttgaaaattaaaatcttctcctttagaaatttcatcaatttgctctttccccttttcagttgccgtattcaccgcagctgcagcagtttcctcttcagccattttcaagagtatattgtcaataacctcaagtgtggtttccaggttcaactcttcagtggtcccggcttcgaccccggtatctttggcttcgccgatctcagcttcaatagtttccactccagtagcttcggctgcggcgccttcggcttcggcagtttcggcaaaggcaatttgtgacaccgacgccggtggcggtgtctgatggat

SEQ ID NO: 88665 - DNA, 708 bp, Zea Mays
tcctagttgaccctgccgacttggccaagcacatctgcattggagaagccctttccagcaatataggagggcgtgctcatcgacttcctccaggccaaccacaacgtcttcgcttggaagcctgcggacatgccgggatcccatgggaagttgttgagcactcccaaagcatccaaccaatgaggccggttgcccaacatctccacctttttgatgagaagtgcaaggacataagcgaggaggtccccaagctcttagcgacagagtttgttagagaaaatcaccacttagtgtggattgtaaatcctgtacttgttaaaaagaagaatgggaactggataatgtgtgtcgactacatgggccttaacaagatgtgtcgaaagatcctttccctctcccacgcatcgactaggctatagactccaccatggggtgtgagctcctttcctttctggatgcctactcaggctatcaccaaaatgccatgaaggagagcaaccaccatgccacctcattcatcactacctttggtttgttctgctacgtctccatgccttttggtctgaagaacatcggtgcaacataccagcgatgcatgctccagtgcttcaccgaccaagtcagacgcaacattgaggtgtatgtcgatgacataatcatgaagaccaagaaatctgacaatctcatcaccaacctagaggagacatt

SEQ ID NO: 88666 - DNA, 450 bp, Zea Mays
ggaagctgcaggtgcgacgacgacgagaggatctggagctgcatcgccagactcgggtgatctctcacgtgctcgacttgtggggcgcgcacgcacccgtcgagctacgaggcttggtcttgaactggattcgaaaggagaaggaaaggcagtgcctgaggttctgagtcttgtacacgtggagagatcaactgagttgggagatggggactgttttcttgtagggaaacagatcaaaaggttggattactactaaggctggctccaacaggccagctatcagaccaggcaaagctagtttagctgtccaactggtactgtagcgtctccaataaggcagctatcctggctaggcaaaatacatgggaggagagagaagagccaaattggctggcattgacacgccatgcatttccctctgacaaccgtcagttgggaccatgtgaggga

SEQ ID NO: 88667 - DNA, 1076 bp, Zea Mays
ctaataccttgggaggttctgtcacataggcgaacttgcctcggcggcggctgctgctagcgtagctgcgtctattgcgcgatagctgcaatatgtgagttttttgttgagtttggaaaattgtgatgtcaggtgaaggccttcactgaccatgttgctttgggggcgctaacctcgcagctgatttccaagaggaaacggctcgagggtaggattgagtgcattttgacacagcataccgatacaattagggacaattcggtggccaaaaataagagccaaaaccttctcgacaaggtgacggcgcttgagaaggaaaaagaggacctcagccgctgccttaacgatgaaaaggaggatgccgagatcgcccacacggaggcccaggctgcccgcaagcgggttgtcgacttggagtttgaattgaagaatatgcgcgaccaccgtgagaagacggagtatgccacccgtgctggggtggatcgggcgcacacgctttttttggatgtgtaccgtgacctcggcgtgcagactgccccttcgacaaatcatgggaggaggtgggaacccgcttcttggggtggctgcaggatgagctagagtcgctcccgtccattatgacgggcctcatgtcctatgcgtctcttgtgacctttgaaggggttgtgaatgccttgtcccgcaagggatgtaggcactttgaggccttcgagcgagtcaacgaggacttcggtgctggtgtattccaggttgaagacgacgtgttgaagcattctacgggggcgctttatgataggatgtgggcgctcatggccgcggtgttgtccgaaagagggccgaccgaatgctggcacatgcatgttttgtgtttggcgaaggtggtgtgtgtgtttgttgtctgatatgttgttgtgctgtcttcacaggcgatgagggatgaagaggtggaggacctcactagccttgagagcttggtggcctggaaggatgctgcggtggaggtgggagcggaggagaaatccttgcttcaagaatgtggtgcttagggtcctgtggcagcgggcacttctgtggag

SEQ ID NO: 88668 - DNA, 605 bp, Zea Mays
gcaggactcactagagcttgttgtgagggcatgtagaggaggggtgccgtggagaggaggggctggaggcagctagaggaggggcagcatgtagaggaggggctagaggtggccagaggtgggcggcgtgtagaggaggggctagatgcggctgggcagcgtgcagaggaggggctagaggtgttggaggtagggtttatgttgtataatgggcctttgggctgcttgggccgaactgggacacaagtcggctgacttgccagaccaagtcgacgactagtcgattgagaatttccagttgtctccaagtcgcccgacttgccagagaagtcgagccgacctcaccagtcgagatcccatggccgacctgacgactagtcgacgactttaaaacagggccatttgttgagtggatgcattgttgttagaacaaccagccttcttatctttcttagtagcttgattgaagtgagcttcatatcttgatcttttgttgccatcttgaattgactttaaaggtctaccaaatgtttgggagtacgacaagtggctgcgaaattcacgttgcaaccacacttgcagcaaagtcatggtttatcatttgc

SEQ ID NO: 88669 - DNA, 848 bp, Zea Mays
gcaagtcttgccggtactcagaatggtacatcggtgctcgttgaagcgtatcgatgtcatggcgagcggggtcccttcggagtccagagtttacggcgaaatcgctataggctggggtatgggtcgccgccccacttgccggtgagtgtctccccctctgcttctctacttttgttccgtttgggcatattaggtgtgggtccagcgctctggtgtgtctggcgtcgtggtggtgccggctggtcagtgcaccatggtggcttcggtcgccctgggctggctggcgaggagcgagaatagggggcgagaggttgaagatggcgtattggtcgtccgatcgtggacgtatgtgtgtgcctgggtcgccggcgggctgggcgttggtgtgctcgccgcggcggggaagaaacagccagggccctggatccatgagtcaacggttgtgattgaatccatccatatctatgcgtcgaacaaaatcatgccgtcagtttccagatcggtggcctagatatagtctagtgtatccccttcgccgatgagtcctgagtcgtagatctcggtgtgggtggctaggattagaacactcgtaccggtttggctgaaccaatctggttcgtctgatctagatctagcgcttgcgatcgatgtaggtaactttaaatcaggactgttagaaatcaatccagtggctggcgcggtttaatgttggggtgtggtttcggaccgcccagatctaatcgtgcggccacggtcgtccgataccccttcggccgggaccttttgctaaagagcccctattctttggcatatgcaacccacagtctgtgcgtagtgttagaacattt

SEQ ID NO: 88670 - DNA, 521 bp, Zea Mays
gtcgggggcagcatcagctggttgggggtgctagtttagagatgcgccgtgggaggaagtctgattatcttgaaatccctctcaaggatagtatcaagggatgacgcttggagtggtttattgttgagaaccacggaagttccctccccccacggtcggggagacagccggatgttcgcactccaagttggaccgaatcccccactgaccaggaggtggctgaggcaggggctttgctagctgaagttggactgctaaaggagaggggcctgactgctgagactgtggttgctgattttgtctttaagaacattcagccattgaaggatagggcatacccggcttatctgtaccgaggtctagctgactcgactcgggttaccaacagaagaattctcgctgcagatttggtgaaccgacttgaaatgattcttagaggcaaggtatcaaatgttggtgccctagtggcatactcggcctggaacctgcctccttccaaagccttcactcattttgtgtcg

SEQ ID NO: 88671 - DNA, 386 bp, Zea Mays
ttggtcaagaagaaggacaacacttggcggtttggtgtcgagttccatcatttgaacgccattacagtgaagtctgtgttcccagtgccagtgattgaggagttgttggacgaattgggtcaagctgcatggttttcaagtttggatctaactgctggttaccatcaaatcctattgcagtcatctgatactcacaaaacatcattccaaacgccttgaggccactatgaatttcgtgttatggcttttggactcttgggtgctcctagttttcaaaaagccatgaacgccaccttggctccactgttgcggcggtgcgttctcgtgtgctttgatgaaactttagtctacattgtctcatttgaggagcatttgcatcatattcg

SEQ ID NO: 88672 - DNA, 447 bp, Zea Mays
tgtcaattcaatatcacccagggaaggaaaatgtggtggctgatgcccttatcaggaccggtattccaaaagtggccatgcctttgattgctgatctggaccatatgggagtttctttgtgctatgttggcactgctagagaggagactcggatgctcattcaatcctcccttctagagagagtgtgcgtggcacaacagcaggatcgtttgttataggaagctcggaagagggttggcaatggtaaacctcgtgagttcaccattgatgagaatgatttggtttgtttcaggggctacctttgtgtgccacaaaaatcagaggtgaagacaaatatcttgagagaagctcataaaacgccttacaccgttcaccatggcgaaaccaaaatgtacagggatttgaagcaaaacttctggtggaagagaatgaaggtcgatgttttta

SEQ ID NO: 88673 - DNA, 633 bp, Zea Mays
cttgcatcccttctttcgacatatgtagcaaaggtgatcttcaagtcttgaagatttcttctttccttgtttcttgcttgctacatggttagttgataatttctttactaacactatgcctttttgttttaaatagggacaagacttaattaagtgtcccttctttgagcatttaaaacaaagtttatcatccttgttaataatcaagccatttttaatatgaggacatgacctaatcgagtgtcccttttcaagcattcactacactttttacttctcttagtgtgaagtgtggcttgatcattaccttggatgttaccttgtatggaggcatggttgaggcttttggaagaggtattgattatcttcttttgttccctcctcttggcaatcctcaagtccttgacattttcttcaagggatttagtgcatgccacggttgtttccgtctcaagctttttcaccatgtgatcacggttatcttgagaaggttgagcaatgaacttccctttaagttgtgtcaagctcatctttagcctctcattctcttctttgagcttttgatatgtatcatcttttgttcctgcaaattctagctcaaaggaagatttgcttgtcgacgaacaacaagct

SEQ ID NO: 88674 - DNA, 1155 bp, Zea Mays
ctacctgttttggtataagtcactcaactatatatagcatagctttaatcgaattagtataatttacacattcgattatatgtaacgtgttagcaacttagcttgtgacatgttttagatcaccaaggagtttttcaaacataatttggaaaacgaaattggacattctgcatctatgcatttttttctgaaagactttgcaaatacaaaatgtacggattcatcaactgtacgtaccggcctagtcatatttacacataatatatgtatgtatggttgattgatcaatggctggtgaattgctactggcagcagcattttgtatggatggacctaaatggctttgcgaaagataggcatgcacgcaaaataaagatggaaagcctaaaatatgctagaatattcttgatgaatgatgtggataaagggcataaagtctggacggaataaacctagggattgggattatatccatctcaaggacaggcatgcatgcatgcatatactgaaccccaggcttttgaggaaaagaggccatgcatttgcagggaattagtacaactcaccaagtatcccaattgccccccctagctcctttgctttctttctcttcctttgctttgcattctttattcccttttgccggtctctgcccttcgcgatcgagcctgcccaggcattaacaaaaaagcaagcccttcttttggatcctcgccagcagctaggttgatatgcagatgcagctagcagtagcagctcgatatatcagcttgtaaatactgagctactacctgcattcacacaaaatgtaatatatcagcacaatttagtttatgtttcttgcatcatacgtgcatcactagatttttttttaaaaaaaaatattggttgccctggcatatttttcagctagttcagaagatcgagcataacacatgaaacgaccagccaatcatccaacaatcatagactagcagctgcacagccgctgcctgctttgttttttttttttcaacgtactgtggctgtggccggccgggcaaaccagtcggggacaagcgacgatatatatatcccggcactggtatttggggaggtggtccaagcttgagagccaaaaggcagccatagctccacaaatgttcttgcatggtg

SEQ ID NO: 88675 - DNA, 490 bp, Zea Mays
cttggattgtactttgtctcttttgtcacctaagctctggtgaattcctccggcatcgacgttagaacgatggttcggtcaactgagcatgtctcctgtctataaaactatgtagttgagaacctcacaagtagattcatagtagttaacaactcaccatctcctttcgataggcttaggatctccttatttgtgagccatatttgttacatattagtttgagaacctcataggtagattcacaggtagattcatagtagttaacaactcactatgtagttgagaacctcacacgtagattcatagtagttacatatttctccacaacataaaagataagagggtcatatttatgagctaaaataattttaatagtcacaactcaccatctcctttcgataggcttaggatctcctttttataattttttaccatacaatgcaaaattgttctatggaagttacattgagccatatcatgtattcaactt

SEQ ID NO: 88676 - DNA, 592 bp, Zea Mays
acacaggggctagcgtgcaaacattcccaagactcagttttaacgcatggtggacgacgcgttgatatctataaacgacaggggtccatttataaaacattcccgcgaaggggtaccgcaacatatgggccacaggatcgaacgcggacggctcagattttatttaacgcgatctattctactctgttgaactctagatggatggtctggatcttagcttgaatgcgacgaccggagatctgatctccaccgtccatcacgtgaccatcggcacacgggcacctagccatccgcgtggggatcaagggtccagacccacctcgcccaatccatacggcggcgcgcccagctccgccgcggtagcctcgccgaaataccatggttcggcacgctggagccctagacgcatgacgaatcgatcctacgcgctcaccagacgaaagcggaacggttggggacaaactcattggagattaggagacggttgtagctgtccacgagctgctcggattttgcggtcaaggcaaacgacggcgaggaattgcaggtactctaatggccttcaatctccctggatgtcaccacagcgaac

SEQ ID NO: 88677 - DNA, 551 bp, Zea Mays
gaatgtacgcagagaataacattagattatgctcggtggagactgaagagtgaagtctgctcacgtacgcgtatgacgtccacgtgtgtttggtttaaggtcaaagtgatatgggacggggatgacatcgttcactcgattttttggatcacgccgctacaaaaaaactatttcagtgtttatctcgttcctacgtaattgtcatccaaacactataaaaactatggccaccccctcccattccactatgtacattcaaccaaacacacactaagtctgcttgaggttctatcatgcttctcctaggttattatttgtgaggcgccatacaaactgtttgatttttggaggacaagccaaactcaaaattctcttccattaagactatcttcatctctcatctcatctattattttaaacttcattataaaaacaatatagtctatagtataaaacaacatgtataaataatctgttagacatggtctaaaagcttccctgattggactcgccatgctgacgaggtgcaccgatgagaaaatgtccctttt

SEQ ID NO: 88678 - DNA, 378 bp, Zea Mays
cccatgacgaagtgagcgcatagaacgggcgaaggcttaggcgctctccatctcagcaagggatggcaaagaccaccgcgactacgaaggctgagtgcatggaacgcgaagactatgtgtcattacccgctcgccattgtaatggggtgacgtgtgtaaccgacccgtgctgcagggtcccacttgtaagccactgtgtgggcagagttgatagtgtgtttgtccatgatggccttaatcacgttgtaatgacccgcaataacccatgagaggggaatattccagggataacgtaggtaaccaggggcacaaccatctttgacagggtggagccgtccactggttacctataaatacccccgtacaacaccattgcaa

SEQ ID NO: 88679 - DNA, 483 bp, Zea Mays
ctgatcatttttgtgaactctgtaagattcgatgggcacaagctcatgtgttgcttccattcagcgggctttgcacacaaactatcacacccgttttgtcgcgcaaaatcgacctcgcactgcactccatcctaaggctctatccaacaattcctcatataaggctctctccaacaattttccctataaaactccacttatatgtattttataatgtttttatttccttctcctaaaaaattatcccatatatacaatttatctccaaccattttctttatctatctccctctatgccaactacctattccaaaaaacatttaaaaaaacttatcgtgtggacgcacattccttccccagatgcttggtcttctccacccgacgccagcaaggtctgcctgcccgctcaaccactacacctccgtccaaattgagatgcgtccgagctttgcctgcaaccccactaacttccctcactcatcc

SEQ ID NO: 88680 - DNA, 437 bp, Zea Mays
gcgtgagcatgttgcaccgtcttaagtcgttgccgacttaagccgattgctctgttagcagggcatagtggtcacctcgagttcagtaagcgcgagcatgttgcaccgccttaagtcgttgtcgacttaagccgattgctccgttagcagggcatagtggtcaccccaggttaagtaagcgtgagcatgttgcaccgccttaagtcgttgccgacttaagccgattgctccattagtagggcatagtggtcaccccaggttaagtaagcgtgagcatgttgcaccgccttaagtcgttgccgacttaagccgattgctccgttagcagggcatagtggtcaccccgagttaagtaagcgcgagcatgttgcaccgccttaagtcgttgtcgacttaagccgattgctccgttagcatggcatagtggtcaccccagg

SEQ ID NO: 88681 - DNA, 528 bp, Zea Mays
gaagcgtcatgaacacaccggccagaaataacaatacaactactccagtccaacctagtggatgtttcaaatgtggtgaacttggttattatgccaacaattgccctaagcacaacccacatacaccccagagcaacaacagtcaaagagttgatcaaaatacacatgctcatggtactgcacagaacaagactccgcagaaccagagtaagggaagaattaatcatgtgacagcagaaacagttcctgaggatgccgacgtggtgtatggtatgttccttattaactccatacccacatcagttttatttgattctggatcatctcactccttcgtaataaagtcatttgtggaaaagcataaaatatcaaactatcctttgaagaggaaactactaattagatcactaagaggtgaacttaaagccactcactcatgccctcagactaagcttgagattagaggaataagctttctagtagagctgataatcttggaatcgagtggaatcgatgtgatacttggaa

SEQ ID NO: 88682 - DNA, 498 bp, Zea Mays
cggacgatgtagagatagatgttgtgcttagtatgctggctggggaatcagctgatttgacccatgccaagccgatggctatcacagctggacaagaacttggcaaagcggtggagactcgaaagcctgaaggtgctcgcccaaagcgtctacgctgagttagccgctcgactgcacctgttgaggaaaagaagaaaaagaggcggcttctgcgactgtcatgcttggaccaaggtgtaggtccttctgctctggttcgtgatgaagtgccaattgaggtccttcctgaggttgatgccaagggttgtgatcatgcacaagctgttgtctgtatatttgatgaagaagaagaagaagaagtcccactgatccgtaagaacaactggcattatagaggtagcgaggggggagtgatattccttctccagctctgtcggctcttgtcaatctttagggactgtccatatcagactttgatcaagcccttgaagaagtcgt

SEQ ID NO: 88683 - DNA, 546 bp, Zea Mays
aatggtatgatactggaagcactcaggaagaaagtattcgacaagaatgaaaagttcgcaggaaagtggatcagagagttaccttatgtggtttggagcttaagaacttaacccagtcgagctctgcatggaaacacccccttcttcatggtctatggttcggaggcagtgctacctaccgacctcaggtttgggacaccaaggctggtcttcgaaagcatagctgaagcagaagctaccaggctagaggatattgatgtgctggaggaagagcgattgaacacagtaattcagtcaaccaaataccagcagaccttgatgtgctatcatgataaggctatacgacatcgatcctttgtagtgggagacttggtcctttgctgaattctaacaggggaaggacgacacaagttgtcaccactatgagaagggccattcattatatcggaggtcactcggccaggatcatatcggcttactcaaatggatggtacggaagtggggaattcatggaacatagagcatcttagaaagttttacccttac

SEQ ID NO: 88684 - DNA, 1788 bp, Zea Mays
cgaccaactcgtaggccagcaggcgccacgtagaaatgtaacgctcgcactccatcccactcttcacccgccgttgtgtcgattctggtgtgtgctaacgatagggatcgctggggtggtttgcgggtgctcgatcgtgtcctcagctttggttcctcgctgcgtcgacgctgattgatcatcgaatactggttatcagttttgcaaatttctggatggtttcagttctggtatcatctttgtgcggctgtcttcagttttaaatcactgtctgtctgctttcatgttgattatcgtttgttggttcagttcttactgattcactcgaaatccttttgaagtctttcccccactttggtcaactcgtttttgcattgttgtattctggatcacgaagagtttctcaccgatgccatttgcactgacagacacgttcttcaattgttaacgtacaagtattacgatggtatcactctgctatttctgccccgggctcacaacgcggtcccggatgcccgtgaagcggtacaagaagatccttgctgaaatctttcccaaaacacaggtcgggacatgccacatccgtttttcttttgtcaaatatatgagcatgttgacacttgaactgtgttgctgatttatttatctatctatgagcatgtttattcctgttgttgcaggatgaagagcctaacgagagaaggattgggaagctgtgcgagtacgcttcgaaaaaccctcttcgagtgccaaaggttcaccccttgctccctcattggaattttgttgtttccatgctaggtgtaggggttctgaccttttgagcgaattgctcttgctgatagaatacagtttgctagctctgtagctactgtagccaagattataaatgcaatcaaagatcgagtagtgtaacttatctcgaaactcggagatgcctcatgggcattgttctaggcctctagcttaatgtttcaagtattcccttgtctccttggcgctctcatttaagagtagtagtccttgttaagtgtattggctgacatgattgcctcgtattctgccctagcaaattcagtctcagtaagcttgtcgtcttatgcatgttgatatctgagcagatcacagtttacttggagcaacatatttatcgggacttaagaagtgagcaatacggctttgcaaaagttgtgatgttgatataccgcagactgtcagtttcctgtaaagaacagatgtgagtcttcttttcaagtttctcttgctcatatggccctggattctgtgaagttgatatttttatttggtttgcgatggatacttcttacactttgttattgcttttgcttgttaaaaatgtaattgttgttttcttaattcaggcctctgtttgcaagtagcctattaagcattgtccacacccttttagaccaaaagaggcaggatgatttatgtatcgttggatgcgaaaccttgtttgattttgctgtcaatcaggtattcctattggagtagatgccattgtccattagcaggactcagtttatatatagatatgtcccattattggtgatattgagtctgtctattccaggtggacggtacatatcagttcaatttggaagggctggtcccaagactgtgtgaaatagcacaagaagtaggagaagatgagcgagcaagtgccctacgagcggcagccctgcaatctctttcagctatggtaagttctgtgattgtgccatatctaactgatatcatatgttgatgttagcatgactttctaaa

SEQ ID NO: 88685 - DNA, 336 bp, Zea Mays
ggcggcgccatggggtaaagagtcaatcagtgagtatacgacgccgacatcagttcatcgatcaaatccatgcttggatatcgtaacaatggtgcaggaagaacaacaaggagcgaaccggtttgcctcggatgcaagtgcacatatgcaaacaactactgccgtaggggcaattactccaccagcagctttgagggcgccgggggttgatgatcagaacacattagaggcatcgaggatgaccataaatcaaggaggacagcaacttactactacgcgtactattggtgagcatgaacatgacacaccagtgattctgcagagacatgtaagtac

SEQ ID NO: 88686 - DNA, 357 bp, Zea Mays
cgggcgggcacggtggtctttattacctccgtcctagttggtgcggtcggtctctgtcgtgttcccattttctccatttcgacgaatcgacgttcgacgatcctgcgtctgtttcgatctagcatggggttcgtaaccgtactagttcaaattgataagatcccgacggaggaaaatggaacattctagcatttgacagtgacaaacttgtcggagttccttggatgggtattgagaaaatcagaagagcatgtaaccatattatgggctcggggcgattcacctgggttggcccaattggcctcttagaatcgagtattatcttattctcaggaacgcaaagcacttaaagaacaa

SEQ ID NO: 88687 - DNA, 606 bp, Zea Mays
tgacaaacgagtaaaattcacaaaaatttgctaaacgagatcatgttgttacccctctcctgatgctacccaggatgttgtccacaggatgatctctttggatgccctggtgcactcgaggatggggcaccagagaatgcctctgtatttgatcatcactctcatcttgttgaaggggttcttcactagcaacttcttcttgctcattttccacaatggttggcatatcttgcggtagaagaacttcttcaaggattggatgactcgaggttgatgggtttgcttggatggaaggattttcaccaaccactttagcacccccatcaacgaccctatttgtcatccaaattctcccttcatcatcgtccttttcttgtggcttcacttcacctattgcaagctttttgatagattcattgggtaggatttcatttcctgcaatatcactagagatgtgcccttgcgagccattagattcatcaaatgtcacgtctatcgctatttcgacaagaccagtggtattgttgaaaacatgatatccatgcgcatttgatgcatagccaagcaagaaaccctcgtccactctaggagcaaacttcgagctct

SEQ ID NO: 88688 - DNA, 539 bp, Zea Mays
caaatcctaccccccttaacaagaatctcgtcctcgagatttaggaaggactagggaacaaatgaggaaattctatccgaagctcttcttctctctcccaagtagcttcatcttctacatggtgactcgattgcactttgcacatcttgattactttatttcttgtaacttgagtcaaagtatcaagaatcttgataggatattctgtataagtcaaatcaccctgaacactgagctcttccattggtaactgttcctcaggtacacggagacacttcttaagttgagacacatggaagacattgtgtacatgagatagattatcaggtaggtctagtttatatgccatctccccaactcgcctaaagattgtgaatggttcaataaagcgaggggataatttgcctttgactttgaatctcctcattccacgaagtggtgacaccttgaggtacacatgatcaccttcctcaaattccagtggtcttcttctattatcaacataactcttttgcctagtttgagctaccctcatgttc

SEQ ID NO: 88689 - DNA, 699 bp, Zea Mays
gaagagtttctggttgctcagtcgtggcgcttgccggtgcagtagctcttgaagtggtgaatccagatgcgccacgattactacaacatggtaaagaactgcggcgtggcatatttgggatcatcggcgtaccatggtgacaccgatgatccgaccatgttgcgtggctatgtgtgcagttgataagcttcaacccgcgatcaaatccactccccttctgatcttttcaccctcctggtattatcctgcccgaattttgcagaaatcactacgatcaacgcgaatccttgcgcagaggtcgccggcggtgaagttcactgaatctgatcctatccagtcactgtaccattggaaccggtcatcagagcgcctgacagagcagattaaaggccttggttctccaatttttgtgtgataacttgataatccttctgtaacaaagttgttgttctatatatcaactacaattcgactacagagaccttgctcatttacttactccctcgagctagaatcgaatccaaagttcatcccaagccactgtcagtaaaatttcagattcagaatggactgacaacccgactttaaacctatttatctcccatttctgtacaacactagtgcttagctacttaaaaaaacttgttctccttacatagctctacaagtttgctatattgtccaagagcagaatcctca

SEQ ID NO: 88690 - DNA, 417 bp, Zea Mays
atttaggctgaaatctttatctcatgtgtggttatattaacaaatccatagaaaactgtgaacttcgtccaaaaacgggtccgaacctcccctgtgtatatgtgtgtatattacttcttgttaaaacccgctggggtttcagcctctccccgcacttcacgggaattttagccagcgctctcgcgacgcgtggccacagacgcggagaaagctaggcctcttcgacggaaccgaaattttagttaaatcgagctgagccgtgacccaggagtccgtgtactacggtgtaccggcaccctcctccgctaccttttctccaccttctccacgccacaaccagacggggtacgtgctgcctcgtcgccaccaccatcgctcctcctccccgccgccaggggctaggacgaggcaagagac

SEQ ID NO: 88691 - DNA, 1069 bp, Zea Mays
tggtcactcgaaaattttgtaaattcaggtattctcgtcccctatgggtatgggtcgtaatcgaatcagttgttgtatgatctccgataggactgccctacatgggacacgttaactctgagtttgtttcggaatgccttagttatctcctctctaactatattaatggcggacgatggtaatccaccagcccttaggcccatatgtgtgtgcgtgtgctgatgtatcattatgtcgctctcttgcccaagggtttgggtaatgtggggaaataatgttggccctaggtactccatattgcatgttaggtctttttggccttctaggggccgaaaagggttgtacctatgtgtgggtgggatcattccacatccttgagggccgtgggtggtagagagacattagtttgggggttggtagtagggctgctggtaatattctacattttgctcctcataccctatcatggacggtctggtgtaatacctagacggtccgatgacgtgctcggacggtctgcgcgtataaccggacggtccgagcatctctattgtccctagcatggttttcggtggcttgtcgtgggggacagagctaaccaccgctagaccggactgtctagcctcagacccggattgtctggccatgcataggggcacagtttgttcccatacaggcggtggaggatgtggctggccatttgcagctgatgaattttgcgggtgttctttggttttgacctcatgcgatgaaaaattagtaatggcagatttatcaaactcacacaccagcctcctataatcttttttgcacacgacttaagatttgttgcatctgttcctgttgttcttctacgtaagattgaagagcttggatgtcgtcggatttacttacagtgggttcgagtgcagcgagttgaagattcgataggttgtattccctctatcggacgagcttctggtctcgatcaaccttttaaatagccaataacaacttgctgagtacgacctacatcttcttcctgatgtcttccagtctctgatattcttcaaccgataggtcgttcata

SEQ ID NO: 88692 - DNA, 388 bp, Zea Mays
gaatttcctgtccataacactccgttcggtggcgataactcattggttacatacgtacaatccgatttccaaaccctcattcacatgtgcaaactgcacagacgagatcgcgtcagatactagttctatttttttgctgctcgagtggacgcgctactgtagtgaatctgaaaatggggctctattactctatctgcagtcgaagtcaggtgacccttcttatcatatcataccgtattcatttgattgtgtacccctgtcgaatttgaaagcgacgttttaggcaacttcctcttgataaatttaatcgtgttttaaattcctgtcttcgattttttatatagagtcaaaacgaatttcatctaaaagtcacctctgttgcatagag

SEQ ID NO: 88693 - DNA, 459 bp, Zea Mays
accatatgggatcttacgactcgtgctgtggtttatcgatatgataggtccagtcccttatattccattcgcttcctcgccccaccatcctccaccaatgttaccagaccctatgctctcacctccactacctatgccaccaccttgcactatcgtctcggccaccccggccacgacattctctttagactctctgtcacctcgacaatcccttgtcgatgcagcaacactaccccgatttgccatgcctgtcagcttgggtgtcacactcacttaaccttgtcttcttctttgtcccacactattcaccccttcgaccccatccaatgtgacatttggacattccttattccaagcatctctacttgttgatactatctcataatcctggatgacttctctcactatttgtggacctttcccttcgttgtaagtctgacaacttcactagcctttcac

SEQ ID NO: 88694 - DNA, 1435 bp, Zea Mays
gcactattttcagagagtgcaggggccctggcgcaaagtgtgccaagacacagagaacccaggccacggactgcgggtttattaacctattttccaggggctcgtttacaaaacgtttataccgaaggggtatcagacgtagtgagccatccgatcatgatcggacagcccagatcagatcgggctccatatgaaacggtgaacgctattgaccatgggatataaaatcaagcgctcagattgtccaactgaatcggtcagctaatatctaatctcggccgcacatctagtatcctaggattcagattgcgtcgagcttttcccttaacccgatccattcacccagtatcctacggccagacatctttcttccccaccgcgacgactggacacggcgccgttctgccccacagcgtagcacgccagtgatcaccccgcctataccccgatgcgtgattctcggctttgatagatcctactcgaagcggatgaattggtgaacctgggggtgcaatccataccagatatagtggcggtagtgaagctccccacgacgacgagcggacgaagtggctgcggcggcttcacgacgatgaggaggggcggcgaggaatctggacgaccccgcgacaccgcgcagagccccggccccaaatcgaggccacgcagttcgtatcccttggaacacggttggctcccagagcgcggggcatcaatggcggcttcactcagcacgcgatgaggttttgcacgacgaccactacggtgcttggttatggctcgatgagatgggccctagcgtcacctaaatacaccgcgaagaagtccggatacgagcggaattggtgagcttctcctacaatctcgccatggcggctcgatgagatttggttctccctccctcctcggtacaggcggcgcacagattggggcaacgaggcgattgtgctggcgcgcccgatctatatgattcggagaggggatggataagcacggtggaaggggttgaaacggtttgcccgaggaatccggccctgcaattcggtcaacggagagtggaagcggtggatccaaaaattggggggagaagaagcttctgacgtgcgggtcccacccgcagagacatgagagcacgacgggtcacagcgtacactgaaaagtgggaccgtcccgtcattgagggaaggctggagccgcgcggtggagaagtttttgggccgcgcaggagatttctctgggtgggccgaatttgtggtctcggcccaaacagcgctttcaccttttttttctttttattttctattctcttctctaattttttttcaaatttaaatctcaaatttgaattcctcttaagtgcaaattcaagttcatgttaactatgcaatttattctcaccatcatgtggtaaagttattcacttttaatattattt

SEQ ID NO: 88695 - DNA, 658 bp, Zea Mays
atctatgatggttcctaggcgaacacgtacacatttgcatggaagaaggcgatgaacgtagattccccacgatgcgggtggtctgggaggagtccgctccaacctagatggtcttcacgaggacatcgttcgccctggatggctgcaccttgggcaccttggtacgtgccttggtacgcgcggtcgaggggtcctgtcccttgccatctgggcctgtgacttctatcatcagagcatgtagattttcgatggctacaagcacatcggtctggtcgcatcgcactatgagaaaactagcgggggacagcatcttcaagaccaagtacccgtagtgggcaatggccatgaacctatacagggccagcctgccaatgatggcgatgaaggggaggttaacctctaccatgtcgaactggacgttctcggtgcgaaagttttacccagtcctgaacgtgatgctcccaagggcgagagtgtccatcgtcgatcaacatgcgtaaagcctcatgttggctatggtaggggcggtgataagcgatagtatgttagtctagccatgttttcagggcagccagacacctttgatggggcaccaaatttggggtccctagggtcgatgagagaacctccaggcgaagggacttaatgtccctctgag

SEQ ID NO: 88696 - DNA, 398 bp, Zea Mays
aaacgatgcatctctaggctctaaaaaacaggcgaacctgtacgctcggaagcacaccgtgtccgtcgcatctcttccgcctccggctccggccacgatctgcatactgacccgtcgtcgcgcccatgttttttccctctcgcgtcgcgcctcctccgtggctccatgtccctcccacggcaaatctgcgtgcggccagatctctgcggctagcaatgccatggccgccgagcaggccatcaccagccgagcgaccacgagctggagatctggctgagcagacccatgctgagtattcttttccttgccgatcagaccaccacgacatgttgacgtcttctcatgatcacgagactattgtccttttgtgatttgctaacactagtagagaatacctt

SEQ ID NO: 88697 - DNA, 812 bp, Zea Mays
atgacatccaactagcaaaaatacaaagtcctagtcttcattcaggaccttctcggcagcttcatttaacaacttgttgacagcttcgtcaacaacttcattggcaattctaatagtctcgagcgcttccttcagggacggatcggcctctggatcatatggctccggagggggagatagttcagctacaccgaagtatgtttgttagttctgaagctaaaatagattacgaagctaaaacacaaaaaatgtacctataagcctagctcgctcggcagcttcttcagctcttttcacctcttctgaagcatcatgtgattctttttcgttccttttgatggcttcatcagcgacttctcgtccacccttcagccatatctcggagtaaaatttcccacctagggtagttgcttcggctaaagggtttttgatatcatcaactgagaaggcgaagtttgactgggctacagccttagtgtgatcgcaaccagctttctccaagatggacatggccccccgggcaccagcaaaggcacagaaatcccccgatcactatgaatttcttcaaaagctttggcttccccgctcatccactggataactccattgaggtcaccgcggataaatctttgttcaaaggaataggctccaaccttagcgaagctgttctttaaactcttagcacagtccaaggatacttcgtaacatttttctctggcagcacgaagctcatcgacattcttttgtgctcttaatctttcgatcttgcatatttcatgcttcaccacttcaacttcaattttttcggttgc

SEQ ID NO: 88698 - DNA, 444 bp, Zea Mays
ccagcaccacccctcgagggttgggccctccgtagcagccacttccaaggctgaagatccctcagccatacccataggagtcggatcactcgaatcagcggcattgagggccggtgcgccttcgcgagctagaccgccctccaaggtcgtcgaagcacgagagactgtccaggttgcctcttgcccgacaggattgcacggcaaaagaacatcatctgaaacctctgaacagatgacgggattgtcaacctcaggaggctctgatagaaggttctcggggatgatctcttccaatgcctggtcaaaatcagatatcgacaaccccttaaggctgacaagtgctgataaggcctgcattggaatatcgctgcccctgttgtgatagctattcttgcggattaacgaaacttcttcttcttcctcctcctcatcctcatcaagcac

SEQ ID NO: 88699 - DNA, 791 bp, Zea Mays
gctctatccttaggacctaggatcctaaccatggggatgaagctctccttatgatggtaaggaatcaaaagaggaaggccatcaggccagaaccgtaagacgaggagcttgattgtgaaatcaacaacctcgaatcaatccaccaccgaatggagaagcgcaaggagaaggtgcttcctctctctaagcttcagaagaagattaacgaagcaactgaagaaatttgtaacattgaaagtgcaagatcagtatagttacaaggaccataactatgagggtcgtaaccatgacaattttcatcacgagccattcaacctccaagatttcctttatgatgaagcttcaccactgacaccaaagttacaggcaacaccttggccaccaatgtacagacctcttacactatgatggtctgtctgacctgaagcaattcctcatgagttacgaaactaccatatcttcatacggtggcaactcagcagtcatggcaaaaccctttgtaatggcgatcagaaatgtgtcctagactttgtattcatcgcttcggccaaggaatgtcacttcatggcagaagctaaaagaaatgcttctcaccagctttgagggttttagtcaaagcatgttactacacaagtcatgttccagtgcacctaagatccagatgaataccttcattcatttgtctgaaggttccaacgtcttcgggtctatgcgccagcagtccaagatgacatcgtcattgaagacatcatcaaggggctcaggccaggatcagtagctcaatattatgc

SEQ ID NO: 88700 - DNA, 486 bp, Zea Mays
ttacatctgtatatacatataggcataaatataaataaataaaattcataagatagctaatcaacttggaatatccctcgttaaaatatatttagcttaatagatctatcttatcttaaaagatacactattaccttagtagattcatcttatcttgaaagattcatattatccaaaccacttgatttatcccaccatgatcatgatctagaccaaaataatgagatcttaactagtttaatctagtcatattcagtctaatttagatcctatctaagcttatatgatccaatctagtgtgagttacttaatgctggtacaaaggataaggccatactccaaattcacttaagcctaaattggtgacttagagcaactaagccctacacgacaacttgacctacataataggttacataacttatccaaccaacctagaagcaaaacaacaagatagacagtgcttaaatttacttaactcataac

SEQ ID NO: 88701 - DNA, 553 bp, Zea Mays
tgaagaaacaaccatgtgttagaagtcaggactcaaacatgggttgggatgcccttcgaccgctcgggcacccaggtactagccgctaggactcatttgttttgtctctcacacaggttgtgccctagggcagctatcgaatcctttgatgggtcaacattcaaacccttaggctgttaatgggtcgtaggggcgtattatagccccataccccttcttacttaaatgtcgtctgacccctagaagggtgtcgttacatcagcccattcctcgaggaatgaccaactaagatgtgggagcacatttcgatgtacttgcaatatcagacgggcgatagtgcgtgcttaccaaagcgatcgatttgttcctgtaggtgttagtcagggcgtttaggcttactgaggcgatcgacttcacgtcatttcgctccacccgttattttaaaagggttgttctggctcccttcttctgtacgctttcattttcccttgcattccccaacttcctcctttcaaacgtctgagcctctgattccttgcaaaagaacttcaag

SEQ ID NO: 88702 - DNA, 1094 bp, Zea Mays
ttcgcggtgttcttcaaccgttttgggggaaatcccaaattgggaagctatgggagatgatcggagctgagagtgggtttactggctacataattccctagcggaacatgctgaggctccaatttataggctgctcaagcgatggtgatcaatttgactgaatcgcattggcgaccggaggggaaaagggctctggcgcttgatacaggtggcctttcaccgtggcaggtgctccggtgatcaccggacatgcaccgcatgattcaccatgacgagagccagcgctaaggcatgtggtgcgcaacggcgacagctcgacggcggtgagagttatccgagcgaccgacgagctgggggggaagtacggcaagcttagccgcaaccgagctcgagtggatcagacgccgagatttttactgggctatgcttatctgatggccactgcgcatgaatcacggcaagcaatcgatcaatggcgatgggccaccggcgacgagatctttttggcgctggcagtctgatcatctcgggacactgtaccatgacgagcacccatcagatgaactgacagagcgacttggagcacgatttacttcagattttgtgtggtgaccaggctagctctctgcaccaaagttatatacctataatccatcttcaactttgccacaatgcttaccatcaaatagtcaccgaattccattcaaaatcgggctcaaagttcaccccatcatactgctattgaaaattcagtccagggattgcctgacagcccgactttgagggtgattatctccaaattttgcacaacaacctaacttactctcctaagcaaaattgttctccttagataggtctacatagttgatgtggtgacctagggcaaagtctcaatagtttggaagtcacaagggctcaaagttgagccaatcctttaattttcagacttagttaatatagagttcacttggtactttttgcaaataaacccaaaacttagggtttaacttgcaaattcacatattcatgaaccaaaggacttaatatgccttaacattgtagtttttacactttagtccaaatgtgcactgttt

SEQ ID NO: 88703 - DNA, 461 bp, Zea Mays
gagtgcgctggccgtctacagactttgcaacatgaagagctgagccgagacccaggctacgacaactaggggtcgacacaacacatgacgacaatgatggcaccaaagactcttcccctcacgccgcccatcataaatgagcacgatcaaagatgaccggacgaccaagacacatacggacaacatagcctcacctagatacaacactcagttttatctcggcataacatctccttctcgaggaagctatcagtggccgaccctcgtcgaggcctataaaaggaggaggtcagccgcatgaggaggaggccgaacagaaggcaaaagatagaagacgcatgctcgacgagactagaagacccggaggctggagcccaggcatgaaccaccgtaacatccaaggcttagtcaggaccccggtctcgtagtctttaggtctacccacgcataagagacttggg

SEQ ID NO: 88704 - DNA, 454 bp, Zea Mays
gcaatcttgatggtctttgatgttcgctttaacttgttaacacacgtcacatagtgcaacatgagtagccacatctcttttcaaaccgtaccaccaatacttttcctttaggtcccggtacatcttagtacttccagggtgaatagaataagccgaatcatgggcttcccttaaaataagttggcgtaggtgctcgatttctggtacacagattctctttttaaaccatattgtgccttgttcatcttcagtgaaatctggggctttatcgaaactaatttgtgccttaatttccttgattttctcatcagactcttgtcctttatgaatttcttcttccaaagtaggttcaacttccataactgttgcttccatattattgagcattccaaggttgagttgttccatttcccagcataattcctatgacatcaaatgagtagtgatgttgttc

SEQ ID NO: 88705 - DNA, 494 bp, Zea Mays
gctggtgctctcatacttgtctaactattagaacttagttaggagaaagaatcaaatggctcataggttaagttcgcttgggtttccttcaagaggcctcgttccccttaatagtcaagggaacatgtggaggtttgatagggtgtgtcatttctcgcctttggtcgcaggtcgtctcctacgctcccaaaagcttgtcatagctagtgcgtctaaccccaaggtattgtcattgtagcttaactggaccaagggccagttgatccttctagaggggcgtttgcagccatgtgaggtggtgtccctgcggaaccatacaaatggtttggctcagatttccctccttattctaatgtcttttctagggtgtttgatggccttacacttgtggtgaagcctgtcatagcctacaggtccttattgtcctttagggagtggagttgttggacatgggtgccttcaaagtccttcatattgtacctgctttcacccag

SEQ ID NO: 88706 - DNA, 408 bp, Zea Mays
gaaaatgccaggaattatgagcccaccagcagaggcagaattgccgaaagtgcaaaaggctcctaccacaactcccgcgagaaggaggatggccagtgtgctagacgctgtcatggagaccacaaaagccttgacccctgctcctactaagaaagttgtcgaagctgtcaaagtctaggccgaagccaaagctggatcttcagtgcccattgagacgaaggctgccgcgcctgaggaaaaagttgagcaacaaactccagataccggcatggcagcggggcaagacatgatagaaaaagctaaatctcctgcccctgaagctctgaccgaagatgttgattacattattcgacatgcttcggggaaaaaattatccaaagaagaaatcttagcagccagacactacgc

SEQ ID NO: 88707 - DNA, 352 bp, Zea Mays
ctattttccacttttctcccaaagataagccctcagtacacttttcacatcggtcactgacattgcagaaaactccctagggttaacctaaatctgacccgctctcctgttctcactggaatagtaactgcggcggagaaaagggcggcgaggcttaccgacagcgattaagctccagtgaagtgtccagggaggtcacagcgatcacgtcgatggtcggctcgtcactggtggtggttggagtcggtcggttctcgtgcgcagttgagggagctcagcggtggcgagtgatccgacctaaccacggtggtatagttcgattaaaacgtgcagcgagcttcactgattgtca

SEQ ID NO: 88708 - DNA, 638 bp, Zea Mays
gcaatctacttcaaacccttataaccaattgatctaatcaaaatgtgcgacaagtagatccatctcatgaacctagatccagatctaaaactacacacaacctggctttgataccactgatggattatggggaggctacactagcgcaaaacaaaatttttgaccccataaaactaggaactacttcggttatagatcatggaattaccactagacgcgcagggtagcggaagacgtctcgatgtagacaaacacgtcgagcagctgtgttgttgttgacgaccttcacatcctcgtgtggttcatcctagtgctccagatgcagcaccttcgaggtatccacacgtacatggaggaagggctgtgtttcgaactgctaggttcacgacggcaggtaggtaagggtgaggggcaagtagttgctcgtttactgatgtcaaattagggttctcttaactgcgcccttgcccctcattatataggcgttctggtgggattctaactctgaggcccattagtaaccttaaagccctgtctaatttcgaatctaatccaagttaagcttccttccccttaagtgtgtgaccctataggttcacatacatatagacatggaatgaaaactgtaacacctctgg

SEQ ID NO: 88709 - DNA, 420 bp, Zea Mays
ccgaaggctgcgggcaaaaagatgaaggttcttacccaccggccacgttacattgaaccggccgtggtgcctgagtttagtggggaggcctcttcagctgctgaaacaagagtgactgctccaattgcgtagagcactgaagagccagttgtaatgccgaaattacctttagttaagttggttgagatgaaggctgataaggataaggctgaagggttgaaagttgaaaaaataacaaaaatgccagagattttgagcccgtcaacagagataatagtgccgaaagcacaaaagggttctgccgcaactcctaagaggagaagaatggcaaatgtgttagatgttgtgctagaaacagcaaaatccttgagtcctgctccttcaggaaaatttgccgaagcttccaaagctctacccgag

SEQ ID NO: 88710 - DNA, 496 bp, Zea Mays
atttttgtttctccatcggcaccaagcttgccttcgcttctgtttatcatccgcagtccaacggggtcgtggaacgcgccaatgggaaaatcttcacagctgtcaagaagatgctccttgatgaaaaaaagggcaaatggaccgatttgttacctgaggcagtatgggcactaaacacgactgagtgcagagcgactgggtttactcccttccgccttctatacgaatcggaggccatgaccccgcaagaaataaagcatgggtccccgcgaacagttccgtcagccgtccccgacgtggacgagccaacttcaaaggacctcattgacggagaccgagtcttcgccctacaggccctaaacaaataccaagcccagaccaaagcatggcgcgaccacatagtcatcccgagggagttcagcgaaggggacctcgtactcgtccagacagctcgaacggagtccaagggcaagctggagcccaagtgggagggccc

SEQ ID NO: 88711 - DNA, 327 bp, Zea Mays
agaggaaagccaaaaatagctgatgaagtacaagtctaatcaacaggagcattgaagcacaaagcgaaataaagaccagccaagagccatctaccggatgtccaatctgtcgcagatcaaataaatttcaaaacctaaccggacatggttagactgcgttgttgatctcaaagacaaaactgtatgctaatttctaaagcataaagctggtgatataatgctgaactctaaggcattggatgaagataaaaggatgatttctaaaaagcatgagatgaagacctttgagtgaattattttcagtaatccattcaaagctcgggggct

SEQ ID NO: 88712 - DNA, 644 bp, Zea Mays
gtttaagtttgtggaacatttgcttgtgtttattggaattggtggtgttgctgccgtccctggtccacctggtgattgctatctgaaatgcaggtcgatcgagcgtacgtagtagagcttggccacgtacgggaaggttcgctgttcctgacggaggcggcggactggacggggatggtccaagacgtagggagaatcttggttcggggtagtgaattgtattaatcaactctaatggttcttacaaaaacaccttgtaagacgcaaggcagaaaggacatgcgccgatatgacgttttgagaagtaaaacgaatatagttcccatcagaaaacaactttagctgatatcaacgtacgtatttgatttgaatacagtgcccagcatcgagaacttggactgatccaattagaaacccaactaacacccagatacagatttttttcattcattcattcattcattcattcccattagatacgtagacatgtatgagaaccgggactaatcttattagaaattcaacaaggacatccaaaattcagccgtggaacatattttgaattctgtgtgcaccagacagccacgttttctagttaacaaacaaaagaatctagcaggagtaagtatgggtattggttgatc

SEQ ID NO: 88713 - DNA, 601 bp, Zea Mays
caaaaacaatgcgtgcagcccaaaacagcaattaataaatttcaactcctatacatttcaagaattgccgcgttctagagacttgaattattctaacactttgacaattgttggagttaaaataaccaagtgagaactaacaagtagacttactaatttttattcgtgtcatttccaacactagaagtaccatactcaattaacaacgcattctctacaataatcaatatcgaagcgcttttcacccaataatttgcatttcaacttagacatcacatgagcactactactttttatccgcgaccataaccatacgcatttagactacaacaagcaattcatcgtgactacgagcttaaccaagtcatctatcaattcggctagctagagcaacaatataggccgctatacatcctacacgtcggcttgcctattattatcgaatctgagacaacacatatataacaatcacttaacgaaatcggctcctacttaacatgagttggctaatcacagtataagacttagcgaaccattttagacatcgtaactcaaaaacatgggttggagccgattaattagtgtttcttaaccattgctc

SEQ ID NO: 88714 - DNA, 1303 bp, Zea Mays
cagcgttatcattgttctgacggcttcctgactcttcatgcactaaaaatctgaggaactgaccgaccgttacccaaatgtacacttcttcgggttcatctttagcccaaaccttccggtgcattctaggacccagcgcaagtcttctatatgcccctggtggacgtagacttgactacgacatcgtcaatgtaaatctccaacagattccctatcaggtcatggaaaatgtagttcatggtgcgttggtatgtagcttcggcattctatatcccaaaagtcatgaccacatactcaaataatcctaccgagcctggtaccctaaatgtggctttgtgaatgtcttctggggccatgaaaatttggttgtacccagcgcttccatccatgaagcttaataccctgtgacatggggtattcgtcctttggtgtggccctgttgaggtctctgaaatccacgcataccctccaccggccatcctccttttgaacaggcactacactagaaatccattcggcataccggcacaacctgatgaaccctgcctccaacatcttctctacctctttcttgacttcatgcagtacttcatccttcaacaatcatgctcattgctgaaaaggccgaaaccccttcttcagcgggagtaggtactctacaatgctcctatcaagcctcagtatcttcgtgtaatcccaaataaagcaacccaaatattcctttagcaggcttatcatcggctctcataactctgggtctaacctcttgctgaagaatgtgggtcgtggcttatccccagggccaatgtcgacttcttctagctcgtcagtagaggcaaacccgtatcctagttttccatcgccccctgcaaatcaatagtacacacatgcgaggagtagtgctaaaaatattcgggccgatcgcatggatcggctgcctcatcattatcattaatacttaaacatttacaacaagtttgtgaccggctgctagagcgggtcacatcatcacctgctatcttatttttacattttatttttctggccgatcgctgggatcggccttcaccagcacgtataccgcttcctatactctataaagctagcggataagactagcctcaacccggtttttgaggcttctacacggtcatagccttccacgtcagttcctgagatttgctcctgtccatctgcattccacctgttagtatcgacgagtgaaattttgcacgagtcatccatggggaccacttccactttgtctccatctagttggatcaggcattggtgcattgctgac

SEQ ID NO: 88715 - DNA, 815 bp, Zea Mays
ggaggacactattgttgaagagtttggtaccttatccttgaatgcattgtcaagaataaagtttggtgcctggactggcattatgatggattttgttgagggcctcccccatcgacatcttacaatacattttttgtcgtggtggataggtttgcgaaggtagctcgtttttgacctctaaagcatcgatttgctggtgacaaagttgatcgtttgtttcttgatcatattttcaaactccatgtgattcgtaccaccattgtcttggaccgtgatataatattcttgagcaaattttggcaacatctcttcaagttaggtaccaaattggtctcgaggatgatgtatcaccctcaaactgatggacagtcagaaagagtaaaccagtgccttgaaatgtatcttcagtgtgcaatttcttcctccccaaaagactggtcatcttggctcttcagctgaactatgttacaactctactcaccactctacgattggttgttcttcattcaaagatctctatggaactaacattaacatgggagtccttccacatcttcttgcatctttacctactaggtcgattgagacctatattcagcatcagcaagatcatttggcagcactcaaagaccaccttactgtggctcaaaacaatatgaagtactatgccgacagacatcattctcctcaagattttcatgtgggtgagcaggttttactgaagctccaaacttattctcaaaccttgattgtcaatcgaccctaccccaagctagcattttagtattatggaccttactctattatggagaaga

SEQ ID NO: 88716 - DNA, 1344 bp, Zea Mays
tgaggaggcagcgtaagaagagagagaaagggaagtcagactcgtcaaagacgacgtgacgagagacgagctctgtgagtggaggtctaggcatcggtaccccttgcgatcaggggagtaccaaggaaaacacagtgagtggaacgggacacaagcttgtgaggggcagtggcaaaaaggttaggattgcatgcgcacccaaatacacgaatgtgatcgtaggagggagaggtgccaaagagagtaaagtagggatgaggaaccgccttggtggggtggcggttgagcaaatatgtagcagtggccagcctcttgacctagtagcgggcgggaagggaggcctagaacaacaaggaacgcatgacgttgttcgcggtgcgaatcatgtgttcagccctgccgttctaagaagaggtataggggcacaacatcctcagctgagtgtcgtgggagtggaaggaacgggacgtggagttgtcaaactccctcctgttgtcccctggacagcccggacggtgtgtccaaactgattggaaacccaagcggagaagtgagaaagggtggggaacgtatcagatttcaagcgcaagggagaagtccataagtaatgtgagtagtcatccaagagcaaataatatttattgccagaaacgctgagtagaggggatgtccaaacatcatagtggacaagataaaaaatgtctgctgttctagaagaggaggaagaaaaaggaagtccgacatgtctacctaactgacaggcatgacacaaatgaccaaaagaaccccgactacaagggatgacagaactgctagatagcttcgacatcacatcacgcccgggatggccaaggcgacagtgccaagtgatggacgatgtagcagcggtcagcgcatgaggggtggaggttgagaaaggggaggcaggcaggcgaagggtgtagagtggcccggtgctgtcacagcgtgaaagaagggtcctggtagcaagatccttcacatacaagccaaagggatcaaactctatagaacaagagttgtcattgataaattgatgaacagagagaagactctgaataatggtagaggcaacaagaatgttttttaggcggaaggggtcgagaaggactgcatcaccaactgagctgacgaggaccgacccatcgccaatgacgatgaggaaggaagagatgggtgaggaggatgggtggtggataaagtatcagcgtcaggggtggtgtggtaggaggcaccagagtcagccacctagtccgagaccgagttgggcgaagcaggagtcatcgtgttgaaggacccaacaagagacttagtatcccacccgcc

SEQ ID NO: 88717 - DNA, 432 bp, Zea Mays
gaataccatcatcagattacaaaggggctggcgccagcaatcaatcaaaacagattatgattgattggattatatctataacagatctgttcgattgcctcagattatatctataactgaacagatcctttcctaactgaacagatcctttcctatctttaacacaggcacaacaccctttccttactttacagatacattcttaatattatctaacatctattaggctccacaatagctttgtgtgtaggcactagacatgtttggtgcacccacatgacatgcttggtgcatccacgtaaaatagccattggtctactagtcatttaatgaccattggagatttggcatgtggtattaaatttgatgccttatggccttctccaacacatgttgcaaccctctcaaggtccctcatttggtaagggtctg

SEQ ID NO: 88718 - DNA, 908 bp, Zea Mays
aaaaattcggacagccggaaagagaatttgcgccaattttattttcttttctttttggccattttgctcggcagcgacggcgaggagatgagccgaggccccgccatctgccgcgctctggctagccgttggagtcgcaccaacgggcacatttcctcctggcccaggaggccgggagtgccttcagcggaggtaatataaataataaacagataaacatgtcatcttttacctcgcccatcctttctaccgcaaagaaaaagttggttcctctccctcccagttgcattagtttacgctccataacaggagccaggcagccacaagagcgacggtacttttaacggggacttgcctgtactaatcatcataactaagccactagttagtcgtcctcgtcccggtggcctggacgaccgggcagcgggcacccctccaccaccatttaatccgcttctagcttgtttctctatctctctctctacccccatctctggcagcttggcttcgccattacttggcttgcaggagctggccgtggagttcccgtgaggtggagaccaagccatgactgactcgctcgaccctacccgcacccgaaagagacgcttcgattcctatgcataaataggaaaaaaggagaggaggaattcgagaaaatcaccgcctctcttcctttcttcatcgccctgcccttttctcttctcctctcctctccacctaccgaatcccgtcgctgggggtcctcgatctggttcgcttgctgcgtgactcccagcctctgaattgtcttgttgtgccagacggatttgtgtctcttgacattggattgctgctcgtgttgttcttgtgtgggcaggtcgggacgtgcggtagattggtggtggcttcgtggcgctatcaatgct

SEQ ID NO: 88719 - DNA, 317 bp, Zea Mays
aattctgctaactctgtgggggccatgcggtatggtctctttgcgatgggcgcagtgacaggaatgagatctatatagaactccactcctctttctggtggcattccaggcaactcttccggaaatacatccacaaactcttcgattacgaacatgttttctgctgccagattaaacatcattggatcgtttgtgggcggctgggcttgacaggaaactgcttttccttggcgatcggtgagaaggacggtcttacttgcgcagctgatgatacccgtgtgcttagtgagccaatccattcctaggatcacatcaat

SEQ ID NO: 88720 - DNA, 345 bp, Zea Mays
tggccaatagctttcaaagtgaaacagtctcctgccctgggaatactcatgcagccccaacagaagaggacagtggtctgaaatgaatgttgccgaactttgcaatacgcagtccgggaaataatccccccagtctgaagtgtgaaagacccggtctaaacgaacaagcgtgagacttgcgcgttcattggaccaagtaaatttgcgccccatcaatggcagttccgacagatttaactcattaagaatacgacagaatctacccatcatagccctgtcaaggttgctattgttcttgtcttcggctcgatatataagattaaagtccccaccaatagtccaagg

SEQ ID NO: 88721 - DNA, 634 bp, Zea Mays
aagaagaggagtaccagcgccaagggcacatcctcgcttgtgaggcctccctccgtcagaaataggaagagctcgatgcccttgtgcagaaactcgatcgcgtctacagtgacatcgagtgaagtcgtcccaaggccaaaaagcctcaggcgaggaaggtatgtgtcatggtttccgaaaccaagggataatgatgtttgtgtaaggtaggggatgctagcgtggagccactccgaatggtgaatctctgggactcgttgagggatctgagacacagggttatactagttcgggttcgcaccctactccagtgttgtgcttatcgtagtattgctttgggcatgttataacatgtgtgcttatgtgtgagaggaagaggggccttcccttttgtatctcaaggggcatgccttacatcgatgcctctctttaagagagatatagatagagagagtccttttgttgtcatggtcggacttcctcctctgggtcgtgcaaagtagtgcttctggtatggtgtcatacgtcacacctgttcttgcagtgggtttgtggctgacgtccctacaatgacacacaacaagtcccatggttcaacctcggcacttgatccatacggaatggctttctcctg

SEQ ID NO: 88722 - DNA, 745 bp, Zea Mays
gttgggctaaaccatattatgacatgggccatccaataggtccgacccatttggacatgcatacctatactatacactagtgatgtgctcgcgcaggcaagcagcggtacaagtaagaagatggctcatgtagatgggctactaggtgtcagcgtaatagaggttagggtcatctattaaggtacaagaggatttttaattttgtaaattcagatttagttaggttcaattcgagattgagaagagaaggggcaccgacacaggcactagtcgtggcaccgttgctcgccacacgcctgtgaagctgaagtcgcaaagacgcgagaaggatactctgccaccagcgtcacaagctgcttgagactttaggctgcttaccctggtggcgacaagtaggtgagggggaggaggaaggggtgacaacaacgatcagggattggtgtcgtccgagtgacctcacgaggatggtgtaaggattggaattgtagtttctcaccatataaaatgtatttatgtaggttacatgatagacacattgtgatcggcacattatgatcgggtacaatgacaagttcaaatagagcataaattattgtaaaagtttagaacatgtttgaacatctattttatttaaaaaggtctacctatatgatatacagaaaccgtagtaatgcactgacaactaactagtctctgttcctttaaagcgtcagtttcgtgcgtcgtgcgtaagcgtgtagttctg

SEQ ID NO: 88723 - DNA, 499 bp, Zea Mays
ccttgtctttgcgcgtgcatcgcctcatgcgcttcttgaaggcctttcgtagccggtgcgcatgctcccaaggcactatcaatcctgagctgactagaccataagagcacttgagtcttgaaggtgtctaaagccttgtcgtagggtacatttctagcaacatacgagtggtttgcctcatagtcctcttctcttctcttgtctagttttgttgacttccttacaccagaggcaaggcccaccatgtcctgcgggtccttgttcatacttctaagggtgaggtagctaggcaagggagtctttagagtcattcgtattatacctacctagtctagcgtaagagggaccaaagagtcttctctcgtctccatctaccacgactaatgcccacacaagttctcctgattacttggtcaaggctagagctcatatagttcttgtggttgtaatgttgtcccgggtgatcactcgacgagttggtccttaaggtgaggccctt

SEQ ID NO: 88724 - DNA, 456 bp, Zea Mays
gtcattggagccatcggagaggaagtggttgcatgtagataagaaatgccacatggcctcgggatcatggagcccagagaagtctaggcctagacccaaatcatcttcttcctcagagtctacatactccgaggtttccgggagttccgcgtacatgctggtgtaggtgcttgtcatttaggggtagcctggaggatcgaagctcattcaaaaggggatgggattgaacaccgatggttcccccaagtcaaatgctggagtcggcacctcctgacccgtaggagggggagccagtggagctggcgcctctcgatccatagggggaggagctagtgaggcagacacctcctgatatgcaacgggaggagctagtgtggccagtgtccttcgacccacaggaggggagcccacgtagttggtgtctctcgaaccgtgggagggggagctggtgaaggc

SEQ ID NO: 88725 - DNA, 353 bp, Zea Mays
atcagaagcttgaagaataagatcaaagctaaagcagaaaagagttctaaattatctgaagctctaatgttgcttcggaagacatgttcagacttcgtggcacgatgctccacccacctgcgcaaaattttcaactcagttggggcactatcaggggaaaagaattactctgccgaagacattccaaaggccctcgatttcttggagaaggaaattaatgaatttgacgaagtaataaaagggcatggcgacttctacgcgctggtggctacctggggaacgaccaacatcttcgcaaaagctggatgcaaacatttaagagatgtcaacaaacctacgtttgctatttctcc

SEQ ID NO: 88726 - DNA, 714 bp, Zea Mays
gcctctgcccggtggaggaccaagccgcgaatcacaggagcgtgggccgggggaagaccaacttcatcgtccttcccgccatcatcatcacttgcaggctcccacgcctgcggattcgtcgcaggtcgagaccgaccgaaaggattccgggaagtccgaccgcgagcactttgagacccggaggcctcagcacccggcatgacattgccgcttccgcgccctcgcttggatcgagagcgaggtggagtatctccatggatttcctggtcatccgaggagtcggattcgaccaccgacgggttccttcgacgcaccattctaagaaataagaaatagaacctatgatgagcaaggatcaaacacgtttgagtagaaacgcataagatattgagcatgcacttcaaccattcatatgagcggtttaactacaacaaacaatatcaaatcgttaatctctaacaatgtttgtgacaaaatgaagataatctaagtgttgcaatcacttaaactaaaatgtacccaacgaatgatacattagataatcaagaacgcgtaggatcgagtacaagaaaatatcatagggcaatacctcgatccgaagattgggtcaagaactcccaacgagatggaggaagatggtggaaacacgccgggaagaacggatctccaaccactcttccaaaagtgtgagggcacgagagagtttttgaagtg

SEQ ID NO: 88727 - DNA, 417 bp, Zea Mays
atcgcaccctcgcaaatgcatattacattccccgcctcactacgagtataatcagtgttggccagctcgatgaggtggggtttgaggtgcacgtaaggggaggagtgatgcggattcatgacaaggcgcgtcgtctgctcgccaagatctaccggagcccaagccggctctacatcctcgacgccgagattgctcgaccagtgtgcttggcggcacacgcgaaggaagatgcgtggttgtggcacgcccgattcgggcatgtcaacttcactgcgctaaggaagatgggccgggagaggcttgttcgaggcatgcctctactcgaccaggtggagcaggtgtgcgacgcctgcctggcagggaaacgtaggcgctcgccgtttcccaagcacgccctgtcgcgctccacggaggtgc

SEQ ID NO: 88728 - DNA, 600 bp, Zea Mays
attattaggagtgtggcaacaacaccatcggatagaagtgtggcaacgccaagaacatcagctagcagcaatgggccaagaacaacttattcaaggcacatgtacattgtgctcaatcaaaaccagaattgcgcacttcgggcggaattccaagaaaccggtgagtttcattccaaaaaggcttaccaaagccaggaaatctatagttttacctaaccgccagagctagctaataaccaatgcagcacacaagaagcaactaagcggagcggaggagagaggggcagagaaggtaaacggcattaccagaaagcagtgtagttggagaagccgtacgctgtggccatagcgcccatggatgcgccagcggacacgcattgcgacaaccgcagcgccatgccactccaggtccccgggctccctaccacatccttcattcccccaagccggtgagtgggagcgaatggagagaagcgcgcaagagaccgcggtaccagagagatagcagcgaccgccagtcggaggtccggcgagactggacgctcgaacccggatctgttaatactggctccagcaagacgaggagacaggaagagtgag

SEQ ID NO: 88729 - DNA, 505 bp, Zea Mays
cattattctaccagctttggcagagggtatctcactatctccagtagattaatatactgtactcaagagtaaactttccctttaccataaagttaccgtcataccaaggcatgccagtatgtctcacaatttattatttcgtgactctgagagtattttctcttaagagcacatgctatgcaaggtggttaggcatgagtgcttaaagagagaatgttattacatcattaagcacaagtatagaagttaatcccttaaatgcaaactagttcttaaatgggcttaactacattgttagcacaccttaagcatcgcctagtacatatgatatggcaaaaaataaaaaacgaaactatttttcttagataagcacctccaccagtccactgtacatgcccttatagaaccttggtttgctcaagatagcataaattggcgtatccatcttcagtttcacatgctaatgagaaagcgtacaaataggttcatcttttcctctggtgtt

SEQ ID NO: 88730 - DNA, 335 bp, Zea Mays
ttcagatttccagccagctggccacttgcttcgataactgatcactggaaattttgtagtcttgtggtaggcaaaattgtagcagccgaagttttcatgtaacccatctcctctagccttggtctggtaatgaagctcatgcactcggcagaaaccttcggcaaatggttccaccccttggctttggagagcccaaatgtaaacgctaagcctaacaatagcgttaggagttagctgatgaaggtagatcccaaacttcttcagcacatctgcaatcatcttattcaaagggaatcttaaaccagatttaaagaaacttttaaagattactactt

SEQ ID NO: 88731 - DNA, 661 bp, Zea Mays
catattagttgatgacgagggaaaaaagcacacattgtcagaaccagtttacttatgaccataaacaatacacatatatttaatgtccagacagcacacataataaatctagcaacaatctatttgttttgtactcagtacgcccaatatgaacggtactgaaactcaccaaatggagcacatcacgcagctgccggtagaaaccccaaacccaagaccaattattggggtatcctttttcgtcagttcgttcattcatagatagtttgtggtccaattgaatatccatctactcattctgctagctatacttaaaaaaagaactgatctaggaacgaaacgaaaaaatggcagggagctgtttaggccgcctagaaaccacatgatagggtcgaacttgttgtgtgtgtatagatccaatgactgaaaatgtagtagctgttcacaaacaggtaacacaacagattcggtgaaaagaaattcatgtaggacaacaggagtaattccgaacaatacaatcagtaactaaatttagtttaaataaataatcttacactagttgtgtgtctgctggggaagggggccaaaatgttaaatcgatcaagttaagcataacatgaaaatgcgtatgttatgtgtcgaggattactggagggattaa

SEQ ID NO: 88732 - DNA, 315 bp, Zea Mays
cccaaccgtcgctgagagggggaaggggcagaggcagtggcgaagccacgagtggtgccggggtgggcctggcacccccaaggacccaactaagttagaccaataatgtatcccagagcccattatcttgccgccagtttattatttggtagtctgaaaccaataattttttccatcacatttgtaggtttgttgatgtgaccaaatctctaaataagaatgataacaccaccgtttttcatcattataaatttgatgtgtttaatgttgcaattgatcaacaactgaatgagatagaagatcgatttggtggcc

SEQ ID NO: 88733 - DNA, 468 bp, Zea Mays
aaaaaggcaggcgcggcgagggttgtttcgtacccttgcgtgtgtcggaaaaccctaacattttcaaaccactcacccgctcgcctaccctccttgttcttctgcttcagagatctggcccgcgtcaagcagaccgcgcaccgccaccgacggtacgtagcaatgtcttcttcctcatctgctgcgagtgcgtcatcggccgatccgttgtctgaggataccctgagtgatttggtggcgacggagttgcagctgggccacacggtggagttcagcacctcgaggatttcctcggttcacgtgcaggagatgcagcagcttgggtactttggtaacggtgttgggcgggttccgggcaccgaggagattccccgagcctgagggcgaattagttgtgttggaggcgttctttcttgccggccttcgcctctcggcacatcatttcgtggtggaggttttgtggagatt

SEQ ID NO: 88734 - DNA, 318 bp, Zea Mays
atcctcccccagattcggcaagctgaccagctcgtaccctccggcctcagaacctggtggtggctgctcgcctatttctgcgtcttgtggcaactgctcctctagcagcgttagtggagcttgcaaggacgaagacgaaacacattagttagtagacactaatgttcgtaaacaaatctgaaaaatgcatatgttcaattcatatgtagacatgaagaacaatgtgttttaacttagttcttctccataagttctaagcaacattatttgaaactaatttgctagtattttaaaaagcatatgacctcaaccagattg

SEQ ID NO: 88735 - DNA, 386 bp, Zea Mays
attaccgccgctttatcaagggattctccaacatagcaaaacctatgaccgaacttctcaaaaaggacaataagtttgtgtggactccaaagtgtgaggaaagtttccagatcatcaaggaaaagcttacaactgtgcccgtattgacactaccagatatacaccaagatttcgtcatcttctgtgatgcttcaaggcagggcttagggtgtgtcttgatgcaaaatgagaaagttattgcttatgcatcccgcttactcaagccacatgagcagaattaccccacccacgacttggaattggcagccatagtacacgctctgaaaatatggaggcactacctgattgggaacaaatgccacatcttcaccgaccacaagagtctg

SEQ ID NO: 88736 - DNA, 1335 bp, Zea Mays
acagcatctagcacgctggccatccctcttttccttggagttgttgcggggatgcttgatggcttcgacagttccgttgtgcatggtggactaagtgcttttaaccgttctgccgccttctctagtttcggctcttcaaccggttttgtcctagcttcgactgacacagagcgacttggctctgcaataggagcggtcccctcaattagcttcggcacgttggccatttcaatgcacctgggctggtgtgtcaaaactttaacctttttttacttcgacgcgctagaagtcacagtggtagcagctttccttttctttccttgcttccgcgaaggataacagtagtctggacatacaaatccgatgacatcgaataccctattcagcctctttttgcctcaagctccgaaggcagttgtcatcgcgtcatcttcggccttcgaatatgctccaagcaattcatcactggtcgcctctatggcatctagctagtcatcattcgattcatcaaattggttcctatatcgaaaagtatgcttcaaatacaccaaaccattttgattggaggcagcggcagtctccttcggcatttcccatccatgagcaagcggccacactctataagcgatatgctcctgcaccaagtctcttgtgccaatgtaagtacacactatgttgaaagccgcctggcatgtttgtatatcattcccaagagcagtggctgacttcctcatgccaaagcgagaccatatagggcgttgaataatccctttcacatcctccctttgacttaggtcattcttcacgtaaaaccattcctgcatctaggagctcggccacctctttcgaaatgtaggcactaggtagcttgcctcagaacgaggcacgaagctgtaataaccaaagttgttgtgatactactcctttctggtagccttcgtttcataagacaactcataaatattgcaaaagcatcttgcatctggttccagtccttggctcttcatggtccatataaagatccccgctttaatgatagcttcaggagtaagttgatgaaggtaaatttcaaaggttttcagaacttcgaccaacaatttgttcaggggaaccgaagcccggctttcatggagcttctgaaaaccaccactttgtcagcttcgggaagaggaacattattctcccctccggtcctcacgattgagatatcacgaaaatatctccccctcattgcatcgatctgcccttgtttaatagttgattttccgaagacaacatggcttggtctccaggaccgatcttcggcatcttcatttctactttctacatcgaaac

SEQ ID NO: 88737 - DNA, 488 bp, Zea Mays
gtgaagaattcccaccggaccgcgacgtcgcccatcaaattgataattaacgcatcttcctagtgcccttgcaaagttcccatatcgcacactagggctggtatgccggtatagccgcaaatcatctccagcggcactctcctcgcctccccagatctcggttctccatcaagatgtgatgacttgctctcctttctcggacgcgtcttgaacacacctaggatgtgccagcgcccctatttgttagatatttggatgccaaccaccagttaaccgagcttccaataacgatggctcctccctttctctgttcgcttagtggccggtggtttcgctctactcacacgccatggctagaggggtggtgtgggacctagtatttatgcccagggcaaaggtcatggcgatggggatcggattcgcgagaaatgattcgctcgggttccatggaggtgaatcccaacaactcctgtcgaattacggaggta

SEQ ID NO: 88738 - DNA, 490 bp, Zea Mays
tcagctctaaccatcttcgctgacggaggttgagatctagttgagtgaatatatacctcagactcttgtgatcggtgaaaatgtggcatttgttcccaattaggtaatgcctccatatcttcaaagcatgcactatggctgccaattccaaatcatgggtggggtaattctgttcgtgcggcttgagtaggcgcgatgcgtaagcaatgactttctcgttttgcatcagcacacatcctaagccttgcctcgaggcatcacagaagacgacaaaatcttgatgaatatctggtagtgatagaacgggtgttgttgtgagtttctccttttatgatctggaaacttccttcacattttggggtccacacaaatttatggtctttcttgagaagttctgtcatcggtcttgctatgctggagaatcctttgatgaagcggcggtaataccctgccattcccaggaagctccgaacttcgcttacgttggtcg

SEQ ID NO: 88739 - DNA, 763 bp, Zea Mays
gtcaaataagattagagagcaacacaagtgagttagaatgaaatcgtggtaagagaacttagaaggggagacataggagaacaaatcacaattgaaagtacagaacacacgaggcaaggaatttgtttttactgaggttcagttctgaagaacctactccccgttgtggtgttcgacaggacctggtctctcttgaccttctcaagtgacccaccgatcaacttgagccctcagcttacctgcgttttagatgcaaggcactccacaagatctggagcctcttgctagcctttacaacaaaagattacccacacaagagcaagaaacacaagaacacaacaccaagaaagctgatcacaagagcacacctttcgaagactaaactccagtcgggtggcaaaacacgcctgcctaatcctaggaataggaggcagcatagggttcacctgacgagatggatgaacacaagaacacaaggggttagagtagttcgagccaccggagaataataccctactccactatgtgttgtacttgctgagggtgtagatgaacttgcgtgtgagtgaagatgaagttgtcctccactttgtattgtatgtgccatcccttttatagtccaaggatgtcatgttacaaggaaggtgagtagccccgataggtgcccccagcaaaatagtattaaacatatgctacatggagcagtaagtactacgacagacatggatcttcacctcggccaccatgtggatcttctgactag

SEQ ID NO: 88740 - DNA, 558 bp, Zea Mays
caaaagactatgaaaagaatataaaatcatggtttaggccaaatataaacattgaagtatactaaataagcaacaacaaagattatgaaatcttgtccaaaatagtttaataaaaactctaaaacaagcttctcaagtgagggttcaatggggatttctgaaattcagaattctgaatttcagcccttgagctaaagaccgagcgtgttcaccttgatccctagctcaaatcctaatgaccccattgacaaaattgtgcctaactaatccctctgtcacatgccagaagatgacattggtacgtgagccctagacacggcaaaaccctggatttgccttgggctcgggcagggagacaaaccagatttcaaggctccaaatctttgaaaccagtaggaaaaatcctatgacccccacacaagatcggtagcttatagggaggagaagaggttttgtgcactgaccaaggaaagagcgggctcggatgaatgaccacacgcgccagaacttgggcagaatgaacgcgcacacgtgttcgaccctggtcggcacgtcggc

SEQ ID NO: 88741 - DNA, 464 bp, Zea Mays
ggaaaaatggaatttctatgaattaaataagttctggatatatttttatacataaaaaccatttcctaattattttcctgaatttcctaagcttctcgactaggcgcatgaataaacaaaaggccagggctactctgcaaaagttcccagacacaggctaacccccatatggacggcgagttgattcacaaaaagagcaggggctctttatgaagatcacccgccgaaggggtataggtgcatgggagccatccgatcggaatacagcggatgagattagatcccataacgctataaaccagcacgaagtgtgagccattggatccgcgatccaaggcccatatttaatgaggacgcaatctaatccagaccatgcctttctcatctgacggtaccggatcaccaagccgaaacgctacctcccttcaaatctccaccgttggctaggatccaacgggtccgcg

SEQ ID NO: 88742 - DNA, 471 bp, Zea Mays
agacgtcagtcacagggaggcgactccaaacaaaacacagtgaaggcgacggcgtgatggagcggccgagagctggaatcagccgccgcccaccaccccccatttcatcctccaaaaaaaactgtgacgtcatacaaaatttcccctgacctgttattattattattaattagtaattaaagtactatctcagctaatcagctgtgcacaccaacccatctgacaagaaatttgagctgcacgatccggaagctgagttgttaatgtatatttcccacggatcgcctcgggtcgtgtacactgtacaccgaccctcgctcggtgccaaaaggcaaatacgatatagtacataataaactaactaaacaagattagtttaaggggtaatcaggccgtaaacggacgccattggaggtacccttgacctcgatgctacgaccttcaacgctcttgctgacacgtgggcatcat

SEQ ID NO: 88743 - DNA, 515 bp, Zea Mays
atcggcttaagtcggcgacgacttaagtcggtgcgacatgctcacgcttacttgacttagggtgaccactataccctgctaatggagcaatcggcttaagtcggcgacgacttaagtcggtgcgacatgctcacgcttacttgacttagggtgaccactataccctgctaatggagcaatcgacttaagtcggcgacgacttaagtcggtgtgacatgctcacgcttacttgacttagggtgaccactataccctgctaacaaagccaccggcttaagtcggtaatgatctaagacggtgcaatatactccgacttactttacttagggtgaccactatgccctaccagcgaggcgatcggcttaagtcgtaaaacgccttaagccagcgcggtatacttgcattcgcgttgtttatggtgaccactgtaccctaatagcagaatgaccagctaagattaaaaacacttcaaaaaaagagaacatcttacttgctagtgccaggggcattttctg

SEQ ID NO: 88744 - DNA, 287 bp, Zea Mays
caaaccataggattcctctgctgtcctgccggaagcatttgtatttttctgctttctgcttgatcatttccttaatgacctgaacacccttgtcttcaatctgtgccctgactatttgctcttgtaatgtgggctccactgagatataatttaaaacacctgaagaaacaacttccaagttcagtttgcccaactcatcacacagagtggtgactcttgcatccatgctcatacaattgcactgggcctttctgctcaaggcatctgccacaacgttggctttgcca

SEQ ID NO: 88745 - DNA, 409 bp, Zea Mays
gtgtggagaggcgcctgttctatgaataaacacgatggatctcgttcgtcattaggcttgctggcctccatgttctgttcatttgcgtcgtaaaccttcctaacattatccgcaaatggaaaaaaaagaacttcttcctaacactacggttcagcgatacctttctgcagaccaaggtccgatgtcctgtacaggtgcgttggtgaccaaaaatagaggacgacgaaatatttgccgtgctaaatacccataggcgtttttaaccgagcttagctccacgcgccgtagcaggcgagcatctctctgcagaacgagataagacttctccagtcttcgattacagagcatttccatgaactcggttggaacttccaaggccgaattctctaacagctgggctggaaaaacg

SEQ ID NO: 88746 - DNA, 619 bp, Zea Mays
gccgctccgctgcgtgagcaggatccgtgcgcagctgattcctttaagtgatagccctgtgagatttgttagaggatccgctacctagatctcgagttgagggtaggaatcggggctctggatcacgattgggtgttcctccggcgatgctccgccgtgtggaggtatgcgtcgccgtcagaagcaccgtggggggggaagatatgccgtcggtcgcggattcgcgaatggacggctgggattagtccccgtttaccctttcgcgttgggttgatttggtccgttcatctggctttgaacggtgtagatgagatgccacttaaccctccgcgcacctcgaccggtgccgttggatctggatcgcgtggcgcttagtctggctaggagattttaaatctggtgcgttcacctatgatcgcacggttgtggcgcggtgcaccaccagtctaatctacgccgtctgttctaatccgacggcggggtaacacccataccccttcgcggctaacattttacgtatgaaccgctctggtttttagaattgaacccgcagtccgtagcccagtggtctgtgtctcggcatatttagcgccagggcccctgcacttttcagatttta

SEQ ID NO: 88747 - DNA, 670 bp, Zea Mays
ctagggtctcttctgcgaactggtaatgtgaaggggtatcggccatgatgggccatcggatcagacccgaacggcccagattaggtatgtgcacttaagtgatcagtctgcaacccgagtccttggatcgggatcctacgaccaatagccaatccgtgggttggaacgcagagccaaatctatccgtctgttcccaaaccaacggttccgatttaaagaaatccatcgccgccccagcactaatctcaagcgcccaaccaggatccaacgacccaggttacaactcagccgaaagcgcgcacatccgatcctagccgctggcttctaatcatatggccaggaacccttctcgtacctagcgcccaaagccgaccacggcactcgcgccaccgccagagagcacgcggcgagtggccaggcgacgacctagtgcacatctacatgagcgatcggtgcaatacgaagatagagagagggctaactttcaagtggtccccatacctcgaatctggacggcgtcggtcctgatcacgcaccgccgcgacgcaacgacgttcgtgatcccgacgagggaaaattcttgaagcgtggggtcacactttgaacgataacgctttgaatcgccccagtgatcgccgatgaacttccccgacgcagcacgaggttctag

SEQ ID NO: 88748 - DNA, 421 bp, Zea Mays
agctattatattgggtaataagcagaccaagaaacaagctaagagacaaaatgtgatcgaagagccgaagaaagtggccatagagccaaaggtagcagaggttgatactgaaggaccctgacacacaaaatcaaagatcccgccttgaaaagggatgtcggaagtgcatccgtcacttggggtgacacaaacattagaggtaatgacccatcctttacctttcaatgttttaagtccactaggatcggacttgaccaacctattgttgaccatgaagagcaagaaagaggagatgtcagctaaagcttcggctacactaccccaaagctcgagtaaaaattctataaaaaggctcttggatgaagatgcttatgagggcagtgtttgggactccgtctaaggagggcaacaaaagcccgag

SEQ ID NO: 88749 - DNA, 368 bp, Zea Mays
tgagaaagctgaaagttgtttgattgaaacctgtatcaactatagattttgtaagattatgatatcttggcaacatggcaggaatggcgctatcctagcctctttaacgagtcgattcgatatcaatatcatttcatcatcggtaaaggagtggtacgccatgtcatggggggcctacacccacaacactaggccaaagcatcatggctataatcatgcccagtccaacatatgcatggcgtcctagacaagtagtgtgtatggtagctaaagtgataggtattgtgtcatcgtcttccatagggatagagtctcgcaatcaccaaacatcaaagtgggggccagagaagtgttgaagagggcaatat

SEQ ID NO: 88750 - DNA, 380 bp, Zea Mays
gcggtgctgcccggttcgccctcgaaatcgccgtccaagcaatctctccgtgtgggacacggtagcgacatcgaagctctttctctctctgcgcggcaaggagctctcggcgaccagattccaccgggtttgtggcaatgggaaaaattggcgcagatggatgaggaaagggggtcacggcggtcggcctttatacacctgatgggcagagtccgattgccagagagctcggacggttctgtttagctaattcgaagtttgcgacgaagataactgcttcgacgcgaatcccgttggccagataaaacaatacccgacgtgcggctagcaattgatttaatggatgacatcgacataaaatggtagtgacatcatcgtca

SEQ ID NO: 88751 - DNA, 694 bp, Zea Mays
aaaaatttgaagagcaagacaatctcttctcaatcctttgaataagaggcagaaagtgttcctttctgggtttcgcaaggcccagaggcaaaccaagataggtgaaaggcatttctccaatttggcaattgagagttcgggagaggatctccatcttttcagaaggcacgtttatagagtacatatttgatttattataattaaccttaaggccagtagaagaagcaaaagagttgaggattgccttgaggaagaaaagttgcttaggacaggcctccaaaatcaaaagagtgttatctgcatactgaacaatcaggaaatcttggtcaccaatatccagtaaagggagcttaagaagattccacagtctagccttattaataatgctctgaagaaggtcggctgccaagacaaacaacagaggcgaaagaggatcaccctgtctaacacctctcttgcaacgaaagggcttaccagggacaccattgagcaacaccgaagaagtgccagaaagaaggatgctccgaacccagttgatccatctagggccgaaacctttgtgagtcagcacctgaataatcagttcatgttcaacagtgtcaaaagccttttcgaagtccagcttgagcacaatgatttctttttttgaggagtggcataagtgaatgtattcataggcccaagccaaccagtc

SEQ ID NO: 88752 - DNA, 545 bp, Zea Mays
ctggtgctcttcctatcatcaatatcaccagctagatcactatcactgaagccaatcaacaatggttctgaattgcccgaccttgtgtacttacaaccataatttagtgtccctacaacatacctcaagatctgctttactgctgcccaatgagttgatcttggcatttccatgtacctgctcacaatacccacagaatatgcaagatctggtcttgtatttactaggtaccttaaactcccaataatgctcctgtactttgtagcatcaacaggtggcgacttgtcttctttgctcaactttagcttattttccatgggaacctaacaggagttacaccctgtcattccagcttgctcgagaattttgagtgcataagcactttggcacaaagttgtgaacccttccttctgaaccacctgaatacccagataatatgtaagtaatccaaggtcactcatactgaagctctccatcatttgccttttgaatacaccaatactctcttgccttggtcctgttatcacaagatcatccacataaac

SEQ ID NO: 88753 - DNA, 508 bp, Zea Mays
gagaacttcagaggatgcttcgggagtaggggtggcagtttgttcagacagaatttgttctgcagcttcttttttcgtttcttcctctccgatttccaaggatttatccttggcgggctctgaagacccagcttcgatttcggcctggctcttggcagcttcggcttcggatagttttgcatcaatttgtgttcttgaagcttcggcagtctttttcggggtagagcttgaagattttattgtttccagcacatctagtacgttgaccatcctcttcctcttgggagtcgtcgtaagatccttttgcgccttcggcattgtcacctctgccgaagggcttataacttctaatgattttattttctcgacctctatctcttcaatgatatcggccttcggctcatctaagttggccaatgatgccttcgggactgcggccggctcttcaggtttctgcgtaatcgcaggttctttggcttcagtagccgaagaggtctcaccggcaaat

SEQ ID NO: 88754 - DNA, 396 bp, Zea Mays
gagattggcatggacttcattgtgggtctaccccgcacatctactgggtatgactatatgggtaattgtggacaggctaactaaagtagcccactttatcccagtgaagaccacatattcaagagccaggctagcagagttgtacatggcatggattgtatgtctgcacggtgtgcctaagaatatcgtgtcagaccgaggatctcagtttacttctcggttctggcagaagttgcatgagtgcttggatacaagattgaattttagttcggcctaccatcctcaaactgatgggcagaccgagaggaccaaccaagtactagaggatatgttaaaagcttgcgctcttaaacatggtggcagttgggataagagtttattgtatgtggagttctc

SEQ ID NO: 88755 - DNA, 505 bp, Zea Mays
ggagggaggggctttgggctcgaattgaaaaaaggtacaacgaacaaagggggcagctcccttgtagactaaacagagcacttagcagcagatgtgacaagattagagcagatgtgagtaagttctctggctactacgcaagagttctacgagagaaacaaagtggcttaactgatgacgacaaggttagccatatcgtacagagtttaattcatgttcataatttataattgtatacttgttctccgaatattctaattgaacaactattttttcagacttccaagatgacaacattgtttgcacatgaggagaacaaaccatttcattatatgcattgttggcatcaactgaagggggaaccaaaatgggagagtatctgtcaaggccattcgttccgaggattaaatgctaaatcaattggatcttcaggtactccatctgttgatgcacatgaaactgatagtggatctgctggtttgacaggaaaacggccccgtggtcg

SEQ ID NO: 88756 - DNA, 652 bp, Zea Mays
cttgagtaaacaccatatcaagataatcattatctccctaaaaataagaaatgttaaacaataatttaacaaaggcttcaacaactacaattacagtttacacagaccctccaaatatgatggacatataagctctgtctacagagagcaagaatagaagtgtatgcaaatcagaaagagagcacggattgtacgcaactggaaagccatcaaggtagaccatttcttcataagatcaaaagaaatctaggccataagggcatgtgtacccgtccatttgattgagcttcttccaaactccaagctttggatctatgtacactctctgattcctcatgatggaacgaccacgatacattaattcattgtgtatgcaacaatgcattcaatgagtaaataaagttgattaaattgtatgcaatataaccaagaaaaaatggccaagtaacacgaatacacttctttgcttgaacaaagatcaatattatgaatataaaactttgtattcagaagctatatctctaagcaagcttgcatcatgctcccttgaatcaaaatgtcatttctatgtttcacccaaaattagctacaagtgttgatcagttacaactcccaaaaatgataactatttagagagcaccttaccttaccg

SEQ ID NO: 88757 - DNA, 756 bp, Zea Mays
ccgccgccgttgaactacgcaattctcatcgtcgggccctcctggttcggccgaggataatctcctgggtacaccgcgtgcgtacgtgcctggattgggcgtcgtggtactaccggggcaccagaattgctcatcggagcatctgctccgccgcgggtctacctagtgccgtggaccactccctggtcgccgtctctgactacggtgagtacctagtccgtttcgccgttgttctaattgtgtgtggggaccttcgattgacgtcgagggagccttgctcggccggactgcgtggctccggcggggtcaccaccatggacatcgggcggcgccgctgtctagctgggaagggataggggagaattgtgtgggccgttgatcggctattggacggtcagatttgatcctgagtgtagcgccctcacgtgtaatatatgccctccgatcgggatctggtggttagggttagggcgctcttcatcacgatccggaccgttggatggggaacgggcgcattcgatgccaccttgggtattttaaatccgatctgtagatctcggatcgggcggccaccaacgcttaccggttcgcttaaagttcagaatctaatccgggcccttaatccttcatcgggcggccccagttggcccgtaccctttcggccgtgcgatgttgcaaataggcccctcgacttttcctaaactaacccgccgtcccccgcggttgtgctttgagtcttgcagattcttgcgccag

SEQ ID NO: 88758 - DNA, 651 bp, Zea Mays
ggggaggtgaggggtgagctggcgatcacgtcgagatgcttggcacgcgaggaggtggccagagtacctctagccacgagtgcaggtggatggagttcgccagagttggtcggtcgaccgtcctagcacgataggggttcgggagagtgatccgggagcttcactgggtcttggcgaagatggtggcgtgctcagatcaggcggaaaacaactggattgtcccagccatgtggaccgagcattggtgatggcggtggaccgcgacgagctcaccggagggcggtagagctccaagattggagcacgctggctgtggcatggtgtggcaagtgttatggtgtgcttgaaatgggaggagagcggccggagctgtgagtccactagacctgttcaaatgtcgggttgggtcaagatcaggtcgtggatcagatatcagggctcgtacccaacacgcgcctagtgttaggtcatcccattccttcttgtttgatgtgacaggtcgggggttttcaggttgggttgggttttttttatgagtcgagttttttcgggttgggtcagattttgggtcaaaaatcatagcacgtgtccggcacgtgaattattgcgggtcgaaaattatgatccatacccgaccgttgcattggtcag

SEQ ID NO: 88759 - DNA, 390 bp, Zea Mays
cggcggtggagttacatccagaccgcacggtggagtttggcgtttcgaggatctcctcggttcgtgtgcaagacatgcaacggttggggtactttgggaatggagttgggcaagttccaggggcggaagagattcctgagccggagggtgagttagttgtgttcgaggcattctttatcgtcggccttcgcctacctgcgcatcgttttgtggcagaggtcttgcagaggtttgaagtacagatccaccaattgacacctaatgtcgtggtggccctagcgaagtatgtctgggcggtgacttcgtatggcggtcagccctccgtagaggtcttcgccaagaattattgtctgcactggcagaagagaaaaattggaagcaagattgcac

SEQ ID NO: 88760 - DNA, 545 bp, Zea Mays
tgaccgatttggggggaatgagaaattgagaggctctggtggatgatctgaggcaagggttggtgcgttggatgcgtaaatacctagcggaactccctggggcattgatttatattgttcatcagtggtggcgcccaatttgaagaaatcgcgctggcggccgagagaggggtgagtcatcgcggcgatctaccgtggcggtcactgggtgatgagctacggcggtcactgggcagtcactacgactcgcgacgacgtggtaagatgtcctaaggcatggcgcaaccgcggtgaagggtgtacatcccggtgacggccgctcggccacgtcgccggcaagtggatgaggcgacagggcgaaacagtgcccccaagttcatccacggcgagatcttttcacccgaggccgttttctgtgcgttactgggcacgaatcgtgacgccggcgtgaatccgagcgcgcgagtcaccagcggcgaggttcagcgtatctgagatttttctggctaccgtaccatggccatctccttcagtctgtctgaccg

SEQ ID NO: 88761 - DNA, 373 bp, Zea Mays
cgagtactcaggaaccaggtacctgaaataggaccttcataaacggtcaactccatcgaccaactctgtgagacagaccgaatgaccaactcttggatgatgaccatctctccgatgaccaactccaccgaccactatgcgagatggaccggatgaccaactctccgatgatgaccaactcttcgatgaccaactctgccaaccaactctatgagatggaccagatgaccaactcccagatgatgaccaactctctgctgaccaactttgccgaccaactctgtgagacagaccatatgaccaactctccgatgatgaccaactctctggtgatgaccagctctctggtgttgaccaactctcggatgacgac

SEQ ID NO: 88762 - DNA, 430 bp, Zea Mays
gaattaaccaacagaagaaaacaaatcatgatttacctgctcaatttctcttttatacatgttaagtgcccttattatgtcatttctctgcatctcaaagaactgcagtgtgcaaaatatgtaagttacctcaagaaaataaagacaaatgacttttctctgattttgaaaagcaagctgatagtactcaccttgtcaaaaagattgagtatcacgtcattgatggctgtttggatcctaccactctctagagcaacctaccattaataacacataaacacaagttcaaggaatcctaagatcacttgtccgatgaataacaaatgaagtgcagccatgagcctagagcggttttggataaggatgacagactaccacaacaagctagggagctcgagtcatgcatcagcacaggtgagtcgtcctgctc

SEQ ID NO: 88763 - DNA, 651 bp, Zea Mays
gattaactcaagccatcttctctgtcttaggttgagttctttctgtgtgaagatatatttcaagcttttgtgatcagtgaagattttacacttgtttccaatcatgtagtgcctccaaatcttcaaagcatgcactacgacagctaattccagatcatgcgtaggataattcttttcatgcttccgtaactccctttataggcaatcacttttccttcttgcattaacacacatccaagtcttagatgtgatgcatcgcaatacacattaaatcctttgtgaatattaggcataatcaatattggtgcagtggttagcctttcctttaattcctcgaaacatttctgacatgcttcatcccacttaaattctttacctttctccaacagtgaagtaaggggtttcactattttggagaagccttcaatgaatcttttgtagtatcctgctaatcccagaaaactcctgatcttggacacattggtgggttgtttccaattaagtatttcacttattttgccggggtctactttgattcctccattggtgataatatgacctaggaaagcaacttcctttagccaaaaatcacacttcgaaaatttcgcatacaactgattgtcatgaagcttatgtaggactaatctcaga

SEQ ID NO: 88764 - DNA, 884 bp, Zea Mays
ctttttatgttataaatcatttcctatattaaattctgcttttatccgaaattctaggccgagggcaccatttaggagaagttcagggtgcccaatataaattcttaggatccacccgtaacgttttataccgaaacccagactgcggcctgattcacctatattccagggtctcttttataaatctacgacagcgaagagttatcaggtgatcctaccgtccgatcttctgtctacggccccgattagatctgcattaatccgaacaggtacgcgatgtggaccgtgggatttctgatatacggtgtggatcagttttgcaatagcggtatgagtataccagacggggacccttgcttttaagatggacgctccggatttaaccaatgaagcaacatttcttagtctaatcgcaccgaccgttggctgatctacggaccacagcgcatcgtcatgcctccgccgctgtgctacgatgggaagcagagcgccgcccgagagttcaccagcgcaccccatcaagtgcccccatgcaccggttttgggctatgatcgcgtaaaaacaaagagctatccttcatgatcccgataggcaccataccaacctcatccagtagtacccaggttcccgaccacgacccacacggttccgcggcggcgccatagctccgttgagccattgcccgattcgaatcacccccacgcactcaatactagctctatatgctgcggcttgaacgaatgacttcatcggtcataccttacctctagccacgacccaagcgctgctggacacgtgatggtgtggcaccgcgacgacaccgaatcaccggcgataaattgtcaccgccctggccaccatcgttgcctggcaacggcacgag

SEQ ID NO: 88765 - DNA, 712 bp, Zea Mays
cgaggattcaaagttacgcaccggacgacaatccaaggtcagatcctgctgcaccgcaattggttccatctcaatctgatggtccggatcccgcaagaacttcctcagcatagagacatgaaaaactgggtgtacccctaccatggaatccggcaattgcaagcgataagtcaagctgcccacccgggccaagatagtgaacggtccagtatatgtcgggctaagctttccggagacaccgaaccgaacaactcctttagtgggtgataccctgagaaggacttgatcacgcccactgcaaattccaaatcatgtctcctcacatcagcataactcttctgacgcctctgagcggccaaaatattctgacgaatttcccgaaccttttcagaagtttgttgtacccaatcaggaccaaccagggatctctctcccaaggtctcccagcacagagggaagacacaccgcctgccatacaaagcctcaaatggtgccatcttgatgctagcctggtagctgttgttataagcaaactctgccagtgcaagatgatcttcccggctacccttccaagacagaacacaagcgtgcaacatatcttctaaggtttggatcgttcgctccgactgaccataagtctgaggatgaaaagcgacactaagagaaagcttggtgcccaatgcactgtgaagactctcccagaatttggata

SEQ ID NO: 88766 - DNA, 499 bp, Zea Mays
tctagatcccacctaatctaacatgagctaatccaaattgagttacttaagtaagttagacataaattaggccctgattctataaacatatcttaccctaaattaataccttggactaactcgtccgtaaaaaaaacaacctaacctacatcataggttgcctaatccagatatcccaaaagcaaagtaaaactctgtttaaatctaattacctcatgtaccctagctatcctagctatatgtccttagccatatgtcctcaactcggatggcaactccaggactgagggccaaagaagaccaaccacgtcaagggaggataagcaccaactcaagtcttcaaagggcaaaacggaatcatcagatgagtcaagatccaccatccataatagaaactttctttgccctaatccttattaccgaaaccttctctacttctgcctaatagctaaacatagtatacccatgtgttcctaatcatttccttacttaaaatgac

SEQ ID NO: 88767 - DNA, 299 bp, Zea Mays
gcaaaaggaatttcaaacttatttgtctgaaatgtggtgtcaaacgagatagcatcacaaaaacatttgtaatccatgctagactagcagtcagcccaaaagaaattaattatacgaccagttggcttatctatttggatggcataaaaaatggaggatcctcaatctgcttgttcttcaagtattccaacagtgtctgtgcatcattggattctaaatatttctttcactctcgaccaatctcattattgcaatccgtcttcgagaacggaatattttcagcaccatcgtaaaattgc

SEQ ID NO: 88768 - DNA, 578 bp, Zea Mays
cacaatttgtcataaaaaagaaaaatccttttaggtgtaaactagaccaaatgttaatttagggggctatttggacataaacaaacttggagggagtaatttgaacttttccctagagataataccatatccgttaaatatatcatcacaatttatacatatagaactaactatcaagttttttaaccatctagtgtaacacaaacattacatcaatacttctctcaacgataggctatatcatcaggttccttaaaacctgaagcatttccaagccctcctcgcacttcccggccttgcagcctctctgcctgtgacgcgtggctatacagaaacactcgctcgattcaccagctgaagcgcagtacatatatcttattgcgtgagtgagtctccgtgcttcgcggtcattttcttgactccgcggactgacgtgtcacgcgtgtccctgccagcactggcgctacgcgctccgtttcgtgtctttgccggcagacgcgtgcccccacggccccacccctcaaacaacgcttcccctatcgcgtcctgctccacaaacaggtcagcctcgccatcgc

SEQ ID NO: 88769 - DNA, 271 bp, Zea Mays
aatttctccttcgcttcttcgcgcacctgggcgcgtcgttgcaacgcatcgttgttccattgcttcatgagatcttcgaactattaatgctcctcgaccgatagacttccatagttggcctaacgatgttacttggggagacattggtacggtctttggaatcgaccattgtggccgatctaatagatctaaaatgcagtcatccctaacggagttgacaaaagtgtgttggagtctttttaggccaaacaccaacgatcccaagatcttg

SEQ ID NO: 88770 - DNA, 590 bp, Zea Mays
cgtacatgtcgaggtgactaactgagggtctgcctatagtgaggatagcatattgataacacctcgtatggctcctcataccctttatgacaaggtagaaccactgaactgtctcattatggatataaagtttccatctattgctgaccggatataaacataaatgcaaggatatgcttatacagtggcagtgacattatgtacacctaccctctatgcatatgtaaaggtgaaggtgtgcatgtaatattgtgtattacatttaatgtgaaccccgctatagttaccgcttcctaaggtaactatcgtactagctatagggataggcatgataacctaagtctgcggataccatggcttaggccaactagcctagggtagttcactactgatatagtcccttgtgctttattacaatttccggtacaccctgcgtgcactcacataattacataaccgatgtatgtaccatgtagtgatcttaagtgccttatagtctaagttgtgtgccaccacactaaatgagtcccataatatcgcccattgcatatttaatgcatggtacccaaaacttatcgattaagctatcg

SEQ ID NO: 88771 - DNA, 713 bp, Zea Mays
gtgggctcttggatccgcagggctctacgttggttatgggttaccaagtaggcctccatcaacttctggacgtgctcatccttagcttgtttcagggcttcaaccgcaatggcttcatgactttccaatgcagttgcacgggcttgagctgtggtgagatccacatggagctgacggttgcgcttctctgcatcttctgctcgggcaatcatctgacggtggtgccgagccaagaaatcatattgtgcatccagggtgagcaggtatgcagtgaggtacacgactgaggggtcgtcctcaatcaactgctgaccctccaatgcacgcatcctggccatccaaactggacggtttctttgaaagggcagaaagaatctgagcggtgtgtcggccacttcttcttcatagatctgacacagggccctcaatgccttgcgagtgacgacttggcaggtgtctttgaatctgtgcccagcagcagtgacactccattccacatggtgcggactggatccaatgtatacagtcacgacacacttctctgtgccatgctcgacgaattcacgaccatcatactctggttggctcctgattccgaggcggactgtgcatgctctcagcaacttggggaaaccatcttcattctagcaaaagctgctttgggaatggacctccatctgacttctgagagaaggaaagagggaaagcatttt

SEQ ID NO: 88772 - DNA, 1633 bp, Zea Mays
gcttgtctggctgctagttcatgtccttctgaagtgtagggagtgcgggcttcgtacctccgatgaagtcttgagcccgcccgtccgcagtgatgtagatgtccgcctccatgaatagttgttcagaggtggcgggagccttctgaaggatggctcagatgaaaaccaaattattggatccccgatagaaatcctcgatcacagctgcctccacgacctcaggaatgttgttcctcattgtttgaaatctcatcgctttggtgtttgatggatttgacatcccatggctgcgccggtttgtcggagagggattggaacttcgcgacaaactggtggctaaaatcttcccaatcgtcgatactgtgtcgcggcatatgtcaaagccattgcaacgcgtcctaccctaggacaatgggcaggtacatggtcatgttttcctctattgccccagtagcccaggcggtggtcgtgtagactgccaactagcacctcgggtcttgcttgggatcgtacttgtcaatgttggaaactttgaagttaggaaaacattggattgctcagagccgaggggtgagcacggagaccccacacgtttccctctcctccttttggtgatcatgtcgccggttccggggaggtgagtggggctcatgtcgcctcgaccgtcctaggaccagactgctggtggaggctgtcgctgactcggtcctggtcgcaaggctacatgccggtgcaccacgatcctcgtcgtatttctctcggtgccttatctcattctcatgtcggcgatcgagcaaagcgctgatgttgcttcgcgcatctcgtcgactattgatggcgtgacacagatcgttcagcaggtgggcgagaagtaaaagatgattagctgcctgagtgagtactcgccgatagatttccatgtctggggttcgctgtaggtcattggctatctacgcaaggacccctccaacctcgctcggcgtgtttagtgctcgagcgaagttagggtataggttctgggtggggagcgggttctcacaccgaagactagcgtcttgttctgtctgctcccgctcgcgttcctgagcctagcgacgatcgtggcagtgggagttgtgttgttctcggtgtgttctttcattaggggtctcccccatctcagaagctttgtcccgagagacgggctaagctggatctcgctctccagcttcatggtgtcgtcgtacattttggcgcctgtttcaccgtcgttgcgcatcgcgctggggggcttctcccccagcacggtgggtttgtcgtcagacataggtgacgtttccagtatcccctgattgacgagcatgtctagaagaaaggcgtgggcacagcggtgcgttccttcccgttctcctttgagggtggagcaatctagacgacagtctgcagcgcttccctgccccggattggagtgttcatctccttttgtcgagtgatccgtgtccacaccttagtgggcgaggtggacaacggagttcgccgagtcggggaggccatggacgaccgtccttcagccctctgtggatcctgagcccgatctcacatgggaccatgccccattatgccatcagtgggggttttgttggcgcggtttgtg

SEQ ID NO: 88773 - DNA, 568 bp, Zea Mays
gtgggacccacacctgggcgttctcctaactcaggttgtttctccgatttctcgggcgcggactcgtggggctggccggattcctctcatcagccattacaagcctgggactgagccttccccttcactcgtggctctcactggtggctggggtcctcttccacgggtcttcttccaccattcatagtaacagactccaacagaagaagccactcacgcgtgtgcctgcgatctggtggatagggttgtgagattcctgatcccgcctttgcccgtataacgtagccgcaaaaccccccaaccctcatctcaggcgctgccaaaccaccatcaattgagaaagcatcgacgagaatagggaagaagtacaggaatcgccgcgggtccgtgcggtggcatggttgggagctctgcgctgggtggatagcggtgagtaccttcccgggtgattggtcattgtctctgcttcgcattgtgccgctcagacctaggattggggcctagtgcttaagatcaccgtcgacgaccatggtgaccgccgagggagtgggcggtgcggccatctttt

SEQ ID NO: 88774 - DNA, 1318 bp, Zea Mays
cgagcatgttgcaccatcttaagtcgttgccgacttaagccgattgctccgttagtagggcatagtggtcaccccgagttaagtaagaatgcaggtcgaccatgaacaatatgggtattcttgaggtctctttattgatgatatatttccagttcatagggtacattgtcatcccgatagcttttgaaatacagctaggggtaaaacttcctgaggtgttctatgttccatgagtttccaatttccgtgacatccatctgagtgagacgatatgatcccggccgagtgacttctgctactatgaatggtccttcccatagaggtgacaacttatgtcgtccctcccccgttagaattcggcggaggacgagatctcccactgcaaaggatcgacgtcgcatggccttatcgtggtaatgcctcaaagtttgctggtaccgtgctgattgaattattgtgttgagtcgttcttcttcgagtatatcaacatcctccagcctagtagcctcagcttctgctatgctttcaaagaccaaacttggcgccccaaacttgaggtcagcaggtagtactgcctctgacccgtagaccatgaagaaaggagtatttccatgcagagcttgactaggttgagttcttaggctccaaacgacgtagggcaactcccttatccacttccctgcaaacttttcatttttatcgaagacttttttcctgagtgcctccaatatcatcccgttagctcgttcaacctgcccgttggctcttgggtgtgccaccgaagcatatttgatctgaatgcttttttgctcgcagaaatcgaagaactccgaacttgtgaagttggatcctaggtcagttatgatactatttggtattctgaatctgaatattatgtcttgtatgaattccacggccttagctgaggttaaagaagcaatgggtttgaactctatccatttagtgaatttgtcaattgctaccagtatatgagtgtatcctccttgagctttcttgaaaggtccaatcatatccagtccccagcatgtgaacggccaagttactggtatggtctgtagttgctgtgctggtaggtgttgttgctttgacaagtactgacaggcttcgcacctctgaactaactcggctgcatcactttttgctgttggccaatagaatcccgacctgaagacctttccaactagtgtcttggatgctgcgtgtattccacattgcccagcatggacctcatctagaagttgcttcctagtggatgagagaatgcatttcatgaggacgcccgaggcaccccttctgt

SEQ ID NO: 88775 - DNA, 858 bp, Zea Mays
ccaaaacaaaaactctgtgtttagactttagaataattactgatactatttcaatcacactatttacattagtatggagcaagggttcgctcagatagctttaacacatgaacacattgataccattcatctttcatgccagagtttgatgcctaaaggcacacaattcacttgtgtgtttgagaaaagaatgacagttcctcgccaagaaaaaatagatcacacaagcacatcctctaaccttactggtccaggaaataactaggcgtgaatttcacaagaagcatagaagacatttttagttctgagaactaaataatatgtattcatgttataataaaaggaggctccatacaaatttcaaaagttacatcaagtccattcctaaagaagaatgaatttacaatttatcaagacatgtagactaatgaggtgcaaatattcaatagactaggctttgatacatgataagcctaaacaatggatgtcatatataattgtattgaaagttcaaggaccacgcatgatggaatgcgagagtaaagccgaacatcatggagcgaatccatgctttcaactcagcatgcctcatcgagtcaatgtacatacctcagtttaatttcttaatgcacacctcaaatggtagcccaattgtcgaacagcacagtctaagaaattatctaaacacctcaaatgtacatacctcagtatctgaatcacccaaagcatttccagtctaaaattagcaacgcactacatgtgttcattggttcccaaattaaaaacacagactaagaaattatctaaacccatggtggaatagtcctagtagagacactccattgttaagcagttagc

SEQ ID NO: 88776 - DNA, 421 bp, Zea Mays
ttaagtttccagcggtagcgcctcaagatgttgaaaacctgctggagatcgacaagttttctgggttcacgattttgatcaccatgtcgtcaatgtaggcttccatcctcttgccccagtggtcggctaagcatgtttggatagctcgttgataagtcgctccaacgtttttgaggccgaacgacatggaggtagagctgaatgccccaaagggcatgatgaatgcagtcttatctttatcttccttcgctagattgatctggtgatatcctgagtaacagtctaggaaggagagcatagagcagtcggcggtagagtcgaccacctggtctattctagggagcccgaagggatcctttgggcaatgtttgttgagattggtatagtcgacgcacatgcgctaatcaactttattcttttt

SEQ ID NO: 88777 - DNA, 621 bp, Zea Mays
ttgggttgcaaacgatacactagtcaactcgaggagacgaggtaagactacccgaaacaatctggtgcctcgtggctccctaagtgaaaaagctcagtttgctgtgtagaggatgacaccgcaattcctcatccaattcattcccatgattacatccaagggcaaatcttgtaaaactatcaaatgtgcttgaaaatctcttccttcaatcctgagggttgcccctcaaactacacgactggtgaaaaattgagccctagctgaacttatctagtatttatgtcccacttctacttatgattgattaaatcaatgagcaaaagcagtactcataaatgaatgagaagatttgtaatcaaataaaacaactacagggtggtggtacataagaaacatactggccataacaggttctccatcagcggcctcatctgctgtggtaggatgcacacgagcggggtaaacatcgttcttcttcttaggacgagggaagaacttagcgaagtgcctcatttttccacaattgtagcatggtcctttgactagttagtgttggttacttgtctccaattgctatacacaattgaaaacaagacaacataatgttaagaagataattga

SEQ ID NO: 88778 - DNA, 752 bp, Zea Mays
cagtggcttgggatgaactttggattcgattctagctcgagggagtaagtaaataagcaaggtctctgtagtcgaattgtagttgatatatagaacaacaactttgttacagaaggcttatcaagttgtcacacaaaaaatggagaaccaaggcctttaatctgctctgtcaggcgctctgatgaacggttccaatggtacagtgactggataggatcatattcagtgaacctcaccgccggcgacctccgcgcaaggagtcgcgctgatcgcagtgattcgtgtagaactcgggcaggatagtaccgggagggtgaaaagatcagaaagggagtggatttgatcgagggttaaagcttatcaaccgcgcctatagccgcgcaacgtggccggatcaccggtgtcgccgtggtacgccaacgaccccaaatatgtcacgtcgtagtcctttaccatgttgtaggaatcatggcgcatctggatttaccacttcaagagctattgcaccggcaagcgccacgactgagcgattagaaactcatccccctctccggccgctgcgcgtcttcttcaatttagccgccaccgctcatgaatcctttaaattgagcatgctctccgctccactaggtattcaagcacccagcgcacccactcgtgtctcaaatcattcaccaaacaactccaatttgggatttcccccaaatcaatcaaaaacgacgtgcggtgtgagctcaccgtggctagctcgt

SEQ ID NO: 88779 - DNA, 529 bp, Zea Mays
actcatccgagcagaattcgcctaatggtgcagctagatatacacagcaaaacacaaaagtcaaacataaaaaaatgtgcgaatacattcaaaagctgaagacccacatagtcgttcctcggtgaaggggggcgagggcagcgtttgacttaaattcgtcgagccacgacaatacaaatcttctaaggattacaaaggctccactttcgggattagaccaacctcccaaaaattaaacaacataagcctaagctctttgccttcaaaaagcgcactaaggtccgttcttcaaaacctcgctcagttgttggcacaagaacaatccagtgaggcccctcttccgattgtgctctcccttgcttgagggtgcaggggtgacatacgaagctcctcgtggagcgagacccatgggcgaggtcctcttagtcccataaggcgacgccttcgagagccctcgcctcctcttggtgatgcaccggcactccatagccttcgttttggtacacccactcttctacttttgcttttc

SEQ ID NO: 88780 - DNA, 690 bp, Zea Mays
gggaagccgcctccgccgttcatcgtccacaatgtcgatggggcctcgatggttggtcggggggtctctgccttggtgcaaggagggtcaccatggccgcgcggtgaggtactccccgaggcagccgcaattcctcgcgggatccagaaccagccgggaccacgccgctcgggagcaacacgttttcccatcgccattcgttggtatggtgcttactatccagtttttcatagtcttctctctctatttcgcgggaccatgcacgatttagatcactacggcggtgtttggggatgaaccgcggcgagcttgtcgccgtgtggtgtgcagcgccaccgcgatgctgtgccagggaagaagaagatggcgcattcgttgatcttcgcgcgaacgggcgagattagaagtagggtagcgattcaccgagttaaatcctagccgttcgactgtggatggacgtatgtgatgggatcgcgtagtattgaactcgtggccgttagatctggatcctaaggtttagatcgtgtaccggttcacttaaatgggcgctataatctggggcgttcgctcgtgatccaacagctgatgcgtatccgtaccccttcgaccactctagtttgctaaagagcccccgcagtttatacaaaataacccgccgtcctgtagaatagttctgtgtcttgggaaaac

SEQ ID NO: 88781 - DNA, 455 bp, Zea Mays
tggagtaaatattcatattcattgttattaagattggagtttctactgaatttgcatggcagattgtctcactgttggcgtccagatatatcaaagtggtctgtattttttgtgttgactgtgcaagatatgtgctactttgcgtagacgggactggtggtgggcagtcgcattgcatctgttcggactgttgcaatccatactccatatagacaaaatactgtagaggtcgtagcaagctgcagcgaacatgctctttctaactgtattctgttatgttctgaaaatcatactacctctgcaagtaatgtaattaatctggggcacattgatagacctgatttgcttaatatttgatgaaagatgcaaattggcacaggtttgcagcaggacttgctttcttgcaatattgtgctttgctaggttttggttacgctgggattggacagcatctg

SEQ ID NO: 88782 - DNA, 874 bp, Zea Mays
ttcatttgagattgccagacaagtctctcatctttggtccatgacttaaaagtaaagttgccctctaactcaaggcccaactttggtacatagatcccatggccaaagcatttttttaacttaggagtggtttacttgcacttgatctctcactaactctaaaacttctctgactctcaacaaaacaacacaccacatatgggttgaatttttgacctagtaaaatgcattctaggaatatcaagcaagatgacgaggatgcatatgatgtcatgccaaagttttagttctcgtaacactaggggtgttacactccacactggcacgaatcgcggcacaggcgtgaatcgcggagcggagaacgtcggcagcgaggttcactaaatctggcatctggttcagtcactgtaccatcatcgcaaactcctttcagtctgtctgaccgagcaacttgcagggctttgctctcaaatgttttgtggcaactcactcacctgcctgtatcaaagttgttgccctatacaactttgttacaaagaccttgctcaaacatccactgaatccccccgcaaatcgatctcaaagttcatccaatttcactgatggtcaagattcagtcttaaggttgattggcagtccaacttcatgtctatttttctccaatttctgtacagcaccaatgcttagtcacttaatcaaacttgtacccctaacatagctctacaagtttattgtaatgaattggggcaaaatcttcacggattaggaaatacaaggccccaaacttggccaaatcacattgatttttcagagttaagccacatagatgctcttgaggatttttgcaattaagtccaaattgttccacattact

SEQ ID NO: 88783 - DNA, 356 bp, Zea Mays
tgacgtcggtgagatagcactgtgtgtgacgagagaaacaacgaaatcaccttgaacaccgacaacactatgacagtggctacaatgatatctcaagcacgctagacccttcgtacatatagacccttactagtgagcttttataatcgctcacttacactagagtcaatcatctatgcaactattcatatcccttaagtgtgtgacccattaggttcatgtgtagatggccatgatcggaaaccaattttgatctattagtcaatagtggcgtctaggagtacacattgaatctcgtgtacatacaaaagattatattagttgaatcatgatataaacatgtcttgatccctttg

SEQ ID NO: 88784 - DNA, 457 bp, Zea Mays
cttggtacccaaagcactatgaagactctcccagaatttggatacaaatttggagtctcgatctgaaacaatggacttaggcaccccgtgaagcctgattacttctttcatatacaagggaaccaactctgaagctgaatttgtggtcttcatgggaataaagtgcatagacttagttaagcgatccactactacccatatagcatccctgccttgaggaaaacgaggtaagccaaccacgaaatccatggtgatatgctcccacttccactctagaatttccaacggcttcaataaacctacaggcctcttatgctcggccttcacgcgctgacacacctcacaggctgccacatacttagaaacgtcaaccttcattctcttccaccaaaagttttgcttcaaatccttgtacattttggtttcgccagggtggacggtgtaaggcgtttaagca

SEQ ID NO: 88785 - DNA, 722 bp, Zea Mays
gatcaagggttcgtccgcccgtcctcctcgtcaagaagcccgatggttcgtggcgcttttgcgtcgactattgggcgctgaacgcgctcaccatcaaggatgctttcccgatcccggtggtcgacgagctccatggcaccaagttcttcaccaagctggacatccggtccgggtaccaccaggtacgcatgcgcccggaggacgtgcacaacacggcgttccgcacccacgacggactgtacgagttcctggtgatggctttcgcgctgtgcaacgccccgacgacattccaggccttgatgaacgatgtgctccgcccgttcctgcgtcgcttcgtcctggtattttttgacgatattctgatttacagcaagacgtgagttgatcaccttcgccacctccgggtcgtcctcgacgaactacgacgccaccaactcttcgtcaagcgcaccaagtgctcttttggtgcttcctccgtcgcctacctcggccatgtcatatccgcggcgggtgtggccatggacccaaccaagatgcaagcgatccatgattggtcggctccactttcgccccgggctgtgcgcagtttcctcggcctcgccgagtactaccgcaagttcgtccacaactatggggcgatcgctgcaccacttacggccctactcaaggagggcttgtcctaggacgacagcggctttcacagcgctcaaggctgccgtcac

SEQ ID NO: 88786 - DNA, 514 bp, Zea Mays
cctgtggcgcctttaccacgggagccgaagacaaatactttctaatgagatcaaacgcttcttgttgttctgcccgtaggtgaatttgacatcatttttaagccaaaggataggagtgaaggcatcaatcttcccggctaggttagagataaacctttgtaaataatttaccttgccgaggaacttctgcatttcaagcttacatttcggaggtcccacattccgaatagatttaattcggtcagggtctatctctatcccatgttcatgaatgatgaaccctaagaacataccagccgacactccaaaaacacaatttgtgggttgatttttagaccatactgacacattttatcaaaggctttgcgcaaatcagctatatgagaactaaactcagccaatttgactaggatatcatcaatttagacttccacagtgtttcccaacagctcgtgaaagatcaaattcatagccctctgataagtagcaccaacatttttcagaccaaatgtca

SEQ ID NO: 88787 - DNA, 291 bp, Zea Mays
agctaaacatgcttgaagcaagggatagtgaaggctggcaattctttgatgccctggcaaactgtagttccctgaatatactttcagtgtctcaaaatcttctacatggacctataccaaattcgatttcaaatctgtccaccactcttcaatacctaatgatggcttcgaacaacctatcaggaaccgttcccccaactattggaaaatttagtggcttgattaaattatcacttgcaaacaacaaccttacaggtaccattgaggaatgggtcggaaacatgacaaaac

SEQ ID NO: 88788 - DNA, 284 bp, Zea Mays
tgtaggttgacgaaccaaaagcatatgcactaccagcacccttcggaaaacaatagatttcataaaatcattttgttccccgaagtaagaactaagcctgatgcaagtcaccgatttttcaaaccaatagggtgatcattcaatagagctctaacgaataaaggtagttttggattgcatctttctcgaccatgaccatctgatcaacggatcaaaaggtatagaatggagatgcccccgatctaaatagacaaagggactatgcatgtactatgggttcatcg

SEQ ID NO: 88789 - DNA, 458 bp, Zea Mays
gctgggtgggaaatatcggaggggggtctcagagatctctcggctatagttttggcacagttgtttgagggcttttcgagcaacgctctggcaagtgtctgggaaactgtgcccgatgaaggtaatttggaagggagggtggtttgggtagttctggctctctcctaagtagaccgccatagagcacttttctattccattttcacggtactccttccagacatattcgggcttcttgcggatccccaagcgtagcgcgcaactccgaagaaggtgagggaagccttcctcctctgagcaataggagatcctaatcaaccaggggttttccatctggtagacgaaaataaaggtctattaatatcgggaaaaggggaagagtgtttcttgggggtaagaggtgttttcttgttaaggcaacttttaaggtcagggctgtggtctacggccagtcctat

SEQ ID NO: 88790 - DNA, 1007 bp, Zea Mays
gtctcaaacttaatagggagtttgtgtagagggaaagaatatgattcgtgaagtatcatacaaagcaaaacaaaactctaggcacaaattagatttcccgcgaaggttggggttttctcaaacaaactcaaaatgagatcaactcagttcacgaccaagaaccgcaccagcagggtgtatgcagtgatccaaagagtgtatctcaccaccaatcaatccccaacaacatccataacacaagaacacgatggttcttccataaatccaaagaggaaagaaagggaagaacgcgagaacaaaatcgactcaaaacttcagcagagacaaaaccgagtaaaagagtcgaaccgaccctgtggatggatctggccaccctacctttgaatagacctgtgaggattacaaacatagatgtgaattcaaaatatctgtggatcttgcctacgctaggggatggaaactagagtttctaaatgtgtctggcctaagcaatagctaaaatgagatatagcctcaagagatatagctgaaacaatcaacccacccttatatttataaagggttattgtcacaatccaaccaaattatctggcccacgtacaccaatccttgccttcaaggcctcggatagatatgtaagtgaatcagataacttacaagaggtgccgagtttcgatgaactcattcatttccatggatcattcacccataactgtgaacattacaataaccatacatgaatagaaactttaaacaaaggaattgagtggaagactttacaataagataatagacattagcaaacttttaagtttacaaacccaagtagtgttcattaatacatgcctgaggtagagacaaagcgctaacttattacatcacctgggaagatgtcatctccccacaagcatacatacaaacaaacataagtaaagggtctccagagtgagcttaacagaactcaaacatgttaagaacctctcctgcaataacatagggaataaaac

SEQ ID NO: 88791 - DNA, 370 bp, Zea Mays
gtctagttcaatcaaaggagtcgtgaagcttgaggaggacctaaggatgctagaacaatcgactagagcggttgaacgaacctggaataagctggccgtggtgaaggtgtctctgcggtggcggaaactcagtttgggggaaatccaaaattagagctctcgggtatacgattggaggcaatacttggtggcttggtgcatgattatcctatggaccagacgatgtgctcaatttatagaaggcaagagcggtggccggtgaatttgggagagacgtgcggcgatcggaggagtgggaggtcactggcgcaaggaattcgtggcatctaccgtggcagcgctcaccggcgatgatcagacggccaaagtg

SEQ ID NO: 88792 - DNA, 732 bp, Zea Mays
tttgaagagatccttagtgacagaggggatttttgtgccttcatcgatgcccatggggtcgtatcagtcctagaaaaaatcgactgcgaacatgctagggctgtggctcagccaggattctcgctttcagctgatgacgttaaaaacccttcggctgacgctactgcattaagcagaaagttctattccaaagtatggatgaagggtggccaagagatagctgatgaagccattagaagaaatgaggaagagtctcacgacgccttagaagaggctaagaaagccgaagaaactgctgaacacaccagggttataagtatatccattacagcttagcttcgtaaattgttgtagcttcggtactaacagatacttgtattttgatgcagctgagctttcaccccatccagagccatacgatcctaaaactaatccatctctgaagggggcacttgacataattagaattgctaacgaggccattgactaagctgttgacagactgttgaatgaagctgccgacaaagtcttaaaagaagactagagttttgtatatttgagagtttaaggtctttgtacatagttttcgtttttgtaagaaacaattatcaaatatccgcatatgtattgatgtaatatatttctttgtggtgcgtgaaaccttcgtacgtaccatttttgagccgctggcgaaaaacaccttcccttcttttcacgcttcacgaagaaaga

SEQ ID NO: 88793 - DNA, 826 bp, Zea Mays
tcttacccctgacccctgtgactatataacctaaccctaagcaccacctcgccataaactaggaacccagaaagccaaacaccatcaatgcagtgctcgcgcgtgaggcatgtgcataggagggggtagccgccacgagctcaacgtcgctgcgtcgacaaagcatccaccctggcgctcaagccccgacctgtgcacaagcatgatcttcggcacagtccaggtgagtccatgatctccccgtgcgtggaggacaggtgtggcggggggaaatatctcgtcgatcctcagcgccaccgcgggttgcgtatcaccatggtcggacccttcacgacatcaccgacggtgagttgctattcggtcgagcttctttattccatagtgcgtgtagcaccctacagaacgatgcttagcgcaccaatgtaccggtaatggctcgtcggaatagctcctccaccgtgatgcggttggcactgccgccctggtgtttgggtggggaagacaagcttgcgaccataggatacgtaatggtcggctgtgattcggcgcttagataaccgttcgccgcattaaatcctggtcgttgtgattgattcgggcgtgatcgagggctagggaagagaatctggcatggatggtttcgggtcgctgatcctagatcggatggctaggataggataccggttcgcgcatgggagatataatcaagggcgtccattgccgatcgggcggtcctagtgtagctataccccttcggctgggtattttcttaatgagcccctggaatttctaagatttaacccgcagcctcggtcagttataaaac

SEQ ID NO: 88794 - DNA, 305 bp, Zea Mays
gcttcgaagggtgccatctttaggctggattgataactgttgttataagcaaactctgccaaggagaggtgcttatcctagttcttgccacaattgattgcacaagctcttagcatatcttcaagaatttgatttaccctctcggtctgaccatcagtctgtgggtggtaagctgaacttctaattatcttggttcccaaagactcttgcagttgttcccaaaatctggcaacaaattgggctcctcggtcagaaacaatggtccaaggcaatccgtgcaaacacacgacaaacacacgatccgg

SEQ ID NO: 88795 - DNA, 447 bp, Zea Mays
aaatttgagcccaactgggaaatcttttctcgtgtcatgtcttcatggaccttgcaggccgcaagcttgggctctctcttcccccaccacgaaacacaacacggaagaggtggtctccgacgaacttcccggcacatccatacaaatcgcttactcctttcagtaccctctccgtttttctgttgatccatagtgcgcatatgtacgctcatctgttgttacgtgctcaatcagatgctctgagtactggccaatccgtgaacaactgtcctgatttgggcacctagacttcaggaggaagaaactaaacatgcaagtccgatggtagcaagccaaaaaaaaaaggagcatgccatttatgacttcgttgcatgcttttttggtagtagatgtttggttggacactgcctcctccagtggttggaacaaacgttgctggtgactggt

SEQ ID NO: 88796 - DNA, 836 bp, Zea Mays
cttcgaaggcgatgggcgaaccagctgccgaagaccccgcggcggcggtcgggccttcgcaggtggcggaatagggtttggagattttaagtgtaaactgttgtttctgtgatactaaacctcggttgctgtgcaggttccgacgtttgggcctgcgcaagcaaccgctgctgactatactgattttgtggcggcctcaaccgtagtgcctgccgatgataatttgtttggttctatgtctgattattttgagtccgatggtgaatctaggagtttgtttccttggacggaggagtcctcggatgaaggcttggattattttgttgcgttggatgtggctgcggcggtgacttcgccgtgtatggagggtgccggggatcttcctagtgtgggtgtcgggtgtaggcggcgaagggtggtgggaaaacatagtgtgggtgaattttcgcggagtggcaggtgccgtcgtatggggatggagcgtggccgtctccgtgtaaaccgggttgataaatgagaattgttgtccttgctggctggggcgagcataggcgagggggatcttcagaagctttttgagggtgaggaattgaggataatgctgtttaattacagggagatgggtatcattctgaaggttgagccgatgtaataggcgatgccctcgccgtgtgtatgtaataggcgatgccctcgccgtgtgtatgtaattgtaatttgtatggtgatgtggcatgttggccgtattcgtatgcttgtgttggtccatctgcatccgtgggcgactctgtgcggagtgtctttgtaatgacagacttcgattaacgttattccgg

SEQ ID NO: 88797 - DNA, 470 bp, Zea Mays
cccgcaggacagtgctgaggacggagctacgccagcgccgcctgtagaagcccaagaagagctggagaagcagcagcccagcggccgctagcaccagaccttccactttgacgatcgtcgcccttgggtgcttcagcaaaggggacagagcctgcattgccctcgtcatgtttactactccatctgggttggagcctggcggatccatggaggaggatggataggtcagagatgaatgaaaggtgtgtgtgttgctctcgaggaattggatgtttgtctgccggcttcctccgactaacggtactccttttatttgatttgaaggtgtggtccgatcgatcaatggatgctttagggtccattgtgattactttggattggacctacaaaccattgttgcttactatcaagctgacaagattatagcatacgttgcgttctttttctttcagctctgcaagataccttgc

SEQ ID NO: 88798 - DNA, 459 bp, Zea Mays
caagtcttttatatgtcccggtggatgtagacttaactacgacatcgtcgatgtaaatctccacgagattccctatcaggtcatggaaaatgtagttcatggcacgctggtatgtagttctggcattcttcaacccaaaagtcatgaccacatactcgaataatcctaccgagcctggtacccggaatgtggttttgtgcacgtcttcccgggccatgaaaatttggttgtaccaagtatttccatcaatgaagctcaatatcttgtggccgacaactgcgttgatcaacacttctgcgaccggcatggggtatttgtccattggtgtggccctgttgagtctctgaaatccacgcataccctccaccagccatccttcttttgaatgagtaccacactagaaatccattcagtataccgacacgccctcatgaaccctgtctccaacatttgctctac

SEQ ID NO: 88799 - DNA, 674 bp, Zea Mays
gcggtattcgtgaggagcgggtagccgaggccgggctcgggcgaggtagagtttatcttgaggccgaattctacttcgggcgagacagagtttgtgcccgagatctagcctgtacctttgtcgtattgtacgtcccatcaggagttggcagacggtgtgcaggaacagtggtcgcatgcgtaatcatagttggtgaatctttgacaagactgcggtcttgttactcctgtgcacctacatccctatgtgggttaggtgtgcgcattgaatgttgttgcccccgacggtcttgccctgggtttgtctcccttaccagaggtgggcttgagcgaggctgaggccgtcgttctgtggtaaggggacctcggccgagacgaggattctcccgagaacacccgtccgaggacaagctcgggcgacccagagtttgtgaagacccctgagagggacctcgggcgaagcgcggattatgatccttcaacctcgggggatgtaccttgatagtgtttttagggattaatcattttagagatgtaatctaggtaccctaattactatacccgacactctttaattacatttattcgccgattgagctccaatttcctctgttgcacgtatttgcaacactattatcctactatagtaaggctaggaattagaagctgttgaag

SEQ ID NO: 88800 - DNA, 725 bp, Zea Mays
tatgaaattcttacactaaaatgcatgtgctattcttgcttgagaataacagaatctatttatcttatactttttcataggttgttgctgtcaaaccaaattatgtgcctatataagttgcgcttatggattatgcgttcgagtataaattgtacctgcattttggtatgtcgttgcttattttggtaatttatcatcctcttatttctctttgtgttcattatgtgcgctctcatttctgcttctatgaccctacaggttctcgatggtgttcagtaaggatttggtcatcagcaatgatgtgttttaagtttctcttctcttgtatgtccacttgcatcgactcaggtatccatttcacttgattgtgctcctgcctgctctttttggcgaagataggtgctttggaatgcctttacaaaatgcatttccatggtctttccatgttctcatttgtttcatgcctacaagtgccttgtccgtatactgtttcacgctgatttgttgagcaacctgtctttgtatagccagccatctttcaatgagttgtgagtggatgctcatgtcattctcccaattttccttgttgaattttaccatgccactgtattacagttatttatacattcctatgtcttctgacctataagtaaagtctacatatgacaatttcagtacattatttcatactaaaaagaaacgtttggactatagaaagctttctg

SEQ ID NO: 88801 - DNA, 1153 bp, Zea Mays
caagaacgcccgcctcatcagctcgtacatggcgcagatcctggaacaggaggagcctcgagcttctgtcgtccatggcgatgctgctgctggggacgaggtgctcaagagctgcaactacattgtcatgggagaggatacgctggtggacattgagcccactgcagatggctacaagctggacgagcaggccagcggctccccaccacgctacgacgacggcggcgttgtcaaatgggtcagagaaaacgatagcatcgtcaccgtcggcaaagtctgggagctcgatgacagtgacaagttcttcacctcccaaaatcagatccagcgcctgaagaggatctgcctctcgttcgctctcttcaagctactgcgccgaaggtttgagcacctgccggcgttgagcaaacaagaagtggacgactccagggacctactcctgaagggcctctacaacaatggcgaaaccagctgctcggccgaagcaatgttccaggtcatgaacgacgaggtggtcttcatcaatgagtactaccactccgttgtccccgtcgtccttgcgagccccttcttcctcgtcctaaactacttcctcctcaacatcgtcgtagccatcctgtgcgtcatgaccgtcatcctctgcgccaacggtgacgtcccctacgcgttccagagcatagccaaagacaactacaccttggattctggggtgtttaagatagccatctgcctcctgcagagagtcggcacgccttcaaacttcttctccgtcgtagacctctccatcaccatcctcctgttcgtcatctacttgtacgaggagatgtgggagttcttcgtcttcctcctctccaactggttcatggtgtccctgctctacaactacatctccaagccacggtggctgaggcacaactccttccggggcaccatgttctcggtgggtttcagcgtcatcatgtggctgaggagcaagatgacccagccgagcctaaccctcaagcagttcaccgtcctcaacgtccgtttgccgctcaagctgccgctcttccccgcgttcaccggcctggcggtggagaagaagccagtgccgaacagtgtgatgagatccgtcatcgactacctggcgaaacgtggacatggtgccccgaac

SEQ ID NO: 88802 - DNA, 606 bp, Zea Mays
caagcaaggagttactgcccttgagccattgtactggcgagcgccacaaggaactcgtccagtggaatatctcgccgccaccgtgatcgccttcgtctcaaactagcgaagcacgtagccggctcctttaaattgatcactaccctcgctctgcctctctgttacgcgctcatgccaccctcagttagtctctctcgtgcatcgtagcccccagtcaccggatttcccccaaatcaggtcactcacgacgtcgtgagacaccctgccgtgatcagccattcccaggtccgttcatacctctctgtgccatgtttttatcattcttgaatgttaacgaagctcatcggctcaaccgattgaacactaccgcgacaaggcatctagaacatcaactcgcagctgcggaacactttcaagagcgcactcacgtcgacccactctcccacgcccgctccgtccaaattcacgggtgtactcgacctctggtgagtcagtgaaactcgccctagcttcaatttaaacgctaccacattttgttgctcggaacatgcttaccggagctctagcgccgccgtggccatgaacaagcatcaattaggaccagac

SEQ ID NO: 88803 - DNA, 418 bp, Zea Mays
aaaatttaaagaaaaaacttgccgagaagaatgaagattttgaagtggctaaggcgaagcaggaaataagggagtggactagcgcaaggttgcaaaagaatgtagatgagcttcaggaatcaaaggaaagatattatgaaaaatccttagattgtgccaagaagctaaaagacatttttgcaaaggtgggtgcttactcatccaagcagaaatttatggggcgatctcgaaggaatcatcgaatggatcggtgaagaagccaaagcttttgaagagatccttagtgatcgtggtgatttcagtgcctttgccggtgctagaggggttgcaacaattttggaaaatctggttgcaaacacattaaagctggaacccagacggaggctgtctttaccgtggataacacgaaggatccttc

SEQ ID NO: 88804 - DNA, 343 bp, Zea Mays
aaaaggcaaagtttagcactatgtttactttaaccttttatgaaacaatttaacaaaagagtatccaactattgttttgcaatcgtcttccctctaattatatatagtggacaagatccatgttcactaagttatagtgaactttgacatcacaactagaaatataatgacataggtaagcaacatttgttaatcacatcctatgtgactcttgattgttgggtggcaccgaataccttgactctcaacatcatgtgcaagatccaaatccgatttggtagcctcattaagcaaaccaatactatgcatgcagatgcccaacatccaccctattagattaaat

SEQ ID NO: 88805 - DNA, 346 bp, Zea Mays
cacgaagctaaacacacccttctaaattttgctttagcttcgccactacgtgcgagacaactttttggtggcatggatgttcactatctaggagaagattcctatccaactcgtctaagaaccaacatcatttgtccatagaccgctatctcctatatctagggatatccatcaaacaaacgcactctcgagtaccctagttgagaatgtaccttactgcggtgaacaagtcatagaccaaaaattaaacaaacaatgcatatgtccatttattttgtcatggaagaaaaaatatcgcaacttttctgcatcctccattctaaactataagtcatgctgaattttc

SEQ ID NO: 88806 - DNA, 749 bp, Zea Mays
atggtttctcgcctttcaatctaactgcactgtcctactcatgctggcccatctttgctattccatacaaccttccaccagctctttgcatgaagtatgaatttattttcttgtgtcttgtaatacctggttcggatcatcctagaacaaagaccgatgtgatgatgagacccctgattgaagaactgaaaattttgtggtaaggaatcgaggcgtacgattgttataagaaacataaattcaacctgagagctgcgtttttgtggtctattaacgattttatggcttatggtatctttgctggatggagttgtcatgagattttgacatgtccgatatgcgctaaagaaactttatgcttccgactgaagtttggtggaaagatatgttacttcgattgccatagatgttttttgctagaggatcacccattcaggttcgatagtaatgctcttagaaaggacacaattgtgacgaggtgaccactcaagagtcttagtggtctagagattctcgtgagacttaatgatttgaaacgaaatgaacatggaaattgttttgaaggttttgaaaccgagcataattggactcacaaatgtggtctatgggaactcccttatctgaaagccttgattctaatgcataacattgatgtgatgcaccaggaatgaaatatgggtgaaagcattatcagcacttgcctgaatatcactgacaaaacaaaggacaaccctaaagctagaaaagac

SEQ ID NO: 88807 - DNA, 472 bp, Zea Mays
ggccagcatggatcttttgaagacccaacatcacttgttggattgttcaataggtattgataggcactttgttatcctttggaagaagagaaccacagagatattacatcccattgatgctagtgtcagaccatccgatatgagcctttagtttcaacatctagagatcaaaatgtagcatcgaccattgctttggacaatcattatagattagatcctttatcatttgctttatctcttcaaagttatctaaccaccttgggctcccatatagaaggtcatcattgtcgaggtggttaacgaaatcctcaaagaattgtgcatccttggggtctagagtagtagccacctcactaggatcctcatcattatcacccctatcgtcgaccatgtcttgcacaaaatcattcatcatgatgaaatcattctcgccatttatgtggtgcctagctcatgatgaagctcttgctcc

SEQ ID NO: 88808 - DNA, 531 bp, Zea Mays
cttgagggaggcagtgttggcggggcttcctcttttcgttctgtctggcatccttggctcttagtctgcttccggatcttcttagtgggggcgagcttctttaacttcttagcgtagtccatcttcagggtttggtaggcttcacgagtgttggcctcttcaccttctgctatttcgaggctttcttggagggacgccttttcctcttttaattccttgatttgttgctctaggctttccacccgagaatttaggtgggtgcagtgggagaaaaggtcgtcatagtggttgtcaagggtgtgaagatatccggacatgtagactatggtggggtcatcctcattaggatctctccctaataaggcctgaagtcttttcctccaggtaggggtatttttgttgctgggtggaaagtaacgaaggggtgtctcggagacttccctgctgtagttttggcatagctggcgaagggctttttgggcaaaattttggcaagtgtctgggaagcggtgtccagtggcggtgacttgg

SEQ ID NO: 88809 - DNA, 358 bp, Zea Mays
gcagactgtaatgcagatttgagtgtagaaaatgcagtttcatgctcagtggtctatatgaagagagagttcttccttagtagattctttaggggattgctaatcactccaaaatgacgcacaaacttgcgataatagccagcaagaccaaggaaactgcgaagttctttggtattggagggaagaggccaagtgacaattgcatcaattttagctggatctatagatataccatcagaactgataacatggcccaaataagacagttgttgctgagcaaaagaacacttggataatttgattctccagtcatcttgcttcaacaagtccaacacttacagaatgtggatgaggtgtt

SEQ ID NO: 88810 - DNA, 605 bp, Zea Mays
gctctttgtgcaggaggccagaaacgactgtccatatatttttccagtgtatcatggctaaatttatttggggctgttgggacctgatgtttggcatgagtcccattcccaaatctgttgagggagttattctgtacttggggaacctcaaaccttcatatgtcgcattccttttatatgttcatgatggtaggactggtttggccccatgtggtgcaacagaaataagatggcgattgagaataaatctcctagtggccctaaaatgattttgtataaatctattggcagttgtttgtctgttgcttttgagtagatgttgggtgggttccatgttctctgttttcttggtcaggagtttagctcaggggtgtcttgtgctggctggactttagtcagtttcagttgtgttgcttggttttgtgtggattggtgttgctgcctggttaaactggtctccccagtagagtgtgtgagttgtcagtttgtatctgaatccttatatgctttctcaaaagcagagtaataatctcagttcaaaaaaatttgtagcgcattttggatgtgattacaaatccgtgaattacgttggttatttggatgtg

SEQ ID NO: 88811 - DNA, 349 bp, Zea Mays
ggaaccctaacccagaagaccccacccgatcgagagaaccgagaacgggggacgcggagaacttacctcggcgttccatggagccagcgacatactcgacaatggtgcgctcacctagaggggagctactcatcaacgagtagccgtgcagcggtgccatcacctgaactctctccggccttcaccaacacatgggaagaatagagggacaagaggacagctcgcggccaggagaagaaaatggcctatgtttttcccgatgcgatgaaaaatacactttttatactttggctagaacgaccgcaactattcgatcaaatccgacagtcgagatgcaggcgagcgtgaa

SEQ ID NO: 88812 - DNA, 699 bp, Zea Mays
tttccttcgtcagcttgtgctcgaagcctttctccataccgtatgctaatggcttcggcacgattttgatcaaagattttctccacaccgaagctaccagctttctccaaccttcgttattcacctgaaacacactttgttataccaaagtacaggtgttttgaggaccttcggcaaggcaagccccccaatagtagccccttgcgggatgagtctgttgcttcataacgagcttagatcgcaaaaatcataaatgtgaggccttgtgtcgaaggtacgaaaaaaccttcctcaagcttgttatgaatattccgactggtagggcccacatctcagtgagtacaacggttaagtacaaaaaatctacgggtataaaatggagcaacacctagtggtgttaacacgacatttgctgcttttgcgcgtgttgttgttcaaggctgctctacctttgaagcttactttgattgtatttccatctctagatcagccttacctagctaaaaaaagtacggttttccaatacgaaatggtagaagagtagtctggtgctggtgtgcctttggtaccttcgtcaagcgttcaagagacaaaggttgaggagtttgtttcaacaatagaggcttcacctctcaggtcttagctggctctttgaatctatccgaggataatgacattattgacattgaagaggatagc

SEQ ID NO: 88813 - DNA, 530 bp, Zea Mays
tcaagggcaagaaagatgatgaaagtgatgatgagaagaaagaaaagaagttcttcaagaagaaagaaggcaagcacaagaggtttcacaaaaagaagaatggaaaaagcatatattgttggtgattggctcaccgacattgaatcctcaagcgactcttcttcaagtgaagaagaagatgacgaaaatgtcaccgccattgcttgggatttctcttcaccaccatcatcaccttcatctacttcacacctatgcctcatggataaaagtgaacggaaggtataacatgaaaatgatattgttgaagattgtgatagtgatagtgatgatgaatatgcttctcctacttatgatgaattagcggacttgcttaaagaatatactcaaatcattagaaagtccaaagctaaatgtgacaagcttaaagatgaaaatgaattcttaactgctaagtatgacatagttgttaaaactagtgaagaaatgaaggaagaaagcaaaactatgtcatccaccaaaaatgagctcaa

SEQ ID NO: 88814 - DNA, 778 bp, Zea Mays
tcgagcaacccgacgaggcacagatttatgtctagcgccactgattcacgtcagctacagcgggacgtgtcatcatcaaaccacgttcggacatgcacacgacacgctgaatgggcacatggatctctacagtgacccgtatatcgaaagacgggacaacgccccataccgagcgtgcgtctgcgcacgtcggtaggtgatgaaggcgtcatgactacaagagaaggcacaccaagtacgaccgcactttgagattgatccgtggaacccatcgcataccattacgaagacgttggtgatggactcgctacaataaccaaagtagcgggcgaagatgacgctatgccgggagtacagctacgcacgatcctacggaggacccaccacaccaacccagggagcatatctctctttctctctagtagaatggaagtcccattgtaaggtcctacccttgagatataaaatggaaggctctcctctttcttcgacacacaagcacacctgctgtaacacgctccagaatgatactatgatcaacactacattgcactagggcgcaagcctgaaccagtataaccccttgtttcatctatcgttgagtcccagtgattcacaattcggagtgagtccgcattagcatcccccgtcgaacacaaatctcattgtcccctggttttaaaaaccatgacaagtaccccatattgttgtcatcgctacataaatctgagagagagaaaaacaatctaagagcatagtcagtagttctcaaaatttc

SEQ ID NO: 88815 - DNA, 644 bp, Zea Mays
gaagactatgcaggagaacatcagagtggtgggaacgaagatggaagccggaaggagctgcaaggatatgtgttgggccgtcgcgtgcctaggcccagtgggcgggcgctacgcgtcggacatctggtccgtgtaagagaggagagtgaggagtgtatttgaactcagccttgccactgtgaatgttaagatatgagaaatacaatgatcctcctcctatcttcttcttccccacgttatcctcttccctttctgagtagccatcgtagttggtagctaacaattggtatcggctgagttcgtcgcattaggagcaactcaggtcttcgaggcagaaacttgccaagaatagctgatgtaggtgctggttcatcttctcagcctcaacgaacatatgtcaggacaaggaagtgtttaagaaatgcagcagctcaagatattggagaagaggacagtgatgatcaagaagatggtgctgctgctgcacaagtagaacaacaacaaacacaagaagcaactggagatatggatgaagatggtgctgctgctgatgcattttgtttggatgctgatctgctctaggtagtagccagcaggtaatgcattactgcatactgcttgatgcttgtactagtaaagtagta

SEQ ID NO: 88816 - DNA, 289 bp, Zea Mays
cagacgccggaatattcagcgacatcacgaggctggggagcgggacccagcgcagcccgtatcccgggatgaagtctcgaaagtaggagaaactcctgccgaacgagtcttcagagaaaggaggaattctcgccgacgtgaccgccggcaagctcaagaccgagatcgagaacaagctgagcaagatgcgaggttacgccgagagaaccctctcttcgcgcaaaacttgaaccctgactttgctcgtgccatgaacacaccgagtgaagtcggaggagtgttggctcga

SEQ ID NO: 88817 - DNA, 900 bp, Zea Mays
cccaaattaggtactttcgtatggtgctaaaataacacccattttataattataagaagagttagtgaaaattagaagtaaacaaaagcttgcatgtctcttgggatgttgaattataccttagtactaattagagattaaatggttatgcgcatgatgaatttagtaaaaaaaattcatcagtgtcactggtgttaagttgatgtttatttgcgcgtgtaaagtaataatgtgattaatacttagaactcttagttgatagtagaaattgttttggcttatatagagaggtggtgacataccaaagtagtcatcgcttcctctatatcttgagtagggtcaatacacgttatgtgttaatgaattgggaagtaagcacataatggtttcgagttagagaatagtggtttacgggtcgtatgatttggtggatgtgtgaaaatacatgtgaatatgtttatataaatgttgtggtatatgttgtgtctcgaattttgataataataggctagccgacgagtatgttgtatagcggcctaggttgttgctcaggttaatcaacttgttagatgactttagttaagttcgtggtcacgatgaattgtgtgttgtagtccaattgcgcatggttatgatcactggtaaaaagtagtagtgctcgtgtgatgtctaatttaaaacacaaattgttgggtgattatcgtggagaatgcgttgttaattggttgtagtaattttagtgcactaaatgacttgaataaaattttcaagttgacttggtgttcctcattgattattttaactctaacaaatggtaaagtgttagattaattgcagtctctagaacgcggcaatttttgaagtaaatagaagctgaattttattaattgctgttttggg

SEQ ID NO: 88818 - DNA, 506 bp, Zea Mays
ggcaggtataataggagccctgggcttcggatattaaagggagcctgggtcagtaacagggttaggggagcatacaggaccagaggaactaaacgtgtgggtgttcgactggaccgtgacaaggaacatgcaagttggacgtcgtcgtgaagcgtgttatgggtaaaacgttggtcaaaacgacaagggcgtaatcatatggtagtgggaggaattataggtattagattcctcatgcagacgtggattcagttaatcgtgggcgtggaatttatggaccttgcatggagcataaaggcgaaagggatagataaaatatggaataagatgttaaaagatatggcataacacatatacgctataaatgttgtgtatatagtatataccatttggtataaaatgttgagtcaatatgcgtaaatagtgattgagggatatttggattctaggtgacttgctccattatcggtaacggttcgaaaaagaggaaatactctggaaagggg

SEQ ID NO: 88819 - DNA, 370 bp, Zea Mays
caatccgcctatggacaaaggcgtcagcctccacacaaagcaaggaaagaggcgcaagggcaaagcacatatggtcggctgatcaaagttgaccctacttttggtcagttgctctccaagagtgctcgcaagaagaccgttctacgtgatcggtcaacgaagaaaccccggtcaccttctaaaacgaaacggccaaacaaaatggctcgaaaggcgacacaacaagcatcgcctattcatcctatgggaccagggtactttccacatgtttactcatcgtcagtatattatcctgttcaaatatggaatggtacgacgatgaatccatggtacatgtatagtccctttgtctatccagactggggggcac

SEQ ID NO: 88820 - DNA, 794 bp, Zea Mays
ccgaagatgaagttgacttctccatcgacacgcgggaatgctctgcctcctcccccttcctgctactgaggttaccgaggttcttcgggtcctcctcgtggtgggggaggttgcagaggttggaagggtcggccattcccaacggagtgcttgaaatctctgcagttccgaagagtatgacgcatatccttgtagtacgagcactgggcgtcgaggatgtcatccaatgtttgttcgcctccgtggggtgcccctcgggcacgagagacgggtggtccagcggcatggacttcttcgcaaggcctcttctcccagcgcttgtcggtttgctggttcgtggcgcgccgtggtgcggatggagctagcttcgttcctccgatgaggtcctacgcacgttcatcggcgtgatgtagaggtccgcctccctgagcagttgttcggaagtggtcggcgctttttgtagtatggctcggacaaaggccgagtcattagatcctcggtagaagtcctcgatcactaatgcttttgcaacttcaggaatacgatttctcatggtctaaatttttttgaggtacgaccgaagagtctcatcccctcagcacctgatggatttgaggtcccatggctgtgccggcttatcggagagagattggaagttggtgataaaacaccgactgaagtcgctccaatcgtcgatgcagtgtcggggtaggtgtcatagccattgtagcgcatcttgcccgaggacgatgggcaagtacgcagtcatcacgtcttcagttgccccagcggcc

SEQ ID NO: 88821 - DNA, 737 bp, Zea Mays
caggaacggatgggaatgaatacaagggttcgagatctaattaaccatgcgtgtatgtcatggccagaaggttggccagacgatggagtgagctagctactgctggaatggcctcaagtgccttgccctatttatagtgagaagaagatccatcacaggactctctctctctctctcgtgaaccagcagctgtggagtgcgacaactatcacgcttgttgaggcatgggggagggaaacggggggagctgagatagtaggcctcactcgccggtgcttctactccaaattaaagccactatatccttgctttcagctgaagcgagcgcgaggccgaggcgccaccagttgctactgcccagtgcccactgctactactccccctccctcctcccctcccctgccgacgctagctagcaatagcatgcatgtgcactacggccaccatgggtacggtgtgtgtgctgatggtggccatgcatgcatatgcatgcagcttcttcatggctcctgccctaataaagcgcggtgtcactgctctgccactccacacgtcgtcctcgcctcgcctttcttttctttctccatccatgcatgtaccgtctcccgtatcaatagcaaggtgacacatgctagagacaagggcattcgcctccgccatgaatggctcgcctcggctccgtccatccatcgtgatcgtgaatgaatgcatgcagaagaaaaaagaaaacatcccgg

SEQ ID NO: 88822 - DNA, 745 bp, Zea Mays
gtctgagtgacagagtgagagactgagagccagccacgcgaagcaaagcgccacttgtccttcctgcgagcgaggtggtaaactttactctaaccaggtgacatacgtggcgcgggggcagccagtttcgttttcagcacggcaacagtacctttctaacgtctctgtctgggaagagaaagagtcagagagagagccgatcacgttatctccatttgccggccatcacagaattcgcgaaaagacgtgcgtcagaacgtgtaggagatgctctttcgttcgaggagagggggaagctgatctgataagcacggtagtagtactagcagacgtgcacggtaataataagctgaagacaactactccctccgtccggttgaattaggcgctctagcccaaacagtatgtccaatgaatttgtcgttttacctccgtcacgccgttcgcactgccgccgccgctgcgtcgttcctcatgcgccacatattctcgttcacaccctgattgcgcaccataaaggaagccaaatcccatttcgatctacatcagcagcaagccagcaaaggagcgattccagcgatctgcatcagcagccaaatcccatttcttgtctagcagcaaagtccgtctagaaagccaaatcccatttcttgtctaacagtaacgtccgtctagaaagctaaatcccattttcaaatcggcatcagtagaacctccgtctaggaagccaaatccccattcgtgg

SEQ ID NO: 88823 - DNA, 442 bp, Zea Mays
cgcgcgccctggtcaccaagtcactgacgcgtgtgtcccatttgtcagatcaatcttccaggatcgcaacaaatcctggcctccgccgcgcgaactccgcgcttgccgcggcaaatcaatcgcgatattgggcatgagctcatctttcctcgtgcctatatatcgtgaccgctcctttcccctctactaatccatccgtgagctttcctcgacctcggaccgtgagcgagaacgcaggaggaggccgccaccatgaagtagagagaggaagagagcaaatcacgttaccggttgattcgtgatgtcaagtccccggtgggcgacggggggatcaacaatattattcgcacgtggttgtggcctttccaagcggggagatccaccagtgattccccaattgctcgtcggagtactttcaacaccgtgatgtcgcgggtcgtcg

SEQ ID NO: 88824 - DNA, 800 bp, Zea Mays
ctcaaatacaccttccggtacagaaggcaatttgacgagccaaatgatgattggctagatgctatagaggcaacgagtgacgagctacttggaacctactcgagggaaaaagaggtatggcagttgccttcgtcactcgagggaaaaagaggttgaatagggttttcgatgttattggggttgtttaccctgattattgttttcctgtttgaaggcaagggggaaagagaaaagttgctgattcaaattattccagtgcggtgaaggcaaagaggggcaaggtcttaacacgtaggccgaagcctattgggaggtcgaagtgccaaagcttattgaaagtgcagaggctggcccattagtcacagaaacaactcctgcgatgctgatcgaagctagcgcaggcccgatcaaagagccagaatcagaaaaggtagcagaacaaccaaaggtgctgaccccaccagccgtaacagggctgtcgaagccatcgagcactacaacagcgactccaaggaaaagaagaatggctagcgttttagatgctgttttggaatctgtgaaagcaccagtttcttcttctgccaaagcatctggggaaacatctggagacacaaaagaagcaactatcgcaagtgcggctactgttctttctaaagacggaccttcagaagccgtgccaataggtctgttggaagaaagtgttcctgaaaaatctaaatctcccgctctcgaagcccctcctcatggtgacttggagtacattgttcgacacacttcgggaaagcaactgtcattagaac

SEQ ID NO: 88825 - DNA, 940 bp, Zea Mays
ctcgtccttctccgcgtcaacttcaattcccgccgatcgaatcgttgtggttagatcgagatgttttcctgtgatttctggccggtgggttacacaagggtaacgtcatggtcttgtactcttgttcgatcaaattggaatcgactcgagcatttacatgctcgcgtatcaagttggtttgcatttgcggggttattagtggtttttgtttctcagttttacccgtttctcgtgcgcggattctagcgcgcttgatgctcgagcagtggggttttggggtctcattggtctgtgctagtttctccttccaatggttctagttgggtcggttcggaacatgctcagtagcttctagtaactcaaattatgtgtcgtccctagttctccgctaaacactcgaacatgtatttggtattttggtagatatatttttcctgctacttgctttttcgaattcaaacgtcgccccggggaaggtcctctactaggttcccggtcgattcggtctaaaaccggtgcggaacttctcttttgtttgcagtctcatttctgcggttttgaacattggtagaatgctagaacatgaactgatagaagaaggtatgttggttttctagttttctggttgatttcggcgattctcaacattgatccagtaaatcgtctcaacttggttgttgggaagtaaggacctgttaatttgcttttagatctcaaatcagtctgcaatgcatatatacatgtctatcatttttttgcttgcactattctcatcgtttcattttttagcaattagtacttctgatgtctgcaaatttatttctccaggggcctctagaaaattattaatcaatttaatacccactcagtctgtgatgattaatttaggcatttagctctccatcgtgatagtttttgtggactgagcgttagaatacag

SEQ ID NO: 88826 - DNA, 337 bp, Zea Mays
gcaagatggaactatcacaagagcacgactgagggaggtagtttcttcttcataacttgacgtgcatgtgtgcagaccaatagtccgggttcatgggggcagaccccaccgggttatcatacacgtatgcgtcatttagttacaaaaaaggaaacagactcgaccccttagtattgctttatggatagaacttacagatatgtttggcatcggggtaaggtactcctctagtcgtagctagatggttgcccctgggtcggtgcactcccgttaccttgaagggtccttcccagctgggggagagttgcagagcacctcttggtatggcacttgccgc

SEQ ID NO: 88827 - DNA, 719 bp, Zea Mays
cgatgatcgtcgcgattcgtgcaccatggtcagaagataagcacgggcaggtaaaaatcttggcgcccggattgagttgggtctccttacgactaagcttgccgtactcccccccagctcatccgtcgatcggataaccttcaccgccgtcgatctgtcaccgttgcgcgccacatgcttaagctttagccgcatcgtgatgaaccatggggtgcatgtccggtgaccgccagagtgattgccacggtgaaagccacctgttccaagcacagagctccttttcccctccagctgccagcacaacttgcccaaattgatcaccaccgctcgagcatcctataaattgaagcctcagcacgttccgctaggtaattgtgtgtctagtaaaccaactatcatctccgatcgttgcccacaactccccaatttgggattacccccaaatcggtcgaagaacgacgcaagaacacctcgtcgtggccagcgcgatacaggttagctcgtcccctctgctctctcatttgagtgatctcacatacccgtgatgctcgtcgacccatccgattgaactagaccgccaccaatcgccgggaacgcgttcaactgtccacatggtatacggtcactgctgccagagcaaaccaagtagcctttggtgaaattgtgttgggggaaatgcgcgggcagggtccgattcggtgtctgccactcgggagcac

SEQ ID NO: 88828 - DNA, 286 bp, Zea Mays
gaagaatgcaccgatgcggagagccgctggtgcgcctcagcctccgaatgatacatgtgttgtcgagtcgaacactgggagagagaccaatgttgggaaaacatatgtccggttagtggtctaaattggtcctgcacgttagtgatctagtcgtagctatgttgtagttacgatctgaccgaatagctagacaactctctcaaatctcatggagcgaggtggggctccatgtgatggtgatgcgagatatgcgactacaagggagccatcactaaggcggtctcca

SEQ ID NO: 88829 - DNA, 485 bp, Zea Mays
gagacgagccacagggagggacaggacagagtgacaggcattgccgcccgccgcgctgcgtgccactgcacacacacgaactacactacacccaatgctgtgaagaagagtgaagaaagaagacgcgatgtgaacctgatgcatacacgtacacagggatgtccgctctgggcgtgatgcagcagatgattcttgactctgcacataggctgggccgtgggcaatataggaaagcccagcaaggctccaaagtccactttcatttcttgatttcgtacggtaaccatagcattcagttactgctccatgttgcgcaccgatttaaattgttcacagatgcatgggtttcatttacgtttcccaggcatatatgatgaaacaatctggttaatgggttccatcctatttgccaaggcacatcaccaaatgatttttgtcatatttaggtaattcatttctaaggcatagttaaggacctgtttggc

SEQ ID NO: 88830 - DNA, 552 bp, Zea Mays
tcttcatggcgtgtagggattcttcctaaatcttaaccctgattacattattgttgtttcctgagacggatatcatcgacaacatcatgtctttcatctatttgaaacatgaccgccacagatgttgggagttctggctaacttcaaatacatgctacagtttgacaagtttttcatgaagattcttattatgattttttctaggatatctctgaaccctaaaccctatatatagggccaaataggtcatcatgttattcaactgagctagattatctctgatatgtgggatgttttgagaaaacaacagtatgagtcgattgaccaaatgtttggactcaatgatattctgagttggtgttgcatcgatgatctgccatggaaattaatcattctaatgagtttcgagatgtatggctcatggatccgagacccacccatttgttcctacaaagagacccataggccaagttgtccaaaatctatcctagtgttgtaattgattcactctagtatgaagttggctagtctcttgccattggctctatttag

SEQ ID NO: 88831 - DNA, 486 bp, Zea Mays
aaattaccaacaaggaagaacaagaggaggaataagaaaaggttctgtgcctaatccggccgatgatcgtcgtcactactcactactacgtacttggtcatcatcctaatcaacgagactagggtgatggtaatctcgccattaggtcctgttcggcagggtctaggtttctaaaaaaggtctaatcctcattccttttccgtctacagttctacatgcatgatgcacatgtgtacagggagctagcatgcatgttgaggctcatggatcaagcagcgaggacagcgtagggttacgaggcagcagcgtactagcggtagtactattgtatgattgattggtaccttagcttattaattattaatatactaacctagattagtttttttttcccttcctttcagtcgtcactcgtgaggttcagattgcccaaaaattcctgacagacgctcatcgtaaggcacgccggccaattttcgttttagc

SEQ ID NO: 88832 - DNA, 964 bp, Zea Mays
agccaagcttcagttaccagcttcagttaccagccacagccaaatttggaaaaagaactgaaatcaagctgttttcaggtagaaaatgaagctgtccaaatcaagctgtttacaggcacaaaatgaagctgtccaatttcttcagcaattcaacactcgacagaatggactgaaaatagtagactgaaaacagaaatttgaatggacagaaatttgacacaagttaaagttaccgagtgccatattcagataaccttaatgaaaacagaatggacaacgttacaaaagctatcgagtgccattcaacactcgacggaatggacaacccaggttcacagtacttcagtaccaagttcagttaccttacacaagctaactattacacggataccttacacaagctgtcccttacacaaataacacatctagtgccgttaaacaacacccatattactctacttcatctgacgatccgaaagctcttcagaactgacatcatctagtgcccattccccaccacccatatgttcatcttcagcaaattggttgttgaaccactcagataatggtggcgatggaccagcttcgagatcttctaaacgttgtgcttcgtcctcaagtgactgagcaagctcatacacgcgccacattgcaaagttcactgacacctctttggccgtatctggcgaatccataatctcgtctccagccaaatctttcaactccttcccaactacacgcatctttgtaatggcttcggcgaggtcactacgaactgtttcaaatcgggtaatctgcgaaaccccaaaaattgctattggatttcaacatagtactgcatattattgaacttagttcaacccttaccgacactgaacgaggtgccgagcagtgattgacgccggctgtgagctctgttcgacagaaaacagttaacaattaaagccactcgcccccaccgttt

SEQ ID NO: 88833 - DNA, 732 bp, Zea Mays
cgggtacacacatgaatttggatggagcgggtgtgggagagtgggtcgacgtgagtgcactctcggaagtgttccgcggcggcgaggtgatgttctcgatgccttggcgcggtagttgtcaatcggttgagccgacgagcttcgttaacattcatgaatgctagaacatggcatagagaggtgtgaacggacctgggaacagctgatcactgcagggtgtctcacagcggcgtgagtggcccgatttgagaaaaatccagtgactgggggctacggtgcacgagagagactaactgagggtggtatgagtgcataacagagagacggagcgaaggtagtgctcaatttaaaggagccaactacgtgcttcgccagtttgagacgaaggcgatcacggaggcggtgagatattccactggacgagttcgtcgttgcacccgccggtacaacggctcaagggcagtgactccttgcttgccacagttatagctacgtggtgaaatggtcacggcgtggcgcaaccacaaaggacagttgccaccacggtgatggtcgccccagccacgtcgccgtgcaagtgggtacgacgaactgagcaataacaggacccgagctcatctctacgccaagatctttttacctctagcagttatccgcgcgccactgagcatgaatcacaacactggcatggatcgcggcgcgggttcatcgacagcgggtgcactgcacctg

SEQ ID NO: 88834 - DNA, 516 bp, Zea Mays
aacacagtggtttctacataaagtttcctaagacgcattggtttatcagattggacgacgggttctatttttcagaaccccgagggttcttatgtaaaagaggactccaaagcggtatcggccacgatgggccgttggatctaaaaggcgtgccccagattagaaccgcacacaaccgaaccggtatgcatccacgatcatcggatctgaatccaacgatgcgtattttaaatactagggatccgatcatggcagtttgtccccgatctaatggcccacgatcgcgcttgctgaatcgttacctgccgtctaatctccactatcggtaatcagatcaacggtgcccatgattcctccactctctccttctctccgatcaacccgaaatggcggcgccatggccgcggacagccgaaccgccaaattcgagcccaaaactccctcctattgccgtttacacgatgcgcggatgaatacgaagcccttggggaggtactcaccggggatagaggcgag

SEQ ID NO: 88835 - DNA, 507 bp, Zea Mays
caaaaactaagcttacgtggtcttcccactctcctaacatgttaaatctaagccgtctaaccatgattggtagaggaaacgctggatgctggtgaagggggcactccggagggagccgcgttcggaccggaagctggctctatttcctcgggatcctcctctcccttgctgcctgcctcattagggttcatgtcttggtggtgcatttctaggtgagtgttggcctccacaagctcttcatgcacatcgtggagctggatttctaggatatcgatggtgttatcccggatttccacctgctactccagagtcaggatgcgctggttcatttgttccacctgtagatctttttccaccaactccaaagacaagtcgactacgaagtcctctcgattgtcgagggtgatctttgtagcctgagcgagcccagtgaggtgtgtcatggtgtcgctttgcaaggcctacaggcggtacagtgcgctcatgcactggacggtgatcctccca

SEQ ID NO: 88836 - DNA, 562 bp, Zea Mays
cgggatatcatctgcaggtggctcggatagcatgtcttcaaggacgacttcctccagtacttgatcaaagtctgatattgaaagtcccttaagattgacaagagccgatagagctagagaaggaatatcactaccccctcgctacatctatagtgccggttgttcttgtggatcagtgggatttcttcttcttcttcctctttgtccttgtcaaatatgaaaatagcagcctgtgcatgatcacaacccttggcatcaacctcaggaagggcctctgccggtacatcatcaggagccgtggcagaagggccagccccctggtccaagcatgacagtcaccgaagctgcctcttcttcattttttcatcgacaggagtagtcggacgactcacttagcgtgcatgctttgggcaggcgccttcgggtttctgagtctccacttcttcaccaagttcttgcccagctgtgatagccattggctcggtgtgggttgagtcagatgattccccagctagcaagctaagcatagcatctatctccgcgtcatcagtgctggccagca

SEQ ID NO: 88837 - DNA, 939 bp, Zea Mays
gattttggtgtttaaaggtttatacattgtctttagtgttatatccgatcctatacttagagggatcctggctctgtcactggtatacgatgtcaagctaggtagcttttgaataagtcgtaggtcatgacatcgagtcacataattcaaaaccagttgtaattctactatcggtctaaatatgactttttttaggaaaaaaagagagttaaaataaaaaggctagttatactcctcttgcgtctgtaatgaaatacaaaggtcgaacaaaatccgtggcacgcctgccgcctactacgtagtacgtcacgacgctacaccatccaccacacacacaccgtcagactagtttgtaggggggaggcgtaattgcgttagtaggccatcgttttcccgaacggtgattattgttggctgcgctgctgaagaaaggtgcggtgcgtggagagtggagactgcagtgtcctgctcctgcgggcggttttagggggggggggggcgtttaggaaggaggcccaatctactgtctagtatagcaggctactaaactactaacctgcacgctatacaacggacggatgtgtggtcgctgttcagagaaggtatcgtcgtcaacagccgaattgataccgctgctagcacaccctgcactctgcactgtgcgtgtcctcccaagtcacgtactcacgtcacgtgacgcttgtgctgctcggagtgctggggaccctcgggtacgaatcacgtactatccgaaacccggtggagtttatgtatcccaggctcccccactagtactagtagtagatttgaatcctgtttggtttctgcaggatctgcccgtctgaaccagtagctgccaaattagtgaactcaattgctgagctgagtctgtgtctgagtgccgcgcccaacagtccagtccagtccagcccagcccag

SEQ ID NO: 88838 - DNA, 578 bp, Zea Mays
ccccgatagcttttgaaatctagctaggggtaaaacttcctgaggtgctctatattccatgaattccctatttctgtgccatccatttgagtaagccggtatgatcctggccaggtgacttctgctactacaaatggccctttctataatggtgataatttgtgtcgtccttcccccgttagaattcggcgaaggaccaagtctcccactgcgaaagatcgatgtcgaatagccttatcatgatagcgcctcaaggtttgctggtacctagctaactggattactgtattcaatcgctcttcttctagtacatcaatatcctccaacctggtagcttctgcctcagctacgttttcgaagaccaatcttggtgccccaaacctgaggtcggtaggtagcactgcttccgaaccatagaccatgaagaaaggggtattcccatgcagagctcgactaggttgagttcttaggctccaaaccacatacggcaactctctgatccactttcctgcgaacttttcattcttgtcgaaaactttcttcctgagtgcttccattatcattccattagccctttc

SEQ ID NO: 88839 - DNA, 337 bp, Zea Mays
cttcgtctgtgggtcgaccaggggattgaacggttccggtggcggagataatttagctacagtggaaaaaattaatcagtccgaagccacaaaaacaaatgccgaagctagatgtcgtgaaacaatacctatgcgtctctcgcgctctgcagcttgttttgcttgtactcgggcgtcatgaatgtctttctcacttttcttaggatttttcaaagcatctttccttggacgagcgaagttcttcaactgttttttctagatggtttttccaatattcactgatctctcggttagcttctgcgagacagcatttttctttggcttctgtcaactgttt

SEQ ID NO: 88840 - DNA, 563 bp, Zea Mays
caaatttacagttgagagctcgaaggtatcttcgaaggcggagcaaatcgacactttcctatttcaaaaagtaccccctatgtatggcactgttcctttatttataatcataagatacaactttgtatgaaatcacaaacatgcccatgaatcttacacataggatttgcaagtcccacagcgacatgatcgtctttcctccttttcttcccatgatgaacaagccttccgagccctcttcttcttctttgcttcttacattaaaaccttcgaagctgaagtcacctccttcgacacgtatcgtcacaacgcctatgcgtggatgaggctaagtagcttcttattatttgtaagctacttccgatgaaggatatcttagttggtcgttcacattgtacctgaaacacaccttttgagttttacaataaggggttttgaggatcttcgacaatagaggcccccaacagtagcccttgcaaaattagttcatttcttcataacgagcttagaccgcaaaaatgtgattgggaggcctcgtgccaaagatccgaaaaacaccttcc

SEQ ID NO: 88841 - DNA, 573 bp, Zea Mays
gcaagatcacataccaactgtgattgtggtgtggctattaccatataccaaagggaacaaggtccatgatgtttcagccaaaaattcaatattggagacgacgaagagcatccgagagagatagaaaccggagcaccacttgtgtgtaaaaggtcggaggctatccacagagttatctggctgagagtgaaaggaacgacgacatctaagagagatgaattgggcaatctattttttacactaatctatgacctctattttttgactaagctatgaagataactaagcattcatatgtacaactaaaattttgactaagtgttgttatttctacagcaaaaagaagttttgcaatctagattccagacctatctactagcctatgactaataagctaataagatgaagcacacggccaaagatcacaatataaatacagaagctttaatatgatagaaatataatttttaattgacgcgccgatatttttaccgatgtatcaataagcgtgaaagcttttttaatcctcgtaggagcccacgcaagagtagcccacacgggagctaagctccc

SEQ ID NO: 88842 - DNA, 619 bp, Zea Mays
attgaatcgcttgaacaatcccactctttgtttatctggctaatgactaccagagagtctccgtacaccatcagtctcttgatgcccaatgatatggcgatgttcaatccatggatcagagcttcatactcggctgcattgttggaggccagaaacagcaactggagggcatatttgaggtgctcgcctccaggtgcggcgaagagatttcccgctcctgctccctgcagattcagcgagccatcaaaatacatttgccatacttctgcagtctctgggttatctggtacttgctgttcagtccactctgatacgaaatcaaccaatgcttgagtttttatggcagtgcgaggtcgaaattcgatgtcatgagatcccagctcgcaagcccacttagctattcggccaatggcttccttgttgtgaagaatatcccctatcggaaaaccagtgactactatgactttgtggtcatcaaagtagtgacgtagcttgcgggcagttagaagtactgcatacaatagcttctgaacttgaggatactttttcttcgagggacccagaacttcactgatgaagtaaacaggatgttgcactaggtaggtatgtccttcttctg

SEQ ID NO: 88843 - DNA, 1100 bp, Zea Mays
cgcaagaggatggcgggtttatttcctagtttgtcgggggctcttatgcaaatgatgcggacaaaggggtacggatcgagattagccgtcagatctaaattccgcggccaggattagacttcattaaaaatgaaccggtacgccacggggaccaccggattaaagatcgtcggtccaaattaagaatgactatgatcaaaacctgatcgcttgatctcacatctactgcccaaattctatcgagcgaaggggtatgcggggttagatcggggtcgtccgtgtatgatccaagaacccaagcccttcatctttctccccccaatcctctctctctcaccacggcgcccgaccggcgacacaacgagaaggcacggcggggcgccattgctggaaggcacgcaccagcccacggttcccgattcgcacggttgatcgatgctacctgatgcataggacagagcgatcgaccagaaggtgcattcaccgaccactattccccgtaatccccgaccgcagcggagggcggctcggtggggagttcccaaatccagcggcgattattggctcccccatggagggagtttaacacgagaaggctcttcacatatagggtaattgggcgaattagtgagggccccaaccatacctagaatcaatctgacggaggcgatgtccaggcagtggtggaatcacacggcggcggatgagatccacgcggaatttcgcctagtcctcactgcaacgaacgctcctgcaccacacaaaacctccacccacgcaaattgaaccgtgaccgagagttccatggcccgaatcgaagtctcctcgccggtcgatggtggcggctcaaacttccttcgctggcaaatccgtggctccctaggtagtctcaacgaaaggcgagagggtcgcagcaggaggttttatacccatggtctgagtgccctgcagcccaccattagcgccggtctggtagggaggtcgttgcgctcgcccaggagttccgttgagctagctccgattgagaagggggaagaggaacaacggttctgggtcacgagcacgctgcccgcgtgtgtctgtggaacgggggcccaccc

SEQ ID NO: 88844 - DNA, 994 bp, Zea Mays
ctaagggtcacaccatttttcagtactaaaagtcttgataaacaaattaagagcaacaaataagaagacaaaacaatagaatggaatgcaaaaaagggatacctgaacatgattgaggccactttatcctgaatcaagtgaactggaatgaggctagcacaagttggcatgacccgcaggtaaaacaacatatccttggtgtcacttgtttagcgatctgatacttaaaatagcactgcttggggccaagtaagcattatcattcttggcatctgggacaagatcctcctcgccatctgaatcttcaatgctatcaaatgcacttacagtggggatagaggatttgggtgtagtaggtctaacaatatgtctaatggttttggtcgaacctcgagaaatgattggcctacatgaatgaaagataaaaaagagacatattagcaagatatctgctgccatcttatagccatgctaagcgctaaccatgttttcatgaaagatattccatgttctaaatcttgttttacggtttcctgtcaggagagggagggggcacaaaacatggcataaataccataatgaaatgcctacttcagaactgtgtcaatttttttgttgctgaaaaattcctatgtagccactggccaaggcttacatacatgatcaggataaactaactccacctaactcaaaacaaggaggggtgctcagtaaacattgaacaaatcaaattatggcgcacattttttgtaagcacttgatgctcgatttacgcataacgcatcgatcacattaccatgactatggggatggtgcgtagctaggaaccaaaacgtgagaaatcgaaacgaaagaaagcagcaaaaggagcggaggtgcactaccctctcgactgctgtggagcagcgtcaggtctggcaggatggacattggacagggtgcgacaatcttggtcagcgctggatggttgtattctccgttctccagttcgtca

SEQ ID NO: 88845 - DNA, 718 bp, Zea Mays
tttataggcacgagacacagcccaggtataagtacatttatgaccttaacatttattcgtaactataacataaatcattagggactagttagtcttttcctcttcggcttagtgccatgcttgaccttcgtcaccaccttaaaccaaagttgtcatccttcggttagaagcttcgatattcatcattatggttctcagatagtatcttcgtcttgagaaccttcggtagagaagaagacccccaacaaatcccttgtcttggttggggcttccttagactcatgttgttggatcttagcaaatagttgatgatgaatcatctcctcataatcatcacgatcccttatcattcttgctaaggtcttgtccttttccttgtaggctctcatgaaaagcctagtgaccttagagcactccaatcctcacttcctaagactcttatcttattgactaggatcatcaaccgatcaaagagagattggagggactcacccttaatccaatcatatctagcaagctcactctccaaagcttcaatcctatgtctcttcgctttaggacctccttcatgtgacattttgagaatgttccaaatatcacgagcatcctctctgccttggactttttggtactcttctgggcataagcttcctttgatgatgctaaccgcttgagaattgcaatgcacttcttacatcatttcaggtgtcctctcttc

SEQ ID NO: 88846 - DNA, 418 bp, Zea Mays
tatttgggatggtttattactagtatttctccttatttgtccctacttgattacaaatgatacaattatacctttggggatccaggcaatggtctaaaggtgagaatgtcgcttaacttcgaaggttgagtgattcttcaaaagatgcaagtgctcaatgtgtcctcatgcatgtcaatgtacctccatttatagtggcgatctgatgtacaacttcgtataaaattacattcatgcccatgagttacatgcacgaaatacaaaactagccgaggataaagttataatttcctctttgagacgcgtcacacatgcttctctatccttcctttgcctcccaggtttcgtgcttcggaccttgaccacctcttcatgtttttttcgaccaatggtgccgaaccaatcaccttcattctat

SEQ ID NO: 88847 - DNA, 452 bp, Zea Mays
taacaatcgtgttgccttgttcttgatttataacatttgagaacaagtaaccaacatcaacagtatgtgacatgaggctccatacaatccctgataaaaatctcgttgtgccagcagtagtagttgtactcttctttttctcgaacaggggaaccatttttggtatagaaaatttaggcttctttggctgtggagaaggtggatcccttgatggctatggagaaggtggatcccttgtttgtggcatagacactgagtcacgaagaggatgagtatggcatggagaaggtggtggagcccgtaattgcgatgcttgtggcagagacaatgagtcaagaagaggataaggagcagtagttgaagtttgaggaggtgatgacagtttatctataggatctgcaggtgatgactcttgcattaggggttgggcatgagacgatgatggtggtgga

SEQ ID NO: 88848 - DNA, 477 bp, Zea Mays
tatcatgtcatttagcgggaaccgaagccctgctctgaagaagctcttaaagacgataacttcgtcatccctcggctccggaattgtctcttccccagcaaatcgaacaagcttgctctcagagtccccaaaatagcccggttttttcatcatagtcatgtcatcttctgttacagtaaatttttcaaattcaagatgactaggctttgccgggtttagaatgttgtagtcctcttcgctctcattatcactctcaccctcaaccatagtttgtccagcttcaacattggaagcaccttcgtcagtaacttcccctggcacaactagacctgatcgcttcattacttctgatatggacactgtttcggtagctttgccctcgtctccctcacgagacaccccagcggtggatcaaactctggccatttgtgttaatgctttttctaagacaaagctaatcaccagtgacgaagcgtt

SEQ ID NO: 88849 - DNA, 512 bp, Zea Mays
ccttctctagtggtagattagattgaagaacacatttgtgtcaaatccatcacttgcgaaaacaggcatcaaatgctaccaaaatgattatattggttcatagttttgtcggcgtgatgtatcaaggttgtattacttactttcgatcttagactatccccaaaagatcatgtgttcaaccgcatatacacattttacgtgattgtggtcaactattcacgcttttagcagatcacgtattcgatcgtgcaaaatgagtgctcggctgctcggtcgtgtaaatctacaggtttctctcttctatgtggtcatgatacgcatccaaacgcgcatactgttggaagcgcctaaattttttcgcgctcgcatgcacctagtcctcacttttttatgcgcatgcacatccactgtttgttggagatagccttagcctgtgtctgtcaaagctattgctgccatattactctcagcgtatgttcttcgctaagtttttacatggtgattaccctcct

SEQ ID NO: 88850 - DNA, 316 bp, Zea Mays
gtgatattgatttcctctgtggagttttttgggttttgagtttgtggtggttggggtggactcgaagggaagacccctggaacatcaatattggagacgatgcaatagagatgcttgctggtgttgaaatataagatgctcgagtgggggagtgaggttttcaggctcgatgggttcatcaatattggaggcaatgccagtaagctgtggcagtgtagtgtcgggtcaggtggtggtactgaacggtgtccagggaagaaagaagctagggttatgtgtgagagaaattggactgttatatctgcttgatgtccgg

SEQ ID NO: 88851 - DNA, 605 bp, Zea Mays
tgtgaatccgagtcaacgatctgcatgccgagcgaaccggtgtcgtacacgacagcaggtagttaagactaaagagtgtgcgtagatatttgatgatctccaccggaacgaggcaggggaagggaaacgttgttacttcgattgactagaataggtttggattaccgtgcctcatgacaggtcaccatgccacactgcaatttaatttgcttgacaggcgcattttatatagtgacgggttagtgaactgaatgccatcagtgataataacgaaatcgctgtgaaattcatcgtgcggacactgttttcccagagttgtagcgcagtttaaaaggttttcttttttaaaaaaaggaaatccgttttttgacctttcaatctggaaacaaggtatatataggacgagaaaagacggcaacgtacatgataatttaagttagacgaaaaaaaacgctgatttaatgtacaagaggtcaatccacgaaaaaataataacagtcaaagccacggacccgtcttttgatgtcatgaaaagaaaagaaaaaggcactagcagtgaccatatatagtagcctcacccgccgctactatattatcactccgac

SEQ ID NO: 88852 - DNA, 581 bp, Zea Mays
cgcagtaaggatccttgtagcctatctttcagcccatccgtatagtagttttagctcttcgcaattaatatatggcctacttgttctttcacaatatttcttagtttgtttctcttctctctcgacttgcagccttttattatatttgctctaagaaatttgaggaatactggtgtgaggaaccggagggcaggaggacaagaaggcagtggtggcgccccaacctgccaaccggaggaagaggcattgaccggagcaatagctgtccggaaaactgttggtggacgatctcgtcggatgaatcgacgggaagacccatgctgtcgtcgtttggccaggacacggcagcaaggatgccatggcagcgcaacaagaggtgcgatttggagatgcacccattccgctagctagatgattctcatttcggcattggaacggttcaacagtcgtgtggcaagtggacgtccatggccgtcctcgtccacctgcgacctgtccatcttgagatttcaacgattcaacaacagtcccgtcccaatttgtttccggagactgttgaccgcgtctgcactacttttttc

SEQ ID NO: 88853 - DNA, 804 bp, Zea Mays
cactaatctattgaaaaaagatactgtgtttgtatggactccaacagaaaatcaggcatttgtgactctgaaaacagccctgattcaagctccggtattagctatcccaaacttccgcaaataatttatcattgaaacagatgccagcgggggaggaattggtgcagttctacaacaggaaggacaccctattgcatttatcagccgagctttagggccaaagaatctgggattgtccatttatgagaaggaatgcatggctattctctttgcaatggaacaatggcgctcttatttgcaacatggtgaattcataattaaaactgatcaccagagtttaacccatttggatgaccaaagattgtctactccatggcaacaaaaggcattaaccaaattgcttggtctgcagtttcggatcacatacaaacagggcagcgaaaaccgcgtagcagacgcgctgtcgcgccgtcctaacttggggcaggatgattttaagctgcaactgaatgctacttcggtgtcatcagttattccgagttggctgagtcaagtagctcaaggttatgaccaagatccgagtgccaaaaagctactgagttgtttgcttacgggtgaaacaatggaacactacactctgtcccagggcatcattcggtttaagggaagaatatggataggagcaaacaaggccatacaacaaatgattatgtcggaactacatgaaagtgccattggtggccactctggatttccagtcacataccgtagaattaaatctaattttgcatggccaggcatgaa

SEQ ID NO: 88854 - DNA, 850 bp, Zea Mays
gcaaaaatttcaaacaagttgtattgttatggtattttgcaaataaaaccctagtgtagggtacttaaccttaaataggattctgaagggtaaacaagagccaaatagagaaaaccctaaagtttaagtgaaatagtcataaaatattcttaagaatggacctacattacattcacacccatgagatatcaaaaatcctaattggaaccctggaaaaccctaaacctaaacccagggggttaagtgcaaaattagtgcacttttagactaaagtgtaaaaactatgatgttaaggcatataaagtcatttggttcacaatcatgaagatttacaagctaaaccctgaattttggacttatttgcaaaaagaccccatgggtgttctagtgctaagtctcaaaatcagtgatattgactccactttggagctctatatcttccaaaattttgagaatttaccctaggtcaccacatcaattttgtagctctatgaaaggagaacaactttgcataagagtgtaagcatggttgttatgaagaaattggagaaaattacacccaaagatgggttgtcaggctgttgaagtctgaatttcagactgatagtggcctagaaccaagtttgagagccatttcgaccatgatccagtgagaatctatctagggatgctataacaaagatgaagatggtttgtagggctacaactttgctgcagagcattggttatgttgccatatgaatttgggagaaaatcgagctcaaagatggtctgtcaggtcaactaaatacactccgtgatggtacagtgtctggattaggccgccagctcagaatctcgccgccggcgg

SEQ ID NO: 88855 - DNA, 334 bp, Zea Mays
cgcttgcacatcaagccacaaaagcacataagttcttttcataagaaccataagagaaagagagcatctcatttcctccaaattgaagaggtgaattcccatatcatgcaaaaatgatcttgatatctaatgaacattgaggataattaaggccagtaggcgagttcatcaaactctattaaataattatcatccaaatggattaaccattttctgatgttgtaatatgccgcaaaatatatcatatctttatatgttggagaactctaggtatcacataaagtgtaccaaaagatttttgaaaattggtgtacacaacgtagataatctccat

SEQ ID NO: 88856 - DNA, 317 bp, Zea Mays
gaagatttcaccgatctctaatgttattcgatctcgagaaaggctagaattggagcctgttaaaacttttgtctcgtgaagcaaatgcaaactcgaaagtcaatctcgtctcgcaaaatcccgtctaaagctcatttaatcaaactctcgacagttgttatgttatccgatcggtgttcgaacctgctttctctattttcaatccatgtccaaaaatttaatccaaattcgtactctcaagcggaatactcagtatgtcgtcctctaattaattcttgctcgactcagcctagtatcttatgtctgaaccgaattca

SEQ ID NO: 88857 - DNA, 283 bp, Zea Mays
cgagatttgaaaccacttgataaccgtggcgcggatggatgagtggcgtcattagtggcattagcctgccctttggcgcggatcctgtcttcctcaatcctgcgcccacgccggattagagtgacaaatccgtctactcgtactatagtctctctctctgtgtctctgccgctagctgcaggccggccgggcggcgaggagtgtattccaagacacaatgattgtgtcgcgcggggaggcgtggattcgtaaagtggacgacgggtgctggttctcgctcgct

SEQ ID NO: 88858 - DNA, 449 bp, Zea Mays
cttttttcaccccataccttataggacaagtggctccaactttacaaatttatgcccacacactacaacttcatctgaagcaatctttatatagagttagagctatttgggagatgtgtttggctagtaaggtatcttcagcaagtatttgtttatttgcccttatcaaacgtgggtttcggcagaatgccctcatacatacggatttggttcatatgcccttctcaaacggtgtctaccagttaaaataccctttcatctattcatcagtctaacaacgtctaaagttccaaatctaccctcaccatatccccgcgcttcttcttcttctccatgtcgacgtctccgtgcacacctagaggtatatggaagggagccaaccaggaaaccatgaatgtctgccaggtgatggcctcaccctctctggctccctctactcactctctcgc

SEQ ID NO: 88859 - DNA, 496 bp, Zea Mays
acggtcaaaatgggttggtgtgccttgcaaccgttggggttgtagaggtcgatccgctgctcctcggcaaagccgtgctgcgcttcttgcggcgatgacaactcgactagggcctcgaacgtaaacctttgctcgctaccggcactcactttcgtgttctgttggtgttctccagggtcaccgccgacggtagccgaggagaagccggcttgggagcggtcgcaacgagagagagtagcagcgtatctacgtaccacacactccccttttacacgttcgcgactgatgcctggtggtcgaatatacagtgcgcccgcgtcacccaaaatacgcgttcgggaccttttacggtacccactggacacaacgacacaaccctaggtcatgtctggaagtagagtatgtttatagtgtcaggcaataccatgatttttagtaaaaccatagtattttacactataagatgcttggttacattcttgaaaactatattttt

SEQ ID NO: 88860 - DNA, 473 bp, Zea Mays
cgatgcccatcatcaagggcaaagaagacaatggcaaggagacgaacattcctaatctagtcttctaggtgtggtcaacaatagatcaataggttgtagctcttactttcatctatgaccaaagatgatctctcttaggtcatgatatgtcgaactactgctaaacatgtaaggttgtagaaggaaactacacaacatcaataagggcacactccatcaattcaaggattgcactttttattaccaaaaaggagacatctccatcactcaatacattagcaagatgtaatccttgtgtgacgagctagcatccaccagcaagctaatcgacgatgacgaattgatctccaacatccccatcgacctcgactacaagtgcaacctagtcgtcaccatacttgcaaaggatcatctcaccatcaacgaggtgtattcacaactagtcagctttgagaaatgcatggaacccccac

SEQ ID NO: 88861 - DNA, 698 bp, Zea Mays
ccggaattataggtgcgcacaaccaaagtcattcctaaaagactctccgtgtagaagtcgcctatgggcgcggctgtatcaacgaaggcgcgcaaccttatcatacaaattatggttacatacacagcgagggcatcacatattacattggctcaaccttcagaatgatacccatctccctgtagttgaacagcattatcctcaattcctcaccctcaaaaagatttcgcagctccccttcacccacactagccccagccggcgaggacaacaattcccgtttaccagtcccgtccacgcgaagacgaccactctccatctcaccacaatgacgcctgccacttcgcgacaattcactcactctccgtttcgccaccacccttcgctgcctacacctagtactcacacccagaagatactcagcacccacctcacgcggcgaagtctccgccgcagccatgtctaatgctgcaaaataatccaagtcctcatctgaagactcctctgtccacgcaatcgaactcccagaatcatcagactcaaaacacttagacacagagccaaacgagtcgtcatcagcagccacggtcgaagccgccacaaaaatagcattgtcagtagcggttgcgtgcgtaggcccaaaccccagaacctgcgcagcaatcgaggttcagtatcacacagacaaaatttacaaa

SEQ ID NO: 88862 - DNA, 490 bp, Zea Mays
gagttccccactgatttaatagttatgggtaaccaggatacaactatagatgtcatcctagggatgaattggttaaccaagtaccaagccagtcttagctgtgacaagagaacagtgaagttagtgtccctataaggagaagaagtgttagtggagttggtcttgtctggaccaagaaaaggaagttgtcaccaagtcaccgcccatattgaggagattaaaccatcggaggctatcaatgtagtgtcagaattcctagatgtgtttctcgaggagttaccgggtatgccaccagaaaggaaggttgaattcgccatagagcttattccaggcaccacccctatttccaggagagcctatcgagtgttcggaccagagttggtggaactcaagaagcagattgatgagttgttagagaaaggctacatcagatcgagtacctcgccttgggcagccccagtgctgtttgtggaaaataaggattgaacaa

SEQ ID NO: 88863 - DNA, 747 bp, Zea Mays
gttaagaacccctagttactattccctctctctccgacattcacagaaaaacccttacacttctaatttttcaccgcgccaggacccaggacgtcgcacggcgggagctttgacaccggcgaggttagactggcaggatggcgcaaagactggtgctcccgaagcggcagacactggattgaactcctcccgcgcatttcccctcaatcaattttactaacggggctttgaatcaaccagttcatggcaacagtgcggatggtcgaatggatcaaatgtgttccggataaccgaaaacatagctgactaaattgaagcttgggtaagcttcaccggttcaccagagtttacgtacacgctagaatttgggctgggcaagagtggaaaagcgggtcgacagagagggcgtcgtggcggtattctatggagcagaggggtgttccagtgatgagactctggtaaactccaattggccggctccgagagcaacagggggctaaaaacaagcaagaacttgaatcaattgggtatgcactaactcgaggagtgctggccacggaagagttcttcacggcggcggaagaaactagtttagggggattccgttgatcacaaaggatggggggacagaacgtgatggctagtggctggttggattcgcaactgaggaatgaagagttgggcttggttgatttgagacaaacgaagtgagagcagggtggatttataggctccgtgagcatcgcg

SEQ ID NO: 88864 - DNA, 673 bp, Zea Mays
aagagatctacatatctctacaaatttatgcatgcgagatggagacttcttaaggtacttgactgttaaccttaagttttctatcaaagaagctaatgcagttattccatcattgacaaccaaattgatgatatgtgcacaacaacggacatgaaagtattttgcaatgaaagcattcccctgtctagctacaaatctagccctcaaaccccgtatagcactatcattgtttgcagcattatctagagtgaaggaaacaatcttatcttctattttccatgcagtaacacattcataagcagcctgtcctatcacatatcctttgtgtggagggtctaactcaaaaaagttcagcacacgatattgcattttccaatctttatcaatgtaatgtgcaaccaaacacatataggacaatgtttgattagatgtccacaaatcagtggttaaggaaatgaaatccacacctttaaggacctttgctaatgattccttttcagactcataaatctttaaacattcagctcttatggtcttcctaccaacaaattcatacaatagattcatatacttcatgagaatattaaactatgtgtgctcaaccattctaaatgggtactcatgaactatgatcattttggtaattagtttttttactcgctcatgattataa

SEQ ID NO: 88865 - DNA, 341 bp, Zea Mays
atgaccagatcgccgggatggatgtctccggggaggccctcgccgtggtccgggtatggcatcgttggggctcctggtcgtgaaaggagatgagcgagggggtcgcgcctgaccattggatctggggccagcggtcccgattaaaccatcccatagcccttcacaggttagatcctgatcgtagatcgagtagggggcggtcaagtttagatcgtgaaaacattaagcctcgaccgttcgatgctagttgaatgcttgggatcgcgccgtgtatacccctacgcgcttccaatcccgaccgtggatctcggatccaacggctgtgggcctataccggttcg

SEQ ID NO: 88866 - DNA, 447 bp, Zea Mays
atgtatcatcttttctcgtcacgtggtgccccttgagccgtccacgcggtggggccgggtgctgttcaccgtgcggctagagatcgttgtatgggcaccgcgtcttcatactgtagtaaggggtacccctgatttagggtaccgacagtggcccccgggcccgcctcaggggaggacacgagcctacaggtggggccaaagtttggctggcgattgattcgctgtttttgcgcgcccgttggtgtaactgctgccggtccgcccttagtcaccccgactgctacacctgcccccacggctgactgacccttgacctccgtacttaatggctttgttgcgccatgtgcgtggtggctcgagtcgctgcattggttttgaaaatttaacttctccgtcttctgcggcggccccgaggaggcgtggtactggcgcgagtggcggtgcgac

SEQ ID NO: 88867 - DNA, 732 bp, Zea Mays
gtttgaataaaagagtttggacgatatctgcaggacaatattgactttcgaatttgcatttgtttcaagaaataaaattttaatagtctccaaatttggcatttctcaagatcgaataactctgaattcagtaaaattttcatgaacaatcttgataaacggggatagaagcgatcgagaaaccattatcttccctaacgatctgagcttaggaccagtctcacatcataacacgaaataaacacctagggtgtcacagcttgcctgtgccatgtgtggcccatcaccatcccttgtgacatgcgtgacctcgctgcttctaccttcaccgtgccgtcgcttgggccagacgtgacctcgtccccctctgctacaccagcacatgcctcggctccttctcgcgaggagccaccagtgcacccccccattgctctccactagaaccccgggcatgtccaccctatggttacctagcgggccgctggtgtcctccggtctgtcgatcgcttggtcctctcgacgtcatcttctctggcgctctcccttgagtcgacctctatctgtagtgtgctcgccaaccccaactagcactctatggagtatgagtctttacagacgaaccacacctgggacttggtaccacacccctcttgagccaatgtggtcaccgagaaaaggatatcaagcacaagctaaaggaaggtggctccttggatcgatacaaggctcgct

SEQ ID NO: 88868 - DNA, 537 bp, Zea Mays
ggaatagttgttgcagtgcgagacttctcgctcttgccttttttcacccacatctatgtaccaaaactgatcagaagaagaacatgtgtcttgaacctaggagtttaggcacatgatcaaccagtcggtgattgcaagggatgtctgctggtggttttagcataaatattggttctgtaataatacttttgttcatgtttagtgaagtattgtgcttttgatatagtctactgtatgacgaagctatacgtatgattttgatcatgtcacatgtatagtgagcattcagttttgtgcttaaaaccatgtgtgacatcattcctcgtgaagttgttgagtttttcatgcatagcattaatccaattaacatccattaatgtttgttccactcttgttggtttgatgggtgaaacaaatgagtagttctcacaaaatgatgctatccttgctttcatttgcacaccacccctaaaatctccaagaatttccagtggatgatctcttgcaatactttatcttgagtacttaagctcagtt

SEQ ID NO: 88869 - DNA, 549 bp, Zea Mays
cggaggcggcgagatcgtgatccaacttctagtccaagagagttgcacagggtttatgtaattgagttcgatacgtagacacagtcatctagtcaaaaggctgacgagcaaggcagaggcctatgtttttgagtgtgggggcccatttctttgggggggcggtgccgttgcacccccagcaccccctaggtccggccttgcctgcactcgtgcccccaacacaaaagggtcattgccggcatgcccacccagccttagccccttaccgtcgacgctcgccttgcactgtgtccgcaccacgccgtgcacactatcgtcatttgctgcatgccagaaccacacatgtccatttaccccctagacatcgctcatccaccccctacgtatgcgcgttcgctatctccccgccccgctgttgctcgcgtcacgtcatcacgtgtgtcatcatgcatcattcacgcttgtcacacgtgttattcgcacattgttctcgtgttttcgcgcgcactattttcgtacgtcgcgtgccttgccgcacgtcgttaaccc

SEQ ID NO: 88870 - DNA, 393 bp, Zea Mays
cagcaacaaaatatcacagtgagtatagggcacataacaatttgacagaacaaagtccaaaaagttataacttaccaccgggaaaggttctaggcagagtaagagtgaggagcgccgtcattcacaatgacacctctcaacatcaattcaacttgcttcaaaacattctccttagatatatgtttatctattactcgggaagggtctttcatcccagtatacagataggcagggtagattctatccttcaaaggttgaatgttcttgaatacaaagtcaataaccatagcctcagcagtctaaccttgactagcagaatcttggcttcaacaacctctgagtcagttggggcctctatccaacttgacaaccgaacatcaggctatctcccag

SEQ ID NO: 88871 - DNA, 477 bp, Zea Mays
ctttgtttatctggctaatgactaccagagagtctccgtataccatcagtctcttgatgcccaatgatatggcgatgttcaatccatggatcagagcttcatactcggctgcattgttggaggccggaaacaacaactggagggcatatttgaggtgctcgcctccaggtgcggcaaagagaattcccgctcctgctccctgcagcttcagcgagccatcaaaatacattcgccatacttctgcagtctctgggttatctggtacttgctgttcagtccactctgatacgaaatcaaccagtgcttgagttttgatggcagtgcgaggtcagaactcgatgtcatgagatcccagctcacaagcccacttggctattcggccgacggcttccttgttgtgaagaatattccctatcggaaaaccagtgactactatgactttgtggtcatcaaagtagtgacgtagcttgcgggcag

SEQ ID NO: 88872 - DNA, 484 bp, Zea Mays
ggtgaggagataatcgcggcggagtaaagatcttggcaccggataggcttggacccggtcactggtgggttcactgtacccacttgacctgcgggcggccgagatggtcctcgctggcgttgtctgcttaccgactgtgcgccacgtgcctagtagctataacacgtcgcaatgaaccatagcagtaagtccgtccatcgccggaggccttgccacggtgaaagccacgatcacctgcgccagtacctttccccactctccggcctccagcgcaacttctcaaaattagccgacatcgctctcagacactataaattgagggtgtcgctagctccgttaggttgtcacgaagccagtgcacccgcccctgcctccaattagccaccaaagcgccctaatttctttcttcccccaattcggttcttcgtgccaccgtgagccaccgcttcatggaccgccgtctctaggtccattcacatcttcc

SEQ ID NO: 88873 - DNA, 631 bp, Zea Mays
agaatgtcctcgacgatggatggacaactttaggggctgtttggaactggttttaagtctaaaaccaccgtaaattacggatctgtaaaattttacaatcctagatccaagttgtctgctttgatggacggtaacatgtgtggtttgacaacagtattatgtcttccgaaccggaaaataaaaattttgcccgtcggccactcaatcagtgtgtactgcaggtagggacagatggaccacaggcatccaaatctaatagggagaagacgagagatgggatgtaagctatagccatcggatggtgtatacggtcagatttatagagtagaacttaagaatttgaaatacaagaaactgctagagatagccagatcgtgtatatggtcagatttatagtcagatttatatagtagaacttaagaaattgaaatagaagataggatagaagcttatgttatatgcagtacaactaaattgtatatatacacactgattcaaagtatttgtggccggtctaagttaatcggtccaagatataattgaaccgaaggtttaaccggtccagtgaataaaaaaatatcatttccatgtccggttggattctaataactacgcatgaccctcgtgccgt

SEQ ID NO: 88874 - DNA, 409 bp, Zea Mays
attccattacagattagtgcatagagcatgcttcgtcgtcacggtcaatcgtcgatagacttaacagctacaatacacgtctccgtcctgaaatagattcgttaactttgggccctttatagtccgaaaaacataggctataccataaacccatgtcaactatgttctctagacgcactgggtggtaagcctttaataagcgaatccgcaatcacttgcctgttacttatatgttcaatacttttaataggtttctggactttctcctttacaacgtataactttgtgtcaatgtgtttggcagcacacttgacccgttgccattggagtgaactatttgaatggttattgctgttgtcaacctttatcaactccaggtacaatttcatttaaccactttgcctgtccc

SEQ ID NO: 88875 - DNA, 424 bp, Zea Mays
cgtggtttttatagctgatggacggtgtggagggaggtgctttcgtgcttggcggcatgcacgggtaatcggcaacgcatgtgtgctttgagcgttgcctggttgtcatgggatacaggacaacaaccatcgtcatgtggagatcgatcgagatagaggatcggagcaagttgacaaatcatgtcaaaatcactcaacgaggtagcatgttgtataaacagatcaatgcagaaatacattagtgctagctggaattgttccgatcagctggcgctattattattttatcgaaactgatgcgtgtgcgtgctcgcgttattttgtgttctgcgaataccaattatttcagttgcataaatatgtttgttaggaagccatggcgaaggtagaataatattgatggtgcattttttcttcttccggg

SEQ ID NO: 88876 - DNA, 538 bp, Zea Mays
gtgaccactatgccctactaatggagcaatcgacttaagtcggcaacgacttaaggcggtgcaacatgctcacgcttacttaactcggggtgaccactatgccctactaatggagcaatcgacttaagtcggcaacgacttaaggcggtgcaacatgctcacgcttacttaactcggggtgaccactatgccctactaacggagcaatcgacttaagtcggcaacgacttaaggcgatgcaacatgctcacgcttacttaactcagggtgaccactatgccctactaacggagcaatcgacttgagtcggcaacgacttaaggcgatgcaacatgctcacgcttacttaactcggggtgaccactatgcccaactaatggagcaatcggctaaagtcagcggcgacttaagccggtgcaacatgctcatgtctatgcaattcaggggatgacttctataccccgcaaacaaatttcataatcatcgtgcgtcatttcattactgcagatttacgaaccgataaattccgatacaataa

SEQ ID NO: 88877 - DNA, 803 bp, Zea Mays
tgaccactagtttgtggataccaaggacaaggaaagcgcgacaaagattttgtatagcctgtcgatctcatcaatgacacaaaaggtactaattgcttatgagcatccctagaatccgtgagaaatttggctcggccttttaggtactagtagtactagtttacacgcttgcattcccgaacatgaaaaaggaacgacgagcgtcaggaaagcacaaagccaacacacacagttacagaagtctaggctgactaccgagagagagctagcaactaggacatgccaaaatgtacatgtcaacctacagggctaaatactattggacaaaacactttggatttctagcatctaatgccggctaagctagtatcgacacggacacaagaatcagtttttgattccacctatattgatgttggtcatcggttcatcatatttatatatatgtaccattatataattcaccagcttaaactttacaaaatccaccccaccaaatcaccatcacacgtataacctactctaaatccaccaaacaaattgcacccagacttaaaacactatcaaaaccaacggttcatatcactggataatcccatctcccttacttaaatctaatggataatattatttggatcatttttcatccatcatctctcctccctcgtgaccccactgccccaacctccccctccaacctcgacactccctccccctcactcgcatggccgccaccatcaaccccacccaagatcgtagcgttaacatgggttatgtgctaataaaaccaaaacaggacaacg

SEQ ID NO: 88878 - DNA, 406 bp, Zea Mays
ctagaagcacatgttgcttggtgaatatttgtcttctaattcctcctgcataatcgccgacatggagccatttccctatcaagctggaaccattctctctaacatcatggaagtgacaaccactaagccctacacccacaatagtaagtgtagatgtgatcacaccaagaggtttctgtaatctcataagaacattcagatgatgaggacgaagctgacatctccaatggcaataacaacatggttagggagatatacactaagaaggctagtcggtaacacaagaacaagcaacgtgcctagtgacatatttgtgctcaactatgccatgaggtgtgtgatcaaaacaaagctaagcgacaatgcctcaattagaatagatagttggatcttcgccatcattgat

SEQ ID NO: 88879 - DNA, 818 bp, Zea Mays
tcttagcatatatgttgagcaccaaaattgacacccggacggtacgactctaggcccagatgattcacggtccggacggtccgccgttgtagcacggacggtccacgcgtgaagagaatcagttagtgtcccgctctaggcccggatgatccgcggtccggacggtccgctgttgcggtgcggacggtccacacatgaagagaatcagttagagttcctaatttcttgtgagatttgttagcaaactccgcgggatttgtttggtaaccaacttgtaatggatccagacctctaccttgtataaacgaaggggcacgaccgattgacgcccccacaaccgatccaatcaaatctatttatcaaatctaccttatttacattgttcttttcattcattaggagtaggagtaatctacctttagtttagccctagtattagtcttcctcgacctcttacttcacctctaggtgactctatgctacctagggatgttccgggtggcctaccgatcccggagcaccctagaactctcctccctgatggggtccctctcgaggacgagttatagggttcttcgcgaagaagaagaccctctgcacacgtgtggactgtctggctcagatcatggaattttcggcacgtaagcagagaagacctgctcctattagcatactctttagatagactaagactaaaaatgaactgcaaatttaaccctatgcatccaaagaaagcttatagactaatagaagtcaagtaaaatctagagataaacttagtttaatagcatacactaccagaatctggctctttgccg

SEQ ID NO: 88880 - DNA, 404 bp, Zea Mays
aaaaaaacctagagttgctaaggatagtttggtcctttgtaatatcttggagaggtaaaaaatgattaaattaattaaaaaagcttgaaatcttctatctatcctaagaaatcaaggatggaatcaaatctaggtcatttatgcggaagcaaggaatgggagcccgtttcgtcgaagctgtatggaaaggagtcctaaataatcaattttctcccagtagctacgctagatatcaaggtgaccaagcttaaaacatttgttttttgaagtgaatatgtatattgcaatttgctatttgtcatttgaactgcattattaagtcttaatcacattttcaaagacatcaagtaaaaggagcctgactagcagtttacttgtggggtcctatgagaagtcaacttact

SEQ ID NO: 88881 - DNA, 598 bp, Zea Mays
tgagtttgtaaattttgtctgtgtgatgctgaaccttggttgctgcgcaggttctggggtttgggcctgcgcacgcaaccactactgacaatgttatttttgtggcggcttcgaccgtggctgctgatgacgattcatttgtctctgtgtctaagtgttttgagtctgatgattctgggagttcgattgcatggacggaggagtcttcggatgaggacttggattattttgcggcgttggatgtggctgcagcggagacttcgccgcgtgtggtgggtgctgaggatctttcgggtgcgagtactgggtgtaggtggcgaagggcggtggcgaaacagagagtgagtggattgtcgcgaagcggtgggcgtcatcgtggtgagattgagagtgggcgtcttcgcgtggacgggactggtaagcgagaattgttgtcctcaccgattggggtgagtgtaggtgaggggagctgcaaaatctttttgagggtgaggaactgaggataatattgttcaactactgggagatgggtatcatcttgaaggttgagccaatgtaatatgtgatgccctcgctgtgtatatgtaaccataatttg

SEQ ID NO: 88882 - DNA, 1791 bp, Zea Mays
ccgcagcccgcagcccacaagcgcagggtgccatgtctgaaccatgcgtccacgcctgtcaccatgatcagccgatcactgctagtgctagcagactagcatcacaccgcgacccaccggcgtgttttagctttcaaggctactctccgtcatagtagcaccatcctcttccggagggaagtcgagcccgccacctgcttgtgcaaatgcgcaagacgacggccgtaacggcagcgccactcgtcatgcaccagattactctgggaaccacagtggataacgggggaccgaggacaagattgacattaggggaaccgaattccagcactcagacgcacttctgctttactcgtagtttgaagctaggcaattcgtcaagagccaggtacatgcagctccttgctgacgaggggcgcgcaggagcagcaattttcgcatgtgcagatatgttccaatgagaccatctcatggaaccacaggttgacttctccgtagtctttcgtcctggatgcatgtatcttttcattcttttcgtacctatgaatgaccttctatgaccacgttgtattcttttgtgaccttaccagaagaaagaaaagaccggcgatcttctctctctcaagtggatggcacagaactagcacacggttacatgctgagctatgccccatggatcacttccgtcgtaaaggtcagaactatcaactgccagttcgtcttgtagatgtgtcactaattaggcatttagatagtagatgatgcttcagacagatagcgtcgcacttgggcaattgagctatccgtaggcatagctgggactcatagccatagggttgtctcgaatggtgtaaaggtatgaatctgattgactattactgattaggctttgctctcacacagttttagtactagaagctgtactccgctttgcctaattacagagaacacgtgtcagaaaccattggagtactaggagcggcagactctgctttatctattcccttgcacatacctaaactttattttaaacaaatatgcccgagattgtgcctatttctgttaaaattatcttagaaactagtgcataaactattagtatctttaatcgtgctgctgttcatgggaatgtggtgaaactctgaatagaaatactgcatgtgatctgcttaacaaccggtatatctgccaaggtggaatagtgccagaacccagaagtatgctaactaagcatgtttttttaatgagaaacatcagaggacaaattggacaccacaaaaatcacactagatttggtgaaaagggaaggcatgatgtacctataagcaggcatgatgtagctataaaccagttaacaatatcatgtagatgtatagtctggtctttctagccacagttctgcttcgctaaatgttaatcattctttgacatttcttagtcacctaggcataaataatgtgtggtaggtttagctttgtggcccaccaattcatgcatggcaatataacaattgtaggctgatatttattagcttaggtgtggaccgaaccatctaaaagcgtaaatatgaatcacatttatctagtgcatgctggcttaccctccggtgggtgggcatgttgggcacaacaagatgggaccatatcctggaattctctgatggcaacaaggatataaatgaccttttcccctgatattggttgaccattaagtcagatcactgcagcatatctatgactgagcagaactttggctgcattctctggtagccttgtccttcccagttctcttttg

SEQ ID NO: 88883 - DNA, 358 bp, Zea Mays
atagacaatattgttgtaggtccgaacctcctcataactgcgtgcacctttgacaactaacaaaagcattctaaggtaatacttgtcacctgccaggggatgcacatagtatagacgtcctatcttgccttctcttgtttgtctaggatgccaagttctggtcttgtcatcccatctccattttgatgggaattgagagtatgtaagatttctagcattagaatgttgttgattagtggtaaaccattcagtaagcatggtttttctgagaaatgattgtgacaatatgcctgccatgttagctgaagttttatatgttatataattttcatttggtaaatgaacatgcattctttca

SEQ ID NO: 88884 - DNA, 471 bp, Zea Mays
atgtcactgtcagtaaaagttcagactctgagttgactgacagccagactttgagtccatttaactccaacttttgtacaacacttatgcctgatgtcttaaacaaagttatactcctttagtagctctacaaatttgatgtattaaccctaggaaaattccttatggattaagagatacaaggctccaaatatgcctcaagctcactgaatttcagacttaggcttatatggcttaagtggtgctttttgcaaataagcccaaatcccacattttgacttgaaaatcctcaaatgtgagaaacacatgatttggggtgttataatactttggtatttgcacttcggtccaaaagtgcaccaattttacacttggccccatagggttctagtttagggtttttaggggtcctttcagggtttttagcactttagggttctggtgtcactaaagtccttccaagatgatatg

SEQ ID NO: 88885 - DNA, 356 bp, Zea Mays
caaattcaggaatcacggctggttcaatgtaacgcggtcggtgagtcagaaccttcatcttcttgcccttcggcacagctgtgatggccgaagcagtaacctttcttgaagcagtattttttctctttaaccctcgccctcgcagcgggtaacaatagtcagggtatacgaagccaacagcatcgaataccctattcaatcttttcttattccgacccctgaaagctgcggacaaggcattgtcctcggccttggagtatgccccaagtagctcatcgctagtagcttcaatgcacttcagccaatcatcgtttggctcatcaaatttatccccaaacctgaaggtatactttagc

SEQ ID NO: 88886 - DNA, 425 bp, Zea Mays
cgttaccaaggctgagcaagacctaaggattttataagtgagggatctaccctagtaggtggtcccacatggtgcatgcctaacatgctagggttttctcattatataaccattccttactcaacctagtatggaatcagtgacaaatgagctcgagcgaccaagtggcctaccccttgaagggcttcataggggagtgctaggtatgatcttagatgcacacttgaacgattggccatgagatcccacacatacaagtgtggttagtcatggtccctgtcactaagctgtcaattgttccttaagagggcctactcatagtgtgcccctcactcgcccgatggtccaaccattgtggtcctttaggatgaccataggggcataaattcgactctaggatgtaaagcccaggtggattcttcccc

SEQ ID NO: 88887 - DNA, 970 bp, Zea Mays
gagaaattcgtcgtgtataatttcccatcatgtgaggtcgcgattgagtcaacctcaccaaaagcatagtctgcaaatgggtctgtacaaacccagtcgttatacgatatgtcgatgaatacattcgcgacacaaccacatccctctcaaccaatctaggataaatccacaaacctgtgcacggccggaccatccaagcctaagctcgaaccatccggcccagcagcgactggctctgtcttactttgcgagcctccaagatccgtgctaggaccaccgtactctgcgcaagggctaactcacacgcttggaccatttgcataacacactagtccatccgcgtatcacaccagacagtctgcataggatacgcagaacagggtgctagttatcaccaacaacccttacacccacctcagcaaaagctttcccataccatccacagctcctcaaaatcatggcatggctcctcaaacacacgggggcaaacactttttggtccctagaaggacggaaagatcgaatacacattgtgagatagctcgggcaagtattaatgccccacagaaccccaacccatgggcaagggggtgacataatgagaccctagcatccacacctttggaccaaagggctggtggattaccaccaaccaatatcaacatagtaagggaggaaatagctgggacactacgagacaaactcggagttagcatgaccaataggggcaatcatatcggaaaccctatgacagccgatttgactatgactcatatccccagaggacaaggatacctaaattttcaaaattttcgggtgaccaaggtagaagcatgcatgaacaaacaggccaattcctagcacaactcggggaaatggtcgatagggaggctttctgaattcacttattttcattatcactaacaggtatcgtgtttgcatggtatgtaaccccgccaccaaattctat

SEQ ID NO: 88888 - DNA, 606 bp, Zea Mays
tcttatcttcccttggatgaatgtcgccagaagcatcttcaatcgacatattctccctctgttagccgtttctacgtggaaactgcacgatgatgtttggcctgaagacgacaccgctgattgcttgggattccgcagactgctcgtctacctgctcggtgaagcaccatgccacgtcctcaattcatctccgcttcttgctattaactgacagtttttccttgccattaatggcatttcgtgccgacgtttctctgcggcaatcaaattcgaggccgtgatttccttttaccagactataaatagtgtcgaccttcatctcttttctccctgctcgacccttgctcagctgctatcgcactcgactcacttctcttccttcgtgctccgagttccttgctgctactaccgtgtcgtgcgctgcaggccgccatccaagttctctacgcgtcagcttctctgctccgctcgcatacgcctcgtcgtcgagcgagctctcgccagcgacctcctccgtctccacgacgttgtccgaagcgctcgacaccgttctccctaccgtggtcgagcccctcgtcgagtttctctgtgtggaagctcacaccc

SEQ ID NO: 88889 - DNA, 395 bp, Zea Mays
ggaagagtataataaggaaagacttcatccagaactatggatcttgattcatctggtgatcccgcttgatccttgaagacttgagttggtgcttatcctttcttcatgaggttgatcatcttcggtctccaatctcggtgtctccatctgagcaggggggatatagttaagatagctgggtctatgggtaggacatttttttcaataggttcacataggtggattatgtaacctattgggagtgtatggctgagttgatctatggcactaacttatgcttaagtgaattaggagtatggttttatcctttgtatcagcattaagtaactcacactagattagatcatattagattagctcagatctagattagattggatatgattagattagaa

SEQ ID NO: 88890 - DNA, 553 bp, Zea Mays
catgatagtttacctgcccacgggtcgttaaaaaccactagccgtgattgtggacaccacacctcagcattagtcgcctctaaggtcgaacgtactgcgcttaaatcccttaaaaagcatcctcggttctctccaaggggtcggtaaggtgactgaccggggcatgaagccatgatgcctttgcacctcaagagtggtaaccagcaccctggagagtaagctaagagttagttggcataagggtgagaaggaacccatgaggaaagatgggataggcgcaccgtccccttgggcgactgcttcttcgggagccgtcccgatccatgagcaaaggaaagcacgagctagcaagagatccacagaggggaatgctttttcttctttctctatctctctctccctctcgctcgcatatgctcttaaagaggggaggtacccggtagagctcgtatataataacagagagaaggggtttgaaagccccacggctagaaaccagaaagcaaaagtctttttcatatattattattattgccacgagcatagcactgag

SEQ ID NO: 88891 - DNA, 344 bp, Zea Mays
atggcaggaagacttactctggtcaactctactttctctgcaatgcatatttgcaatgtgcactttgaagctgatgatgacagtcattaatgatattgatcatatcagaagggactgcatccgatgtggtaacaatgaaaatgcaaatcagaatcctatgtttgcctaggtcaaagtgacctggaataaagggggcttgggtgtcctcaatttgaagatctagaatacaatccttctgatcaaattcattcacaaattctatggcacggaagatattccttgggtgaatctaatctagaccacccactattctagggttagggtcccccatggatcccctaaaa

SEQ ID NO: 88892 - DNA, 877 bp, Zea Mays
agccatgttaacggtggatcgatgagctcctgtgaggcgtaccggggtttcgagcgcggtagggttcaattcaaggtcactacgagtatcagtcatgcatcagacatatgatgctcacctaggtttgtccgaaggagctacgggtttgccggtcgacgtggacattgccttcggcgacattcaccaaatgacacgatggtgttccagttaatcctgtgtagtagagttcaagcgggcaagcgcatgagcttcatcatgatctatagactgcgaaacacgagttaaacaactacgactgaccttaggaaaagctggccacatagttgcctgcttggcggcgctagtgaccaccgatggggaaaaaccggtgttccttgtctatcgatggtggaatgacggaaacaaatggtggcttgggtgcataacggagaggcaggactgagcgcaggctcaatttaaaggaagtcaccccgacggtggcaatttggtcgctgattcatggcagcagcgataacccgagaagctccacgttaggctcaacggtgtccacaggccggtaacgtggtggatttaccgcgaaccctttatggcggttcaatacatgagtccccaaccagctgcgtggacggtcggagcgtccggtggcttgctacgacggcggcggatgatttacggtgaggacacgtggtgtccgtggctagagtggtaattcgagcatcgaatccgagccggagatctttttaccacgcattgatcgacgtctcgacggcactaatcgtggcgcgagcttgaatcacggcggcgggacggcggtggcgagcacacggcacttaggatcttcttcagtgtactgtaccatagcgatgtccattccgag

SEQ ID NO: 88893 - DNA, 693 bp, Zea Mays
gtgggggatagacatccccgagtccgcatgaacacataaacacctcatgagccacctgatgtgcctcccgatggcctgtctagcgagacatgctctcgggccacaaccaggccggacgtccgagaccgagttatgcgcagaccaaaatgctaatatcttgcgcaaagagattgcgcgcacccaaagggctaaacacttggcgctaactcgaccgaagaagcgacagaactacgaataaacaggactgcatgccacgttaaaggaggatttatgtagagtagaactgatcacaacttgtaaagggataactctctggtcatctatataaggccaagagggtacccctacgaaaacatctctcacccatctcatccggtcacatcctagcaccacctcatagctcattagccttccagtagcaatcacacgctgctagatcaataggagaactcatcctccaccaccctcagctcgcttgtaatatgtgaacaccagtgaaatttcaaatatacatcctcaacaggaagtagggtgttacgcgttctagcagctcgaacctgtataaacccttgtgtgatccgatgtgctcccgcacgtaccatcgagttgtagtcaacgacgctgtcctattcaaaagcatcacatggggagtcccgtggtgcgtagtcgggtcataaacaccgacatctggcg

SEQ ID NO: 88894 - DNA, 601 bp, Zea Mays
ggctgcattgctttgttgtcacgagcagctagtgttgaggagcgccgaggtggcggacttgacgtcctggtgcgtgggactgaaagaagagggcacgaccgatcgcgcgaaggtgtgtcggctggcggacaaagtccgtcgcatgaaggcagaggcggacctacgccaggaggagatgcggcagatgaagggaaaccttcaggtggtgatggtgcagtgggacaagtctcggtgtcaggtcgccgaagcttccctccacgttgactccctctccaagcacctggaggccgagcggtccgagggtcaagccttaaaggcccggataggaggtattttgctgaagccttgtctcatttttaggttcaatatctttttgtagctatggcttaatgcttccatcctctttccaggcctcaagaaggatctggagaccgcagcccagacctctcagacgttgtcccaaactgtggagcgaaaggtgaccgagctgagggagttgtccgatgctgtggcggggttcctttgggatctcgacatggtcgacatccccagggcgggcccctacgatcctatatgcgagccctgagtggctacatacgcg

SEQ ID NO: 88895 - DNA, 348 bp, Zea Mays
cgcagttggataacacagaagggtaagaaatatcatctcgtggatgaactccggccactattctactccgatcgccgtacccgcctaagtcacgaccactttggataggatcgccggagttagccacctcgcaaccttgcgccacatgcctcggtgctttaaccacgccgcagtgagtcaccttagcccacccgatcgtcgccggtgagcccgccacggtaaatgccaccaattacttgtgccagagcacccccttctcttcggccgccgcgcgtctttccctgaattagtcaccaccgctcatggatcctataaattgagcctgtcgtcggttccgcaaggtagtcc

SEQ ID NO: 88896 - DNA, 463 bp, Zea Mays
caggaccaccgaccttagcctcatatggaagatgtataaagagatgttgcataggattgaagaaacccggtggaaatattttttccaatttgcacaaaagcatcggtgcctctttctccagttgttccatcacatctcttctgatttctttagcacacagtagtctgtagaaatagctaattttagctaacattttctacacagcatcggaaatgtacccatgaaacattacaggcatgagcctttccataattatgtggaagtcatggctcttcagtccattcatcttcattgtcttcaaattcatagatcttctaaacccaacagcataaccatcggggaatttcagatccttcatccacttcatcacttcttttcgttgcttaggtttcagacaatatttagcttttggtttgcctccgttttctctaagcacttgggttggacgatcacatatcacggc

SEQ ID NO: 88897 - DNA, 430 bp, Zea Mays
ggatacgaaaacagaatcctagtgccagccatgtcggaatttccatggaagatcttccatgctatacacgctacccgttcgggtggacactgaggttttgcagtgtcataccacaaaatcaggaaattgtttatttggactgggatgaagaaacagatacaacgctggtgcagcgagtgctctatctgtcaacaggcaaaagctgaaagagttaaatatccaggcctacttcaacctctaccaatccccggtggtgcatgaaaggttattacagtgaacttcctcaaaggattacacaaatctgatcactgcaattgtattatgttaattgtggataaattctgaaagtacagtcactttgttcctctgtgacacccttttataactcttgtggtagccaaacagtttatggaacatgtcttcgaactcc

SEQ ID NO: 88898 - DNA, 766 bp, Zea Mays
agcttttgtagctgtgtgaatgatgtggtacatgatgacctcgcggtggtacatgatgtggatctggaggtccatggcgttgatctggtgaaatttcttccagacgctcttcaaagatgactttatttctatttgtggttgatgtcttgactactaatagttttgttgactactaatagttttgtgaggtgcacggtggtagatccaatttctgtgaattgtgtttcgatttgttggattagttcaccttaatctgcttaagaatactcttggtgtgatatagggtggcacgtatattacatggatctatgcagtatttcttactagtccagttatgtaggaggccgtctagttctacaggttggtttccatagtatatgaccatgttatgttgcatggcagatatgtgaacgccaaaagggtctaggacaatgggtgagtgattttgttttgttctgcaactatttatcttaatgttcttcaacaaaccattgagttaatcaccactgattgtcacaatgatataaaagtttgttgtcagttggtttctgtggaagtgtgggcttcaactcgttaagataaaaaatctcaaccttaacagttgttatggttcatctttctccaaatttttgtgactttgaatggagtgcttgagatctgtctgttcttaatatgtgcaatgacatggctgttgaattctgcaataacctttgtttaattctattgccctagctggcttgaaattgatttattctgttattcggtt

SEQ ID NO: 88899 - DNA, 912 bp, Zea Mays
gcgtaatgacccactatagaggttttagtagcctgaagcttgttagtcatagcatcttggaagggcttgataattataactgtctaaaagagaatggtaatgaaaataagtgttgactagaaatataggacacgactattgtcctccatggtggtgcagacaaggtcttttattgataaaatctattttaaggtgtaatagacgttcttatatttcttcgattctggtggcataaggtaactttgttttattattcgctgacttgtttctctctctaaataggctacagttcattgttcaccgacctcacttttaattgaatttaggacaccaggtaccttgggccaataatactccatcgtgctggacatttcccatctcaaatattagttgtactgttgtaccactactggaactccactcggatctttctcagatgttaaaaccctatgtgtaacctgaatacagacaaataacaaagctgtaaatttgcagatgaaatttgttctggctacttgcttgcctagaatgtgcgcgaggcatggcgatgcagcctgccagctacggaggaagagagaccccctgccttaaacaaacgagcaggagagttctgtcggcaggcgacaactgttgcttcaacacgtgggatccgactacctagtggggaggaggccgtgcggggagagaagcctgctcgtcgcgcctcctcgagagggcgacgacggagataaccagatcttgggatttggggttggtggggagagggggacgcgatgagagggacgacaagagagaggaacaagcggacctttcaaggctcaaccgagctgaaggaaggcttcacgtccggagcctgcccacgtgccggcacacagggagtacaagatgtcgtcaagcgcgcatggaggagaa

SEQ ID NO: 88900 - DNA, 810 bp, Zea Mays
ggaatgttagggtgatctcagagacaatcatttttagtttggatgatctttaaaccgacttgggagtcttagattcggcaatcccatgccctgatcgaggacacaacaactgcaatgattgtggctcctttcacgtccacactacataaacaacattggggccagcacttggaactacaattccacgtcgctcgaaactgatctaagtcatcgtcctatcaataaactgctttggggccatgtcgagaaaatgatccccgatccctaggacccgccgaccagtgagtgcgctgaggaaagagcctcagatcggtggggcccattagtcagtcagaagagacaggtgcgccaaccctggaaggacactcccccggtcgaaccctgcggcaccgagcccggggccgaggatggtagagcctaacaagggaggatgagcgtgtcggaagggaaccactcgagtggatcccgcacccggccccggactgacccgccataaataattggccgcattaaccacgcttattaccgagccacaatgtgggcgccggtccgcttgccactcatgacctatgagcccctgaactatgacacattaataactcgtgcgcccctcgtcctgtggcgtacttatgttctatcagactagtcctgagtacgcagatctcccgcaaggcactacacgacgagtcgcgccgagccccaggctacaaaagctaggttcaacatagctcgaatgatggtgcctgagaccatcgccgaccccgcgttatccaccacgataaatacgcgacagcgaggcagccccgggcc

SEQ ID NO: 88901 - DNA, 988 bp, Zea Mays
gttcttagatttgaagcaaggggaagaagagagtgtaatggaatattttgagaggtttacccgcttatcccaatatgttttggattttgtgaataccaatgagaagacaaagttctacttcctacgtggccttaatgagaagctctagtgcttgatggcagccagtttggctgaaagatataatgaggtggtcagtcaggctattttgggtgataacaagattcgacttcatcaggagtctaaaagaaagaaatttgtggaggaatcctctggtaaagtcaaacggtaccggagggttgtttatcaacatgtttattatcctctttcttcttcactctagctgcctagctcaccgcagtcatgcgaaagacaggctgttatcccttccattccacctaagccggatgtcctagacatccgttctaaaaatattctagctaatgccaaaccttgtgagaagtgtggtaagtcaggacactctactcaggattgtcgcttctctaagctagtggatgagcggcagtcgcttgtgaatctccctcgaagtagccagcagaaagcaaggaagaatgagattgttcttaaactgggtcaggtccattatacaaaaatcaaagctattcctgagggtgaaccggttatgatgggtgcttttccggttgccaatcatttggcgagtattttatttgattctggtgcctcacacaccttcataaatcatacatttgtgttgaaacatcagttgcctatggaagtggtggatactgggtattgtatacactctcctggaggacttttgcatactaaagagatggtatatgagatacccataaagttggttggtcacatgtttcctaccaacatgctagttcttaaaaatcaagatatagacgtgattcttggtatgaattggcttcgtcagcatggggcggtgattaacgcgttgcaacggacaatacagttggactcacctagtggtaaatataag

SEQ ID NO: 88902 - DNA, 600 bp, Zea Mays
tatatagtatggtgggaactttagtgctactatgctacttcaactggagtgaggctaacttaaatagtcgagttgtctccgccgggttaaagtcattgaggagagagaaaaaagaaaaaacccacactcgtgcgctcactcgtggggcaatgggcttgggcgcgcgccggcatgctcgtggatggtccgacgatttctcgcttccgatcttgtgggtgcacgacatccttttgccacatgatatttgtgcatgcatggagaaatttgtgccgcttttgtaagcaattattggtgtattaattctgattattgctgtgattacgcaaatatttacttgtcttagctacgtcttgtgtatataataaggtcgagacgtcgtccttgatacagattcactcgtcctcacaccagaatgatgcgctgccttcgtctttcctatatcaccatcaacgtgccatcggagctgggaaaagtatgatctctaaagtctatgtccccttgtgtctgtgcacaaggtagggaccgtattagttttttggaaaacgtcgtcgtgactgctcattgtttgtttgcttcatctacgtcgacacgacgtcctcg

SEQ ID NO: 88903 - DNA, 489 bp, Zea Mays
ggcggcggccacggccaccgccggtgaggcaaatactcggccctggcgcaccgaactccaattaaatggctctacgcattgcagtatgcaaggagaacacgggcgaggtttacatatcgttgattatgcatccaggcgacttgaccacagcgcacggaggaaagacaactcggcaccactccggcgaggaattagttcatgatccggccccgcaatttctaatctgatcggtcgtattcaattcctaaggcgcggcagatgacttgggtgacttacccaaggtgaagacgaccgcaaggatgatgttccacggcgagggcggtccgctgctcccacggaggccggtgatggctgtgcggcggaccttgggacgaaatcacaccacgcagtctgcccacgcgccaccagtgaaccggaccggcctatggaacgaggtcgacggcaagcaccatcgtttatccgtggcggcgagccttcacccgcactccc

SEQ ID NO: 88904 - DNA, 352 bp, Zea Mays
gtgaggtactcaagaagctctttcttcttcctctcgtagtaaggtcgaagttcaggttccatttcttctaagttcatggctcgaattcctcggtgcactccttgatcatggtagccctctcgagggttagctcatgcaacttagccaagtattcagtggattaattggagctagatgtaagttttgtcctctcggacttgctagaatcatgtccaaaagcctcttgccactcactgacgatggggagcagctgtgcatgtcgtcggcatggacgtgcgagcttgcggtagccgccatcgatgtcttggtagtagcttttcgattggaggcatccaccaaaagttcccatttt

SEQ ID NO: 88905 - DNA, 602 bp, Zea Mays
gttagaacgtaaaaatgccctctggaaaggtacacttcgcccgaccccgagggtcgggaagggtcgtgctcgagtccccagactagaaccaacaaagacatactagagaccgaccattctaggagtaggtacacacgggtcatacctacaagcatgtgattggacgatgggacagtaaggggtatgtctgaacaaagatgtcgcatgacacgacatggacgatgacaccaaaccaaccactccctcaccgagaagtcaataaaggatgataggtaaaatagccgtgggataagacgatacgtaacaatagctgtggtgttgctacagggcctggaataagaaggaagatctcttcatgagtttgtatgtcagaaagaacatcgaaggacatgaaaatacaacaagacccacatgatgcatgtaacgggttcccgtctgccttgacctataaaagacagatagtacatgttggtcacctattcatgaaatgaggtcaaaacaaggaaacataatcaatgatagggggccttcattcttttaatctattcaagggatagattaaaggaagaaaattatgagagtaaatgacctctaaataaaag

SEQ ID NO: 88906 - DNA, 664 bp, Zea Mays
gaaggttctgactcaccggccgcgttacattgaaccggctatgatacctgaatttggcaaaggggcctgttcagctgccgaagcaaaagaaactgtcctgactgcgtagagcactaaagagccgactatagtgccgatggtacttacagtcgagctagttgagaggaagattgaagagccaaggattgaagaattaatgaaaatgccagaaattttgaatccttcaacagagataaaactgccgaaggtgcaaaaggcttctgccgcaactcccaagaggagaaggatggcaaacgtgctagatgttgtgctagaaatgatgaaggccttgagtcctgctcttgcaaagaaagttgttccaactgaaaccaagtctcacgccggaaccgaaactaggcaagccgaagctgcaagttcaagctgaagtcgaggctgggccttcagtgcccattgagatagagcctgccgcacttgaagaaaaggcgacagagcaaattgcatctgaaaagatcgaaactcctgctcccgaagcttcgaacaaaagtattgagtacattatttgtcatgcttcggggaaagaactatcccaaggagagatgttagaagcacgacactacgcccaaaaattgaaatatccgaagggggcattagtgtttaatggaag

SEQ ID NO: 88907 - DNA, 293 bp, Zea Mays
attcctaggtttattttaatactaaaaaccaatttctaggattatttgtttattttctctgttccctagacttcgcgcaataatacagagaaactcagggggtttggtaaaaatatccctaagactcagggcgcccccaaatacggacgacgggttgatattcattaaatctaggggctcttgtgaaaaagcgcgcgacgaaggggtatggttgtatctggaccgtgcgattacagatggagggctgagattaaatcgttctcatccccaaccggtatggcaccaggaccaca

SEQ ID NO: 88908 - DNA, 523 bp, Zea Mays
tttttggtatgcatctacaagtgcaaataaaagtaaccaatgaagaactgaggataaaaaagtagtggcgaatagaaattgaataatttgactagctcacttacaaattcaaatgtactccaattctgctcacaaccggatgatgaaacacaaagactaataatccgtcttgcaaacttatataattcaatagtacgaccaccatatgcaagccaccaatcaactaaaatggcaagaacaagaagattatatgttacatgctaaaaatggagggtagactatcaattttagaatacttacatggattccttgtttgtgcattttttatagccattggatttgcaaatgcctctctttggttctcataaagaacagcttgggcatcaatcctctctctaagatcttcatctaccaccattttgacaaacacatcattaaagcaaccccttagctctccaacatagccttcatcatcacctgctttgatgttgtagaattttccagggttcaaatattgtgctgc

SEQ ID NO: 88909 - DNA, 1109 bp, Zea Mays
ctagatgatcaactcctcaaggaagacattaaaagtcatatgaagacctactagaacatgaaaaagtctaagacacaagatataaccaagtcagacatgaagatcataaagtaacaaatataagaagggtttcaacaagcattggactaaagcatcaaatttacctgtgaagtgttataccatactagaaccttgttaaccttagctggctaacaataggagcatcagactgagcgtcagaccaacaatgatagggacattgaaccatacaatctcactgtacacatagaggtgtgttagattgagcatcagactcgtagtagagatggtgctagaccaaataattacactatttacaagcatatgagcatcaaaccatcagagaagaagtttgatagtcaccaaaaaattcctgagagaagagagagggatgtcggactatatgccacaaatacacgccccaatggtttgtaatggctagtactaacacaataaccattatgaggacctccttgtgaactaggcgaataagttttactctaggcaggacatcccttgggttaatctaatttgggacacatattacgaagggaaggttcctcgtgcttgtagggatgttggctccttctagtggaaggatgtatttataatcaatagcaattatagatctatgtcaagtagtgtaattgttgatggtgcatcaacccccttttgggaggataattgggataaggaagctatgaacaccaaattcccaagacttgcttcttttgcattgcattcgaacatatcaatcaaggaagctagagaaacccctaatttatccaccattttgtttctctccctgtcatctcaagcacaccaagagttacatagcatgcaagatttattggtagatacaacgtactctactaaagagaagaatgtttgggttttgcatgggggagcaatatagttttcagttcacaaatatcacaaacacaaacatgcagatacctaaacttttatagtatttttttgaaatacggaagcgcaaatgcataatgagaaccaagttcttctaatggttgctacttgttgataggattaacaccaacgctacttcgaag

SEQ ID NO: 88910 - DNA, 703 bp, Zea Mays
ctaaggatgagggggaggaaataccatgtcgatgcaccatgaagataacacgaaaggtagacactgtaagtgtcattgtgttggatcgataatggcactaagtataagcaaataccctgtatatggatcatgaatgtcctccaatacatccaaatggaagagaaaatttgaattgaagatcaagacatggatctaaatgtgaatatgaattccctttgtggcaaatcagaattgaattaaagtcagaaagtagacctttgtgtcaacaatgacaaactcatatgggaaccaaagtctagcataaagattttgtgaagatgtatactttgaataagaaacactccacgatataagcaatgtggattaaggaatccccactaccaacttatgaaataaagaagcttgtgttgcataagtaatgactgtgatatatgctatgtatgaaaatcccattaatatataattaagaaggcatatgatgaaccacgttagagtcttgcataataagccacaagaggatcttgtagatcttcatttaagcattacattcatcattgaaatgaaggacttgaagcaattatagaagacttaaaagtgtggttctcagggggagaaatttgcatactcctaaattgaatcttgagcatgaagttcaagtatctaattataaccttaaaattaaattaagaaaaggttgatttgc

SEQ ID NO: 88911 - DNA, 1518 bp, Zea Mays
agaaaacttcaaaactcaattaaaatagtcataaaatgtaaccatgaatagatttaaatggcatccaaaccctagaagtactaaaaaccctaaatggacccctgagaaaccctggactaaaaccttagaggggttgtatgcaaaatgtgcccatttttggacctaagtgcaaaaaccatgaaattagggtatcttaactcatatgattgacatgtatgtggatttgcaacttaaaccctaagttttgggcctatttgcaaaaagccacatttgagctctaatgagttaagtctgaaattcagtggagttggctcaactttgaggccctatatcttccaaattatgaagattttgccataggtcaccacatcaagtttgtagagctataaaaggggaacaactttgctatagagattaagccctggtactatgaaaagttttgataaaattggacccaaagatgggctgtcagactgtcttaggtctgaattcaggctgacagtgtaactgggcaatctttggactttaatttgactataatccagtcagagtttggctatggttgctattataagtttgtagctgaatcattaggctacaactttgctgcagaatgttggtctagttgccatgtgaaatcaggagaaaatttatccgcaacttggtctgtcaggccgactgaatgaacttcgtgatggtacaatgatcggattgggccgccagctcaaagatctcaccgccagtgatctcgcgctcagatctgcgccggcgttgtgattcacgcccgaccaaactcggataagtgctcctcggtaagaaagatcacgctggagttaaactccggccactgttctcaccgctgtcgtgtcccgccatggttagtcgtgttggcatcaccggcgttcgccgttatccggcctggctacatgcctcaacatttcaccacgtcgtagtgaatcgctgtaagccactggttcgtcaccagtgaggccgccacggtgaaggccacgaatcaccacaccagtgactcattccttctccgaccgccaccgtgcccaatccaaattcactggccaccgctcatgcctgctataaattgagcatgccgtgagctccgtaggataattatgcatccaaagcaccagcaattgcctccgatcgttcaccagagaccgtgaattgctcatctcccccatttctgtttccgccaccgtggtagaaccctcaccgtggtcagcaaatcctaggtctgttcatcctccctgctgtcttgtttcaacatccatgggtcctcctgatgttccccgacctggccaattggactaggaccccatagatcaacaggaatgcacttgattgcctatagtgcccgctgtcaccgtggacaatgcgtgttagagcgccattagtaaaattggttgaggggaaacccttgttaggatttgaattcggtctctgccaaagtagagcgccagtcatcgagtaagccagccgatacaagctcaccagagctcggcc

SEQ ID NO: 88912 - DNA, 783 bp, Zea Mays
ccacttccctaacctctcgccctcacacctcgccacggatgcgcccacgtcgtgcgtttcccggccacctccgcacgcactcagcctcctttttgagcccgcacctcgttcactcacccccactcatttgcgcactcagccgaactccctcgctctctctctcaccttatacatgcgcccaggaagaccgttgccgttcaccgtgtccgcgtgcccgttccgtcgccaccgttgggcgctcgccgtgccctttgcctaggtaagtcctgccttggtgtccgcatcatgggacacacctcaatttactctccccctctctggttccctctgcctgtgctcaccagaacattcctcgcataactagagagccgccaccatcgacccaagccttcgccgtgtctctgctgccgttccagggtcccagagtctcttctcaaggtaaccaacctgtcccgcccccaatttaccctttccctgtgctcgtctgggcgcgattgctcgccagagagtagttgtgccaccatcgagccatcccgccgcagacagttgttctctggtgtctccgcgtcgttgctgtgcccatgaccgcgttcggtacattcccccgaacctcctagagcctttcttagtgtcccgagggtcccagcgcgcctgcgccctcatctccggcgagcccccgccatagacgcaagaggtgccaccgctggcgacggagggacctagtcggtggatcttaggcgttcgtctgagatcgggcggcccggatttaatcaaacccaatct

SEQ ID NO: 88913 - DNA, 1152 bp, Zea Mays
cgttggtgtaggttagagtgggttaaaaatataaattatgcgacatgttattggtgtttgaagacgagatgtgcaaagaatcagtttggtgtttcacccgtatagtcgataaatgttgttataaataattgcgctaaaatttggtcataagagtgcagtgggcacgtggtgtggttggatgtgataagtagattggaagtgtgggtttgtctgagcacgatgttgtcaaacgtgtatgtcgtaatgcgttatagtagtgattgtgttaagttaatcggtaatgtcttgggtgcacgccacaatatggttgtatgcaagacagggtaaaataaagtgtgctcgacataaatgtttggtcgttgtaggtagaaattgtcttggcttaagtagagaggtgatgacatgccgtaagcagtcatcacttcctctataattataagtcgagtctatacgcgttaggcgttccttaaattgtgcttcacaaataagtgtatgattgtgtttatgacttgaatagatgtcttcgagtgaactaataggttcctaaggcaattatgtgtaaggtgtttatagtgacgctttatcccgaaaggtgttaagtctgcgcataaataagagataagtgtattttgtgtagtgtggattgattttgagtgcatgtgtcgcaagaaatgaattagtgcgcatataggcgatgaatgggtgtgatgaaattgtgacatgccttcatagtcatcatgtcgtatgttggtgacctaactgaaggtcgtagagaagggtcgattacctatgtgttattattgtcaccttgcgattctgtatgaattgcaatgtgaagtagtaggctctctatgtgatgctagatgtctaggtagactttcgtgaattgtggtgctcggaccgtcaagatgaaggttaagtcggtcgatgccgattaagtagttaaaatgattaatggaataatcatggggttaaaactagaaactagtgttctctcacccgtttgggatgttgtagcccaattgcgtatggttatgatcgcggtaaaaattagtagtgctcatgtggtgtataagctaaaatgcgaactagtgggtgaaaagcgctttgatatacatatatgccggatttgatgattgtggtgaatgcgtt

SEQ ID NO: 88914 - DNA, 294 bp, Zea Mays
gcgagagttaccaccctgtgtgatgaattgtgcaagctgaacctggaagttgtttcttcaggtgatttaaattatatctcggtggagcccacattacaagagcaaatagtcaaggcccagattgaagacaagggtgttcaggttatcaaggaaatgatcaagcagaaggcagagaaatacaagtgcttccgtcaggacagcaagagaattctatggtttggagatcgactggttgttcccaaggaccctgagctcagaaagaagatattgaatgaagctcacctttcaaaattc

SEQ ID NO: 88915 - DNA, 1608 bp, Zea Mays
tatggacttggtctaagggaaaagtccacattctctagggcatcccggagctgggtcgccacttagcctggtcctgtatacaccttccaccgccccagaatagctgacttagtaccttccggaataggtacctggaagtctggacttcgtctagattcaaggcccaacacgaaagtcttggataagcaaggttcaactgcgtgattcagaggattgaatatattaaagtaaagaccctaagggaacactcccagacatcgatcttggaacatgttcaagattggcccttggttcgatgatagcctcagacaatcttggactatgggctacgtgaggacaaggctcgttgttcagcgctgcggcgaggcttgacaataggctgtgatgacctcatggcgaggcagtcacaactgtggcacggtgcaagcgtgcaatgaccaatgacgagaaccaagtcgggccctggcgacagcagtcacagctagtcccctcggtggctcgacaaggaggtagcaggccgatctagcaaggatggcatcctacgacgactagatccccattgtcttgacgaggaggtggcagatcgatccagcgaggaggcatactgcgatgacagaattaggcgacgtggctcaaggattagatgaagaggcggctagtgatggccgtggtagttggttccagcgaggagaaaacccctggcgtgacatcgtgatgaccattgtaagaacatttatgctatatctaacactacttatgctcaaacttgaagattttacgatcatgaataccatgccccagagatattcaggtctctcatgtggacttggtatttagtatttacgatgaccgcatgaggtcacacatacctgttacgtgggggtcgtacgtgacatcaaattgaccattgcaacaacatttacactatatctaacattgtttactctcaaacttgaggattttacgctcaaatctggctgtgcgcatgtgtccatagtaaccactgcaacccacgtccctcaccatataccatatttcgcgtgtacgagatcccatgatttatggcacattcgtaactgccataaaaatagatcccaataaaacgctataaaacaaattccatgatatatggcgtgatctgggcgtgggacatgggcgcgatgaggagaagccgaccggggggctttctgtaacaacatttacactatacctaacattatttatgctcaaacttgaagaatttacgattatgaataccatgtcccagatatatttacgtttctcacgtgagctcggtatttacggcaactacctagattcacacacatctgttacgcggggtcatacatgacatcgcattgaccactgtaacaacatttacgttatatctgacactacttacgcttaaacttgagtattttacgttcagaactggttgtgcgtttgtattaaccaccgcgcccgtaacccatgccactcacgggataccatatattccgcacgcccaacgggatcccatgatctatggcgcgtctgtaactgcccataaaatcagatcccaataaacactataaaaaacaaattctataatttaaggcatgatttaat

SEQ ID NO: 88916 - DNA, 726 bp, Zea Mays
caagttcagtgtctcttctgaaacacgcatgcatgcatgttgccgtggctccaaggtggcatctgtacaagcaaaggctggccgctggcatggcagggatttagggagcgcaggcgtctcaggccctggttgcagacctcaatgcaagaatcccagcggtgacctgaataccaggaaggatagaacagtacgccataccgagtgtatgtccacgacaagctgaagggtgacatagggctcatgatgacgggagacgcctcgtttcacgcgatcgctccgatggactgatccgcgggacccacacacactatcacaaagacatcagcagcatactcgctacagggaccatatggcggatgaacaggatggagtgctataccacgggaacgacaacacacgaccctatggacgacgtcaggagaaccacgcatccagaggcagcgggccaagctctcttccagtagaatacaaattcctattgtaatgtcctcccttgatttataaaatggcatgacagtctcttttctacacacgagcacaccagttgtaacacgcccttagcaatactatgatcagcactacactagactagggcgcaagcctgaaccagtataacccaccgtctcaaatccattgcttgagtcctgacggctcaccattcggagtgagtccgcgctaacttctcctccgaacacaaatcttactgcccctggtttccgaaaccac

SEQ ID NO: 88917 - DNA, 298 bp, Zea Mays
gccgccatgctccgccgttgggggattgaacgtgcgccgtccgattgcaatggatggcgtggattaaggatatcgtacaccgtcggatcgtagtgaacgtctcaggattagaagccggataacctttcgccgtgttaaatccatgccgcagaaattagatcggacgatccatagggaatcaaactttattaaatctgtgacgcagatcttggaatgaacggtccgggctgcgtaccggttcagtgagccaagatctaatcctggccttcgatatttgatcggacggccgagagttaac

SEQ ID NO: 88918 - DNA, 796 bp, Zea Mays
gtcaatggaacgaacaacgcgacaaggaggaggtgaaactgctacataaactctctgaatggcgcaaagatcagtccggctatgttgcggaccatccagtgtatttttacggaccgtctgaccccacataggctcacacacagattactcaggtagcaccatatatgaccggatcattcgggtacaaccccagacaattcggccctgttgcggaccgtccggatatgtcgcggaccgtccggtaccttacgccagaccgttcggatatgtcatggaccgactgacgtattttgccggaccgtccgactctacacgtgtccaagcgcagacgaccccagtcacgccatacatgaccggatcgtccgggtacaaccttggaccattcggcccgatcgtggaccgtcctgtcccttacgacggacggtctaggtacgaaactacctagacaacaccatatacgaccggacagtccagatatactctcagactgttcggcccggtcgcggaccgtccgaccccttacgccgaaccgtccgggtatgcgtacgcagaaccgagagttgcacaatatacacagttcccacacccatcgcagcaacactatggtgccccactggtgacatgttataaccatgccagaccacctcatgaacatagagctgaatattcttcggccaccagagagcctgagagatgtaaagcaggaggtggtggcattaatatgacacctagcgcacatcttggacatccctgggaggaaagccgacaaaatgatgttaggcaacctgagatttcc

SEQ ID NO: 88919 - DNA, 937 bp, Zea Mays
tatttgtagatattttgtagttgtttttactattagtagaatacaaattcagatactatcatgttttagttgttaattgcccatgtctctgatcttcactgggtgtagtgttgtgctgctgtgatgtcagtctgaggctctattttttggtatactgttatggatggtggcagataagacataattggtatatgtagtctttttttcctaagttgtttgtattcttattcccagtgtgttgctcacttctactgtcttataaatgctcttgcctgatctgtccgagattttcagcaattttgttggtttgttttcattgccttttccatgtgtagtgtatcgtcatttgtttagcctagtttagaccttagttagagttgctctgcctagtttagttggtcatgcttatgtatcatcattcaaaattttatatcctgcagtaccaaagtaggaaaatacgtaagtttcaactctatcatttctttttattagaatccaaattcagttgctatcttaattttttctacatattttatatggtttaaaaacacccacaacaaattatttcttgtagtaattttgccttctttaattatcataggcatgactgcggtattttcacacttcaatacatggaatattgggatatatctgttgatatgatgctcaagttccgcactgaggacatccctcaaattcgaatcaccttggccaacgatctctattttagtgagaagaacactgaagacaagtctctagttcgcaacatgtttcttcaggttttttgtgattcaatttgtgttgttttttgggcgctcttattattttgttttttctagttttttcctttttcgtgggtggtgtgtgcagtgctgatggtggtatggagtttttttgttttttgtgcatcatttttttggtctgatttgcttttttt

SEQ ID NO: 88920 - DNA, 349 bp, Zea Mays
gtgctaaatcccaacaggggcgggagaaccaccatccaaatagtggcgtgctgcgcactcagcacacaattctgcaacctccgcccaaaccttgtccaactcgtcaagggcgtggtctagctctgtgttgagcacggtggccaggttgaccatgttgttcagcatgggattgccttcaccaactgacgagacaatcacacctccagcactaccggtcgaatggcgagggtagtacttcaggtcaaggccattagctaccccgctgaacaatgagcaatactgcgaaagtacacgttgtgctgcatcttgcatggctgcctcggcagtatccctctcagtaatagaatag

SEQ ID NO: 88921 - DNA, 435 bp, Zea Mays
ggccggggtattattggtttggtgcatccagtacacatgtgtctgaaaccatgcatcaaatacgatcagcgcgaggcgtgtttgcctgcgtgcagcgtgctccagcctccagcaaacatgcatgctgcatgcatgtggacgtgccggtgatctctcgaccgtacccttttgctagctctccggggcctcacgagcctttgcttgctgccctgataagccaacgggcgtcctctcctaacagagcacatgtgccttgccttgtgttgtgagccgtcttcctcttgcagctagtgcagggagcgagagagctcaaagcagctagcagcagcttcttgcttcagatcgatatgcagtgttgcccttcgagtaaactgaccgtcgtcaccattatattttacaccaggcaattgccgtggtcactttacggcttcactg

SEQ ID NO: 88922 - DNA, 1598 bp, Zea Mays
tgataaacaaaagggtaccattttatatgtatggtgcttttatatctcgtaaattatccaagagatagaatcaaatgatcaatttaatggttgatgttccagccaaaataaataaataaattaatgttgctcatatgccgttcatctatacctaaataaattggtatatttatgctaaatctcaagccatggctgccaacgctagtcgacctgctatgcgcgccatggttaaaataactaaatgtgttataaatattggaacaagcctagcaaataaaaaatgcacgcttggttcatcaattatcgttccgcccaattaataaaaacagcaactctattaagtatttaaattaaactaaataggttatatatgtaagccatggtcaaatactatatcatggccatatatctggctattataactaactacatacaccatggacgccacatcatatcttgctaagcctaaataaaagtaaaaaaatgatttggcttggcttaaataaatctcacaccaccacatgtcaagtgcattcataaacatgcgtctcaaaacatcttcattcgtgatcttatataatccgataagattattaaatttaatcctcaaggtaaaccatataaatatataacataacgtgtcttccattaaagaaataaacgttgaccaaataaatcttcttggtctaacatgcatatgagtcatattatatgattcagatgcctaccgctcaaataactagataaagattgtatgctaagttatcaaggctcaacgccatgtcatagcttgaacaaataacaagatattcataaaagtatgcatgaattaaaatacatatatattatagttcgacagagaattgaccaagccagcaataaagagatatttgtcagctcgtcaacaatgagatcatgtcgtatctgatatacgcatgcaccatccacgactacatgaggcgaagactttttttgtttcttttgtagtttgtaataggctagccatatgatgtaattttatttttcttttatgtattcatgttggaactcttaatcaggggttttctctacggagatgtaattaacataatttttatgcaaatacaagaattatggaagtatgagcctgcaatacctgtattatttactctattgtatctaaattaaaacttgtctctgttgacgtggagacggcgcttttgccgcccgttttcccgacatcagtaacttcgtctacgtatgcatcatgtgtcaacataacaagacgccaaccttgtagccaactggtgccctccatccactcgacgtgtcgtccaagtgtgagtggacatcttgacggacttcattgagggccttcccaagatccacgagaagtatatcatcctcatcatcatgaaccacttctccaaatgcatgcacttcactgcccttagtcgctcgtactcggttgatcgcccatgccttcttcgaggacattgtttgtctgcatggcttcccctgctccatcttcagtgaccgcgttgatcttcaccagccacatgtagagcaacttcttcaagatgaacaacgtcaagctccgtctaagcacgatattccac

SEQ ID NO: 88923 - DNA, 308 bp, Zea Mays
tacgaatacggccaacaagccacatcaccattacaattacatacacacggcgagggcatcacctattacacacacacggcgagggcatcgcctgttacatcggctcaaccttcggaatgatacccatctccctgtaattaaacaacaatatcctcaattcctcaccctcaaaaagctcccgaagatccccctcgcctatgcccgccccaatcggcgaggacaacaattctcgtttaccaaccccgtttacccgaagtcggccacgctccatccccatgcgacgacgcctgccgcttcgtgaaaattca

SEQ ID NO: 88924 - DNA, 283 bp, Zea Mays
gttttttacgaagcaatggaaaggaccaacgttgaaaaaatcactaatgagatgctggcagggctatctggggattccagcgacagtgatagttttgatgtggaaagtggtaacgaggatgccgaagatcggccattgagaccgagtcatgttgtttttggaaagtccagtgttaaacaaggacagattgaagggatgaagggaaaatattttcacgatatatccattgtgagggctggaggagagagtatcgttcatcttcctgaagcagatgaagtagtgg

SEQ ID NO: 88925 - DNA, 963 bp, Zea Mays
cggcgacgtaggcgcaaatctctggtggctgcttcatcataattaccttcttcatcaaacaccgcatcatcgggaagatgtggacgaggaggtggtggtggcggtgcttgttgttgcgtctccaacacagcaagtctgtcgacgatctaggacaatcgtcaatccagcctctcgtaagtcttgccaaggttcatgtcaatgaaggcatcatgcactgacttgtggaccgtctcctgcatttgctcctttaggagcttgttgtttgcctcaagatcttgtcggctaacacattcatcgaagtatgtggggatccttgcttcttcttcgtcgcctgccatcgaaacacaaaaacaggaaacagacggtgatggttatccctaataatttcactacacgctcctctcaggtggaacataggaacacgctctaatgtatcttaccaagcgcttacaagtgtctgacgaaatacaagcaaaggatggtacaaacggaggctggttcgtgatacttaccaagaggtagtgaaaccgcgattgcaaggtcaaagctgtactaatcagaagaaagtatgtggagcttgggaggccaaaaattaatatcaaggattagcaaaaatcgagtgcagattagcgaagttcaataagtgtccaaagcataagtcacaattgttggctaagacgtgtcctatcgaagcacaacaaggtaaaggtaacaaggaacggtggacaaaaacataaagacccagcagaatggcagttctgtaaatagcgtagatttttcagcactagtagaaatcaaaggcgcatttccaaaggagtaccagcaaaagatgtcaaaatattctgaaatttttatcactgatccaaaatcacaaaatatggaagccccacaaaatttcacttgaaacagagttgtattgtggcctagagaaaatcacaaaggatctctgaaattcctgaaaac

SEQ ID NO: 88926 - DNA, 1630 bp, Zea Mays
cgctgactccaggactgcaagtgtttcgaaagcctttttaacttcactgcaaaacgttgcagtggacaaaaggaaccccctggttgtacccaagattcttctaccttctccatagaaccttccaattttgaccaatagctttcaaagtgaaatcgtctcctgccctgggaatactcatgcagccccaacagaagaggacaatggtctgaaatgaatgttgccgaactttgcaaaacacagtccgggaaataatccccccagtctgaagtgtgaaagactcggtttaaacgaacaagcgtgggacttgctcgttcattggaccaagtaaatttgcgccccatcaatggcagttctgacagatttaactcattaagaatacgacggaatctacccatcatagccctgtcaaggttgctattgttcttgtcttcggcttgatatataagattaaagtccccaccaataatccaaggtccaaaacatgccgagcaaattgtgcgcaactcatttaagaactgcaacttctgatcatctggttgagggccatacaccccagtaaaccaccaaggagtaccagaaatatgatcaacttgaacagatactgaaaaagagtctactctggtctgaagaaccttacaagtgccccccttccaagccaccaatatccccccacgcgtgcccagtgcagggagacaaatgaaatggtcaaactcacttccaagcaaagacatgaccctaaaacgggaaatagaggccttctttgtttcttgcaagcagaccatatctggtcgagcgctaacaattgtctgacgaactgcatctcttccgactttcttattaagacctcttacattccaaatgatgattttggacaaatccatttaaacaagcgagtaacaaccaaaaaaactggaaaaaggagaaaattatgcgcctcctaaataaaatcagtcggggcatctccggcgaggagctgaatggtctccaggttctccacgttttcaggaacagtccaaccaaataaagctaccaaagccttgatgtgggactccgatagtggattggagaagaaacgtccatacttatcatgagcttcagtgctaacaacctcatttccactagcaatacccaaccttctaatgagatcttgctggatatgtctgataggcgcatctttgctggatttagaacccttgcttgccaggcggctgctatgacgaggaacaaaatccggaggcagctgcgcagaccttctcttctgtgggggcggatggggaagaatgcaagagattggttttgtaacactagcaacaaacgattgcaccggtgtgataccttgctgaaccaaagcttgagagttgttgctgtaatctgatctaggatcaaattcatcttgcacctgatgctggctcctgatccgccttctagaataatacttcagtgggggagcctgaccatggaccagctccagcgaccctgcagcctgatgaggcccttcatgcggacttgtagcatccctctgctccagtggtccaacacataagtagggatgaaacctgaacaggcccctcacgcggacatgatgcatctctctgcagaggcgggcccagccgcaccaagtccagaggcc

SEQ ID NO: 88927 - DNA, 339 bp, Zea Mays
attttacctatggatacacggctatgggtagtacccacatgtacatgtgcctgtctaccaaacaggtagaggtttttgtctattaacataccccagggtaaagaaaaatcatttcatacttgtctttgtatcaggtaagacccatcgggtattcaggtgtcgagtactcattatcatctctatcctctactcgtataatatcttggttgaatatggtagatatgctagtgtgtagtgtatacattttccaacccctactcatttctggtgaaggagcatgaatgagaagcagtgaagcacagaagcgtgtgagccttaattttgtttggcagagcttcg

SEQ ID NO: 88928 - DNA, 407 bp, Zea Mays
agctagcgctgcccctcgcagtgactttgtattggtcgaatgtcgaagaccgttgatgcggtcttttttcgatgtagatttttgcgggggatatttcgcttgtatattacatggctccgcctcgttaaaaacctcaccccccgggagaaaaagagtgcgggccagaataaaatcgttttgcaaattacaagggcgagctggccctgaggagtcaaacaaaaaatttgcggagattatcaatgttccaagaatgctccaagtcctcgccggatggcgttgtgagcctgtacgcgctgggggacgcctttgtcttgacgatgaaagggccctcccacttgggctccagcttgccccgggctctgtccgagctgtccggacgagtacgaggtctccttcgctgaattccc

SEQ ID NO: 88929 - DNA, 768 bp, Zea Mays
gcactcggggtgtgcgcgggcgagcgccagtgcgagctctggcgtctgggcatggcgtcgagcacgaggcagcgtagagagaggtcatgttcaagcgcggattggctccaaatctttgagattatggccatgatcccattgagagatctcttcctcggacattcctttgtcgtttgtgtgtggaggcttatgggtttcgctgactggatcaagagatatggaggggtgaagttgggtttgtctcactgctgaactccgagagaagatcccaggtttgacgtgtctagggcacgcatctcgatgccatcttcacacacattgcagaggggttagtttagaacaaaattgtcaatgggggcttaaggatttgagctagggatcaaggtgaacgcgctcaagttctaggtgaaggctgaaattcagaaatctgattttgagattccccctagggagctttcacttggagggcctttttggggtttttaataaactattttggccaaacttttataacaattgttgtagtttagttagtgtatttaaactttaataattggcctaagccatgattccatgtttttcatcgtctttttacccatttcttcctttctacttaagtggctaaattagggttgttctagggtttcaacatttttccctttttgaatacatcatatggtttaggcgtgattcttagataaaatacttagtggaacttttattctcaagttgattgatgtcttttgcccaatttggttcacatgaaat

SEQ ID NO: 88930 - DNA, 386 bp, Zea Mays
tgaggcactaccatgataaagttgtgcggcgccgatcctttgtagtgggagacttggtccttcgccgaattctaacgggggaagggtggcacaagctatcaccactatgggaaggaccgttcatcatatcagaggtcacacgtccgagatcataccggcttactcagatggacaacacagaagtggggaactcgtggaacatagaacacgtcagaaaattctatccttagcgaggcctcaaaattcttgaaggaacattgtactctgtaaatctgaggacttcatcatcaataaagtttttgttttccaaaggcattcagattcttgacttacagctaactttgattgggattggtttgaaatcagcacacctacttgacttaggg

SEQ ID NO: 88931 - DNA, 504 bp, Zea Mays
atgtagcaagtaacgaggggtatgagaattacttaggccctcatctccttggtttccctatgaatactccattcgccccctgaataggacacgcataacaagacatttgagcaccctagcttcctgttttgttgagcattgttgcctcgcttgctactgagtgcttgggcccacatgttagaacctaacatttggcgcccatcatttttgctttgacaaccaatcacacgatggatctcaataagatgaacactaggtcaaactccaccccctggacaaggtacataagacagtctccatcaacaaatccaagaaagctaaggtcacatttgttgatcgatcccaccagcccctgcgaaggcgggcttcatcaccattaacgagccaggcatagagaaattgaaggactagtgaggcgactagagggggtgaatgggagccactaaaaattctcgacttgagagcacgtgacttcgatccaaaaacttaaacctaaaacctgat

SEQ ID NO: 88932 - DNA, 813 bp, Zea Mays
cccttccgaaccggattctgcgccgatattaaacccaagcgcatcgctcccctggccataaaagctccgttcctcgcgccacagaagaaatgggcgggttggagtcctcgtcgtcaatcatgtcgccaccattgatccgtgcctttgggctcgtggtgcacctagggtgcggcctcgaggaatctcctgcacatgtggactctcgccataacgtcagtatacgataaacacccgtggcgctgccataattcctcaccgaagttatggctctgccgcggattgtacttctccgtggatagaaatcctcggcgcatcaatcgtcggtaggtatgtgcctccttgcttcacttttgtatccgcaacgttttgaaccattcgtcatcgagttttggtcaccagtgcgtcgggcggtgtcgctccggtgaactccatgggcagatcccgaccgcgctaccatgcacatatggcgggggagggagatgaagttcgtgattagatagggagataacctttcaatggattggatccgggccatcaatccagatcggacggatgaaaatcgatcgcgtgactttaaaacttggacgttgatctgtgatcctatggctgacgttgcgtaccgattcatggggcttcgatctaatctggatcatcgattgtggatcatacggataggaataacctataccccttcgacgtgcgacttttgtgaaagaacccccaaggtatttacaattcaacccgccatccacccgtagattataaacattacagagaattccaaatattagcagttttaaccctagggttgca

SEQ ID NO: 88933 - DNA, 275 bp, Zea Mays
ccgaaagatgactggctagattgcattgatgcaattagcgatgagttgctatgtgcctacatgagggtcgatgatgatgccatgacagtggccttcggagggcgaggcaagaagagattaaacaaggtttttgatgttattggttttgtgtacccagactattgctatccctcgcgaaagtagggaaagaaaaggaaggctgctgctttggctatctctaccacgcagaaggtgaaaaatgttaaagttttgacccagcggcctagacacattga

SEQ ID NO: 88934 - DNA, 564 bp, Zea Mays
gttatgtgctggtgagcagcgaggaccattggataatggatcaacggtccaggtcacttttgaacgcgatctaatcctacacgtcggtaaatgatcgaacggtggagataggctctagtcaagttggccctatcttctaatcctggccactgataatgcaatctacggttcatgggttgtcttccaccaccgatagctgagcgcagcagatcccgcaccagcggcggccgcccccaacggcggagaccatcaccggtgctcccgtccagtcgagcaccagagctccattttcccctatgatttgtgctacttagagcggaccagcaagcgaaccaacggggtccagaatctcaccagggttcatgctgaggagaccctcaaccatggtgcagcgactcggtgatgaacatttggattgaaggaattccgtggaggctcccagaccagcgctcatgcccagaatgctcacgtagttcggtgcccacggcagcgcgtgggtccgtggccatgccctggccccaattgagtgagttgctggtgcagaagaggttccatccaccaccg

SEQ ID NO: 88935 - DNA, 739 bp, Zea Mays
cgctcgggatttcaaaccatgccaacggatcacataagtgttaccaaagtacatatggtgtttaagtatccattcagaaaatagaattagtttattaaaaacgagagtttaaatctataaatattactctactagtttattttggaactaaatcctttaggaactatacaataagagcaatataaccagataaagacaagcaagaaaaatattttgctagacctcaggagcttttctgtacgttatctctccctcactcgttgttgcaccatcactctacaccccacgccaccatggtgtctttctaaaatcagatattccaatcctcaatctcatatttatacgcacttcagaaccgcaatagaatcaaggatcctatcaatctggtatcaaagatacctggttccaatgttacagctaccattgacaccaagacttcatccccgctgacacaatatgtcgttctgccagtgccgtagggagtgccgccatccgccttcgataccaagaaaaaagccctcttcgaggtcgcatagtagcagcccaacctcaacacgcaataggttcctatcctctcacaactagccaccattgagagccatcaggaatccttattggcggacgccatatcccatgggtttccctacgggatactagggtacagcacgatgttgcttttgaattactttgccaccactgccgtatcacatcatgttgctcgccaacacacgcctcactg

SEQ ID NO: 88936 - DNA, 333 bp, Zea Mays
agatagctgtcgatagcagtgaagcagacccaattgagagtatcaaggttgtgtccgaattcccagatgtgtttccaaaggacttaccgggtatgccaccagagcggaaagttgagtttgccatagagcttcttcctggaacctctcctatctttaagagagcttacagaatatctggaccagagttggttgagcttaagaagcaaattgatgagctgtcagagaaaggttacattcggccaagcaccttgggccgctcctgtcttgtttgtggaaaagaaagatggcaccaagagaatgtgtatcgattatcgagctttgaatgaggtcacg

SEQ ID NO: 88937 - DNA, 305 bp, Zea Mays
gtgagttaggaccttcaacttttttcccttcggcacaggttcgtctggggtggccgaagtagcagctttcctctttttcccttgcccccgcagcgggtaacggtagtcggggtaaacaaagccaatggcatcaaaactctgttcaatctctttttccccgacctccaaaggctgtggatagtgcattatcttctgccttggaatatgctccaagcaattcatcacttgtagcttcgatgcatttcagctagtcatcgtttggttcatcgaatttatccccatacctaaatgtatacttcagccag

SEQ ID NO: 88938 - DNA, 272 bp, Zea Mays
aagagaaatatttagcatagcacgtctaataactaaactggccaaaacgaagttggcagtaagttttacccttcataaattaagctcttgacaaaacagtttgaaggttgcaacagctgcagaagatacataatcctatggtgaaccatggacaataagaataaaaatatcaaaatgacacactttaaaggttattatttgcataggcatttcacattgctattcagagttaattgtttataaagtttttagatcagatctcccatttaagt

SEQ ID NO: 88939 - DNA, 620 bp, Zea Mays
cgagaaggaaattgagatagaggagaagggagatagagccgccacaatggttttgcttgagcatcgtcgtttgagcatcgaaaagtactcgacgagcttcgcccggtccccaggaaggagttcaggacctcacgaggcacaattggttagccgaactcttggaattgctcgtcggagtcggttttggccgcggatccccccgcgttgggggtgggagtttctgcgccatcgtcatcggtaaggtaaatcatcccccttttgccattgtttcctctccgttttgcaccgagaagtgaccatggtggcgcacgggagcgccgattcgtgtatctccgacgagggtgctgccgtgggagtcagcggcgccgctgtctactcctgtcggggtgagggagaggaaggagttcccgtgccattggatcccaaaggtacggttgagatcagttcgcaccgtaccggttcgagtatgagatctgggccgctgatcacgtgctcaacagctttgggcttgtacttcgcgttttaatcaggacatccaatggtcaggattgggtaccagttcactcatggatatgatctaatctgcaccttagatcactgatccaacgactagaatctag

SEQ ID NO: 88940 - DNA, 358 bp, Zea Mays
agtcaagaggacctctccgacacattgcgaccttagatccaggataacactatcgatatcctcgagatccagctccatgatgtgcaggaggagtttgaggaagccaacgaccacctagagatgcaccatcaggatatggaggcaaacgatgcaggaagcgaggaagaggaggctcccgaggaattagagccagctcctagtcaaaatgtgtctccctccgggatgcccccttgacctgcatccagcgttgcttctaccactcagggttgacgggatagtttgacgtattaggatgataagaacccacacgagcttagttggcatcagattttggactaggcttatgggtaatttcccc

SEQ ID NO: 88941 - DNA, 607 bp, Zea Mays
gttcattaggtaaagatacatcgaacggactataaatgaccgttgcgacataagttccatgagaaagtgtctctctcatttgataagaccgatatgtgcgattttggctactaaattataccattggtttaggttgattcctaccaaggctcttcgaaaagagatgtgtagtggcatagtcctcgtaacattcacaactgtttcatgtggatagtgtgtgatgttatagggacatggatattgttctttgaaaggctgcctgcctaccatttatcttcccataaccttatttgcgaccatccttaatatttaatgtgccacaatcaagaacttttttcttaacttttaaaagaccattccaaaagtgagaatcatttggtttcgcctgagagagggttttagtggttagatatttatttctaagcaaatattgccatggcccatctccgttaagcaagatgaagattcatttgcttaacaaacttatatttttattgccaaatctgcaattcttagacctccttggtctttgggtcgacaaaaaatgtttcatttagaaagtatatattttttccttatctttgttttcttgccaaaaaaaatctag

SEQ ID NO: 88942 - DNA, 550 bp, Zea Mays
tcgaaatttcctgcagtaactccaaagaggagaatggacagtgtactagacgctgtcctagagttgacaagggtgccaaatcctggctctgcagaagtgcccagcatgagcgagaaaaatataaaaaaggtcgccgaagctgttacaactcgtgttgtagctgaagttgggccctcatttcctgcagaaacatggcctgttgaaactgaacaaggaccttggaatgccgctctgaacttggaaaaagaaggtgcacctaagaaggttaaatctcctacccccgaagcatctactaaagagctagattttattatacgacatgcttcggggaaacaattatcagaagagcagattgccgaagccaagcaatatgctagggatttgaaatacccaaaaggatccttggtgtataatggcactgatgaagatgaatttctgtactgccttccggacaacaaggagatatctgtctgccgggagatggcaaggaacatagggtttctgaagctcgagcttggcctctccgcaatgtcaaaggatgaccttgttg

SEQ ID NO: 88943 - DNA, 425 bp, Zea Mays
aattgcaatgagcagttgtgtggagcaacatgtgccgtcttaggggagaatgctattgggatatgcaaggttgttggagggatctcctcctgttgttgtgtcccaaaaccatccacatccttcaacaaccaactctagctggttcacagattcatcattgttctcattcaatattgagaatgtcacgttttgttagaaaaaataatatgtattgtaagggacaagatgtgtggcacaatatattacatccatgctaggatggcaaataagtaaaggtttgtattttaaaacaaaatttaatatataacatggtattgcaatatttttattgtgacgatatgcttgaagattccacatcttgccttgttttcaccttatcatcccaattctttatgacccgtgttaatcgtttggatgtgttttcc

SEQ ID NO: 88944 - DNA, 398 bp, Zea Mays
ggtagtttatagaagcttcatgaaggcagggcttcggttccctctggataaattgttggtcgaggtcctgaaaacgtttgagatttaccttcatcagcttactcccgaagctatcatcaagatgagggtctttatatgggccatgaggagctagggattggaactagatgcgaaatatttctgtaacatccatgagctatcttgtgagacgaaggctaccagaaaggaacaatatcacaacaacttcagttgctacaacttcgtgcctcgctctggggtgagctatctagttctgacatttcggaagagatggccgggggtctggatgcaggagtggttctacgtgaaaaatgacctggttgaaagggaagacattaaggggattattcaacgtcata

SEQ ID NO: 88945 - DNA, 705 bp, Zea Mays
tcggctctgataaggcaatagaagagaggagtctctctatacacacttaagtcttagttgtttggtcatttgcactggtaatggatgagtaggatatctagtgatcttgttgaaggtggtagatgaactccaagtgaatgagaccaaggttgtggtatgacttagcgtggtctaaactatggtagtttgctgctaagctagcattgtgtctagtaccttccctaatcttggagtagcaaagacatgagtaaactagagcaaaggtgaagcaaactaaaacatagatggatcctaactctaaagtccattgaggctagagtcacgatggtcattgtcggtgctagtgctagaaactagacatgaggtaccatgagaggcgtactagtgaaatgtagcttgtgctccataaatggaagtggtgattattgtatagcaaggagttgcaattagaactggtccaggcaaagttgtatctactcaaacaatgtgagcatccactcactctagtcctcttggacactaacctgatgatgttgctctatctgaagtgtggcaagtactctacaagagctagatcgattggtgctactaagctagatcctctagcctttgagtcatgtgctctaggtggcatctgtggtactagttggtagtcatcatcgaaactattaatattatcatactaatatgtaacaactcagcaag

SEQ ID NO: 88946 - DNA, 354 bp, Zea Mays
tcgtactcagaaacaatggaagcatagttaccgcaaaatggaagttggatgttagggttgatttggggaatgacaggggtggtggtcccttgcttcttcttcctggtcgccttcagaccttacgggcaagcggggttgagcgcagtcacaaagacgagcaaggatttcaaaaactagatcacggcggaaaaaacagagttagcattcactgccagaaaactgttagcgaggatgtataggcacacactaagtcttgcgcatcgagatggacaaagtaactcaaactataccttcaacaaagcgaagtcagttgggcttatcaaacagaggtgctaaccgaagatttcagtcaga

SEQ ID NO: 88947 - DNA, 467 bp, Zea Mays
atttaagtcattttaagtaaggaaatgattaggaacacatgggtatactatgtttagctgttaggcagaagtagagaaggtttcggtaataaggattagggcaaagaaagatttcattatggatggtggatcttgactcatctggtgatttcgttttgccctttgaagacttgagttggtgcttatccttccttgatgaggttgatcatcttctgtctttaatcttggagttatcatctgagtttatggacaagtagatagatgtggccatgtgggtaggataggttttatgagatagttcaaaatctcgggcatttttaatttatgttgatctatacagattatgtaggtcaaatagtggtatatggccgagttggtctaggacaccaattttaggttaaatcattatcataggagtagggtctagtgtatttcacctgtattaactaatccattaagtaactcac

SEQ ID NO: 88948 - DNA, 883 bp, Zea Mays
aagagacactgcgaattttggtttttattcaagctaactgaagaatcgtgagcaccccgctgtggctccttgcttaatttataggcacggcagtctggtgcttgatccacggccacgaggtgcgccgttagcgcacgacaaccacgtaaggaagaggcacagtgagatagagtggtggcgcgagtgacacggcgacaattaccacgccacgacgatcaccggcgagaagtctccggcaaggcgccgactaggctcgcggaaccgtgaatcagttcgtcattatcttgccgcggtcgatcctatctccaatccatatgatcccatccaaatctacagtaccactgatatttcgtgagccatggatcttcaccgttccactgaaccgatctcctttctttccccctttctcttgattcttattaagaacaagttaacctctattaataagagttattcaccagataatggtcttcatctttactataggatttatggatcaaaactgcctggattctaagatacagtgctcgcaatctggccatatttcactgtgaccatttcgttttggaattcagtttacagtgacattataatcagtgtgactaagttctgacagaacaactttgcatcactggttcttcaatttctgttcaacaacctagaaagatgactgtaccaaaattactcccctacataccagttctaactttgttacaaagagtatagtctacctcccctcggattgagctccacaaggttccaaagttggctgtttaccactgaacctctgaatttctagcacagcacagatctgataacagaaacttgagggggtttttcattaaattcttctgggttttagggttgggtgcttcaatcaaac

SEQ ID NO: 88949 - DNA, 971 bp, Zea Mays
atgggttatttctcgatattcttctaaattataggctaagcttgcctttcaccgtggtaaattcttgaaaacgtctaatgcccgcccacaatagacagagggagcccacaaccacctgtggcaaaacacatgcgtaaataaatcgtaagcctgcctctagctgccttggcatttgtgcgtcctgacaagccccacctacaccctctgccctgagacagccttgtcatgcacgccaaactgctatattaaaggggcctggttgtagaccttgaagtgatacctcagtgcagaaagtcactccgacaagacctcgtgcacccgcctgaacacacgtcagtcacttgtcgcaatcacaactaaatgaatgccccaccatgagccaagttaccctgccaacctcgggatgttgcgactgcactgtggcaacatcaccaatcatagtacgccggtcgagactccctccattataaactatcgttcctccgcatataaataccgatgcccttgccgcggaacctcacagtccagccaccatctcattgtcaccctcacatacgaacaacgcgtgccttactcttcaaaccagaggacaagctctcaccgtcgatttgagccataggtgagcatgccatgatcttcgacctcttcctcccctgaagtcattcttaaactataaaagttatgaccttagcatcaattatagcagctttttccatggccatcatttgcccattgaaaatatgcaaggaaaacctcgcttaaacaattgtcatataataagcataaccaagtttctagaagcttctacaatattcatgataaaccttaatcataagcaagacaactttctaggaacaaccatggataaccatgatgtacatagccttctagaattccctacactaatcatggtaagtcacgaagcctagatatttttggacctctctagaactatggtgatgtgtcatggt

SEQ ID NO: 88950 - DNA, 558 bp, Zea Mays
tcctacgtagttcgagaaaaaaaactcttcatgccatatatgtattttaatacaccatgcttctgttgttttgaaaatatcatagcatgtatacatgtttgttgaatgtctcgctttagatcatcttcagcataatgattttaatgctcatgtagtgttatggtgggtaaaacatatgaaaggcggcccaagcagcccataggccaggccacgccaggagatcaagattagagggataaggataagtttgtcagattagatatcaaaaggagagatagtaggagtttgttagagaataaataggggcggcagcagtttatgtgcgcctgtactggactatataaagtccttagtttgtacctaggaggattagcaaagatcaatctaagaagagtattgctccttgccacattccgtctcagccgtgcgctagcacggctccctctcgccctcaatcctcaaggcctcgccctactacccactcatacaacctcagaagttgagatcattacaatcggtatcatatatgtcaggtcacgatgaggaagatagcacggc

SEQ ID NO: 88951 - DNA, 435 bp, Zea Mays
ggaacacactgcaatgtccctagtcaccatcatcttcatcatcttttggagtcatgaaggagacaccataatgatgtttgtgccactgatcaatgtatgtgaaatgtttatgaattggtatgtcctgggagcgaggtggcaaaggcacaccagaagaagacgactgacgacgcaagatatcatcagtctcccgctggttccaagccaaatcatgcacatctactgaaatgtcacaaaacatcaaaaagatgaagctaggccatgagcaatgcgtgagccaagacccctaactcatgctctccctcaaacactgtgatccataggatgtgaggcggcagcagcacgagaggaatatagatgacgagggggcgcaggagcaggttcatcacaagaataatcttgtctagcagctcccgcagacgtgttaggtggagg

SEQ ID NO: 88952 - DNA, 355 bp, Zea Mays
cgtcatcccttcccagctgacggcgcgcgttagtcgcggtggtgccattacagctcgacgtaagcccgcccagcgaccactaccgccagattgtcgacgctattatctgcggagctcacaacagtcattataggaacgcaacttaccaacgcagaggcgaggatgaggtcggcgagtacgacttgaaggttcgccacgcgatgagagctccgagaaggttcgacgacgagaccccttaatgatcccaccgctgcaccagaaggtttcgtagcgcccgaagaatttccctaacggcctcccgaaccaagcacgatgcgggtacggtgatggcagcgaccgcgacactcgctctctc

SEQ ID NO: 88953 - DNA, 309 bp, Zea Mays
tgaagagtctacggacgcaaagggttttgttttgtagcttacgcgccgccgattcttggtactcggtggatgccagggatccggttttgggtttggcaagtaaagatgacgttgacgtgtcctacggtcacgccggtttctgaagaatattagctgcagtggaatccgtgctttcacgcttcaggggaaggcgatctctcgcgggcatggtaatcccatcctgaggatgattgcagtggcaagcatgccattaccttaaaactagctagtcctttcctttttgccagaagctgaatcgtcctctctgac

SEQ ID NO: 88954 - DNA, 422 bp, Zea Mays
gaacaatctttgacaatcccacgttgcaccacacaaggtgggtctgaagctaccatgttcgagttgatggtgtgataaggggtgccacgtcacctatcgtgcttggatgacctgccacgttggcagaccaaccacatcagtttggtctagacctgagtatgggccacccgacctgaccaatcctacgtgttcaaaaaacctgacccaacctaacccaaccaatgcaacaggtggacacgaactatagttttgtacccataataatccatgggccaggcatgggccataaattttgttccaaactccaacccaatcaaaaacccaacctaaagcaaaaaaaatctgacccaacccaaaaaactaaacatgatgcgttcaacagggagacgtgagtaaaagataggacatgctaaacaactcac

SEQ ID NO: 88955 - DNA, 408 bp, Zea Mays
atgacaaaatcctcatagataaagaattacaggggcttgaagtcggcctgataacactgcttttcagagttaagcatatgggtacccttggctcttttgcaatttatcccaaattgctccacaaaacatggaaattcccaaacatgaaagttgcttaacttttgttactctatcactttgatatatacacttttgtccaaaagtgcatagaaattgaaatcaccccatagagcactaattagggttttagggtttcaattagggtttttgagtgtcctaggattcaaatgacacttaagctctctaagtttaagctttcttaaacatttctactaacttttaagatcatcctatagttctcatctcacaactccacatgcttttaatccttgggaaaataccctatcc

SEQ ID NO: 88956 - DNA, 682 bp, Zea Mays
ggttgtttatcctttactaacttttcttatattaagtcagatccttagtaccctggtattcaaactgagatgtaagagcatcagccaagaagcttgatcaagagccgcatcagctggaccgcgtccttcgacattagtaaaaagaaataaatgcattatttgtactatatttcccaaataacttgcatatttacagttcacaccaacaactaataagaaaggcaaagatccaatatatacatttttatcacagcccgaaaggtcacgttctctaacacaatcccaatcatatacatttctttttaagtgaacattcacttgatatggtctatttcctaaataccacaatgatatgattcaagtttttaaattcatttacttaaatgatagcaatgctactttctgtacatatgtttctttgagatacattttcatcttcatgtacaattattattactacctttcaaaacctacttacatacttatccaataggcaatacatcttacaattcgtgctgctacacttaggtattgatgtgctttgtcttagtttcctaacaaatacctatcaaccctcttttatctttgatgtaccctacaaatttaatgtttctatattttatttatgaatctgacatcatattatatcttaatcatgtgtatgtgcacgtgcgtgtgtttc

SEQ ID NO: 88957 - DNA, 375 bp, Zea Mays
gattgtgctaagacctctatagttagtcttgcaaatggcaaatatgctcttgaataaaacatatcaagtttgaaagttcaaaaccaagaactataagtgcaatttgctaattacaagaactctatcacttcatctttagaagtgaattcttttcctatcccctccaacactagcacatgtaaacattgtttaaaatatcatgctagttgttgtttgactaaccttgcaaggaaagatagctctaaggttgaagtcaaacaaaccttaaagaagtgctctaacaatgatgggttgagtaaagttgagcccaagtacaagcccttaaggaacaacaattggaagaagtgacttgggtacaacactttcaaggtgaac

SEQ ID NO: 88958 - DNA, 671 bp, Zea Mays
cgattctacgcctcaactaaaaattatccaactagattacataaaggaaacttttatttatactaacaaatcaccccctaatctagttgaaccggagccactcccatctttgtcctcagctccacgaatttgactctacccaatggcttggtcagtatatctgcaagctggtgatcagtccccacatggtctacatccaccttgccttgtttaatgcaatcaagaatataatgatagcgagtgtcgatgtgtttgctcctttcatgatacactgggctcttgcttagttctattgcagacatattgtcgatgagtagactaaacttctacacctcctcttttgtaatatctgctagtagcatactcagccagacccactaacacacaccaagtgctgctgcaatgtattctgcttcacaagatgacagagcaaccactctttgtttttgagatgaccaagttattggattcatacccaaatagaacacataccagaggtacttttcctatgaacaagatcaccggagcagtcactatcagtgtatcctaatagagacaaaccacctcctcctccttttttgaaatttactccaaaattgattgttctagctatatacctcacagtccttttcacggcactctagttctctttgtttggagtctccatgaac

SEQ ID NO: 88959 - DNA, 578 bp, Zea Mays
tccaaaggtggctgaagcaagaaggttgaaggaagaggctgaaaaaagggcaatgattcatggtgacaagaaagaagaggatccactaatcacaaaaagtgagatgagaaatgagatgaggagtatgattcagtaactcatggggctaggtatgattggccccaagactttgactatctcatccgaattaaagttggaactcgttccaaatgctgtgaagctagaagggagcaagaattacttgagttggtctaggagagtgcgagtgctcctaggaggttaaggaatggagcactatttggaagagggttgtgttgaacctgttgataggctcagctctgaatggagggtttggtataccaccaactcgattattgtggcgtggttgttagcatccatgtattcgtctgtaagtaagatggttgaagccatgcgcactgctgcacaaatttggaagaccttgagcaatatgtattcaagaaaggggaatgtaatgatgatgatggaaatccaaagtaaggcagatgtagtgaaacagatagggagaccagtggaacaatatgctagtgaacttcagt

SEQ ID NO: 88960 - DNA, 1130 bp, Zea Mays
ctcaggaacaagcagagggtctcgtcgctttgacgcttgatgaacttgatgtcccaaggctgcactgctttttcaaaaagggattgaaagttcatgacaaagtggcggctgaagtcgtcctagtcgtcgatgcgatggcgaggtagatgtcgaatccattgtagcacatcttgccctaggacaatgggcatgtatgctgtcacaacgtcctctatcgccccagcggcctaggtggcggtcgtgtatacgacaggccagtgcgccgggtcctgcttgggttcatacttgtcaacgttggagaccttaaagtttggtgaccattgaatcgctcagagctaggggtaagggctgagacttcgcacgtcccccggtcctcttggcaatggtcatgattacggtcccgaggaggtgagtgatgttgtgcatcatgttgcctttcccgggctaaccgacatggagccgggctattcattgaggctgctgccgacttgggtcttggtggcatgaatacgcgccggtgcaccatgatctcggtcgtactcttctcgctgcctcatctcctcctcatgccggcgatcgagtgaagcattgatatttctccatgcgtctcattgactgttgatggcgtggcgtagatcattcgatggatgggcgaggggaagaagactgttcgccacttggttgaggatctgtcgatagcctttcgcgtctagggggcacggtaaaccattggcgatttgagccaggactccccaacttcactcggtgtattcagtgctcgagcgaagtgagggaacgggttctgggggagaagcagtttctagcgtcggagcatgtcatcctgctcaacttgctctcgttcgcgttcctgggtgtggcgactatcacgacaatgggagttgcggtgttcgcggagcgctttgtcgtttgtggtttcccctacttcagaggcttcatcccaggagacgggttgtgcaggatcccattccctagcttcatggtgacaccgtatgttgcggcgcctgttccggcgtcggcatccgtcacgctgggggggggctcttcctctagtatggtgggctcgtcgtcggaaataggcacgtcctccaccctttcctaaatgaagagga

SEQ ID NO: 88961 - DNA, 576 bp, Zea Mays
gacacctgccaagtcatcgctcgcaaggcattgaggaccctgtgtcagatctatgaagaagaagtggccgacaccccgcttagattctttccgccctttcagagaaaccgtcccgtctggatggccaggatgcatgcattggaagtgcagcagttgcttgaggacgaccccacagtcgtgtacctcactgcatacctgctcacccttgatgcacagtatgatttcttggctcggcaccaccgtcagatgattgcccgagcagaagatgcagagaagcgcaaccgtcagctgcatgtggatctcaccacagctcaagcccgtgcaactgccttggagagtcgtgaagtcattgcttttgaagccctgaagcaagccagggatgagcacgtccagaagttgatggaggcctacttggtaacccataaccaacgtagagccatgcggatccaagagctcgcttcatccaaccctgttcaacccatcagagctgaagacccccagattcttgaaggtcacccggtctctatcagaggagagaagaaggcttgggaactcccggaaggaaccatagtcttg

SEQ ID NO: 88962 - DNA, 313 bp, Zea Mays
gaagcgggggtcgttgtcgctgttgtcatgggtcgtcggcaagccgcttggagtttattatcccgcaggccttccggtgtggaagttgttcgtgcctgcgggaatgaaaccggagtccagtttgtaaggagatataccgggtttttgccggagcaaaatgtaaccgcttcaagtacttagtcatttgtcgtaggtcgggagaaccaccgagggttctgccgacgtctaagcctgtgtagcagagttaccccaggtgtatatgtttgttctttgtggctgtcgaggcctgaacatttgggtattcgagaacgaa

SEQ ID NO: 88963 - DNA, 508 bp, Zea Mays
aaagaatattaatatgagactaatgcaactggaatgaatcagatcagagctaaactatgagaattatgaattaaacaagtttgagttgcatttattattaattttaatgccaaaataaacgcgagggacttctctgcaaattcagaggactgatctgtaatttcaaattttgtttccgaggttactgctgtgaaaaacaggacggcgggttagttattaaaaagtctagggtcccatttgtaagtctggctcggcaaaggggtatcgtctattatggaccgctcgattatatttgaatggccattgtctagatatgaagcggtattcggcgatgtccgcacgatcagaaatcgacggctcgcgagatcaacggtcacagtttaatgaaacacagatcaaatccggaccatgcgttggacgatcaacggtccagaatcaaccatggaacgatctacttctagttcgatgaagatcctacggtgactgtgtgtcttctacctcatgctgc

SEQ ID NO: 88964 - DNA, 722 bp, Zea Mays
tcttctgtttctttgagtgttgttttaggtttagcgctgtcagcgactgtatttccgtttcacatcatggttctagcgtactgaaacaaatacaaagctgtcaaagaagacgtctatatttttgccttcacctttgttcaaatcacgagtgtttgaatagactgtgaagccgtatgtattctcttttccagaattattttatttgctatgggactagatgcttactcaattgatatagatgggcctttgatcaccacctttcctgccttgaactctgaacccaaattattctcaagtagatgctagggttcttgtttttcttcttttgcttccaaaaaaaaaaaccgcaatggagagtattccttcacagaatcacagttcacattcgctattcagttgccatgggaatgaaatttgaggaccgagggagcaattctgttgaaaatgctacgaaataatggtggaacaaaattttaagaatccaaattagcatatgcagctgtcatgcataggtcttgctgggggaacccacgagaaaggttctagaaatggcttgtagagttacagatcacagacacggacacggcaaccaatccttctctgtggtctctactcgccttctcctccatatctttttgataagactactatgtattaatgttatgaagccgtaagatgcatgatatcgagaaccatatctacttttagagaacgagaattct

SEQ ID NO: 88965 - DNA, 530 bp, Zea Mays
cacgtcgataatcggttggatgggcttgtgcaggtgatggacctctagttaaatgttattcatcgcctagggtgattgatcccatggtccataaactagatcagaagtctaattagaccagcccatcaagacaccaaccacaccagaaaattagctggaccagggcgcaccagccaaccagaagttaaaacgggccctcgtgcacttaatggggctgatccacctgccgctcgtggaacgaacaacaaattttcatccattcaaggtttacttcagccatttaaggtttacttcaacttacaacattaacaattatttagttattcaaggtttactttagtcattcatcgtttttaaaattttacaaggaagatatattcaataattcaaggtttacttcagtcattcaagaataaacattaagcaattcaaggtgctgaatcgaggacaggaggcggctactatggtggacaagtggaggcacgacggtgaggaattgtagacgttgtgtggcataggtcagcatagtg

SEQ ID NO: 88966 - DNA, 403 bp, Zea Mays
aggaagaattaattcatctgtgttgccttatttttgacttccctcaggaaccaaaagcaagtgaccaacattggcgcccaactccgatgaactcacaacaacatccacatctccaccatgtctccaaagtacttacctcatggttctatccttactcccatagattagaaccaggatgaagaaacacttctccatgaggcataaacataaaagagaaaagttatcgacccttcgccataggatgacctcgatcgggaaattcagaatctcgaagctatccagcaacatgttgataagcgcaaagaaaagatgcttcatatttctcaactgcaaaagcaaattgacaaagtgttggagcaattgtgtaatataacgcaacaggttgagcaaccataagaaccag

SEQ ID NO: 88967 - DNA, 356 bp, Zea Mays
taagattataagctcgtaacccactgagcatcacgaccacctagctcaccctcttgttgcgatgagagttctagcctattggtcctaacccattattctctgtgcccatttaatagagtgaattcaatcctaggatagttggagacctctcaacccttcatcccactttcccttggaatccttcggttgagtttattaagggttgagtttattctaaatgttactttattcattttgtagagcaggagagaagagaggttatgatagtcatctagaggaggtgaataggtgaaacctaaaattttacaacttaaacagaaactttgaatgccagattaaggttagctcaaaatcta

SEQ ID NO: 88968 - DNA, 491 bp, Zea Mays
acaaaattcaaattttacttttgtattttgggttctaattcctagttcatgttcttccaggaaatttatgagaaatgcatgacacatggttccagtaggtatgttaaatgtttgtattctaatttctaactcctagcattttgttttctgctactgtttgcaatattataggtacgaagttatatagacccttgatatgtcaggggttatatagacttctaaaaatgatacatcagcaaaaccaccttcaaaaccgcttcgagggttattttagagggttttaaaaagttaagtggtcagaatacatggttttgtaggtggagggtgaagtagacaaccatccatagttgagggggttaagtgaattttttcctcgatataattatataagagagaaagatagtagaaaagtagttgtagttgttttgaaattgttcaacggtcctaatgaaaaattgtcttttgtttttgccatactttgagaacttttg

SEQ ID NO: 88969 - DNA, 568 bp, Zea Mays
cggcggcgaccgtccgccccacgccgtggccggcccccttcgcgacccaatcaacaggtaatacccttcccaattgattcatcgcatcgtcccgtatgtatttccatcgtctgtgcgcgctttagggcatcgggtaggggacgggaccctgtaaatccgccgccgctacggtagaccggccgcgccgccgtgccatatgggcgggggaaggtgatgatggttgtgccattggatttttgtccaacggtggagattagacagggagataactttttcggtggattggatccggaccatccatccagatcggacgggtgaaaagcaatcacatgactttaaaatcgggggcgtcgatttgtgatcggacgatctagagcgcttgctggtttgtaatggttaagatctaatctgggccatccgcgcctgatcgggcggccgggatcaaaccgtaccccttcgcgggtccgttttgcataagagaccctggaccttttggaaatagaacccgccgtcctggcggctgtgatgtgagtcttaggtagaactgcaccgaggcccctgcattttc

SEQ ID NO: 88970 - DNA, 407 bp, Zea Mays
gtgagatccacatggagctgacggttgagcttctctgcatcttctgctcgggcaatcatctaacggtggtgccgagccaagaaatcatactgagcatctagggtgagcaggtatgcagtgaggtacacgactgaggggtcgtccttaagaccttgctgccctacccatgcacacatcctggccatccaaacgggacggtttctctgaaagggcggaaagaatctgagcggggtgtcggccacttcttcttcatagatctgacataggaccctcaatgccttgcgggcgacgacttggcaggtgtctttgaatctgtgcccagcagcagtgacgctccattccacatggtgcggactagatccaatgtatacagtcacgacacacttctctgtaccatgctcgacgaa

SEQ ID NO: 88971 - DNA, 491 bp, Zea Mays
gttcgtacgtgaagatctagttctgcctgaagctgacaagttgagcaaaagaatttttagaactggcgcggactgtttggaaccaagggcagaccgttcacatatcgtcaccaaggaaagacaatcgttggtctgtctgatgtatccgttaagatgtcagaaccgtccgtttgagggtcgcggaccgtccggaccttagctacaaaccgtccaccggtgtaatttctgaaagatgcgccctacagagactcgtacgttctgaggagaggataacataattaaggtaccgttgattcatttcacaaggttacaacataagctcacaaaggatggagaagagacaacgaggttacaacagagtggtagctgtcaacttgacctaaactatcgactgagatgacgtgctgcacaccaacaggcatccaaactaccataatgaatatttgcatccaccgccccgtatgtgatggaagtttgcttacatctaaaaa

SEQ ID NO: 88972 - DNA, 372 bp, Zea Mays
agagtctgtacatcctagaaagctcctcaacctgcaataatagagggatgcagtgcatattcaatatcgttaggaagtcatgcattgattagataataataataaggttttcaatccaaccttatcatcacgaagcaaagtagaacatccagaatgccccttctctaataacagggttgtataatgagcaagcaatctatctttgcactttctgttgaaatcaaggttataacaatgtaagggccatatggggaaatttgtcgagcacaattcaagtaatacatagtaacatcatggattcaaaactaatatatttgttacagataaaatattgattgagaaatactacaaaactggaaaaggaaagttttc

SEQ ID NO: 88973 - DNA, 284 bp, Zea Mays
tttttgttcatattccatgtttggagactgagatagctttatctcgtaggtgtccggtagtgaactcttctcagggcagttacgaaggtaatgatcttcacgtccacatagatagcaagcttctcttgaagttatttcttgactttttccatgtttccatttttgtttcttggacctgatgcgacgacgaggctgaaactgtgtgcaggtgatagtccatccatcaatgtaacactcatgtgcttctttttggagctgggcatccttgtgatgtttcctttttg

SEQ ID NO: 88974 - DNA, 487 bp, Zea Mays
gtcgagcgaggtggagccgaaaggggggtcgggtggatcgaggggaagccactcgagtggatttcacacatgatctggactgaccctttgtgccacattaactactcctggcgttgagccacagagggtgagtcggtccacttaccactcataacctatggacccctaggcatgcgacccactcatgatctataaagccgaagcctgagtgcgctagccacctccacgccccacaacacgacgagcgtgccgagacccaggctacgacagcaaggggtcgcacggcatagaggcaacaatgatgactctgggacccttcaccgcccacactacatgtcataaaaagtacgaccagggaagcccagacgaccagggcatgcatggataaacacgaccttaccagggtaagacgtcctattttaccacagcgcagtagctccttccttgggaagctaccgatagctgaccccaccttggcctataaaag

SEQ ID NO: 88975 - DNA, 870 bp, Zea Mays
tggctatctcatatcctttatggcggacgacacgggtggcatgggcctcgagtgccatcattcgggctatgtcgtcccctagcctttgtagcctagggctcagcgtggttcatcgtgttgtgccctgctagaggtctgcgtactcaggcctagtcctagtaggctatgagtgcatcttaagttggtgggagcgcaagccataaatgcattgtagtccaaggggttcgtaggtcatgagtgctctacggcctgaggggctcgtaggctatgagtgggaggcaaactagcgcctccgttgtggctcggtaccagtgtagctaatgtggtcggtcatttatgacaggttggtctcaggccaagagagggatcactcgagtgctttccctttgaaatgctcacccccttgttagacactgccacgcccgaccccgggcttaatgctgcggggatcatctgggggcaagttcctctagggtagacgctacatgtctcctccagctgaccgatgggccccaattgccagtggctttccccagacacatttgctgatagatgggccctagggttcatgaatcttatcctcgatagtagcccccgagcccctagggggagtttctccctctagagctgatgaagggtttggtggcgcttgtcttttcgcctttctgagtaatcatggtgtttaatctcccttgggactcaggtcgcttccaaggcggcctaccgcccctcgtggtggagtcgagcgcttttgccccctttataagctctcggtggtcgtctgcatgatggtcaccctcgaccccctcttctttggtctcctccatgaacagacgtcaattgggtcggtcgatggacctcggttcgtcg

SEQ ID NO: 88976 - DNA, 644 bp, Zea Mays
agccggttggccactttgtacggtagctgaggactggtgcctttgtatccttgcgatacgcaaaattgtaacaaccaaaattttcgtcaagaccatctgccctggcctttgtctgatagtgcaactcgtgcacgcggtagaaagcttcggcatctgggttcatcccttggcttcgaagggcccagataaagacgctgagcctaacgatagcgttaggagtcatctgatgaaggtatatttcgaaatttttttaggacttcccctatcatctcattcatgggaaatcgcagccccgctctgaagaagctcttgaaaaccactacttcatcattcttcagcgctggggtagtctcttctccagcaaatcggacaagtttactttcagcttctccaaaatagcccaacttcatcatcatgggcatgtcgtcttcggacacagtagatttctcaaaatctaaatgactgggctttgttgggatcaaaatactgtaatcttcttcaccttcatcaacatcttcttgaacaacagtctgttcagcttcggcatcatgagtacctccatcaatagctccctctgtcacaactagacctgatcgttccatgacttctgaaattggtgctatctcagtgacctcggtttcttc

SEQ ID NO: 88977 - DNA, 404 bp, Zea Mays
cgagggtatgtgcaactgtcgtgccatcatggtgagacatcgaagatctggcgaaatcaaaggggtcaagggggatgccattctggttgcatgggatcgagggagacccctatgcttaggttggtgaagccgtcggagtccaatttattcacgagtctgctttgggtgcatgagtgggcctcactaaaacggacgcccaagccgcatatggactctattttgggcgttattgatattgttggaaagctaaggagataacctttccaatacaactaatcccacgtcaaaatatgctcggatctaatggaaatcatcgtagcaaaatgacatccagaaactgccagaaattagcgatgcctgtttttgagcctgaagcttttatacaccctagggttcattggcca

SEQ ID NO: 88978 - DNA, 540 bp, Zea Mays
ggaggacatgtccaagctcgccagcctcattcagctatctcttgccgggaaccaggtcagtggatccataccagcgtccatcagagcccttgagaggcttaactacctcaatctcagcggcaaccagataacaggagcgatcccggcagcggccattggattgctccccgtactcagcgtgcttgacctctcaaacaacaagctcgacggcgagataccagcggatttcaacgatctccatctctctcacctgaacctctcgttcaatcagctcgtcggagaagtgccaaccacgctagagagccccgtgtttgacgccgccttcttgggcaaccctggcctctgcgccagacagggctccggcatgctcctccagacatgcccccatggaggaggtcatggctccgcttccgccagaatgatcgtcgtcgtcctaatcgcgacagtttccggcgtttctgccatcggcttcgtcgctgtcgtgggatggttcgtcctccgccgcaaccgcaagagcgactcgtggaagatgataccatt

SEQ ID NO: 88979 - DNA, 2477 bp, Zea Mays
cacaagccagtcagctgagcgcgaccagaagcaagctagaacgacggttgcgtggatgccaaggcgtgtggactagatcctacgcttgcagagggtgtgacatgctcctgaggactcgctgacttccatataggtcggagccagtttcagatcggcaacgaacatgggcttggtgcatgtaactctgttctttcgttggcataaggcgaaaggacaacccgtatgaaaacgacggacacatctgagtagatatagtcatcttctagctctagaactctctgtaaccaagaactctaggcaatacaactccataaacacacatgacgtagagtgtcacgcgcttgagtggctcgaacctgtataattctctgcataccatcgtgcccacacgaaccatcgagctgcaattgactcgccgccctcccaaaaccactatgtggtacatcccatagtgtgccgtcagaatcaaacactgacaactgacgcgccatgtaggggtcaagcgacgttgatctaggacagctccatggcgctgcaatcgtcttcaacatcatcgtcaacttcaccgtcggggtggttttccattttggatccctctcctgcatcgcggaccataatggcgccctacaccacgtggcgcactcggggaaggaggccccatggtatcgcactaccacctcgaccgagaagaagcccccgccaagacctagggctgccccagggacaatcacggtcaaaccctgcttggtcctgacacgagctgcaccagtgcacgctcgggctcagggaccctagttcatctacaagtcatgcatggccaccgttgcgtcggctggacacagaactgcaccagtacctttgtctcggtagtgcgctgtagcaggcccaacatgcaaactttgttatccacctccctgactcgggactagacttagatcagtcagaggaggaaaaagggtcgagggccccaccatcttcaagagtcaaaaaacacgactgactgacgccatggccacttggcccgcaagtgcggtcatcaagctcgcggagccagagcctcccctatactacccttacgccctcttcaaggggggagtagacaacgatcctttctctgacgatgagcccagcatatagggggaggagcctccacagcgtggggcacgtctccgtcggaatcgacaccacaacatctagtgtcaccacaccgccagggagcaagacccaacccagcctattcccaagatgaggcattcgaggtcgatgagtcccctaatgagaaggtattacacatgcaaaggaatgcccgccgctcaccgtgtcactcaggagcacaagcacgagatggccgaacgcactgttaggctcccgcatgatcctatgcctgttctacacaatctgcagcttgcatttgctcaggccatgcagactccgagctaggtcggcggtgtgctggctcggattgcgaatgacttagctcgcatgcccaacactaagggttaccaacagctcgtcactcgaacaacaaatcatcttcttccactagcccatcatgaggataacattcgccacctcatcaatatctgttgtgatgcacgaagcaaaattgaggcatcacacatccgatggcatgtagaagagctgaggcaccaagaggggtacgactagggccactgtgccctgcaacgaggagccagggtccgtgtagactctgccactacctcgaaaaatagtccgacaccacgtcgcacagctcgtgagcggctgcatgatctgtgatatcagttgccgccaaaggattgatgtcacgaccatacccggggcgagcacctggaagctcggggcatttttgtggtttcctccttcaccctccgacttcgtgcagtccagtggtcacctatcttcaaggtctctaacagcgaccaaatacaaggccaagcaagacctaggtggctgtatggccatttaagctatggttgcctaggctgccggggtgatggagcacgtcgtgatggcatatctcccgatcgtgctgaggcaaggcgcgctccagtggctttgttatcttcattgccactgcgtcgacaactgagccgacttctgcaattggttcatcgctaatttctaaccactctccgacctacatacgcagtcgtgggacctcaaacctataagatgcaagaacaatgagtccctttgcttgttcctcatgtatttctaatcgatgaggaatcgcatccccgacatccgtgaatcggctgtgatcgaggacttctatctagggtgtcgtgatgaggtcttcgtatgagttatacttcaaaaggctctgatgacctccgaagaaatttttcatgatgccgtcacctacatcaccaccaacgagtgggcctgtgacctcattaaccagccgagacccgggtgcccaaagaaggaagggaacccacaacaagacaagtgctgagacaagaggtcaagga

SEQ ID NO: 88980 - DNA, 308 bp, Zea Mays
acggtcggccaccattggcggggtctgtaactcgccccacccgcggactccgcgctcctataaaatctacccgaattgcgccgccgtcacctgggttgatgccgtgagggaaagaaagggtgaaacacctcgtgttgaaccacatcttcggcgtcgctccgaccggcagtcaggggcagggtgcttcgtcgtggcatggcacgagtgtctgtagcaccggtcgatggtaggcggcttcggtgatcgcggaatttctcaccagcgcaatatttctccgtgggaccacatcgcgtcgtgaacaacaccgc

SEQ ID NO: 88981 - DNA, 738 bp, Zea Mays
aatatgatacataggtagcaatcaaaagttatgcatcttttattcattgaatatatcttcctagagtacaaccactagcttgtcattttgagttcatgacattcctagaactaggtgtagaacttacgaaggtgctcaatattccataaatttcaaattggagttccatccatttgagacaacatgtaggaccctagatgggtgacttctatgacattgtatggcccttcttagggaggtgataggttgtgacgtccttctcctgagagcaaactctggagtaccaggtctccaatggaaaaatctctaaaacgtacctcattgtcatggtaacatcacagagtttgttggtatcgtgtaaactgaattaatgcaccaagtcgaccttaatgcatccagtcgagtaacttctgcttctgctatgcttttgaacatcaaccttggtgctccgaacactaaatctataggtaacactacttctgacccatataccatgaagaatggtgtgttgccttgcagtgcttgagttggttgagttctaaggctctagataatgtatggaagctctttgatccatttcccagcaagcttttcatttttatcaaaaactttttccttaatgcatccaggatcttaccattagcacgttctacctagatgttggctcccggatgtgccactgaggaatacttgagaagtatacccttctactcatagaaatcaaagagttctagctct

SEQ ID NO: 88982 - DNA, 642 bp, Zea Mays
aattcgtggtccttttggattcaagtagttcacttaagcgttaagaggttttgaggtgatgaacattgcttatgattaattgggttttggtaaatacttacacttagtaattagatgctgctaattaaagtgtgaccaactaaaatgttaaccgtataaacccttagccttggaaaaacaacatcgatgacaatcgaagtaagtgatcctctaaccatgagcaagatgaaagcaatctgtatctgtaccgcagtacggacatgctaatctaccatgtgtacagcaaccaaaaaaataaatagacgctgggaagtcatgcaccgaccacaaatatgcgactcgaaggttgaatttcggccttttgaaaacatcatatgctttaactcctttccaaagctccttcaactcttcagtcaagagttgtaacatgacattgagtttctttccaggatggtccaggccaggtatgatcaagcaaagaaacataaattcatacttcatacaaagagaaagtggaaagttgtatgaaatagcaaagacatgccaacatgagtatgattatgccatttcaccagaaggtgtgaagccatcgtgagcccgattcgaacatttctcagtttagcggcaaagtttggatcaaac

SEQ ID NO: 88983 - DNA, 594 bp, Zea Mays
gcttcgcctcctacctgctatctcttggcttcatcaacaccaagactgacgccttgttgttcatttaccaccacgagggcaacaccatctacctactcttgtacgtggatgacattgtcctcacatcatcctccatggcccttcttcggcactattgcagctcttcagaaggagtacatgttggatattctcaattgagctggtatggccgactgcaagtcatgcaccaccctagttgacaccagtccgaaggtctcagctaacactggtaccccccttggcgcacaggatgtttccgatttccgcagtctggcaggtgctttgcagtatctgatcttcactcgacctgacctcacatatgttgtccaacagatttgccttcacatgcatgatccttgagaatcccatttggcagcactaaagcgcattctttgttatgttcgaggcacctttcagttggggttgatgatccgtccctgccagcgccaagtgttggtggtgtattctgatgcagagtgggctggatgtcccgacacccgtagatatacttcaggctatgcagtatttctaggtgacaacctcatctcatggtct

SEQ ID NO: 88984 - DNA, 552 bp, Zea Mays
gattccaagtaaaagggaagctagctcctcgattcgttggcccctatcctatcatcggcagaatagggcccgcagcctaccgccttcaattaccagagtccatgtcagatatccacaatgtgtttcatgtatctcaactccgcaaatgcttgaaagtaccagagagtcacattgtagaagagacaattcagattcagaaggatctgcagtaccgagaaaagccagtgaagattctcgattcagccatccgaaagacctgaaattcagaagtaaggctctataaagttcagtggagcaaggagaagaagagcctacctgggagagtgaggactctttgaggaaggaatacccttacgttttctcgaacccagtctgaatctcgagggcgagattcttttaagtggggtaggtttggaacatcccaatttttatttctgaggttagaaccctaaactcctaacccccctaattatctcctaagaccccatgaaatattatattcatcatatgcatacaccataacttcttgtagaacttcacatagagtatttt

SEQ ID NO: 88985 - DNA, 1522 bp, Zea Mays
cggaattagcttgatttcaaaagtcacatcgcgctctggtggaatgcctggtagctccactggaaacacgtcggcataatcacacaccacacagatgtcctgcacccgcaaggcagcctcactatccaccatcatggaaaaaaggattcccgacttccttgaccgacgatccggaagtaattgggacaacaaggaaagagtgtactttggagagcttcccaagaataccacctccctacccgatggcgcctgcaataacactgtctgcaaaaaacaggatataactgcgcgatattgagttaaccaatccatacccaaaataacatcaaatgactcctgggaaatcaccacgagattagccgaaaatatcttatcagcaaggacgatggaacaactcgggcagactgaacaactacttatggagcccttagcagaactaaccacaatttggtgacccatcctctgcaccgaaagaccagcacacgacacaaaattctctgaaacgaacgaaaaactagcgccagagtcaaaaagagcatgggcatcaaacaaatcaactgagactgtacctgtcaccacgtctccctgatctctgccatccacagagggtagcacatatgctccagaaacacccgcagaagaggaagctccaagagtgaaattaacagaagaacccaaaggagtcgcaggatgaggcagacgaggagctccaaactgaggtggtataggagcgatcggtgcaggagtaggcatggccaacaactgagggaaacctggcataggcaagaactgaggagtcccaggcatataaaactgatgctgaggggcggtagagaaaattttttctcagcagttgccatcatgttgacagtgccctgcgaagaggaagaagtcactagctcccattaaagtttcccattgggattcctcctacacaccacatccctgtgatcctggctgcagatacagcacctgccactccactgacactcggcacgacgatgcgcttcaccacaacggaaacacaccaaccccaaccaatgcttaggaatagctcgatacctctgagtactccctcctaaagtacccaattcagaggacttgccacgataggggtcgtggcgctggtgttgggactttcccttcttgtgggctggagccccagtgtagcccttcctcgcatcatggccacatggctgatccacacctgaagacttctgagattcaattgtgtactgaggctgcatctccacgcccaatgcctgctccaccatagttcgaaaatctactagtggaaaggcgcccagagcatgcctaatggagggtttcaggccctgatagaattggcttgccttctccaattcattgtaggccacatgaagaacaaagcggaccatcttgttaaagcccacttcatattttgtaaccgacttcttctcctgcttgtaagactacaaatctatcttcatcttctccaggaaagtgactgggtaaaatctcctttcaaattgcctgataaaaa

SEQ ID NO: 88986 - DNA, 622 bp, Zea Mays
ttccactttacagagtacatcatcatcatcccagcagttttgaggtacagctagggataaaactttctgaggtgttctatgttccaggagttcccaacttctgtgccatccatctgagtgaggcgatatgatccgggccgagtgacttctactaccacgaagggtccttcccataagggtaataacttgtgtcgtccttctcccgttagaattcggcggaggacgagctcccctactgagaaggattgttgtcgcacagtcttatcgtgatagcgccttagagtttgctcgtaccttgctgattggattactgcgtttaaccgttcttcctcgagtacgtctatgtcctccagcctggtagcctcagcttctgctatactttcaaagatcagccttggcgccccaaacttgagatcagcgggcagcaccgcctccgtcccatagaccatgaagaaaggagtgtttccatgcagagctcggctaggttgggttcttaggctccaaacaacatagggtaattcccttatccactttcctgcgaatttttcattcttatcgaaaatctttttcctgagtgcatccaatatcatcccgttggctcgctcaacttgcccgttggctc

SEQ ID NO: 88987 - DNA, 327 bp, Zea Mays
gtcccttccaacaaggcaaggcagaagcaactgcttcgcttgcagatctcggcggcggttgaggcaaacatgcgtggagaatctttgcagcttattaggctgaccagcttttgaggattctgctagagatattagtatacgctgcactggcacagcaaatccctgatggagagatccttggatgatcgatcacgcacgcgcgctgtgctggttggaccatctgaatgaattatttgctgagaagaagcagaacgctacacacgatctgcagtgaaactcgctcgcagctggtctggcgtggatggtcacagtcacagctggtctttt

SEQ ID NO: 88988 - DNA, 477 bp, Zea Mays
aatagcaaacatattttgggttgatgccaaaatgattactgactttgcacattttggtgatgttatcagctttgacactacttttggaacaaacaaggaaagcagaccttttggtgtatttgttgggttcaatcagttcagggaaactgtggtttttggtgctgttctcatgtacgatgagacatttgagtctttcaagtggttatttgagacctttctaaaagcgcataatgacaagcaacctaaaacaatctatactgatcaagatgctgcaatggcaaaagcagttaaggaagtatttttagaagcatggcatggtttgtgcacttttcatattatgcagaatgctgtcaaacatctatttgaagctggcgatgaagaatctagtacttctcccaaacagacaatagaagaaaatgacaaagaaccaagtattcttgcatattttagtgcatgtatgtttgagtacgaagatga

SEQ ID NO: 88989 - DNA, 488 bp, Zea Mays
agatcggctgctcactgatctttgggggcgtggttactatgcctcaaggaagcaccaaaaactcgaatgatgcaagatgatcgacacccggccagcgaccccgtcctctttcggttagcccaacaacattgttgcattcaatcaatctgattgatccgagcgcattccccaactaggtcgatgcccacctatcgtcgactccatcggtggtacgacatgactaaccgaagtgcacatggctagaggtagtaggcttgtcgtcctctacttcacctcaaacaaacaccatgagtcttggacgggattgcctccatccaatccaaggacccgtccgcgtactggttagtcgatgaatgttgcctatagtacaaaacattgagttgagcaatgagaagaggagaatatcaggtgacgctgggaacattgagcaatgagaacgactcgatttgcgatgaagtttcggtgccctggactggctctataccccg

SEQ ID NO: 88990 - DNA, 409 bp, Zea Mays
caatatatgttgaaaatcactaacggattatttgagataaacacgcattagaggacctcagatccaggtaagcaccgaaggaagccacctcctctataattgtgtagagcctcctggatctagtgccctcgagggttgtccaaactccaaagaactgagtgatgacaaacatgtggagcctagtcgtgggcagaacctagaaatgcaggaaatcgattggtttagcttgggagcacattaatattccctatgacgatcaaataaattgtaagctataatctttaagcaaagatttttctcttatattttttaacataatggaaaccgatcaattttgtatgatgttgtaggtttaccttcataccaaccctaacaatattcaaactggttatgcgactacacattcttg

SEQ ID NO: 88991 - DNA, 327 bp, Zea Mays
ctgggtcgcgtgcaccatcacctgcagcagcatcgaacctatctccaccaaacgtggttcctacgatgcctcctcaacacatcaccgacgaacctgcggctgcttcatcgcctgttcccgtgaactcttgtgatgcgcggggttcagtgctgctgccgattccttcgtctgggaccgtgcgtgttgatcatgagctggctgcaccagatattccatcccccatagtgtaattttcatctgattctcttggggtttcttcgtctgatgatggctctgtggaccctcctgctaatgaaccgcaaattactaatggacactcttatggta

SEQ ID NO: 88992 - DNA, 937 bp, Zea Mays
tcttagcaaatttgttggtaccaacggttcactatttcacctcatggtgttctcgtatgtcggcctactgaatttccttttgtatttttggtcatttttttttgtaaaaaatcatgttgaaccccgaaaggaactaatactaattttttgacccatgggtcaacgatgtgcccccatggtgttaagcgggggtggaccgacattggggtgccactcaattttcttagtttagtggtctttttgctttatttactgtagttacaaaggtttatttattaacatcactttatttcgtcctccactcacatttgtgcccccactcaatatttaggctggatccacccctgattttaagagtatatgtcctagtgccatagtctatggcaccaaaatattgcgccaaccaccattatggatgatgatatggcaggaccttgtgccgtgggccatggcgtcgacctcaacactatgaatcttagcactgaagtcctaccactcgggtcgagccttctcctttccctgttcagtgttgctcactcgctcaacctttatttgtttctcatctctcttctggtatccctcgtccttgttcgagtgtggcaacaagaatgaataagtgtatctgtcgggtacccaggaacctggtgcccaatataggcccaagactcttgatggcccatttgttgccctagtctctaccgagcaaccttgcaaggtggagcggccgaccaagtccctgtcgagcaaccctgtgaggcggagcgaacaaccaaccctctgtcgagcaaccctgcgaggcggagcggccaaccaaccctctgtcgagcaaccatgtgaggtggcgtggccgaccaagtccctgccgagcaaccctacgaggtggagtgaccgaccatctttttgtcgaacaaccctacgaggcggagcggtcgaccaa

SEQ ID NO: 88993 - DNA, 462 bp, Zea Mays
atcattattcaaccatctacgaaaatcaagctgtgcatttttttccctaacatgctggaccagaataaatttatcatcgcacatctcatataaatctggttcagaaatagctagaggaatctcattgagccaagtatcctcccagaatctggttttatcaccagatcgagtgataattttccttccaattgcatagtgatctcttatattcaacagatcgtgccagacctgagaatcaaacaatttgtgactaacattcatgatactgtcaccatgaatatacttctttttcacaatttcttgccagattccattttcatattcaagtttccaccaccacttgcacataaggcaaatattcatgactctcaaatccttaataccgagtccaccatttttcctattagcacaaactctatcccatttaaccaggtggtatttctttctatctcctccaccttg

SEQ ID NO: 88994 - DNA, 644 bp, Zea Mays
cacgaataggtttatattggtgaataggggtgaagtgtgtgcttggtttgaatttaggcgaagaaaatgacatttgggcactcggctcggaaacgatcgctcgaaacggggaatttggaaaaacaattaaagcctggaatatcggatgggcgtgaaattttgcgaatatgttactggagatgttgtgaaggtgcctgaaaaatttgggttcaattggagcatttttggctggtttgggcatttcaccgaacacgtggtgggcggagttttagggtttcggcgaaaacactatgtggggtgggaaaaccctcccgaaggagctaggaacctgcaaggatactcaagaagcacataggaacactttgcatcacttggattcactggaattcacagaatttggaattgggcacaaaaggggaggaagagtattcactgcccagagaaatgaagagagaaagagagggaaagagagagcagatgattctcaccagagagggaagcacgagcactggatcgccggaggatcgccggagaggaacagcagacgccggcgggggagaatggatcgtcagtgaagcagagagcagagagtacagagggagaagaaagcctctagctcggtcgcgggctagaggtgatttttt

SEQ ID NO: 88995 - DNA, 593 bp, Zea Mays
taattcacaagcttattggcataataagcttagatccacatagggcatcgtgacaatcactctaggagagcactccagcaagccactattccatagttggtcttcacgtatatctcacgggaagggacacaagagactattacaattcgatgattggatatgacaacaatcaccaatgcctctaaatgatcctccattgcaccaaagccatataggtggttatagacaccaagagtaacaaaaatccacaactcaacacaaccactaggccactagatgcaagctttcaatgcaaatcactatgatcactcaataatcttactaaggatgtatcactatcattagatgtgagtggaagattttttttcttgggattagtaggatgtgtattcaattgggaagctaggatgcatccccaagaccgcaaaacatctatttatagagtcccaaagttcaactagccattggaaccaacccaatctagactgtgaggcgttggaccatccgacacccaagcatcagaccataacccttgggtccgatgccctccaatgaagccatatgtacaagtcatttaaatgttattgttgtcg

SEQ ID NO: 88996 - DNA, 436 bp, Zea Mays
ttcatgagagcctacaaggagaacgacaaaagcttagcagggatgataagagatcatgatgactatgaggagatgactcctcatcaattattcacaaaaaattcaacatgagtcggaggaggcaccgaccaaggtaagggacacacatgccttagtggtcaattatgaagactcaaccaagaagggttccatgtgcaaggatcacaagtgcaagaaaggtagtagaaagttcaagtgatgaagacacgacaatgctcatcaagactttaaataagtgtgttagaaagaatgacaagtatcaaaggaaaggaaggaagagggcatgctataagtgtggccaaacgagccatttcattgtagattgccctaacaagaaggcacaagaagggaagaaggacttcaagaaagacaagcagttcaagaaaacagagaagag

SEQ ID NO: 88997 - DNA, 292 bp, Zea Mays
gttagtttgcttatcttatgttggatgcttgttatgatggacatgtaatgaagttagatctttgtaatgattgtcaccaaggtgtgggtatcccctgtaacttggtgtagttattaataaagtcagttatttagttgggtaatccatttatttccactttcctctttatctgtgaagctgttagtgaagatggtcatttgtttagtgctatgaagattttctatacatcttttcttatgctgaaagactgcagagtcagatttgatatatatgtgtgatttctacagatgtc

SEQ ID NO: 88998 - DNA, 296 bp, Zea Mays
ctgcccacccccagggccggccctgacagcttcgcctcaatgggttggtcggtagcctcgcctcgctaggttgctcggtagatatttgtttggcgggcgggtcgggttggtgggccatccctgggtggcattttgggccttcccgccgagctgcttggcaggtgggccgcccagttcgtgggccgtctttgggagggttggggccttctttgtgaacgttgttccttggtacccaatagataattatcaccatgaaggtcatgaagctttagccaaatctcattagcacttttgag

SEQ ID NO: 88999 - DNA, 515 bp, Zea Mays
ctcggggtaataattctaagacatagagaacagccagcctggaccgcgggttgataaatagtttactagggtttcttttgcaattatagctcggcgaaggggtacgggctaacgtgagccaccagatcaaatacgaacgaccaagattatattgtggaagcaatggcctagaacgcaatccatgctgtcggatctagaacctatggctaagatcttatgaagccttgatctcatccaggccgaacgattattgatcaacgccttagaacaccccgctggaacgctgcgccaggactcacatctcagccctccgccactaatccaacggcacagagcccatcttcctccctgcctccgcggcgaatgacggggaaccgcgccgcggtgccaaactgtactccggcgagaacaactccgaccccggagcgcccaatcttcaatcactaccgcgtacacgcacagggggatgtattgaaccaactgggagaatactaaccggctctggtggaacggag

SEQ ID NO: 89000 - DNA, 716 bp, Zea Mays
tggcccagcctgcctgcccgcggtacaaacgacagggtgatagcatgagggggccaggcccgtatgtcggtgggagggggcgatggtgtgagcggggaagtggacggacacggttcaattgaacttgatcgatgctggtgagcggatcgccgatggttcctcgttgacgctctgattctctggtcagggagggacaggagcacaggggtggcttaccgagcacaattcacaaggtgatttgttcaatggggttgcgagggaggatgccatggcgaggtggtttgctgtcgtggctcggctattcgacggcgagctctagagcttgatcatggtcggggcgagtggtgtggcgatcggggtgagctggtgatgcctctagggggttcaattttgcacgggattcttagtaggggggcgaggatggctcatggatgatagtgggcggtgatgcttgctttgagcaagccatctcgaggaaaggggaggtggtcgggggctcgagcgttgcggaaaagctccaggcgtgctccttttataggtggtcgaggaggtgtggctcgctcagtgaggcagtgagggagcaagggggagcgatggagggtggtcgatgatgtgaccacacatcgggaagtacatggccgacatggttgggtgcgggagtggtgaaagaggactgggcggtgcataactcaacgagacatgttagcgtggcaagg

SEQ ID NO: 89001 - DNA, 570 bp, Zea Mays
gtttccttttccattacttaccctaggacttttaatctcgggacgagattcttttctggggggaggatgtaacacccctggtgttaatgttactaaaacttgagcataacatcatgagcatcagcatttcatatgtttgatacacctaggatgcattcactaggtaaaaatttcaaacaagttgtattgctatagcattttgcaaataagaccctagtgtagggtactcaaccctaaatggggattagaagggcaaaacagggaccaaatggagaaaaccctaaagcttaagagaaatagtcataaaatattactaaggatgggtttaagttacatttacacccttgaaataccagaaaccctaattgaaaccctagaaaaccctaaaaccaaaccctagggggttaagtgcaaaattagtccacttttgggctaaagtgcaaaaaccatgttaataaagcatcttaagtattatggttcacaaaaaggtggatttgcaatccaaaacttgagatttggacttaagtgcaaaagagccacacttgacccttttggttaagtctgaatttc

SEQ ID NO: 89002 - DNA, 528 bp, Zea Mays
tgctgacttgggtgcgagctctaatcctcctttggggctcgagtctgctctcaatattgcttctgcagtacccgccgtccgatacgtgtcggtgcctccggctttgggatttcctttgttcctttctaaccttcaggtgagctgacttttgccctgctttacttgttgacaaatagattcctttgctaattcttgtatttgcaaaatattctgagctctgtgtcggctcagttgaggtcttgtggtgtctctgttcccgatcaggttttgtccttgctgaagtggaatcctctcccgttttagaagcaaatagatgatctaaaagccttgaacatcgattagtgggttgatagctttcttcgctgcccattgcttcccttgttttaccccctgtgctatttcctttttgcctttccagctctgactcggcggtgctccgacgttgaggagaggtttgctcagagtcaagccaacttgaaccaggttgttgtgttcttggatggtgcccaaaccctgaactcttccttg

SEQ ID NO: 89003 - DNA, 449 bp, Zea Mays
attacaatgatggcaaaaatgaatcgaacctcaacattttttagggcaactcggaagtgcaagtggttcgaccaccaataccttgagacatgaagagtggcaccatatcatgctatatatgttgaccaaccttcacgaggtaatgccatacatgcagcaatttcttgatgacttctcgtgtcgatcaagggatccaactccacaggaatatgatacccttcttagaaagggtgtgggaaatggattcccgatttcatttcctggttcaaatagaaggtacaatacttagtttgtaaatagaagttgctcttacgtgcgaagaatacaacaatctagagtgtttgaacttgtagggctaaagggatttgtctatgagtgtcgagttgagacaagtagccaatggcttttcctatagggttaggacatttttgggtatgacgttaatggat

SEQ ID NO: 89004 - DNA, 581 bp, Zea Mays
gatcactgccgacaagtaatgaaactgtagatgcctggagaagacgttggagaccatgcataccattaagctcggattcttctatggacgggaaaagccatctgagccagagccggcagtgcagtgccatcccacatgagacctttgatcctgatgtgggggagaggcttgtcacttgtcagcagttgaatcaaccaacggttgctccgctctcttcagcttttgaactctggatatagatacaatacgagttgccaaacactgtttgcataaaacccaacaccccagcaaatgctcgttggattcatgtcactgtgcggtggtgaaaaatttgaacccagattcatccgaaccaagtcaccgtgcggcactaatctgtttgaaccccgattcatcgatgagcccatacaaaaatttggtgggagacagcacaaagacgaatttgctggcgctgggggcaaaagtttcatttgattcgatgactctccaatcatgtgcgttacatgtcaaatgttaggaccatcctatgaaataacacaaagaccccttggcgcgcccctgaagaccttggtactgcccgc

SEQ ID NO: 89005 - DNA, 828 bp, Zea Mays
gtaacttggaacaaaaagagatggagcgaatgacagaagcggcggcaagggtggagggaagtttcacgacgccttgactagaacccatttcaggtcacctgttggagatttagattttttttttcttatccactttaagagcatgtgggtacctatacaccattttagatctctatatagattttttttcttatccactttaagagcatgtgggtacctatacaccattttagatctctatattttaggtccactgttggagtcggccttagctgagctaattgggagaatagtttgatagaaccttaattgtgggtcgacaccacatgtccatgcctcccattctcccaagcccatgtgtcgtgccgtcaaaagggtccgaaccccgaggcctcgtgcatgcatttcttcttattaagtcgttgcggcttcgaggccaatcaatgtatccacgtcgttccaaatatcaccgccgttcatttaaaaaatcaaagttgtccatgtgtcctgtgtcactctagcctccactctcgttctaaagcacagtgcccgttctaaagcacagtgatgcttctgtgtgtgaccgcacatccaagagccaagggtgcaataaaaaaataaaaaatctcggccacatctgtaacaccgccttcgattaaaaaaggtgaaagaactctccacactattccttgccggtgttagcagaccaaatactggaagagacgacgctatcgagggcgaccaacgtggaagctgctttcgctggctctacctcctccgaccatccctttctcttcattttcccctttccatagctcactgcgtctt

SEQ ID NO: 89006 - DNA, 526 bp, Zea Mays
gacaattcgagccggcccagggaaggagctcaaaattacaaaggatacggtgcaccttattttggggttaccaaatgctggtggaggaaaggcattaggcattggtgaagctgttgctgcaaacaatttaagagctgaacttggtttatccaaagaagaatttggtgttgcagctcttaaagatcgtctgaggaaagggtttgacgatgatctaagcatcagatccttcttcctgatactgttcaataggttgttgttccctactgcaagctggggaataactaaccatgaggttcttttaactgaggaaatggatcgtttccacgagatggactggtgcgagctaatattcaatgatttatgccaagctgccaagaagtggcatactaggagcgttacaaatgtttctacaaccatttacggatgtttcatcgtcattcttgtaagcatatcacttttttgtctgttttatgtagccagatttttttatgcaaaattcatctacatttagattatgctttgttat

SEQ ID NO: 89007 - DNA, 314 bp, Zea Mays
catttatcgataaaaaaatccatatgtgttagcattcgatattaatggaaactgacgctttgtccgtttcgcccaaaaatgctggccatatgtccattgatcgtaagtgagagtttcctattaattaccccacacatgatttcgtgacataaaccacattatttggtttttgctagagactgtttgtctgtcaaaaatccataggtcttcgatattaatgaaacctgacactttggttgttttcgcccaaaaatactggccatatgcccattgattgtgagtgagagtctcttattactcaccccacacatttc

SEQ ID NO: 89008 - DNA, 799 bp, Zea Mays
ctcccacacacacagttgttggctggtatgacaacttgaccattatgacttgtgcttcagttgactataaacttacagattactctccatccctcctcatttcgacataaaatctatgcgcattcttttactatacttttgttgtgcattgggggcttgggcgcgacgaccaattgaccactgacttttctccgcgagggaggcgtcaggctggcgtgtacactgttcttgctccgacgcctcaatgtcagcgagctggtatggactcgctccatgaggatcgcgcatgtgagaacacgaacataacatggtcaaataagtcctttacagattaccgaacagagggaggctcgttaaacacaggaggatagctaaaccatgtgactcgttcgtcagatttggctgtggttaacaggacatctgactgcctctgtcaaagacaggacagggcaggggcgttaagtccgtaacgaagtatcgaggcaaatcaggttagtctgttatgcgtcagatagtggagaggaatggaatacgcatctgatacattgtgcagtttcgcacaggagttgtagttttacacgacaagaactttttagaccagccagactagttataggaccaagcaaaggcaaaaggagtcaacacgaattaaaaagcaggcagggccgccggcgtcgaagctccgtccagacccgcaacgattcacacgtgcatcagctgctcctcctcctcgactcgcgtccgaccgatgggacccacccacattccagcattccaccacagtgctggtccaggtccg

SEQ ID NO: 89009 - DNA, 733 bp, Zea Mays
gttttaaaaaataactctaactttaaacaaacactcccaagttattcctcaaacttctgctcgagcgacttgatatttgtgtgaaaccttagttgtcgtcgtctcttccatcctctcctcattgcctcaccttgcttagactctcttggtacaacctggagcctaagctccaccgcatggatattgacgtaggctatcagatctatgatgggctccaccagatccatgctaggagatgagcgatgggaactaactcctctataggtgcagagacctcgcaaggttgagagcaaaccagatccctttctggtggcttcttcccacctcatacgaccttatcctcgggtgtggtagtgtttctagtgtggcaacctcgactctactccatcctccttcatcgacatatatacctattccatctcatatttgtccttttattgtttcgccttgaccttggtgctcctcaccacaaatacaaggtctcgtatgatacccaacataagacacaaatccaaggcctagtgcgatgtccaacacaaaggtacgcaaaattgcaaataattgtttgttgtgatctatggatcacaaagaatgggctagagtttacactttttttgagatgaataaatgttgttatgcattggtctggagtattatctaagaattgtataataacttgtatagaccaataagtttcatattgatgtgttattttagtacatgttggttgttg

SEQ ID NO: 89010 - DNA, 755 bp, Zea Mays
ttgctgaagtaccgaagatatttgaaatataccttcatcaattaacatcgaatgcaattgttagaatcaacatttacatatgggcccttcgaagccaatgtttgagtgcaaatgccgaaggcttctgcagagttcatgaacttcattatcaaacaaagttgaggtccccagacagtcttcataagaacttcaaatgttataattttgcatacagaaaagacaccaaggctccggtgctaggatattgcacgaagtcgccaactgattggactatgatgatcccaatgagtttaaactttggcttaacacgaccagtctgccatatgactcttgggtcgccggcgcaagtggcccaagtcaccttcaacattgtgattaagcacatcgtcactcgggacttggtgtaggaatttcttgctaacaaagtgttcccaacactgtctaggcggggaatgccgaatctgaaagagagtgtggataagggaaatcttgtaagattgtcgtaccagtttaaatttcaggacgtattcaaggagccatgcgccgaatggctggaaatgattgaaataatatgtattgaaatcttgggtaattttatgaagaatgaagatcaattaatgactgcaaccttcggtaatcgagagaaatgaaggttgaatagagttatggatgccctgcagtttgattatctagactacccaaagatttctgaagaagctgctggcgtgaaaagaaaaagaactgttagtattatg

SEQ ID NO: 89011 - DNA, 502 bp, Zea Mays
cttttacaaaatgggatcggcgaagaggtatcatgcatccagggccgttggattgtcttcgcacggtgcagattagatcgcatccttatccaagcggtacgcactagggaccaccggatccatgatcgacggcccagattcaatcaagtcggattcaatccccaccacacaatctcccatccacggtctaagttcaatacaggaagggatatgtttcttttaatctgattcgctcactgcaagatcgacggtcgaggcaacactaagcgaaagggtatgtgtgttatgatctcaaccgtccacataggatctgatgtcccaggcgctttcttcctccctggaacacgccagcggtggagcccgagcggaccacggcagaaggctcgccggagcacgccaagttctgggttctggccgtcgatgtgggataagactaggcgaaaaagggaccgaagatcctaacgaacgcgatagagagcaccatacctgggatggatgcgct

SEQ ID NO: 89012 - DNA, 415 bp, Zea Mays
gtgcactagggttctcaatcttggcccgagtctggtggtcaatctctatggacttgagcttgctgaagagctcgtccactatgagattttcgtagttgggcgattcaacgatcgtcgagaccttcacctcccaaaccttctgatctagagcatgtagtaatttcagcgctctctcatgatcactatagggtagctgtgccttgttggcatgcatcttgttcacaattgactggaacctggagaacatagaatcaatggtctctctagccaactgtgtgaagttctcgtactctcgcctgtacgtctcaaacagtctggtctacacatgatcgttgccctcatggaatctctcgagggtagaccagatctgatgagccgtagtcagatgtccaactcactcaaactcaccagcgag

SEQ ID NO: 89013 - DNA, 775 bp, Zea Mays
cggttatagtgcttgcgcaaactcagacagaaactacttggcacgaccagtcgacgagaaccatgttcgcggtagcgttgaatcggccaagaccgagagctttcctaacatcaaaggatgcagaaacgcgaacctgaggggcatgaatggacctgtggatggctgaccacggcgagaggtcacacggcggcgtggctgatcgaattgtggaaaaactggaattcacgagctatagtggttactcgggagcgagaagtggtgttctggcttcgtaacaagatagcggaggaggcaggggcgtcaatttatatagaccagaagcggtggctccgaattttggatgatagcaggactcatttccccgacgagatcattaccgagatccatcgtggagcacatgcgttcaccgggtgacggtcacgacatagaggacgccatgaccatgacaacacagtgaatcaggcaactacgtgtctctcaccgagaatacggcgaacactggcgacgatatttcactgattgtgcaggcaagtgggcacgacggtgatccatcttaggcctatgttcacctcacccaagatcttttcacccgccatggttatccactccagactagcacgaatcttaccggcgacgcggatcacaacgtggagatcaccggcgacgggtgcactgcacctggaatcttgttcagttactataccatcgtgatctggtttagttcatctgatagggcaaattgaagggcttcgttctccaatttgtatgtgacaac

SEQ ID NO: 89014 - DNA, 508 bp, Zea Mays
cagctaaggcagtggaattcatacaagacataatattcaggttcgggataccgaatagcatcataactgacctgggatccaacttcaccagttcagagttcttcgatttctgcgagcaaaagagcattcagatcaaatatgcctcagtggcgcacccaagagccaacgggcaagtagaaagagccaacgggatgatattagaagcactcagaaagaaagtctttgacaagaatgtgaagttcgcaggaaagtggatcagagagctgctgtatgttgtttggagcctgagaactcaacctagtcgagctctgcatggaaacacacctttcttcatggtttgtggttcggaggtagtgctacctgctgatctcaagttcggggcaccgaggttaatctttgaaaacatagcagaagctgaagctactaggctagaggatgttgatgtactcgaagaagagcgactgaatacggtgattcaatcagcacggtatcagcaaactctgaggcg

SEQ ID NO: 89015 - DNA, 558 bp, Zea Mays
attttattacaaagccaacgcaacttgaacgggctaaatcggagttaaaatgcacaagttatgaattatctaagtttatagatttatttttttatatttaaaatcgattttccatttttattttctatattctgacctctctggaccgcgcacaacatttgcacaaagatcaggggctaacccgcaagattcctaagactcattacatagtgaatatggacggcgggttaatttgtaaaaattacggggtctctttagcaaataggccagggcaaaggggtatgagacaatcaagaccgtcagatctgacccagatggtccagattagatctccacttttaaagaagtagtccgcgaccacgaccccaggatcaaatttccacggtgcagatcttgcacccgaggcggtatgccaaggatgcaatcctagccatccgatcccatatcaacgatttagggttgatctcgcgaagggagtagctttgatcaatcgaagctgttcatccgtagatcgagggctcccgcgcgtcttcatccccaagccagcacatggtggcc

SEQ ID NO: 89016 - DNA, 496 bp, Zea Mays
taataatggtagcatcgtgctggcatttttggatgtgcatataagtgtgatatgagatttaaacacatatttgaattcaaatttgaaaactaaaattggaaatttggaaaaacagaaaatataaaagaaaagtaaagggtaattctcctctgcgcctagtttcaatataaccccatggagtggttttaccacatccaacaatatacaagcgtgcaagaatagtctgctatcttccccaccacagttaacatccatactaaccacctcaccaatgagtccaggaactgtagcacccctcatttcattcatcttgtcgaataggaggttgaggattctcacacacatctccatcttaacgaaactcatgtttgatgtttttagggtttttttgtactcatgtagaatgacaacatgttggcccaccatccacgatggtcattcaagcgctttcttcttatcgtccagtgaaccaaatttagcaataaatagattctcc

SEQ ID NO: 89017 - DNA, 505 bp, Zea Mays
aaggatggaactatgcaatttcattgaatatcttgaagtttcattgattctgatcatagctatgttcttgtttttcaattggtagtatcttggcttaggtgccttatgctttaaaatgttgtttcctttggtgtacctaagaaaatacttcttaatcatggtgtgcttagacattgtgctttatatgcatgatcttgtcgtttttcaattggtatatgtgttgcaataatcatcatgtgtgaagtgtgcctacgttgcttttaaaatgttatatatcttgaggcatgcattgtttccactagtcataagttgtattatgtcatctattcaattggtatctttttgtgatgcaattgatatattatgcctagaccaaggtatgttgtgatcccctctagttctgaggacattagaatgtgcaaggtgctagtcattcaaatacttgacgcacaactttagggggagcaaacataacttgtgtcttttgagactaactatttcttga

SEQ ID NO: 89018 - DNA, 789 bp, Zea Mays
caagaaaatagtggcaattggctccatccttgcactgatcgatcccaatcaagggaacgaagctctcatcagagaagcaaggaaccataagaagaaagccactagcccaccaccctgagaagaagaacttgaggaggagatcagcaaccccatgttcatccaccagcaagttgagaagcacaaagagaaaatgcttcgtctttcagagctcggaaggaagattgacgaagacaccgaagagatgcgcatatcgaagcacacgaaaacatgaacaactacagggaccaagattacgatggacgcgatcatgacaaccttcgtcatgaagtatacaatgttcaatatttcctttatgatgaatcttccccattgacaccaaaattacaagccacaccaaggacaccattgtataggcctcctacactatatatctatgacgacctgaccgacccaaaacagttcctcatgagctacgtggctaccatatccacatatgttggtaactcagttgtcctggcaaagtctttcatcatggcagcccaaagtgtggcccagacctgatattcatcgctacaaccaaggattgttaattcgtggctgaagctcaaagaaacgcttcttaccagctgtgggggacaaatatcccccggttccactagaaggcaagaagtcctcacgagaggctttgggcctgttatctcgcaaggccatcccttcgtgagccaggggaggactactggcaaaatgggccgacatgagaaagaagcaggctcgggcccaagcaactcg

SEQ ID NO: 89019 - DNA, 839 bp, Zea Mays
tcgctcgtgtcctgccactccttggcccataagggctataggcactttgaggcctttgaacaaagcaacgagcacttcaatgcatgtgtattccaggtcgaggacaatgtgctgaagtgctcggttggggcgctttacgatagaatgtggggtcctcacggcagcggcgtcttccgggagagggccgaccgagcacttgcacaggtatgtttgtgcccttagcaagggtgatgtatatgttcgctatctaacatgttgttgtcctgtcttcacatgcagtgagggatgtagaagtggaggacctcgctggcctggagagctcggcggcccaaaaggacgccgaggtggaggcgggagctaaagagaagtccacactcaagaaaggcggcgctgaggaccctgtggcggcggggacttctgcataggtgtaaagattatagtaggagtggtgcaatggtgttctgttttgtatgatacttaaaattagctgctgcgtaggttccggtgtctggcctgtgcaagcaaattttggtgataatgggaatgatgaattgttaatgtgtcaaagtttgatagttattagtagtgatgaatctgatgatgaatctaatattgagtcatggtcttcagaaggcgaagggttgatgagcccgtttgctaggatggacgacgggtcttctgaggatgacctagattattttatggcgctagatttggctgttgtggagtctttgttgagggttgcccccactgcgatggacttgtcgcctagggttgccctggctgagttgcggggtaagagaagggtcgaagtgtcgaagcgaagtgtgggaatgttg

SEQ ID NO: 89020 - DNA, 633 bp, Zea Mays
cttgaccttcatgtgcttctgcatgcaacccctaagggcaaacatgggcacatggatcttattaagggtccctatgatccaatgcaaatgatcttaggtgagctattcgacgaggaggtctaacgacacatggtagtggtcatcatagagaacttgcaaggagtcatggtggcacaccctttgtcattcaggaaggatgcgcctgctgaccttgtaaatacttgttttgtttagagtttgtgggcatgggcctaggagagcatcaaagtttgacacaattattatgctaggcttggtagtttgaaggattcggtgccctagccaaaatacaaggtgatgagggctcaatgccatttggcggtggaggccaagtaagagaatgtctgccatcaaaattaggaggagaagaaggtctgcacatgacccatggggagagcatgtatgatagcaccaacaagcagcctgtgataatgccccaacatgtgccaccccaatgaagcggagagtgttgccctaggtcttcttgaactagtaaggggttcaatatttgagattggtcggaatgaggtcgcctaacctataacacccttggtgttatgagaactaaaactttgacatgtcatcatatatact

SEQ ID NO: 89021 - DNA, 421 bp, Zea Mays
gatagtttgagatcacacacatcacatatcacatatttgagcttaaactttgatagcctcatattctccattcaccattcatcattcatcaaatttgcatgctcaagaattggtaggggtggctgttgtctccttagaaacagtgaggccacaaaactctgcagtaataataaggagtaaacaaattagtaaaatctgaaatcaataagaacatagtagaaacaattatgaaataaaaactgcaaactaatttaccttcctcaagcttagacagttcttctaggttctcttcaacactaatgaaatcagatccacgaatccaatcattcgtacagataagacgctcaaccattgctggggtgagtgaactcctaaactcatctagtgttctcccccctgcgctaaaggctgactcagaagc

SEQ ID NO: 89022 - DNA, 390 bp, Zea Mays
tgaagcttgatctggatacacatataccatggtacatattattgacacttaaatgctaaggaccatctactctcaccaaggtccttaagctcctgatctcaccttgtaaaaccgaagaagcctgaggctctgtaggaacaagagactcggtatgcctaagtataatcctatcacaagacacaaaaatgtgtctcaacccaccatggacagtatgccctagaaatggaccccacgtctaagggcctgaggatgaattcgaagggtaagcttaactgataagtcttaggtacaaaacattaaatgcgtgaggtgcgatattacaaatttgacaagcgtgcttttgtcaatacctaggctacagggtacctgagatcaccatgtggcacatgc

SEQ ID NO: 89023 - DNA, 1530 bp, Zea Mays
agctttcaaaatagtgagaattcatgttaggtgaccacatcaaagttgaagacctaacataggagaacaactttgcttaagaaggaaagcatagttgttaagagaagtttggagataatcaggcctcaagtttggctgtcaggctggtccattctgtaattcagcttctcagtagaacagagccaacttggtgtgtgaattcaaacttaaattgttgagaaattgatcaaggttgctatgacaaagttgtagctggtttgtcaggctataattttggtacagggagctagcttagtcaccacataaaattgagagaaaactaagcttcaaaaggctctgtcaggcatctgaatgaactcctccatggtacagtgttctctgtagatcagaacaccagcacgacaacctcaccgccggcgacctctttgtgccaaaattcacgccgccgccgtccgggtttgtgtgcagtggggaacggataacgtcggggagggacaaccttacgtggcgccatcgccctagccctgccggagccttcaccggcggccaccatgacctgtgaattttgccgcggtgtcacccatgcctccatctccctcactgtatctctttccgacgtggtaggcatgcgcttgcgctgctatccgtggtcgggggtcgtctgttgggccgccatgcctataaatggagctaggagtcacggcgaggcgctcgctgttcttcaagtgagctcggaaacaaccagaaattcgtactgccctttccatcttctcccaaattgagtatgcacggtgaagctatagtttcttacggccgtgtagcctcaatccccgcccccaatttcacccagagccgccgtaacgccatttttccctaattcggtcgactgcgtcgccgtgaaccgcctgcttgcggccaactgattccaggtccgtcctcgcccttgttgctcgtgttttagcgcccctatgtgcttgggattgttatccacgcaacccagggagctttaccttacgtatgaaaccggaacgtattgatcaatgcttggtgtccgccatcaccgtggtcaagcgcatcctggtccgggttagtcacattggagcttgttctatgattgcctcaggtcggtgatgctcacccagcagctggtttgggtatccgccgtagtttttggccggaccgagcgacgggatggtcgacggcgagcacgtcgtggtcagggtcgtagttggggaagaaataaaagtttagggtcatttcggcaatatgtcagcgactaagtgtaatagtagatgaacctacttcgaattagctgataaaccgaggccctttgtgcaaaatagccagagcgtgcgggcgcgcgcaggcacgcgccccggtttcatgtgctgttgggcctcctagtgtgaattcggcccagaactgttgcaagtttgtctttttctttttcttccaaaaccaaataaattctagaaaatggtagaaaaatcctaaaaatatgagaccaattttcttagaaccctaatttcc

SEQ ID NO: 89024 - DNA, 1000 bp, Zea Mays
gttgttgacttttcgagctttggattgttcccttgcatcgcgctactgctgatcttgatattgtccttgaggttgttgattgtacgacgaagttggaactgatgtgggtggttgaggtaaggcccatgtggctcgagaatgacttggtgaggcgactgaagctgaaggctgttggattggttgttggttgcgtacatactctggaatgtatggagagtgatatgaagcagtatagagaacctgctttggctgattatgtcttgcctcaacattggcaagttccttctgcttttgaattgtaacttggcaggttcttgttatgtgccctttattttctccacagaataagcagaatagtcttctttcttgattgttgtatcttccttcgaagcttcttcctccccttcctcctcttggagctagcggtctgaaggaactctgttgagttaccgttgactgggagtgactttgttgtccttgaatattgttgtttttgtcttcactttggccttggttgtggattgttctggcgtgccttggattgaaccttcctccgaagccccttgtcatctcagagtatctatatgcttcttctctcctttgccgaaaatcgttgtcagcccatatatattcatccatttttcagagaagcttctctagagtctagagaggcttcctggcaaaatactgtgcagctagactcggccgaagccccttgatcattgcttcaatgacgatttcattcggtgttgttggtgcttgggccctgagccgtaaaaaccttcggtcgtaagcctataggtactcctcatggttttgtgtgcattgaaataaggcctaagaagtcattggcttcgtctgaaacccttggaacttgtgatcaacatgtctttcaacttctgccaagatgttattattccttgcctgagagaggtgtattaggtctgagcaacacttctgaccgccataacgaaggacttggccatgatgactgtattac

SEQ ID NO: 89025 - DNA, 307 bp, Zea Mays
gtggaggtggttacaaggtggattcctagttaagtcttggcttggcgacggagctctggcctctaggtcctcctcctattcgtcgatcttctaggcctcgtctcgtctgggtccatccttgcaccgtcctcctaagcaaaagaatatcctatgttcagggccagcctcctccttttataggctaaggaggaagggtcgacctgtggtggcttccttgggaaggagccactgggcgatggtaaaactgggtgtcttactatgcggtaaagacatgcatgtgtgtggtcgcttggctgtcctgtattct

SEQ ID NO: 89026 - DNA, 445 bp, Zea Mays
ccagggttaagtcttccactagggtcgaccctctcttagtcttgaccacgatgtcatcaatgtatacctctaccctgtccctaatcaggtcaccaaaagtcttactcagcgcccgtacaaatgttggcaaggcgtttttcaaaccgtaaggcattacaacataacagtaaagcccatccatggttacaaaagcggtatgcttcctatcttgtctagacatctggatctgatggaaactagagtaagcatctaggaaggacaagaggtcgcacccagaggtagaatccacaatttgatctattcatgggagtggatatgagtccttgggacaggccttattgaggttggtgtagtcgatgcacatccgaagctttccgttagccttgggaacgatggctggaatggccagccatactgggtgatggacctcttcgatgaagccagc

SEQ ID NO: 89027 - DNA, 439 bp, Zea Mays
caagaagctgcgcgtcggctccaacgaggggctgtgctatgacaccaagcaacaaggcctcgagggcgtcgttgcgctcgccggcgtcgcggactgtgacagcgtgaggagtcgcacgacgcagcacttggtttggagcaatagtactgtagttagccgcggcggcggcgtgtacaccgtgacctcatcggctgcttccgccagccgtaactccggtggcggtactcgtgtggagacttggcttgtgttcgtgtgtctgcaccttgcatggttcgtagcctgtaattgtaagtaggccaagtggtgattccgggacctgaacagtgtggttgtaaagagagctcagtgcattgttttatgaagaggacagtaagaagcgaataagaattttgtcttactcctaccgtcctacgttccaaattactaaattattttgaag

SEQ ID NO: 89028 - DNA, 587 bp, Zea Mays
ggcaaaattggatttccggtcgggattactcttcgaggatgatattaggcgccgcttagcttctccagtgtgtcctgggcgtccggatattccttcgacattttggttggtcatctcttttggtcgctgcatcttcaagcttgactcggttgcagtggattatcttcttcaagctgctctgggaggttttgcaaagggtttcaatgtatcccagctctctggtcgggtttttcgcttctcggtatcctccaaggtcgttggttttcatatctacaattctaaatgcattgatcgctcggaattcagggctttcttcaatctttggaatcatggaggaccgaattggacttatgaatacaggaaattcattcaggaagaaaatgccaattggtggattgttaagggcaagaagaatttttttgccaatattgttaagcttcctccgttgtctggtgcaaatgctatcccgattcatcgtagtaagatgctttctcactttgctaggaagtttgatgagacaaggctttctgtcttcaagcaattgggatctccttcaagatttcggggctcttggaattcattcaaag

SEQ ID NO: 89029 - DNA, 701 bp, Zea Mays
attagggttgaaagagagtcgtctctttgtgggtgcctcaacgaggaagtagggcaccttggtggtgtgtccgaacctcaggataaatcttgtgtctcttgtgtttttgctcattgtgtttgtttgtgttcttcgttctcttaccattccatggaagattttttatatctttttggtgtgtggattttaagaagtgcccttctcagatctactactttgaaccctgtgggtcatctaggacaacccatttgcaatgttaactaggtaaattttgagatcaattcaattttatatcgcattctttagttgggctcgtgcagaccggttgaaccgattttgacaccggttgaactcgttttacccagttcgtttatatttttgttgaaatttttctgcttgcatatgcacccccccgtaggcaactttcagtcgctacttccagtcatcggtggcttgcgctaccggcaccattgatgatcaaacttgtagcaggggttacaagcagtcaagagagggaggagaggctcccagatctcttatcgggatgggactggagcttagaagctgcaatgtggagtcctagctaagtcttggcttggcggggctccgaccttctagtccttgtcagtgctcctcttcctgttcgtccttgtgggtttgtctctgtctaaaggcgtatggttgcctctctgtcccccttg

SEQ ID NO: 89030 - DNA, 369 bp, Zea Mays
accggtacgtggcagtcgctaccggatcaggatccgacggctcaaattttataaggtttgatccgatccaacccctcggatcaaaagcatacggctgctatcaaccgagcgaaggggtatgaaggcttctaatcctagccgttgaataccagatcgacgatcagggcgccccttcacgctttcctctcttccctgctcactccggctggtggtgaacccaatcttgcggcggcgccattgactgtgtcacgcaaacaggctaacccgcgcacatccccgaataccgaacgatcctacacgaagtatagcgtatggcaaatctaatggcgggttgtttacctgatggggtggtggcagattggctagcca

SEQ ID NO: 89031 - DNA, 833 bp, Zea Mays
tattatagtaatcacgaaagctttccttttctagttgttggcataatggtagttcaccgagggcgtcggtctacgacatgtacccctagaagttaagtaggaatttctcccaaagtgttgcccatgcatcaattgtcataggaggcagcctggtgtatcaagttagagcaaagccctcctgggcaatgatgaaggattttaccattgtgttgtcatctccgctagatgaggccactgcgacttggtagctcatgatgaattgcgacgggtcaaccttcccattgtactttggccagtttccggccctgtagtttcttggccagggcgttgcctacagtctggcggagagtggacacctattgtcggtgaagtttaaagcatgaaagacgtcattttacaggggctgcctgacttcatcaaaatttctcaaccttacacgaccttgtgaatggtgagtgaggtcctacgcgtgtagttgtgaaatttctttctcaagggcccgaagatgctatttttcttacaagatgaggatacagactctggcctaggcctcgctaagctattgcttggatgcaagggcatctctttgcttttagaggtttgaactgcgcatgcgaaggcttttttagtaagagctgctcctcgatgttgatgttgaggtcccggttgtcctggaggtctatgatgtcttctagaggcattctggatgggtgaagctggtggcatgccgcagtgtcgaagcctgggggagtcgggggtagattcctcatcaagtctggccataatttagcttggtagggcagaatttttgggtttgacggagggtcttgtga

SEQ ID NO: 89032 - DNA, 662 bp, Zea Mays
gttccacggtcagccatacccggttattgcggatcgctgggacacgggaccataaaattccaatgcgcgcgatgaaaactgaagccctctgttaccgccatggccgcgcggaatccgccagctcggctgaccgtccctgcggactataaagccaatgtggccatgggactcattcgctccataccctcgcaccctccccgttcctcgagccatcatctttgagagagagaactccttcaccgtgtggagaaattgccgccatcgtccagtccgcaagaactcgcgggccaggctccaagcggcataattgaaggtgagaccccctccatgtagttcgcgttgccatccttcacgtttggcactatttcgtgttgggtttcgtgctctggttgccgctcagggatgtgaccggctatggctccgccgtggctgagacgccggcgttcgcgcggctggccggggaagtagagatgacggcagggttcgtgcgtcgttggattcgctgtgggcggccatgattaaatggtgcgcgtaccgattcgctgggtgaacctaggccgtttgatctcgatcgggcaaatctggggcgagttggggtattttaaatccgcgtcgtcggtcgtcgatcggacggataggattgcgtaccggttcggataggg

SEQ ID NO: 89033 - DNA, 627 bp, Zea Mays
ggcggtgccaggaagaagctctatagcaaactcaactttccgctcaggtggcatgcctggtaaatcttccggaaacacctctggaaattctgacacaaccttgataatctcgagtggatctggctctttgctatcgatagccatctgatgacaacttcctttccttggctcaggcgggactaactcagtcaccacttcctctcctagtggggatatcaacttgattgtcctcttatcacaactgataactgcctgatacttatctagccaattcatccctaggatgacatttattccctgagtacccattactatgagattagcggaaaatgctattcctcttatttccacacttacattcaagcaaatgctatcgactcgaattctaccaccggctgagtcaatttggatgggggttgacatggtagtgattggaagattatgtgcttctacccaagatgcagtaataaatgaatgcgttgctccagtatcaaataacacctctacaatatgggagtcgactggaaacatacctactgtcatgccggggttttcctgaactgcttcaacctccaagtgattcagtcttccatggttgtagcatggctgagagcggttgcctgctcc

SEQ ID NO: 89034 - DNA, 508 bp, Zea Mays
gaaacaccgcggccgtaggatgcaaaatgaacggtgtagattagatcaatgtgtaacccttcgctgaatcggatccttgccatcagatcttattgggcggtctggatttgaactaatgtaccggtttgacacgggccgttgatccaatatcaaacggctaggattagatctagacgaaataaatcctgagcgacggattagatatgggtggccacgatttgatttggcgtaccctttcgtctcaatgaatcgtggtcgtgtgtcgtggatcggatggatccagggagatctcgacttctttaaatctctgcccttgatttcagatccaagggttcctgctgcgtaccggttcggggtggtgctcgatttaatctgagccttccatctcaaatccagcggccaatcttcacccgtaccccttcattgaagactttttacatatgagacctcggttttcattgaaaataacccgccatccctccaccattggatgacttagctgttaggc

SEQ ID NO: 89035 - DNA, 726 bp, Zea Mays
gatgaatatgctttggtcacttgcatctcgccgaaggcgaagcccgggcacgtgcctaggctggccgggcggtgcctccgccactggccctgagcgattctgcaacagaacttctcttctcttccttacgctttgtgccgttttttgagaaagagagagagagagcgctctgcattctgcaactgaccgactcttctacgcaggattgagaaactaggccgccgaactagaaggtgccaaacacatcaagttctcatcgcatctaatttctcagcagttcgatcttaagatgacggctaccaaacacatcaagttctcatcgcacatgtccaccatccgaccgtcgctattggaatcctctagaaaaaaaattctcgacaatgggagtaaagagaggcattgtccatcagcagcaacgaccccactagtggtcgatgccccattcgctccccctcccagcacaaccgcgctctgctcgacgctaaggaaggcacacagtcgaaatggggaaaaagaaagtcacaacgctcttcgtcaccggcgacgctgttggtgatcaccacaccatgcccctgctcctcagcgcgtttgatagccccaacttcgtttgctcaagcacccgctcctcaagcacgacagcggaaagctagtgcatgccagcctcggggcgagattagatgagttggagagtaggagaagtacacaatagagtgggacgtgggagcg

SEQ ID NO: 89036 - DNA, 370 bp, Zea Mays
attatatctatacatatgtacacaagcttacattaggttctacaatgacttctctcaggtatgtgcatttaaaaactacacacatctttatttgttacagtgacttagtttctcaactatatttaataagaatgttcttttaccatactaacgatttataacaattgttatagattgatggactacacacttctaccagatttaacaacgtataaaaaacatgcgataatccaggtccatgtctcaagaaaatggtctttccatggtgccactgaaaatggtcccttgcagcacatcgacatggtcctatcagattgcaaggtatgacacaaagtacacaaataaaattcttatccactttcttaactca

SEQ ID NO: 89037 - DNA, 726 bp, Zea Mays
ccgaactccttttctaaagtgtccccaaattccttgagaaggtcatcaaggctagctagggacatgtcttcgacgtcggacaaattctctatcctggcgggaggtggtgctggaggggctttcttcttccgctcagtctgacatccttggctcttagtcttcttttggattttcttcgtgggggcgagcttctttagcttcttatcgtaatccatcttcagggttcggtaggcttcatgagtgttggcctcctcgccttctgctatatcaagacactcttagagggatgccttctcctttttaagttccttgaccttctgctctaagttttccacccgggagtttaggtgggtgcagtgggagaaaaggtcgtcgtagtggttatcgagagtgtggaggtatccggccatgtagacgatggtggggtcatcctcggtaggatctctccctgatagggcctgaagtcttttcctccaggtgggggtatttttgttgctaggtgggaagtaatgaaggggggtttcaaagacctctctgttgtagttttggcatagctgtttaaggccttttcgggcaacattttggcaagtgtctgggaagcggtgcccgatgaaggtgacttggaagggagggtggtttgagtgacttcggctttctcctaggtagactgccatagagcacttctcaactccgttttctcggtattctttccagacatattccggc

SEQ ID NO: 89038 - DNA, 764 bp, Zea Mays
gaacaagttccttctctttctttttccctttgagcttcggcatgtctcattctttcaaagtcgggaatactctaaaagccaagaattcttgcaccagatccctagtaccaatgtgctccgcaataactcaaaattcgaccagtgcaatttggcatggactctccggtttcatgttgcattggggcctagtctctccgaagattaattctaatgggctttgaaccagcttctcctttttatcatcaactttgacataaaaccattcagtcttccagccagctggccatttggtacgatagctgataaatggagatttcacatctttgtgataagcaaaattgtagcagccgaagttctcatgcagcccatcttctctagcttttgtctgataatgaagctcatgtgcttggcagaagccttcggtaagcggttctgccccctggctttggagagcccagatgtagacgctaatcctaacgatggcgttaggagttagctgatgaagataaatcccaaacctccccaaaacatccgcaatcatctcattcaaaggaaatcttaatcctgctttaaagaagctcttaaagactacaacctcatccttttctggcttcggagtaatttcttctccgccaaagtgaattagttcctttttggcctcactgaaatagcctaacttcatcaacttaggcatatcatcttcggtaacagtggacctcccaaactccaggtggctgggtttagatggcacgacactataatca

SEQ ID NO: 89039 - DNA, 486 bp, Zea Mays
gagccgatagcatttgcttgaatgtaagtgtggaaataagggggatagcgtttcccgctaatctcatagtaatgggtactcagggaatagatgtcatcctagggatgaattggctagacaagtatcagacagttatcagttgtgataagaggacaatcaagttgatgtccccactaggagaggaagtggtgaccgagttggtcccgcctgagctaaagaaaggaagttgttatcggatggctgttgatagcagtgaagcaagtccacttgggattatcaaggttatgtccgagttcctagatatgtttccaaaggatttaccaggcatgccaccagaacggaaggttgagtttgccatagagcttcttcctggaaccgcccccatctttaagagagcttatagagtatctggaccagagttggttgagcttaagaagcagatcgatgagctgtcagagaaaggttacatccggccaagcacctcgc

SEQ ID NO: 89040 - DNA, 544 bp, Zea Mays
gaccttctgacaccaggtacaagactgttcactcaactaaatttgcaaaacagctgattttaggcggtttaacgtatacatgccttattccaggcggtgtgcatgaaactgttggtaacacgcctaaccataatttggaaagggccgcctactttagagagcggtacaaaaacttaacttccgcgagagggagtttaggcgtgaacgccttaggttgtataataatacaccaaagcggaaagggtcaaagatagagtacataagaaaatgtagagcactattggctgacacatcgagtcacgagtccatcgccatggagtccccaacatatacccctgaggttgtacaccctacaatagatgcaactgaacctgatggatccgcagttaccccctgcgactgggttatccctaaaatcgccagtaacccgttcctgccggcttcaacacagactgaggatgccgattcactgcatatgtctactggaccactaagacgtaaacaacatgtaccacgtggtgaaagacaagctatcttagcccgt

SEQ ID NO: 89041 - DNA, 739 bp, Zea Mays
aaagtctatcataaagaatataatgatacaattaataaaaacaaacagagaatacatcaaccattacctttgtagatacgagcaattgaacctttggtgattcaaccttcggctcatcagctggtgcggccgcaatagtaacttccttgacagaagtcacgagcgtaggcagcactgctgctctctcttcatagtaagattttggctattttgccaaaactttcacctttttcttcttcggcgcagcggaaggtgacttcaaagcgcttttccttttatgacctttgcttggaacagggaagcaataatcaagataaacaaaatggatagcgtcaaaaactcggttcaatctcctctttccccgagcaccaaaggcagtggtcaaagcttcatgttcctttttcatgtaattccccagtatttcattacacgttgcttcgatagcatccaaccattcatcatttggctctccaaactaactcttgtatcgatatgtatactttaagtgcaccaaaccatcttttcctagccccttggttagatgcaccaccttcttccacattcagcatttcccactcatttagaagggccatactttaaaagctgcatgctcctaaaccaaatctcgagtacaaatgtagctgctaatagcattaaaggccaccaatcaggcttgagcttcttctgtctctacaacagctggccactttatgctaaagcgagacataatgggcctatg

SEQ ID NO: 89042 - DNA, 612 bp, Zea Mays
gaggccttgagatattccgagatgaccaggggcttcggcagacggttcaacccaagacatatcaggaccatacacaatccaaatcaaaacaaagacaaaaacaatcacactcagggacaaccaagtcatcctcaaaccacagaaacctagcaaaataccttcatatcactgtccctaagaggtgcaagaagaggaaggagttttggaggaagattcaactctcaacccaggaaaatgttttgccttttctctggagaggacaaggggcatacaacaagaacctgtcaagtgacaatccagaaacagaaggaaatcactcaagctgaagcacgtcaaaaatcaatcaaaggaggtcctacccatcgcctcatactattccccatacattacagaatatgttcgcaaccaacagccaagttcaaaaccctcgggcttagttgatttggcaagtcactcttcggctatatggatgctgccccagccatttacaccagcaccttcgtcatatgagcaacaacatccaggacaacatcagatccaatagtagttctccacacaggacataccacatcgagacgcaagggaacaatctgaagccaacatagtgaacag

SEQ ID NO: 89043 - DNA, 431 bp, Zea Mays
aaaaaaaatcctggcacatatatgctatacattcggttttgccaaaatcgggtgtgacatggtgccttcacaggtgacaagggaggcataagacatcagctctgttattaccgacggaagactcgctagctcctcctacagccagccaaggaagtgggtgcatggacctatcgaagggtgctgcctccgcgcctagatcatgataggcctcaaccaacaacgatgtgcctgatccacgccatcctgtgtatcatcttcaagtttttcaccgtacgtgttcgcatttggtagttccagctccagcgtgccgacaggatatcacataccctgcgaatccaaatgcattttagcaattgtttctttcacctcgcccagttggcagctcatgtcttcattatccttttcaagattgccagacttctccaccaagc

SEQ ID NO: 89044 - DNA, 728 bp, Zea Mays
atgtacatctacttagcatacatgtatgtgcaaatatgcataacacggcgttgtgtaatgcataaactggtcagactgtgaagcatgactatacaaaaaagagatgtttccagtatataacggtgataattgtatcatacacttgagacaaaacaagaataatgtatgggcatagaacggtgataattgtatcataaatgtatgggcaaacatgcataacaccggcaataagtatatcataaactagagacaaaacaggcataatccgaggttgttgacagcatacaattgtacaggaaattggcagaatcaaatgcaagaaacacacatgacggtcaaacacatagggtacaatattccagtttagacattcgctgatccccaaagttgtcattgacataacataagaaacatagtctttgcccatattatacacacatgactgatctgaagtttagggaaccattgtatacacaatatattacatgtctaaactaaactacatccattagaccttgaatctttggatgtcttcaagcagcgataatgctttgttcttcggatggaatgtgatataatgcagcgcaagagatcgtatctcactagtgttgccctgcaagacaataaaattgtgttagttatacatgtgtaccatatgttgccttgtgccaactatagaattaactggtaaatttgtacgtactgcttctatgtctgaccgcagagat

SEQ ID NO: 89045 - DNA, 522 bp, Zea Mays
ggagactggaattccttgcaagactatggctccttccagtagttcccaagtcttcttctctcttctgatagagaccgggtgaccttcaagaatctggggatctttagctctcctgggttgaactgggttggatgaagcgggctcttggatccatagggctctatgttggttatgggttaccaagtaggcctccatcaacttctggacatgctcatccttggcttgcttcagggcttcaacagcaatgacttcacgactttccaaggcagctacatgggcttcagctgtggtgagatccacatggagctgacaattgcgcttctctacatcttctgctcgggcaatcatctgatggtggtgctgagccaagaaatcataatgtgcatccagggtgagcaggtaggcagtgaggtacacgactatggggtcaacctcgtccccaagcagttgttgcccttctaatgcacgcatcctggccatccaaactatacggtttctctaaaaggacggaaacaatctgag

SEQ ID NO: 89046 - DNA, 412 bp, Zea Mays
agaagatcagcgaagctagcaaagatcaaactccgatgagccgacgtgaagctgtaaagggtgagaaggagacacatgagtcctatgcttcaatgagatgcactctagccgctttgaaaaacgcagtatttatgatgccagacaggctaaaagaaagggtaaaggacctaggcttcagctaattattgcaaatgaacattgaagcaattgaggataggatcattgctacccttttgttgtctattgtgtataactctcctctgatgttggtggacggtccttgccaataactgtagaggttgttcaggctgaggctattcaacttgttactggattgccgaggggagacgagaagttcccgaagctgaacaaccattccatgagtactgccagatatagttttaggccagta

SEQ ID NO: 89047 - DNA, 885 bp, Zea Mays
tatgtgccacttcattgtgtgaggcatcaacgctccttctgcgcataacttggtcgttcggtcttcgtctccctgggtcgagctcatccaaactagttgcggcccgagagtgtgccttgctatgcaagccatcagaggcccatctagcggcccatggggcgtttttgtgctcccacccaaggttggcctcgagcgagtcgtgactgtgtttcctatccaaggttggcatcggacaagtcgtgactgcgtctcccaccgaggttggccttgggtgaattagaactgcgtctgccgtctgaggttggcctcgggcaagtcaaaatagtgtctcccgtccgaggttggccttgggcgagttggaacaatgtctctcatccaaggttggcctcgagcgagtcggaactgcatctcctgtccgaggttggcatcgggcgagtcgaaattgcatctcccgtccgaggttggccttagacgatttggaacaacgtttctgtgctcataaggacccaagggatatctatttcatcaggttgtagctgatgctcgagaggttgacttttccattctattgtagtcttaggtgaaggtatggttttatgtttcaattaacaagaattatctgtgactttatactaaccttcatctttcgcttgatgtatagtaggtggctaataatgttatcaaagacattcttccctaggtgcatgcaatcgatggcatgccgcatatacaactcctagtataacagactttaagaaaactgacttgttgaaaggaatgaagacattcagtggttcttccattttctcctactttctcttccttgtcatgttccctcttgttcttctttctagctcgacctccatgtccttcaccacgccaaac

SEQ ID NO: 89048 - DNA, 551 bp, Zea Mays
ggcctcatcattctgaagcttaaagtcagtggactcataaccatactcatcagcttctccctctttttctcgtttgctttcatgtaaaaccattcattattccaaccagttggccacttggtgcgatagctaagaactggtgctttagtatcctttcgatacgcaaaattgtagcagccaaaattttcatgaaggccatctgccctggccttcgtctggtaatgcagctcgtgcactcggcagaaagctttggcattaggactcattccctagcttcggagggcccagatgtagacgctaagtctaacaattgcgttgggtgtcaattgatgaaggtatatttcaaaattcttcaaaacctctcctatcatatcatagagagggaaccgaagccccgccctgaagaagcttttaaacacaataacttcatcatccttcggctctagaaccacttcttcgccagcaaaacgaacgagcctactctcgacttctccaaagtaacccaattttttcattataaccatatcatctgccgtcacagtagatctacc

SEQ ID NO: 89049 - DNA, 425 bp, Zea Mays
gaatggtttagccctcccctcttatttatagaaggttatcctccttttctgaagtactcctagatacatagaatgtatccactcaacgagtgctaaaatgaacaactttgggaatttcgatctgacgatctcgcactgtattatgtcacgtgtcctctctaatttcctccaaaaccgtgccatcaggttttgagatccaaacctagtgaaacttgtgaactgttgtgcagtggttttgaggcgtaaccaccaaaaaccgaggatggtatacttgatacacaatccgctcctctatgttcttgcgcctgccagtgtccctaggtgctagccaccacggctgatcacccgacttcttcaatcccttggccaagactcacaatatgtccttcaccgcttccaatccatcatcacgaacccaccttcgc

SEQ ID NO: 89050 - DNA, 485 bp, Zea Mays
ttgtgatgtcttctatgccaaaaaggctttcatgcattatattatatatcttcgggttacttcgggtaaaactttatgcatgaggagagagcagaaaattaacttatctgtgtttaattgtatttcaatttaatttcctagatttccaagcactatagagcttgatacagctgttatggccacttggcgatatatatagagcgaaacaaaattgtttatgaaggttgcgcgtaatgtgacttcaggggcttgaacaacccaccataatccacacgaatacaagctcaagcgtatccgacgtcaatgtgtgtcatccatcagggctacgacaacacaacaagccttcataataaacgcaacaggcgcagttgtgactcgatagtcggagtacaagacaagtccacacaacgtgcgcaataggcgcaattgtggctcgcggcagacatacaatgcctacagggtatgcaaaaaatacgcgactcagc

SEQ ID NO: 89051 - DNA, 764 bp, Zea Mays
atttgatgtgaggtgtatttagcattttgtggagcattactcaatacaacagctttgacctcttcatcatatttagcaattagctttaccatctcgagaaaattaccttggttctttgaattagcagactcatcgtgtccacgaaagggacagccttgaaatgctaaccatcggactgtatcaattgatgttctaagccgcaatctatttgccttaacttcttcacttgtttgcatctcaatgattggttcaatatggcataatcgattcttcaaattatcatagcatttaatagaataccgatgagctgacccgctctctcccacatgaattttgaaggcacaattatccccacttttaacctttttccaatttttaaatccattaacagtaaatacatcagatcctgctcttcctactggcttcttagaaaacaaaaggcaaggaaagcaaaaggctacatcttttgttggtgagtattctaaccaagaaaaaatttcaaaccactatgagtgaaacctccgtgggtgattctttggacctgaagccgggtatacatctctaaaaaattggtatggaccatgtttcatgtatgctctaatgacttgttcttgcttatgaggggggtaagtctgaatctggcaacgtaagcctgggtctctttctacaaccaacatgctagtgtcttcaaaatttactcgacacaccttaggtgatggttgttctggagctttctcttcttgatcatcctcttgttgtgcagc

SEQ ID NO: 89052 - DNA, 473 bp, Zea Mays
ttgggtacctcgttactaggtacccaacagcagccctcaagccttcgtgcgacttcttggagtcggtcggaggctttcttgtcatggatcaaaaagccccgagtgcgcgcaagcgcatcagtatgaagtagcccctgaaccaccaaataatccttgaggattgcttggggtttacttagttcttggcgaagcaatgggcctaccttttgctgacctcttctgacctgaccatatcaggtacgcgcccattttatgtcgtggctcctgattcggcccttcgccagagcggagcgtagtcttggacctgcatggagttgcccgaacgcagcgatctccgaagcagaacgtggtctctgtggatggactcgtatggagttgcccactagggcgagcgtggcatccaaggacagacccatatggagttgcccagaggcggtgcccgtcggagcaaggcctgaatgcgcgcacgcgca

SEQ ID NO: 89053 - DNA, 1451 bp, Zea Mays
agacacatgataccgtatggttttgttgagcatcatgatttagactcaacgattgctaacccgtcatcttacgaacccttcttactagcaaaagcttaggattttgtggtggtatcatcttgggtagcaaaaagtcaaaaggaagaccacaacatgaaagcacatctcgtcacacaaaaggaaggcaccagggagccaaatgggagcatgagaccaatttcagaaaaactctaacgaggaaacaaagctaaccggcaaaagtgctccctcatggacaccctcaataacaccccattgttgatgggaaagcatggtgaattggtgagtgaccaccacaataacaacatgtagatgatcatcacaaggggccttcttgtttaggcatggatctaaaacaacaaacaaacctactagtcgcgtcaaataatggaggcattgaccataaatttgcatacaacacgagttcctcgatagaaagaggtcacgcctttcaagccaaatcgaggtgtagaagcacctccattgcaattgtcaattggatcttgggtttaggaagctcatttggcagggacaccatactggaagggggtgggggaccatcagatgcaaccatgagaaaaaccctaccatcagcctcaataatagtgtctgatggtgcaagaagttaaccaacaactagaggaggacatttgaacatgctggaggagagttgatttttatggggaggttgtggtgtctcatgtgctgcacgccaccacatacttgcctcaacatgttacccacactaaacgcgttgcgaggtgccaatgacattgtgtgtcaaggtgctctcagatttggatctaagcccactcaataaagacatgactatcctgcctagcagcgacaacattgatgaccggagttgcgatagggaccaagggagatacaacctgttttggatcttatggttgtagaaggtggagttccacatcaaaaccaacgtcaatgatagggaccacgaacgagagtgggtgtaggagagtttatagttgttgaatggtgatgcgagagaagaaagaggagtgagcgaaagagggggtcatcaacattgaggaaaccctagccagaaaacccatgcgttgaagatctcatctagtcaccattggctatttttctagacctcaagctatttctcatgcctaaacttgtgcttttaggttggcatataatcaaattattgcaaactaagtacacatttatgatatataataaattaggtctagttttgcacaagtaatcttgttgtgtggaaagtagaaagcataaactcaaaatatgcaccatatgaaagcatcgaagcaaggaaatgtaagaaaaatgttttttgtgtgttgaaaatgaacagataaataagactatacattttctatctttgttagtgaaccatgactcgcatgaaaattcatgac

SEQ ID NO: 89054 - DNA, 454 bp, Zea Mays
gaggaacctaggaaaaatacagagaaccctagtccagagctaatccaaggttaaatatttattaggcactaagaaaccaaggaaaaccatgattaaaaatataagaaccctttcaagaaaggtaagaaaaattcattagactcctaactactaggacaccactacaaaaataataaacaccccaacccctcacaataagtgagctaaacaattcaaatatggttttggcccatgttctaattaaatcataagaaagtctaaaattgtgcaacagtaggcaaatgaatttttacccaactattgaagaagtagaccactagaaaaaaatacaaaacctattcaaaaatataaaataacacccaataccccctaccccatgaaaaagaccatataatccaagaaattctaccccctcttcccttatgcaaaaagtttccaaattctagaatgattg

SEQ ID NO: 89055 - DNA, 413 bp, Zea Mays
ctgaagcttcagtcgggtctgatgtactagcagcaggccgctgcttatttgcagggaatgaacctatagaagccgccatctttgatgtaccattggatggcgaagacctagctgtatttccttgggatcgtcctccaccaaaacaagcactggattgctgtttgcgccatgggacaacattataatgacttgcataagattttccacgtgactcttgttgaatttttctctctgtacgcattgcttgaacaactagatcttgcaaggtacggtatgggaacatctcaacaaaaatccagaaatctcttcattgagtccacctaaaaatcttgccatggttgacttgggatcttctctgattccagttcacactaacagcaactccatctccttaaaatattcatcaacggatt

SEQ ID NO: 89056 - DNA, 510 bp, Zea Mays
acagacaggaactagaggcgacgctcgtgcttgaagaagacgaactatttggaaagcagcgttggagtgcgggggagagagagaacgcggaggaaaagggagtccacaagccggcctccattttccacgcctggatgcagagcagagctcattgggcggatgaatagtgcacgcgaccgcgcattttggggatggtgagcgcgatgcagtctctgctgaagttggtctaataattccattctggcccaatgaaccttgggttgggttttacagtccgtttgctgcttcccccttccgtcggcccatccggctcctgaatcttgattttccccagcagagccgttgtgacacagcgccctctcatttaaatccgcaatgacacaagttttgccacacctgtgaacaatttaatccacgaaatcgcagatgtcttttgctatcctgtatgctagctagtacgagtaacatcccccaccgcagcccgatacagacacacacaaagaacgagag

SEQ ID NO: 89057 - DNA, 772 bp, Zea Mays
agtagtgggtctgggagattagccgtgctgtgtgtgggggttcccattacttttctcggagagatcgttggtgtagcgtcgtgattgctcgccggcgacccggtgcaccacgggaccgccgcgccactggaattgaagcaccaccctcccagaatacggtaatccgccctccatctatttagcgctcgcctctgtgtgggatgttgtcagtaggtgtaagggtttggtcaagccatgggccagttagtgtctccggtgtggccgtgggagggggaaattggcaccgtcgtgctccatgtcgggaggtcagtgatggttggggagaccgttgatactccagcgaacggtccagatctgaagttgatcattcacctcgagttcgattggcaccgtcgtgctccatgtcgggaggtcagtgatggttggggagaccgttgatactccagcgaacggtccagatctgaagttgatcattcacctcgagttcgatctgggatcgttggtcacaaatcaacggttgtgattatattaaggcatatcccttggatccattaaaatatggatcgtcgaagtgcaagcggacggaccggatctggcatgtgcaccgtttgggctaaataaaaacctggccatcgggactcgatccaatggctacgggcgcataccgtcctgcgtatctcgaggatctaatcctgacctctggcgcgcgatcggacagcttagaacagccagtaccctttcactgtgcacgttttacaaaagagaccccgcg

SEQ ID NO: 89058 - DNA, 400 bp, Zea Mays
attttatgaccgactgttataaattaaagaacaaagagaactagtacatatagaaagaaaggtaaatctaataatgaaggtaaagcatatgttgttgctttctaaggtagataatttaaatggtgagatacttgttgcttttgctagatgtgcaaatagtggtgatgaatgaattcttgattccactgcttcatttcatatatgcattattgatagtccacatgatattgttgggaccaaatctattcaaattaagatgtgtgatggcattaccataacctcgactgatgacagcgtaagcacaaagaggttctttagtgaggatggagttttaaagatgctaagaggttctcttattgttttgaaaggtgaattaaaatctcaaaatttgcaccgtctt

SEQ ID NO: 89059 - DNA, 440 bp, Zea Mays
cccggcatcggcacgtgggccctcgccacccaaaaatccacgagatcaacatttctcgtgttttcgcttggcccgcgacggcccacgtgtccccaagcccacgtcaccgtcgccgcccatgccccacctaccggtactatctactctctctctcctccggcctccgccttcgacaagcgcgcccacccgcgcgacagcgggcgcgcgcggctgcgactgctgctgctgcttcttctccacttctccttccttcccctataaagcaaggaatagtcgcagcttgccccagcttcgcaagctttcctgctaatccctgccattagtagcaagcaagcaagaaagcagtggtagtaggtgccacccacacggttttcacggctgccggctgggagcgaccgaggagatcgtcgtcacgctcgatggaggccctggtggggagg

SEQ ID NO: 89060 - DNA, 610 bp, Zea Mays
gataaaacagatgaccgaaagctcaaatgtcttgtcaagcgtatcccgtccagctacaagacgtgggtatttatagggcaaccaggggccgatgtcataaaatacgtctgtgcctcggttacatggtacattcctagaatatgctatatagtagggtaactatagaacaataagcctggtattctggatacacccgatattctaccctcaagagaggctgatgagtggggccattgctgctcggtcgagagcgggccctccctatgcaagcatgtcaattgttgctcggccgaccttggatatatgatcatcatgtccagattttggaagaaccaacaagttgtctttcttgtacaaaggaaaacaaatctctttgcttcctttgacaccggaaggaactgtgaaggatgatctaaagaagaaataacgagacaagaagaaccacttgagagtgatccacaaaaatagtaaggaagagtttccaaagccagctaaaactccataacctccaaagtccaaggcatcgggaaaagagggattagacatgatgattagaaagggggatttaaaagaactgagtgaacctaatgccatgttctttgtgctcctg

SEQ ID NO: 89061 - DNA, 671 bp, Zea Mays
tagtcctttaattcggtcacctctttggcactcaattcttcgccactaatatgtctaaagtcaaattcaatttcttcttcatgaagagatctagctttggcttattgaggccttggggcctcaatttcagatattttaggctctagggccttgtctagctgcaacgtttcatcaacaagctctttaggctccaaggccgcaataatcttttctatcgaaccgataactattgcttcggcatctagttccaagtttggatttttgttgttctcctcagatggagttctgaatatcgtcctcttaatcgacttcatttgagaaccctttttcggtaatcttttagtcgagccatgaggtaatggtgtagcaaagcattaactgaaacatcttcgtctttgttgcccttcatggtcaacaatattctggtcaggtccggtcccagtggatttaaaacattgaagggtaaatgttgggtcattacctctaatatttgtgtcgccctaagtgatgaagctgatgcactcccgatgtccctcttggccattttaaggtctttcttctatttttctagcaaatgtatttgttctcttcctttttgaaggcatagttttgacttttaagtgcaaagagccctcaccattagcccatgtcgccttcagcttttcagtcac

SEQ ID NO: 89062 - DNA, 954 bp, Zea Mays
actttcgtctcggtcatatgtcatgacagttcaacacagtgaactctgttgtccatctctccgacttgggtctggactcagataagtcgagggaagaaaggagccgagggccctaccaccctttagactcccagagcacaaccgacgaatgtcgtggtcactcggcccatgggtgcagttttcaagccatggaggtggatcatcctctctactaccccaacaacctctttatcaatgggagggtagacgatgatcccattttttacgacgaacccaccatgcaggggaggagctcccacagcgcgatgcacgtctctatcggaatcggtgatgcaacatctggtgtcaccacaccgctgcggagcaggaccgaatccaacctatttctgagacaaggcatttaaggttgatgagtcccggatgagcggggattcctcatgtaatggaaagcttagagcaagaattgttgtgccgctcaggagagcgagcgcgaggtggctgaacgcaacaccaggctcccgcacaatcatctcccactcccatgcaatttgcagcctgaattcgcccaggccttgcagtcttcgagccaggttggcagtgtactagctcggatcacgaacgacttacctcacacgcccgacatagagggttaccgacaaatcctcacttgggcggcgaatcaccttcttccaccagcccatcccgagaatgacatgcgccaccacatcaacaaccgtcgtgacgtgtggagcaacattgatgtgtcgcacgaacgatgtcatgaggaagagttgaggcgtcgagaagggtacagccgggaccacagtgtaaacttagttatcatgatgatttgggatcaaatacaaatgcaggggaagatgtccacttgccttcctcacaaaagtcttgagggtcttcttcaaactattcctgatcctctatcacagaagcgtc

SEQ ID NO: 89063 - DNA, 417 bp, Zea Mays
gcattgtatatttaattgtctaactttattaataaaataagatattgattattttattcatctcgtatgcatgcatattaaatattaatatttcaagatccaattattggcgttatgtcttctgccaatcggctagaaaatatgattctggttatcaaaagcgtaagagaaaacaaagaatagaggatttaactcagtctcagaagggagctatggatagatttattataaaagaatcgcaagtattctctgataatcattgtaacatcccaaaaatcctaacctagggttgaaaccctaacctaccccctttccctccttttcatcctttaattccaagaactcccttagattttctttcatcatatgcatacaccattgtttgatcacaagcacatcacttagattctattttcc

SEQ ID NO: 89064 - DNA, 374 bp, Zea Mays
atttatgtgaggttgtgaaaaaactctttatgtgaggaaaaaatatttcatgagtaagcatgccatgtcagctaaatcgagtggatattgtgaattgtgaactttgagtctgtaaacttgtgatttttatgaacttgttatactgtgaacttgttatattgtgaacttgttatctttgtaaactttttatattataaatttgtgatccttgtgaacttgttatattgtgaacttgttatatcataaattgtgaacatgtggtctttgtgatcttttgtcaactttgttgtattgtgaggtttgatatgtttaccgatcgtattttagttttcgaccgttaccagtgtattttccgcaccgaactttcgtttccg

SEQ ID NO: 89065 - DNA, 327 bp, Zea Mays
tagcaaaacgatttctgtcacatagatctgctcgtgatgcctgatcaccaaacctgtcctaaagggccgattgctggagagttcatggcctcttgattgctggagttcatggcctgacctcctacgagtctacgacataacgggagtttggtaggttgcgcattcttcattcatgaatttattctccaatttcagttgatcgacagtaaggacagagaagcgagttttggcatcctcttccctcacggatcatcatcatctaattaattaaccagacagaggcgcaaaaatgattcttggcctccgtttgatgagtttcagacagtg

SEQ ID NO: 89066 - DNA, 600 bp, Zea Mays
gtggatatggaggtggaggggtccatgatggtgaagtgggttgtgggttggggtcaactaaacaacattttgggtcgatttattcggccttatttgctgagatgacctaatcgatttcgcctgcctccctcgggcgggtgaatatggttattttgcgggccgatcactattactaaccttttaattgacatatttggacaacaattgtcaaaagttgggatggctttaatcagccgactaggtgctttagctgtattttgcttccgcatacctatttcgggtcatcgatgtttgaagctacaaagtcgttgctgcctctggtcaattccagatcgttcgccctctctaaccgaattgtccactggcaaaccgaaccatccacgcctctaggccgaaccgtccgcgatgcgcagaatacgagccctggcaccgctgcctacctgcacctaccccctaaagttggagaacttgatggtgatcttcagcgtttctcctacatctagcgtcctcttagcaacgaccttcatggattgaatcttcctgttttcatcgaggacccgagggtcactgatggaataccctttccattttctttatcag

SEQ ID NO: 89067 - DNA, 372 bp, Zea Mays
cgcgtcacccacttaagccagatcattaccggcaacacccttgggagttgagttgcagctcacatcacccacctgggccggatcactaccggcaacaccctcgggggctgggttcttggcagcagtcatctctaagtctaaaggatcttctgtcacctccatgtgagtcagacaatcctgaccaacgtcttgacatcgaagactgccttctaaagtcgacgatgcacgagacactgctcgggatacctctaatcccatgttgggaatttctgaagagacagtcataatgtcatcagcagttggcttcgatagcaaatcttcagggacgacctcttcaagagcttggtgaaagtccgatattaatagtttttg

SEQ ID NO: 89068 - DNA, 678 bp, Zea Mays
gtggtaaacaacattattacgaaattggaatggactcatttggacaaagtatgcattttctatgagttaaacaaattgtagtcattatcttcacattaaaaatcaattcctaaatgattttataagttttattcactgtctggactgcgcaccaatttcttggaatcacataggctaatccataaaactccttaggctcaggcaacagtaactacagactgcgggttagttctataaaaatagagggggttcttatgcaaagtgtcgcgactgaaggggtatcgcgatatctggtccgtccgatcaccagtgtgcggtttagattagactgtgacccctcagggcttgcgcgcgacgacgaccgccagatcaaatatctaaggtggagattttaagtacgctctaacccttttcctccgcccatccacagatcagcggctcggatcgtttcaaagcgaaacgttactcttcttctaatcccaacccttcgtgtaaatctgacggtgcacatgcatcgtccctttccccagctcacagacgacggcgcagaatcaaccgcgacggtcggctccggcgagcccgaccgatctacgcagaaggacacccacgaccatcccggaggcatctaaacgcaacattcgactcactcaaatcatctagtgcttcattactagaccg

SEQ ID NO: 89069 - DNA, 2601 bp, Zea Mays
cctaatggtggattgcacgtagaggaaattatcatggatgcttcttcccttgatgaaggcactctgacagttggacaccagagcatttaggtgaggggtgagtccgttggccaagagtttagtgaggattttagcaacgctatgaatgaggataacatgcctgaaatttgtggtttttagcgcctctattttctttgggaacaggataatattagctaagcttaatagctccaaaccctaggaatttaaatggtataaacagttgagcacagacgtcaaatcattcccaatgatgttccaacatgccttaaaaaaggcaacggtgtagccatctaggcccggggccttgttagatgacatggagaagatggtgcattagatctcgtcttgagtgaatggcatctccagctgctggaggtctgcctgccaatctagggtcctggttctagtgaccgaagtgcccaggtgctcactaaaatttcatcggccaccttctctttctcttgttgggagaagaccagcccccctgattctgtaagcaatggatgtagttttttctttcgccgtgcatttgctttcaaatgaaaaaacttagtattggcgtctccacaacggatgtatgtgagcctaaaccaaagggtacattcattggccacaacctgcaaaacaatatgaacaccaggttgttgcccttcgaacacacaatcattatgatgcttctagatttcccagtcagccaacatgatgagggtgttaaggccttttcgcaacttctttagaactgttttaacaactatactccaccagtttaggaatttgacactagaccgaggcgacggagtagacaacctcaatttggcgaataacgaaaaccacacttctctagcaaaggcacatgagattaagctgtgttggatagtctcctcagcctgatcacacaaaggacaagcagcagggtaaggcagccctcgtttagcgagcctgtccgtcgtccaacatcgattcttgacaaccaaccaaatgaagaatttgcattttaatggtgcccatgtcttctagatgcatttccagggaccaaatttaactgtcccaatgaagaaggcatcatatgttgatttactagagtaaaccccatgcttggagaggtgtcaggtatgttgatctggggtgtcttggtggagcactaagttgtcaacaaggttccagagctgcaggtattctacaattacttgaacagacaacactccactgatgtcagagacccatctacggttttgcaatccttgggccaatgcctttatcttccaacccttttggggatcaaaaggaataagtttggagtgcattcagcaaccgttttaccttgtagccaatgatctgtccaaaatttggttgattccctgttctcaattgtagtaacaacagcaaccttgcacagcgctagcgcgttaggggggacacggatggggtgaccagcccaaggatgggaagcatcagtcttccgcttggtagaattaggttgaaatctcctaggacgggaagcatgcatagagagctggatgctggagagctcaaaataattacattcgtggcaaggaggatttcgcctctagtttgagatgcaggcaggacaacgaaggacgtagcaaaattttgcccaatagtacggctaaccaccaacgcatcaacattctgcaacttggaatcctggaggcaaacaatggtggcgccggtgtcacgaacaagatcactaaccacgtcgcgcctagcattgccgttgagacccctgacgttccagtttagaattcaatagtttcgttgcgccataataaactagaaactgtggcccgtggggaggggaggtgcagaagtgtaggggtgcatggaggattgcatagccaggaagacgtcaagtagacaaaagcaataggtgaacacagttgcatgatcacaaagcagctctggataccgacaccatatttggaattccaggggtagatgatgcaccgatgggttaaaaacacgatccaggtccggtgctggttgaacatctaaacataaatctcatgctagtggcaggcttccgcgtggagcagacagcagcaacacaaagggcgactctaaacgccatgacgatggcagttaagacggttgacatagtagatggtacagacccacatgaggatagaagatgatgtactactcttgtgcaggctccggcgctaaggtgttctcgaggccaatcagagcagaaagggtcgtgatggctactcttgtgcaggcttcgacgctaacgtgttctcaaggccaatcagagtagaaagggtcgtgatggtggagtcattgagcggcccttggaagaggttgacgtagtgcaggaaacggtcattgtcatagccttcgtttgggactccgagacggttcatgaggactttgcgagcacattctagggtgttcccccatgttctggttgcgatgcgtgcgctgcactggcggagcaggggaggtggggccttgatgcgtcgctgagggggcccttattaggacgctggaggatgacaggggcgaccggtgtagagatggagatgagtaagatctcgg

SEQ ID NO: 89070 - DNA, 1547 bp, Zea Mays
cgtggtcctcgtcgtcgtcagtctcgggatcggctgatccatgaacgggcacggacgcatcgaaacaactgcgctgcggaactcggggccccgccccgcccatcctgtcagctctgcccagccggaacgtgggcgtggggggctcttaaaaatcatggtgtcgtcttttaaggccaggccaattacatcattttcggcagaggactagggccaaattatatatgagcttctgttcccttccctttcggatgtgtacagttgtatccctacgcgtttgagtgtttatgatggcccctgcccttgttggtggatctggctagtgtgtgctgttgatgggggccactttacagggcactttcgtttggatctttgcgctgaaataggtggtgaggattgcgcgccgaggctaatcatcgacgtagatggaccttatttagtgctgtccatggccacgtacgaatggcccccctccctgcgctttacaggaaggaagcactgttttagcagtacgcgaaattaaaccctccatctcctcctactagtacacaaatccaatccatcatccgtcgctggatcatggtttttgaacgcgttcttccgttcccatcctataaaacctagcagccttattacccccactctgttttgttttttattttgttttttttgccacgagggtcggttacctgcactcatatcgctttagcttcaccacacacacaccccgcacgacacccccgaatctgcaagcgacgggcgtcgtcgcatgccttcgcctttaagcttccttccagtgatggggtatgcgcagcgcagggaagcttctccctttgtgctgctacgtcgtttctcggtggtggcaggcagtataccggccggcgcatctctccctctctctctctgtctctctatttcgtcccacatttaattcgcggcgtggagtagaagtagacacgacgttgtcaatcgatcagcggcgcagcaagcgaccagctcgttttgacccagaccacatggccaccgcccaccggcgtatagtataatgcacggccgcgccacctactgcgtactgcccccggcagcaggcgacgcgacgacccgactcgcactcacagttttgttgtattcatgtgggttcgtggccactaaatttggcatggccgtgacttggtgcccgttcccgtctcaccaaacctcccgcacttaacaaacgctagtaggagtactgattagtggaaacgccttgggtcccttaccacatgtaggcagtgcggaggccgcagcacaacgctgtccaacgatttgcggtgttatctggggacgcgctgagttgtaaaggggggcaaagggaccatggcataggggcgcggggtgtggtgccgacggcatctcattcttctcgtcttgggatcgaatccgattaaagagcctgtctatactctagtcttatcttgctagtgatgaaaggcaaaagagaaacaactccagacggaaagaaagaaagaaatgcgtactactcgcgcctagacggaaagtaagaaagaaga

SEQ ID NO: 89071 - DNA, 434 bp, Zea Mays
tgacaatgaaatacttcgtttccaacttaaaagttaacttttatacctttatactgttgtatgctaggctgtcagcaagatcatccttcgacaaaatcgaaaggccatcttccagcttcgggaatcccatactcttagctatctcccggcaaacggatatttctttgttgtccgggagacagtataagaagtcgtcattgttagtgccgttaaacactaaagctctcttcggatatttcaattttcgcgcatagtgtctggcttccaggacttcttcttcggacaactttttccccgaagcatgacaataaatataatcagcatcctcgacagcggcttcgggggtaggagattttgccctttctcccgcgtctggtccttctgccatgccaacgtctgaagcctgtggattagctttatcttcaggcgcggtg

SEQ ID NO: 89072 - DNA, 413 bp, Zea Mays
gttctcaacttcaggcacgacctcatcagcttcgggatcagtattaccttcagcattagtaggtacaacaactttttccaccgaggctgggggcggggtcttttggatggctttcatcacattcatcattcgtcgtttcttctgacctccggcatttccttcgattgccaaagctgtctccttccctcctgagcttcattcaattcccttctcctttaactacaataggctagtcagatccgaccccaggggacttagcatggcaaacgggaagggttcagtcattaccttcaatatttttgaaacactgacagaggaagatagagaagtaccagcagtcttttctggtacatcttgtaccttcgtctcggcaagagctatcttggcagactttcgtttcttgggagctaaat

SEQ ID NO: 89073 - DNA, 717 bp, Zea Mays
gtagtactagatcctcgtttgctacaaactaaaagttttgaatatatggtcttatctactcgatgctttgtatcactctttctaacagtgaatccaaccttaccggcataggtattgtacatctgataagcaactttctcatactctcaaacattattcctattagtggtggctctaacgatgcttcgtctaccgttgatatcaagatcgactccatgtctgtgtttctccaacaagaataagatcaagtgatcttgaagttggctgcatcaaacttggtggcgatagaggagacgagtatgctggtggagaggaagatgatgctgacaatttgaagggtggtagcgacggttccgcgacatatgttggtggagaggaggatgccgatgatacgatcagtggcgcagcggttctatggtgccgtgttggtaggagatgaggaggatgtcgatgatgacaccagacgaaaacgaggacaccgatgatccgatcaatgacgacaagggttctacggcgccgggcgctgtggtggactggtacaggtagagccgcgatgccaccaggcggagccgtgcctgctcgctcacacgtcaaaacagagccgaacgcaagggagccgaagggagtggagccaacagccatgcggtcgttctttgggcccatcctccagttttgtgaagcgaccagagtttgtaggacggatgcacggcatttttt

SEQ ID NO: 89074 - DNA, 1225 bp, Zea Mays
gtttacatgcatcagggtgccaattacttggttgaggaacttgacttggcatcaaggacagccttctgtaggaaagctgatttgaaatattacacgaaaacacgagactacactgacatcaatgttctcggaggagaatttgtatgttctcaaggctattactactctagcttcctttacattttcttcattattgactcatcccctggagtggttttcagcactttattttgtttactacttttctgtcttgtttatttgactctagtctagttcatcaaatattatgaactcctgcactttgactcttccaatatatgttgaaggcttatcttcctacaagtatatgtagaactaatcgggtgaagacaactgctcaagcaaatgactgcacggtgactactaaatggtttggtttttatcgcatatcaaaatctagcaatacaatatccgacagcttcgagcttaacctgcccccatactcctttacttcccaggtgtgtggcttgaatattattactgcataaaattatgacacattcccacatgatgcttacatttctttacgttgcccaatcaggctgtttgggtgcgaattccccactcagtaaagatgaccgtggaggaaagcaaactagaatttagaggcggctcacatgctgcttcgcatgcactcctgaatatagtgcctctgtaagttatacattgacccccagaaaagttgatgcctggtagataattttctaaaaaaattgttttcttaaaccagaatatgagtggttggtaatacagtagtgagtatttcttcctggagctactccagagtagcccctgttcgtttcttccagattccacccgtgaatcattctagctgatcaaatcttatataaattacacaaacaatctggctaggaatagttccaggccacggttccaaaggaaccgaacgggcccttatagtgcaactgttcagatcagttttcttttattcgttcttttgattgtctgtaactttgtgttggttgttggttgtacataaattttcgcaggcatatgatgtgcagtgcttctgacctaggaacagagtgcgctaatcctcatgaaagccgtggcatcccagacagaatccttttatatgatagacatccaggtggtatcggcatagcatcacaggtaaagtttcacctggttgagattgtataggcgtatttacagagattgtaaa

SEQ ID NO: 89075 - DNA, 445 bp, Zea Mays
gtgttgaaaatactagcgatgagttacttggagcatattccaagtccgaagataatgcactatctgcggcctttgggagccaaaaaagaaaagattagatagggtttttgatgctattggatttgtgtaccctgactatcgctacccgccatgggggcagaaaagaaagggtgcaacctctggaaaggttgttgcttcggctgctccaagcgagcctgcgtcgaagagtaaaaagttgaaagtcctcacccatcggccccgttatattaagtcggccgtggtgcccgagtttggtgggaagacttcttcagctgctgatccgaaagatccaattcctcctacgcagaaggctgaagaaccggctaccatgccgaaggcaccctcagccgagcaggctgaggcaaatactggtaaagataaggccaaaaagccagagactgaagga

SEQ ID NO: 89076 - DNA, 495 bp, Zea Mays
atcaggggcatgtaagagtgctgaaacaagagagcagaggacaagatcggacctgaagtgcactggccacggtgagagcttgttcacggtggcggaaaactgatttgggggaactgagcaattcaggggctctggtgagtagttggaggcacgagtgggtgtgttgagtgcacaattacatagcggagccgagggtgtgctcaatttatagggcccttgagaggtggcccatgaattcgcgatcgcgcggtggaagccggaaagaagggggtccactggtgcaagcgattggtggcatttaccgtggcaagctcaccagtgatcaccagattggctagagtcactcacggcggcgcggttaaagtaccaaggcacgtggcgcaaggtccttaggtggctatcaccggcgaggatgattccgaagcggccgtgagctaggcggacacggcaaccggagtgaatagtggctcaagttcatccacggcgcaatatttc

SEQ ID NO: 89077 - DNA, 581 bp, Zea Mays
ttcaacttttctatcaattcagccttactaatgcatggacttctaaggtgtcttaatttcacgccaccaccatatccaacaatgtgatcctgtctctttgaagggaagcacttatccataagttctgcattagaaagagaaggatctaatgatatttgttcctcaagttgtgcctacattcaaagataccttaatttcagaggtttgtattatgatgtatcaccaataaacaaaaatatatatgacttcataagctcacatgcttgctggaggattcagaatctagaaaactaccaccctttgtgtgagtcatgaaaaataaggcatccaaacttggagggttgttttcctttccgccctagtatatgcatggaatatatgtaatcaaaactaataagcaatacaagcttgtgcatgggtttcattttagagggagctggttgggccagaatcaagtggttgggccagaatctggtttgcgcgcggggagaggcacatgtattcgcgccaaaatcagttttgtgcgcggggaaagctggattcaacgtttaacgaccatagaggtcagctcactaacgacg

SEQ ID NO: 89078 - DNA, 596 bp, Zea Mays
ggggagcgtggatagacatcttcactgctccaatcatcgtgagtctactctcgagtctacccctattcctcctctctcgttcgcactcgaaatcgctgaatggtgcgcgatttactgccgacaatttctcgtcgaagcagggcctccaccgcggaacgacaacccgagtgggcgcgttcctatgcctccatctctagcgagcgctctacctgtcaactcgcggtgttccaaacgtggggtagggtcctcgtggttaggtagccgggcactcagacaccgggcagtgttttgccggcaaggcgttcgccgtggatggtgctcgcgcggccgtcgcaacggggagttgggagagagagtccctggtcgtttgtccatgatcggacgacggtgattgagtgcagcttaacaatttaccgattagatctacaccgttggatggggatcagacgtataggaagccgagcagggttatgatgaattagagccatcgatcctgatccgaacgggtgggattgagcccttgcattgagccacgaaatcggttgtggaccgttgggtccggatccaagggtccgcatagcgcattgtttctgagg

SEQ ID NO: 89079 - DNA, 862 bp, Zea Mays
attgtgcgacggtacaacgaggttgtcgacgaactggcaaagatagcctcgggacgaaccatggttcccctgaatgtcttctcaaagatatctacaaaccctcgatagtacccaaggaggcgtccaaaccaacccccaacgacgacacgcccccagccagcggactcgaagccctgcagatcgatggggaacaaggcgagaccaccctagcttcagactggtggacatcgtacctagagtttctcctttggggagaactccatctcggtaaggccgaggccagacacctggctcgaagggcgaagacgttcgtgctacttggagatgaaaaggagctataccgacgtagcccgtcagaaattctacagcggtgcatacccatcgatcaaggatgagaactgttaggcgaaatccactcaggggcttgtgggcaccacacggcaccccagaccctcgtcagaaatgccttcaggcaggggttttactggcctactgtggttgccaacactactaggattgtgcgatcccgttgaggatgcaagttctacgcaaagcagacacacatgccacctcaagccctacaaacgatcccgattacatggccctttgccatatgggtcttagaccttttcggccctttaaaaaaggtgccccagggctttacgcacctactggccaccatcgataaattctccaagtgggtcgaggttcgactcctcgccagcattaaatctgagcaggtggtagcattcttcatagaaatcatccatcactttgggtccccaactccgtcatcaaggacaacgtcacatagttcacagggaagaagttcctgagtttctatgtcgaccaccacatccgt

SEQ ID NO: 89080 - DNA, 746 bp, Zea Mays
tactgcaatagcaatgagattaaaaatcccagttaacaagagcataaccagattcacattgaggattagacaaaggatgcaacgacacaaccataagacagaagtgcctatacgccggtacagagctaactattaggcatggaactggagcagtttcttgcgaggctcgtataatacgcccatttcaagtgatgtgcaagcctattaccacactaccatcacataggagtagaacagtagaacattcgtaagccatgttgctccaggaattaaaatcaatggggcactagtggcactcataacctcatatagcacagcggttagccatccaaaaggaattcataaaattctccaaacaacatgaccaaagcatcaaatgtggtgtgataacaatcttaggacaacatggtagcgcattttgcaaaactctggggtatagtatcaggcaaaaacagtcaagtactctcaagtcattgaaaacacggaaaatgttcggctggtcctaaaacaagcccctagaatatccctaacaacaatgcacgtacagaagcagagcagaaggtaacagtcgcatgcgcacagaagaaacaaaatacgacgccgccgtgactgcactttgcagaactagtcgacaaaattgtgctgttagcctagatacgtggctaagcgtactgaaacccatggtcctaggaggaggttccagagcacacagcatctagaaccgcgtgcacggtcgtcgacctccg

SEQ ID NO: 89081 - DNA, 825 bp, Zea Mays
ggagttgtgcttctactaacatattttacttgggcctaagcctagcaaggtgggtccaaattgcacacgtttattctaataactgatgctggctaggcagtagctaatgcagaattagccatgaagattattctatatgctatccttttcagtttaacacacaaaacatcacttgttcatgacaaaatagcttagccatggaaataattccaagtgccattcatgacatcacacattgctgtacgaatactaaatatgtatgaatatgcttggttgtctttgctattaatttccatcatgcttggcagattatatcctggatgctatgaactgtgtgctggaccaaaatatgtcattttcaatgcttgtgttgttttgctgttgtcgcaaagttctgattgaatttatttccccttcaccagtctccaatagtaataacttggtgagcgtcacctgcaaggccacaaccttggcgagactgccaccatgagtgtgccccacggccgccaccaggacctcaagctcgccatcgatgacttcgacgaggagttgattgagcctgagctacgctactcgttccagcgcaacagcaaggtacaatcctccccatctccgtccaaccgaccattctttaggtcgcaactggtgtgtatgtttttttactattatcacgtaattggaataaaaaagtagggaaaatacaagtgagttattgattcacttttgccaattgttcgtcttttgcatgtatttatgcagttatattatagtggtattgtggtaataattctgttgtgcaatgatccttgactaggaaatagaggt

SEQ ID NO: 89082 - DNA, 575 bp, Zea Mays
ttaatatctttctttagtataacattaacttcaaagacatggaactttatactcacattcttatatttgtttgcagccttgacaaacctgcagtctgaacacgtcacagatgatgtcttgccttttgtggatgtacatcttggtcacctctgtttatcgcttttgtggatggattgttcagctgcctttagtagatgaaatggctctgcacttgtagttgcgtaatgtttgtgcctagctatctggattgtgccggccaagagttggctctaggtaccttgtaaatacctctggtttggttgtctgtcccccactgtatcgactagacgtaaacttggaccatgtaatcttattctggaccagtttccagctgaaacaagcctcgacgtcatgctatggtgcacgtttaagtgcgacgctacaactttaatgtgaattattttcaagctacctatgttctatgttctgttgattatctgttttctttctccctaaactaaacaattttgtttgagatttagtcattctttatttaatttagttatagtgtgtataattgtgtattcatatttttc

SEQ ID NO: 89083 - DNA, 371 bp, Zea Mays
tgcgctgtgactgttgcgtggggccgcactgtcaggtgttcgtcttcttcaccggatcctccgcattcgccacggtcaaccaagggctctgcgtgattctcggccgtggggtccccgaatctggtggccttgactggagtataaaacactggtattccgcaaaccacgttccttactcgaccgccttgaccgcctgggtgaagccgccatcgggagaagaatggcctgttgggaagctcgctctgcacagccaggtgcagtgggaaggccatctctgccgctccgatagtcgtaagtcttctcttaggcatgcacctacaccttctcctccgtttgcgctcggttttgtttagggggaagcgtcatactgc

SEQ ID NO: 89084 - DNA, 356 bp, Zea Mays
ctgacagcccgacttctagagcattttactccaatttctttaccattcttgggctaggtcacttaatcaaacttaaactactatagtagctctacaactttgttgtggtgactcatgacaaattcctcatagatccagagatacaaatgcttgaagttggcctgttaacactgttttcagagttaagaatatgggtgctcttggatcttttgcaatttaccccaattttcaccacaaaacatgcaaatcccctaacataaaagttgcttaacttttgttactctatcactttgatgtatacacctttgactaaaagtgcatagaacttaaaatcacccaatagggcactaattatg

SEQ ID NO: 89085 - DNA, 314 bp, Zea Mays
ggactatgcgggaaggagggaatggaaaagacagaacagactatgcaggggaatgagaatgggaatgggatttgcggtgaggggtgaatgggaaaggcagaacaatgaatgagaatgacagaatagggaacaaagaatgagaatggtagaacagaaaatgttggcagaacaaggaatgacagactacccttgtagccttaataaatagtagagataatacataacaccatgagaataaaaaataaaggccaagggcaaattttccagaactactaagatggtaaaataagagctgacagctcaatacatataac

SEQ ID NO: 89086 - DNA, 370 bp, Zea Mays
ctgtataattcgttgtgtcctgtcgagcattgcatgaaccatcgagctacgatcgacctcgttgtcctctcaaaagccctatgtggtatatcccatagtgcgtcgtcggtaccaaacaccgacagctggcgcgctaggtaggtggtgtgacgtagatccgtgacagctccatggtcgtcatcaacaccatcgttgaccgaaagggcactctacaccatgtagcggatatggagaaagacactctgaggtctcgcatcattgccacaacaaagaagaggctctcgttgagatccaggacagcccccgtcgtgactaaacaccagttggttgtggttggatccacgtcgaaacgtccctagacaaaagggcc

SEQ ID NO: 89087 - DNA, 599 bp, Zea Mays
catggcctagagccagatgctgactacttttgcaatatccacgaactctcttatcaaacgaaggcaactagaaaagagcaatctcacatcaattttggttgttactccttcgtatattgctttgatgtgagatgcccagtcccgacatttcagaaaaaatggccaggatcctagatgaggcaatggttctatgttaagaatgatttggttgagaggaaggatgtgaaggatataattcagcgtcccatacaatcacgcttcgacatcagaaggccttcgatcgtgaatagtgataagtctcaagcatgtctggtggccttcaacactgtgtgcagctatattggcaccagagacttggttcaagagcacatagccttcaaagtgtggccccttgttaatgaatgggaaatgccgaaggaaaccactgctagcttgagcgaaggtgacctggtttatctgaaatatacctaccgctacaaatgtcagttcggcgagccagaagatgaatggctcgaagccattgaggtgactagtgaggagttgctgggggcttatatgaaggctaaagatgaagccatgaatactgtctttggtgccca

SEQ ID NO: 89088 - DNA, 364 bp, Zea Mays
cgggaggaggtctctgtaacacccttggtgttactgtaactaaaacttgagcataacatcataaacattggcattgcatatgtttgacacacctagagtgcattcactaggtaaaaatttcaaacaagtatattgtttttggtgttttgcaaataggaccctggatagggaacctgaccctaaataaggctcaaaggggtaaaacttaacccaagatgagaaaacctaaaggctttagggaaagagtcctaaaatgtccccaaaaacaaagttgaatcacatttatacccctgggataccaaaaatctcaattagaaccctagaaaaccctaaaaccaaaccctagggacctatgtgcaaaatt

SEQ ID NO: 89089 - DNA, 419 bp, Zea Mays
gtttgagagaaaagatgaaggcattgaagagacagtggtatgagtacaacaaagaatggagttacgtccaggcttacacgcggtaaagaagatgatatagccaagggtgaggtaaataaaacaccactctcaaattgagataggagactagagattttagataacagacataatgtaatcacaaggtaggatagagtgatgagaagggtaagggagatgacaaaaaaacacaacaaaggatagagttaaaaactcgcaggtgacaaagaagaggatacgaccaagggaaaagtaggtaaagtacactgctcagattgagatggaaaagaggatattttaaaggtcggtataagataaacatcaaggtaagatatagaggtgataaggataaatgtgataaggatgaaaagcataatcca

SEQ ID NO: 89090 - DNA, 540 bp, Zea Mays
cgctgattgctcgggttcgggtgggggatctgtggtgttcatcggtgctcaccagggtggagctcgcggcatggctgccattgccgctgggcataggaattggtccggcctatgcctcaatcgcaggtaagtgcacgttcctgctattcgcctccctccacttcgtgtagggtctgtccagagtaggaaccgggcgccaaaaccggacggtggcggctcgtcggcgtgtgtgccaccgcgggatgcgcaccgccgccgcgtctagctttgggggaaggaagcaacggctagttcgttggattcaggatgtagggatgggattagatctggggaaggaatcactgtgggtcgttgatcgacttatgatcgggccagattaaaccaggggataacgtttcggtccaaggaatcctgtacattagatcgcgatcatgcggtttacgtcgttcgcgggttcataatgcgcttagtctaatctgagccatcaggcgttgatccaacggttcatataggtccttaccctttcgccgtggcaatttt

SEQ ID NO: 89091 - DNA, 685 bp, Zea Mays
gcgcttggtttgaaatttggcgaaagtgaatttttggcactcggctcagaatcaatcgctatatatgtgaaatagtggtgtaatcagtgactgggatatcggattggcgtgaaatttggcaaatatgttacttgaggtgtcatgaaggtgctgaaaaaatctggggttgatttgagcaagtttagctggtttgggcatttcaccgagcaagtggcgtgcggggatttaggttttaaatgaaatgcctattggagtgattgaaacctcccaaagggagaagattatctgcaggggaacacaatgagacactaggcacacatacaatcactaggattcacaagattttgagttttgctcaaagggtggaaaggtttgatctcactggtggagaggaactcacatagagagagatgagagggagagcagagctgctcaccaggggagaagtgcaggcacaggaggagcagactcaccgccggaggatgggtggagctcgccggcggtggacagggcagacgccggagccagagagcaacaaacagacagaggtaagaaaggaaagaagtgttggcttgggctcgggttggggaaagaattttttaaaaaacggttcatggtcacaccagacagtctacaatgcatgtctggtgcacaccggacagcacacagtagttgtccggtgaac

SEQ ID NO: 89092 - DNA, 359 bp, Zea Mays
caaaccttgaatggttgaatatttgttgttggtgtacgctaaagtaaaccttgaatagatgaagtaagccttaaatggctgatgtaaagctcaaatgactgaagtaaaccatgaattgttgaggaaaacctcgaatggccgaagtaaatcgtgaattgctataaacttagtgtgtgatgggggtgatagacgaatcaatctcattaagtgtggtgcggactagtttcaacacctaatcgttggtgtggtcagtctggttgtgcagttaattaaaagatgtggttggtccctggtgggctggtcctgttgggccttttagtctaggtgatggaccatgcatctcaacaccgtgggtgatg

SEQ ID NO: 89093 - DNA, 426 bp, Zea Mays
tccaatctatactatctgtacgtgtggttcttcagaactggtgtcgtctctgcacgcgatggaaaaccgaacctcctgatcttacgcatctgatgacggccatgattaatctttctttgcagtggttagtgcgcggggctagagatgaaacgagaattattgtggaaatctggaggttggggtgctgtgcctgtgcttgctcatcatcacacataagcatgatggcctaaatggatcataccagctagctttgctcgaagctggaccagctagctaccttcctttgctgatatagctcacgagtcatgattcaagtcaatgctagcttttctttcagttaatgaaggtgtgtataatgtgtggatgcatgcccaaaagggtagaggtgggatcctttttgcatgacaagatgcatgcttaacacga

SEQ ID NO: 89094 - DNA, 390 bp, Zea Mays
ggaatagactacttgaccaagtatgatggagtaatatcttgtgccaagaggatggttacattaaccagtccgcaaggagaaagaagtgaagtcaatgtcagtatgccagcaaaagcagaggcaatggtaaatcagttggaagagaaatctttggagcacatcagaatagtgtgtgaatacctagacgtattttcggaagaattaccaggtatgccacctgatcgtgatatagagttttctattgaactattacccggaactgcaccaatttcaaaaagagcttaccgaatggatgtcaaagatttaattgaactgaagaaacaaatagaagaattactagaaaaaggttttattcgccccaattcgtctccatggggagccccagttcta

SEQ ID NO: 89095 - DNA, 945 bp, Zea Mays
agaaatacccgcagaagaggaagctcccggagtgaagttaacagaagaaccccactgagccgtcgggtgaggcagacgcggagctccaaactgagaagacataggagtagttggtgcaggagtgggcgcagctagatactgaggaaaaccctgcatcaccatgaactaagaagtcccaggcacatagaactgctgcggagggagtggaactgcaaattgctgctcaacgcttgacatcatgttgacagtgccctgagaagaggaggaagtcactggctcccatctgagcttcccattgggattcctcctgcacaccacatccttgtggtcttgactgcagatagagcacctgccactccactgacactcagcacggcgatgcgcatcaccacaatggaaacacaccagccccagcctgggcttaggaacaacccgatacctctgagtacttcctcccaaagtacccgattcagaagattttccacggtaggggtggtggcgctggtgctgagactttcccctcttgtgggctagacctccagtgttgcccctcctcgcatcctagccacgaggctgatcaacacgggaagacttctgtgactccatggtgtactggtgttccatctccacacccagttcctgctccactgtagtacggaaatccaccaacggaaaggctcccagggcatgcctgatagaaggtttcaggccctgacggaactggctcgccttctccaactcattataagccacatgagggacaaagcggaccatcttgttgaagcccacttcatactctgtgacagacttcttctcttgcttgtaggactgcagatcaatcttcatcttctctaggaaggtgaccaggtagaacctcctctcaaactgcctgatgaaaacatcccaggacaggactcctggtgaagaggagtgagctgcctgcac

SEQ ID NO: 89096 - DNA, 283 bp, Zea Mays
tttgatgtagaaatactggtggtatggattgaagagagatgtggctgcacatgtggctatgtacgatgtgtgtcaaagagttaaggctaaacaccagaggccagctggactactgcatccactgaagatacccgaatggaagtgggaagaaattggcatggatttcattattggattgcctcgcacccagaaaggatatgttatgggtggttgtggatagattgactaaagtagcccacgtcattcccgtcaagactacttataaaggctctcagctggcaga

SEQ ID NO: 89097 - DNA, 487 bp, Zea Mays
ggtagggtggcggaaagtggatgggagaggaggggaaaggggggcgtagacagttacccgagtggcaacggcgagctcgacggagctccgagcacgacggtggcaatgatgctggctctacaggctgcggtgggggtgctccgggagtcacatgggtgcagcgggttcaccatgggacctttagtggccggtggctcgatggccctcaacgagacacaacgcaacgacaaagcgaggtggttcttattaaataaagaccctagggcctaactgcaagattccaggggcttgggtgaaagaagtgaggacgacgtgttaattctcgagaaccggggtctctttagcaaaattgtgcgggcgaaggggtatcaggtcacatgggccgttggatctccgatccatgaccacgattagattgggtggggatgacccgcgcccgctctagtacgtgcggctgacacacggggcccacaggctagtggctcaa

SEQ ID NO: 89098 - DNA, 461 bp, Zea Mays
ggctgcaactaagactgatgctcccgtggtgtgccccaccaccagtgttcctccacagcagtcatgacccgtttggtgtcagcctcccgtcaacattacagaggtaaaaccagtggctttgataacccttgttcgaagaggtaaagggagataaggatgtacatctgtgaccgatccaagcgcaactgaagcatgcagccaccagctctcaccgcatggtggaccttcttcacctccgaagggagggaaaatggatccgcgcgaaagaggtggaaccacaaatcctagtggggctcgatctcgaggtacccctcacagaccgttgtataaattgtcgtttgggctatggagttggagtttaagttatggagctccaccccatagtagtgtgggagtgcccacatgaagcggctcatcggcatctcgaaccctagctcgtggaaggatacaaagctgacaat

SEQ ID NO: 89099 - DNA, 475 bp, Zea Mays
tgaatgtcgaggcttgactaagggattggagaagtgaaaggaccgaccgcgggggtgcctagtacctggggttattgataagtgcaagtgtatatgaaggagtagatcgtatttaccaaatcaagacaatggtcgaccaagttatgcggagggtctggaagacttggtgattggatggttgaggattggtggtaacacgtgctaatatcatggagggagcatgtcagacatgactcacgatgggtatggtggtttgggcctcaaacccaccgggtcgatgttttctcatgtttggtcctcaaaacctaggcagagtttgagtaggaactagagacgtcacatggcgtcgtcgtgaagcttgcgtcaatgcgaaataaagtcgtgaagggcacgtggctatcagatctacaaaacttgagttggaccataacacccccgaggtcaagtggttccactctaactacctaggggcaag

SEQ ID NO: 89100 - DNA, 1202 bp, Zea Mays
atcagctggtgagttttggctcataattataaaaaatacgaagtataaaaatttatgcatttgtaagttcataaatggtgtatgggcggcatatggggaagaaatggtttggtgtcatgatcccaacttcgattggcgacatgaactattagatccctgaacgtgcatgctagtggtggcggaaaagctcatggatgtttagctctatttataaaattacatgattaatattaaattgatcatgcactaagcacacttttccaatcacatctagatacacactcttcgatgaagtgattgactcatctgacgtgacagctcaaaggactggttcatcgtatcgtagctcgtgatatcattgactaaacaggcaggagttggatattttgaggttgcgtgaggagatgagacaacaaagggaatatttcatggcttgcattaaacatcaacaagggatgtttcaagtaagtatagatgatgcaatctcaaaattcatatgccgtggtttcgaaaactgtggacatagtagaatttatgttcggtggggggaggctagcgcggacttgacttcgatggtgaatcaagtgactcgagaggggatatactagttcaagatcgctcactacatccattgtagtgttgatcattgtattgctcttgaaacgtgttacagagggtgcaagtatgagaatgagagaaaggggagaactctagctataatgctcctcgctctcctatccatgcctgttcggccctctcccttttatagttcaaagggaaggcttttacatggggacatgttatctgaggtgtggcatgatctatcatgtatggggtccttctgatgtagtcctattgacgtcatcttctaatacgtgcgtagttgcacgtccggtatgatggatcactccgtcctacccggtatgcatgttattgtagatactccgatgttgaggttccctatagtggagtttggctggtcccacatggcagagttgtgggacattaagggttgtacgtggtgacacctcgtctcattgatagagattcactatcactcctccggcatgctgtggcgtcagccaaggcggtgcttggtggcgacgttttgtggctggcatggggcaattgtgtcagctatgtctccctatcaggtgggtacaggcatgcgcctgccgtgcgcatgactgggatcatgtcac

SEQ ID NO: 89101 - DNA, 1000 bp, Zea Mays
cagtacgaagcagctatttaactaggggcgatgctgacagagtatccactagtctttcgtctcttccagtttactaggcgtcttcttcaataggagaatgttttggggaagagatgtacaaaaaacgctgctaaaataatggcgtgccagccatgaatcatgaatggctctgctaaagtaattctttgatcagacaaactgtacacaactgcacacgaacgtgcactctgaactgcagggaccctctgacaggattcatggcacatctgatgatcctaataacttctcacagtgagacaccatgacagatcagggaaaaagtgcaaggcaatctataatgcaacggaatagtaaaatccatcggtctgtctgcaaagtttcttttaagacccggcggggcctggccggctggcccgactcgcctcgcctgcgcgaaagcgactggagcgtggagcaaaggagcggcagaagaagttaaatcttccacacacacacattgtttaatggcacatgcgatacgatctcctggtacttggcttttggtttcgagctcaatgtggtgcgtgctaagattaccagcccttgcgcaaggtggccccctggctggctctagcaaaaggccaaaagtgcttgcatgggttgttgtagtagctgctggcaacttgccatcattctcttaatcgaaacaacttgtgttcttcaacggccagtttgtttggcaaccagctgagcggttctagggcaatgatcggcgctctgtgactcggaacgggcacgacccgagcttgggagggcagcgcagtgcaggcccaaatttgtcaggacggtctggtgtgcaggtgatggtgtttggttgttcatgctacatgtcatatacggaaagaagtcttgttttgatgcatgtagcatcgaagttttaggagcgtgatcgatggatccttgcatctcgcgtgcgtcatggcatcccgattcccgagtcgcgagggaagctcaaattttg

SEQ ID NO: 89102 - DNA, 410 bp, Zea Mays
agacaggggaatgcaattcacctcgaaattttggttgagccttcaggaagctatgggcaccaagctagatttcagcacagcctaccacccccagtcagatggatagacgaaagagtcaacaaagtcctcaaagatttgttgagagcctgtgtgctgaccttcgacagagactgggagtccagtttgccatatgcagaattctcgtacaacagttaccaggccagcatcaagatgtcacccttcgaagccttgtatggaaggagatgccaaacccctatgatgtggtcaaacataggggaaaagaccctagaaggacccgccttcgtcaaagaggcagaagagaaagttgctctgatccgcaagagactactcgaagcccagagtcggcaaaagagttatgcagacaacag

SEQ ID NO: 89103 - DNA, 747 bp, Zea Mays
ctttgcgatatgtgtaggaaagcgagtatgctatgcactagcatatctatcatgctcaatcaagatatataacatgcgggtacaatattatggattgttatcattagacgcataacacatcaggaaaagactatggcgatgtatttgtagtagttgtaggttctcgtataccaacaacaacaacatattaacctgtgctcctcacattcgtgtgatcaacattgcagcaacagtagcaactccacggtatccatacatgcgggaatgaaacaccgtgacaccggtgtgctagtgcacccacacagtgagaggaagggcgatgttggcttggacgcttgcaaccctaggaagataggtggtggttgctaagatgtgtgtctcaattttagtatgtcaaccccttcatatatagtctcttactaatttgccttcgtcctaaaggctcgttagtgttgtcatggatcatgattgtctcttgagcatataatcaacaatcttgcacttgcgctagagtcaatcatctatataactattccaaccccttaattgtgtgatccattaggtttatatatagacaaccataattgaaatccatttttgagtcattggtaaatagcggccctagcaacacattgaatcatgtatacacataaagatcatattacacaaaccttgatatgcacccattttgatccttttgccacatgatacatgttaaactcaatgcaagatttatgccacccttgc

SEQ ID NO: 89104 - DNA, 334 bp, Zea Mays
gggatacttgcagttcacgacgatgatgatccagatctgtcatggtaaagcggtggctcctttccaagatggttagggaattgctggcatcacgatacaacctatccagattatcgcgagaagctacaagtgctcgtttctcctcctacaaacaagaatcaactctcaagcatccagtaagcagtaaaagcatggcagatccaattaagtgagcttacctcgttaaccgccctttcagagtcaagctgagcattaagagaagaattcaaagaatgtgcgtcgtctaaagaagtagaaacccgagctaggtcgatctgaccttgggaatacctct

SEQ ID NO: 89105 - DNA, 304 bp, Zea Mays
ttcagagcagcctgtgatgttccttctctgcaagtttggctcgacgaaaggaaagtagtagttcaattggtccagcaacagctagctcgtgcacaacttcgtcagaaaacacaagctgacaaacatcgtactgaaagaacctttcagataggggactgggtctatttaaaactacaaccgtatgtgcaggcatccttggttcgcagagcaaatcacaaactggcgttcaagttctttggtccttaccaagtcattgcaaagatcggctctgttgcctacaggttaaatcttccagactcttgcc

SEQ ID NO: 89106 - DNA, 620 bp, Zea Mays
agtcaggccgattcccctagtggcaaagagaacgaccgtggaaaattggggctggtggtgcggaggaggctggggaatttctcatcggagttgcatctgcgtggcagagacgctttccaccataatcggctttctcgactaaaccattcctggtgagaactgctgcatcatgtccgccgtgtcatatgctttctctttgcgtgcggtagaactttgattagggtcggggtccttgattgggtgtcaccccagcgaggcatcaccgccatggcaccatgctccactgggcgcgcacaaccggtcggaagacgagatatcagtgaccgttgatctttacagtgacggtctcgattagaagcaagataccgtttcggtgcgctaattgtggccgtagatcggagatccgagggtggcaaaatgctcttgggtagattgaatggagaccgtacatcgctgatccaaggatcaggatggcataccgaatcgagtacagctgagtctaatctgggccgtcggtctatatctgagggcctctgtgtaacgataccccttcgctggcccttttgcgcataagccgtttgtgatactggatatcaacccgctgtccggggctgctgcgc

SEQ ID NO: 89107 - DNA, 617 bp, Zea Mays
gcgcaccccctctgctccccctcggtgagcagcccactgtcctccctctctctctctcttttctctgtcgtttaggcagtgaactccacccttttgcaaatcttcaaattcctgtgaatccaattgttgaaatgtgttcatatacctccattgtgtatccctgcaaacctttagctccttcgggagggcattcccacctcaaatggctatattcctaaaaccctaaatccccgcccaccaagtgttcggtgaaatgcccaaaccagccaaacttgctccaattgaacccaaatttttcaggcactttcaccacacttccagtaacctacttgccaaatttcacgccaatccgagatcccaggcttaaatttcaccaaaattcccgatttgcgcgatcgtttccgagccgagtgccccaaaccctatttcttcgcctaaattcaaacctagcacacacttcactcatattgacctatataaacctattcgtgaagtatcggctcaatcccatatcgttttgtgcctcaatttgatttccaatcatcctatgtctctatttgtccgtcaaccgtcgttttcacggcttttgacttatcgatcgtcccgtctcgtgccat

SEQ ID NO: 89108 - DNA, 903 bp, Zea Mays
gggagatagatatcccctgggtccttatgagtagaaatgcagttctgactcgcccgaggccaaccttagatgggagacactattctgactcgcccgagggaaacctcggaccggagatgctgttctaatttgcccgaggccaacctcggtgggagacacagtcatggctcgaccgaggccaaccttggacgagagaacgcagtcacgactcgcccaaggccaacctcaggcgggagcatagaaacgctccatgggccgcttgatggccccctcgatggtttgcctagcaaggtatgcccttaagccgcaaccaagctagatcagctcgacccagggagacgaagacagggacgactgagttatgcgcagaaggagtgttgatgccccgcccagggaggttgcgcatacctgaagagctagatgctcagagataactcggatgaagggtgatcgtactccggataagaagaaatgcatgtcacgttaaaagatagatgcagatagagttagatagtcatcacgacttgtaaatggataaccctctagtcatctatataaggtcgaggggtacctattcgaaggcatctcatctcgtcacatcccatcaccacctcatagctcattagccttctcaaagcaactacgccaccagtagatcgacaggagaattcaccatccaccgtccatagctcatctgtaacccgtgtacaccagtaatacttaaatactcagcctccacatgacgtagggtgttacgcattccagcggcccgaacatgtataaacttttgtgtgatctgacgtgcacccgcacgtatcatcgagtcgcaatcaacaacattgccctgcccaaaatcatcacgtcaagaatccagtggtgcacagtcaggtcataaacaccgac

SEQ ID NO: 89109 - DNA, 490 bp, Zea Mays
cccccttaagaataatatcgtcctcgagatttaagaagaactagggaaaaggtggggaaaatctatacgaagctcttcttctctttcccaagttgcttcatcttcaccgtggtgactccattggactttgcacatctttatcaccttatttcttgtaactcgagtcaatgtatccaaaatcttgatcgggtactccgtgtaagtcaaatcaccttgaacactgagctcttccatgggtaactgttcctcgggagcacggagacacttcttcagttgagacacgtggaacacattatgcacatccgatagagtagcaggtaactcgagttggtatgccatctccccaactctcctaaagatcaagaatggtccaatatagcgaggggacaacttgcccttgactttaaatctcctcattccacgaagtggtgacactttgaggtacacataatctccttcttcaaattccagtggtctccttctattatca

SEQ ID NO: 89110 - DNA, 736 bp, Zea Mays
tctggttcaccctcttccacatgaattcctggtagctcctcgacaatcccaattggtacttcctcctacggtcatgtatgatgtatggatgcagtatgaggatacatgatgcttcatgcaagagatatatgttgcttatgggtgcatgtagtgtgcatattctgagtagatttactatacagaggtttctacaagatagtctacatcgtccaagaacatgtagtctgtcttttcttggttggtcctaactatcatttagagaatccacataacttaacacaagttacattacaatgtatttctaattaccttacacctacatgtgttgaaacactaagcaatattcttcatttagccccttttcttttagaagttagttatctcttagtgagaaggatttggttcaaaccctagctatcacaatagtaattatttcctaaatcatcccagactatcctacaattgaaactaaaattacttataactgttcacacccttgcataccatttagttggacatacattgtgaatactacttgatcacttcaaaatttactacaaaaattatagcagttagtattccttataccacagaaattacaattggtttggaccattatttttgtctacacgaaagtaacaagaaatattgtagaaagcaatctaatcaattttacattactaaactagccaaacattcattaccttgtttttcctatactttacttggccttata

SEQ ID NO: 89111 - DNA, 954 bp, Zea Mays
caatcgcgcagcgcacggttgataaccagaggagaagtggtgttgcgattgcggggttctagtagtgtttattggaatccggatcgtctgtgtgacatctccaccaaatcgatagttatcttcacctgacggaagatcgggcacccctgttcctatcagtcatgttgttaacgtcggttagaccgagcattgactggtactagtcgtttccttcctttggatcacatgtggacgcttctatttaaaaggaggattggataagttgggtactagggcactcgataggggctgtgggttgccgtcaagactctgttgaccatggcaaaccatgtaagcttgcattgtgggtgctcacaatggccctggtgaacttcattgagcagtcgaggtcggtttagcacacgtttggataagggaacggatgggttagttctaatagctggttacacacctccttgtactaggtagagcatccacacgtggctagaggcatcattcgacggtggtggggcacggcgaggtcaggagctccatggtctagggtgtcgaagtcagtagagtttcctccctagtaagttgtagatgccccaaacaccggcgaagctcatggcatctgtggtgaggacaaaggtactctggtggggggaggatcatacttggaagtctcgacgatggcggtattggcactggtgtgagggctcggggtctaagaaggttgtagagctcttggtgaagtaagcatggggtgccatgggtcaacttttagagggccatgccattgatgatggggaggggtgatgacaagggtagcacggctagggccattgttttatgctagtgaaatcgcttgagtttatggcacgggcatccgacgaggaaaatgggggagcaacgaccaaggtgaagacatgaggtctctactgctagatgacgggcgcgagagtggtgtcctag

SEQ ID NO: 89112 - DNA, 326 bp, Zea Mays
taaatagggtttttgatgccattggcttcatatgccccgactaccgctatccgctgcggggacaggggaaaaagaggaaagctgctacttcggccaccccagttgagcctgtgccgaagcgcaaaaaggtgaaggttcttacccaccagccgcattacattgaaccggtcgtggtgcctgagtttagcgcagggtcctcttcagcggccaaaacaatacaaattgcttcaactgcacatggcactgaagaaccagctgtaatgtcgaagacgcatatagctgagccagccgaatatgaggctaaaagtctgaagagccaaagattg

SEQ ID NO: 89113 - DNA, 426 bp, Zea Mays
atttttcctaaaagattgtttttatgattgtactcatgcttctaagtaaaggaaaaatgcattatggcactctttggtggcttgcactgtatctaggcttcagcagtgtacttcgcctgtttggttgtggaaatctttatgcaggcttaaacaatgttcaaagtactagctagtacattgattaggcgatgtagatttacacaagctgatgaacaaaaaaagtggagatattctcatctctttctacctgtactagaaacataagttctatactaaaacatggatgtgactgcatataacacaacataaggaaccaaacacaaatgtaccaaatgtgtcttgtttgtgcaggataactaaacactaagatattgtacacgattattctggcttagattgtgctgcataaggtctaatacaagcaaa

SEQ ID NO: 89114 - DNA, 743 bp, Zea Mays
aaaatataagaaaatggttttaaggccatttccctttcatcatctttacccttgtcacctctatatcttaccttcatgcttatttatacatgccctttaaaatctctgctcttccatctcaatcttagagttgtattttacccattttcccttggtcgtacccccttcttcgtcacttgcaagtttttaactccattctttattgtgcttttgtttgttatttcctttatttttctcatccctcgattttaccttggtgattacattatgtttgttatctaaaatctccaatctctcgtctcagttcgagagtggtgttttacttctctcgcctttggtcataacctcatctttgccacgtgcaagtcttgtcttagctctattctttattgtactcatgcccttggttctcctgaacctttatctcttctcttgcactcctgcctattatcgcctttaacccttgtaatatctatatttttaccttgatgcttactttgaaccttccctttaaagcttcctcttttccatctcagttagagagtggtgcttcacctatctcatatttgattgttttccttctttgccggcttgcaagctttttcctaattccatcctatgatgtgtttttggttgctattcccattacctttgtcatccatcgatcttacctcgatactcatctttacacttactctttaagatgttctctcttccaccctaatttgagagtgacaacttac

SEQ ID NO: 89115 - DNA, 666 bp, Zea Mays
ctacacaaaaagtggagaaaaagttgactgaaaatggactattgggtttctcgtgactgaaattggttcagttaactagaactaaaattcagtaaatgcccctgatctccacattaatcaaggtcgggagcgatgtcgcagccgcatttgcacaacgcgtccacctcttaaacacaaggtcaaactttggtcctctaaaaatatttccatcattgaatacacttgaagctgttcgttcatccggcaagaacagaatgaaatcctcaggcattgcctggtgaatggacattgcacccacatcgacgttaaaactttgagcaacttcattgatgatctcagcccctaggacctctggcctagtaccaactattgtgacaaacagtgccttccgcaaagctgcatcctcacgcgccatctccgccgagaattccagcacacataaaggagagaacagaggcctgccttgctgatcatatttctgctctaccgttgtaatctcctccaaagctgtcagagcaacgacatcgtcggaagatacagaagttggtgataactgttgcattgccgccccctgacgccgcttcacctgatgtctcttcctctttctgcgatgaactggtggaacagcctccccggagcccaacgccaacagcaggggtgaatgat

SEQ ID NO: 89116 - DNA, 495 bp, Zea Mays
taataagtgcgcaaaaatcgaagtcttttccaaaagactctccgtgcagaagtcgcctacgagagcagccggatcaacgaaggcacgcaacctcataatacaaattactgttacatacacacagcgagggcatcatatattacattggctcaaccttcgggatgatacccatctcactgtaattgaacaacattatcctcaattcctcaccctcaaaaagatttcacagctccccttcacctatgctcgccacaatcgacgaggacaacagttctcgcttaccagtctggtccacgcgaagacggccacgctccatcccaatacgatgacgcctaccactttgcgacaattcactcactctctgtttcgccaccgcccttcgccgcctatacctagtattcacacccgggagaccaccagaaccttccacgcgcggcgaaggctctgctacatccacatctaatgctgcaaaataatccaagccttcatccgaag

SEQ ID NO: 89117 - DNA, 730 bp, Zea Mays
gtaacataggaatatcatttttatcaacaatatgccatcaacatataggactagaaataaatgtgcgctcccactggccttcttgtaaacatgtgaacacaaggttgatatatgctcttttgttttgagtttgtgatgagcgattgttaatatagtagcgttttggttgagtcaagtgtactaagtggggtgtgagtatgtgcaacatgtttcttggcttatagtgcgaaggtgtgaagtctaaaggtggtggtcgatgacgaaggtgaaggtcatgtgacttcatgccaatggagcgagagcagtgaaggatgaatgctaggattcaatagaatgactagagaagttgggtgactagctacgatggctgacacctagggacatcgactgatgtgaggaaacaacagagcggatcatattgctgacgcaatcaaggactgacagaacacatgtctagaacatgggggacacatggagtacgctatctatgagggtttgttggttgagcctcaaaaccacccagcgatgatttcaaaaccttggcctcaaaatccaaggcgtggttccaacgagaattggaggtggcacatagagccatcacgtaggttgcgtcaaggtgaagcaaatccatgaaggagcatggccatcatatttacagcttaggagttggaccattatgcccctagctaagtggtttagctctaaaaataactagagatatgttaggaat

SEQ ID NO: 89118 - DNA, 498 bp, Zea Mays
ttgaaaatagatgtaattcagagaagccaagttcaagccacaatttatactggttagttcgttaaacctagatcagtttaggtaccaaaaaatccaagctgttaacttgagcatggtctaatagttgaaatatcgtagcagcagtaatcctttttttcaatgataacagaagaagcaaatggaccttcctttttttaaaccacccattcaattcagttggtacaccaacatacttcattttttatgtgcatgaacttttaatgttctaggttgttatactaattctgtcatccatcgatgttttcgctcgttcaataattgcctacatatgggacgagcttctgtaggagatacaaatgatggggcgcaacatgcattgatttgttctgccatgacgaatttataatgagcataataatctatgggtgataagattttttcctcttagacccaagtgatatgtgtaactagagtacggagactcttacttctcttttt

SEQ ID NO: 89119 - DNA, 274 bp, Zea Mays
catctatataaggccgagtgggtgcccctatgaaagcatctctcatctgccacatcctagcaccacctcaaagctcattagccgtcttgttgcgatcacgcgctactagattggcaggagactcacccaccaccaccctcagctcatttataatcggtatacaccagtgaaattccaatatccaacctcaacatgaagtagagtgttacacattctagcggcccaaacctgataaacccttgtgcaatccgacgtgctcccgcatgtaccatcg

SEQ ID NO: 89120 - DNA, 806 bp, Zea Mays
tggactgggtgttcaatcagacgacagacaacgtcgcctaccctacccagcactggtgctatttgacaacgtcgcctacccaaatcatcaatatagccacaaccacaacaccttatgatagcaccatatatgtagtatttaggcaacttgtttttgacaagatacactgattgtgcattgctcagcaaagatacaaaagtcgcagaaccgacctacaaccaaccttcttccgacgacaacaaagaggataatggttccacctacatatacgtactaccagcattgaagtagaaacaggtgtggaagcttcagaaaagccttgtccgttcatgtcatcaacgacatgatgagcgggagggactggcaccttgcagtttcaggcactaccgtaccgcacggaccggaagcctttgtcacttgttggcgtagaggaagacgtcagtgaggacggacttggacttgagcgacgcctcgagaatcgccagaccctgcatcgtgaaaaccaaaaaccagcatcaacgtgcattattttgagtaggccgggtgacgcaggagatggcggatatatgaagggcgaagatcagtggtggacacaccgacctggttgtagcccagctgcacggtcttctcctggaggtcgccgatgtccctcacggcgaaggtgttgagcaaggtgatgcttgagatggaggacttgggcgttaccgtcaccgtcaggtcgtccagcaccgtgtacgtcgcggtgccctgcacgaaccctcccgccgcgctctgcgccaccgattggccgacggaggcgctgctgc

SEQ ID NO: 89121 - DNA, 722 bp, Zea Mays
aaggctaacgaagccaatcttaccacgcagtccgaagctcatagagccgaaattgaaaacttgaagaaaaaacttgccgagaagaatgaagattttgaagtggctaaagcaaaacaagaaataagcgagtggaccagcgcaagattgcaaaagaatgtagaggagcttcaggaatcgaaggagagatattacgaaaaatccttggattgtgccaagaaactaaaagacagttttgcaaaggtgggtgcttactcatccgagcagaaatttattagaggcgatcccgaaggaatcatcgaatggatcggtgaagaagccgaaggttttgaagagatccttagtgattgtggtgatttctgtgcctttgccggtgccagaggggttgcaacaattttggaaaaatctggctgcgaacacgttaaagctgcaacccagacggaggttgtctttactgtggagaacacgagggatccttccgctgaggcgactctggtgggcgcaaaattttactccaacatttggatgaaaggcggccgagaactagccgatgaagttataaagaagaataagaaagaaactcatgaagccagagaagaagccaagcaagccgaagaggctgccgagcgcgcaaggcacataggtattttaactgtttcatagctttagtattttttttggcttcggattaacaacttattacttttactgtagctgaactttca

SEQ ID NO: 89122 - DNA, 410 bp, Zea Mays
ggccgagcggccgtcgtcgaggtgtatgtcgttcgccgtgaccgcgccacgtcatgaccagtttaccacgtcactgctagtcgtaatagctcactagtgaccgttgtagctcctcaaccagtgaatgccacggtagaacaccacggtgactttgtccctctcttcggccgccagcacacttctttcaaattgggcaccaccgccgttgagctctataaattgaagcctcagagaactccgccaggtcgtcatgaagccagagcacccgcccctgcctccgattagccaccatagcgccctaatttctttcttcccccaaatgtgctttccgcgccaccgtgaacgcctcaccgtggccagccttctgcatgtcagttcaagcttccttaattggtgttctagcctccctc

SEQ ID NO: 89123 - DNA, 455 bp, Zea Mays
gtggtttcatggagagcagagcacacgttcggaagcaaatgctctacagctgcaggtgcagtaagttaactgcaagggctgaatacttatttaaacatttctttcgaaccaagtgcgtcgaagaagattgtaaacaaaagaagtactgagtaaaacgggtagtcagattacccggactcacgcgttgcagtttatatatgtcaagacgtcaagtgttacaagaaaatgggccgttaccatacaattaaaagaaagaaaagtagcccattcatctgtaagcagataagcccaacacagcctactcaacatgcaaagatatttctcattttctttcacaagtagatccataagccataatcccgggtataccgtttactccatccggacccgcggcagcatagttaggccattgactggatgcaacgaaagcgtttagactgtgaccaatatttggc

SEQ ID NO: 89124 - DNA, 397 bp, Zea Mays
cttcgcccgaggcctcctcaggggtcaccataactccacctcgcccaagcctgcccttcgacagggtatgttctcgagagaatcctcgtcccggccgaggtcccctcttcccagaacgtggtctttgccttgcccgagcccgcctcaggtaaggaatataaacctagggcaagacccagctgaagtccgcagggacaacaacattcaatgcacatacctaccccacgcagggttgcaggtgtacatgagcaacaagattggggtcctgtcaagatccaccaattatgattacgcatgtgaccactgttccctcacaccgtctgctaactcccgatgggacatacaatacgacaatagtatatgctagccctcgggcgcaaactctgccttgctcgaa

SEQ ID NO: 89125 - DNA, 386 bp, Zea Mays
ttagtaagtcgcactaagtctgaaatccaaatctgtgagctccactttggaccactttttctcctagttccaagcagtttcaaggacatgaccctcactatgcattactctcccaacattggtctccaggtttgttacaaaaactacagcctaaaagcacatcgattgaccaccgaggagccccaaacttgacacttttcactgaaaattcagttctcaatcagccagactgtctgaaatccagaactgaacattacatctttgagccactgtttctcccaattccatataaatttaggggcataacctttaaccaaacttatacaccaacatgtggaattccacttttgtacatatactttaacccatagctgtatgtatcagcc

SEQ ID NO: 89126 - DNA, 1302 bp, Zea Mays
gggcagccttaagctgggacacatggaatagtgggtggatctgggaggatgctggcagctgtaatttgtatgccacggggctgacacgttgaagcactatgtatggtccaaaaaacctgaaggccaacttctgatttgctctggtagtcacagatgattgaacatatggctgcagtttaagataaacttgatctcccacctagaactccctttctgatctgtgcttgtcggcttgcttcttcattcgtgcttgtgctctgtacaaatgttgtttcaccagattggacaccatttccctctcttggagccatgtcgccaaatcaggagttgcaactgctaaaccgatctggagtccaaaatgcctaggtgtatgtccatataacacttcgaaaggtgatctggctatggcggaatgaaagttagtgttgtaccagaattctgccaccggaagccactgaaaccatttgtttggacacgcgtgcacaaaacatcgcaaatatatgtctcgatgcattgatttacccgttccgtctgaccgtcagattaggggtgatacgctgaactcatgcacaactgagcccccgtgagatggaataattgctgccaaaatgtactggtgaatactcgatcgcgatcggatacaatgttgtcgggcattccatgcaacttgtatatatggtccagaaataatttggccaccttggttgctgaaaaaggatgtgacagagcgagaaagtgactatacttggagaaacgatccacgaccacgagaatgcagtccatcaatccagacttgggaagtccttctataaagtccatagaaatagaatgccacacatgaggcggaatgggaagaggtgccaacagtcctaggtagtgagatctatccggtttggcctgttgacaggtgctgcaagattggacgtactggtgaatgtcatgtttcatgcccttccagtaaaacagttgtttaatgcaacgatatgttaccggaaaacccgaatgtccaccaagcgctgaatcgtgcattgctgaaataaccttggattgcacaacactattgtttcccagccacacttggcccttataacggatgattccttgtgagagagagaacgacgaagtgggacaggttggtgttacagccagctgagttagcagttgctgtgcttgctcatcattctgatatccctagagtacctcctgcagccaagtaggagtgcactgagaaatattactgagctgtgctgaagctggtactttggataatgcgttggctgccagattatctgtgcccttttt

SEQ ID NO: 89127 - DNA, 1886 bp, Zea Mays
tccccttagtataagaaagtaggatcacgacaattcaagaatgggaggaagaaatccttcttaccttagattgagtagcctagatttgttcccgctctttgtgtgaggctgtgtaactgatatatgttcgtagatatgtaaaatgcatatgcagtatgtgtggcaataaattatgtttttgtgtatacagattaccgtgcatggacataaacacgttgttaaatagaatatggttgctgacttgtacaatcttttatttatgcagttattaggggacatgtttaaatactatgttgtgtattttcttgaagaattttttggggaaaaagctgactgcagtttgtttatcggataaactatattgtttcaatggaaattaaaagatgtaaagaacaacactgtattgtcttcaatggaaaaggcatatttgtgttcagtagaactcgtagtttttggtgataggtttgcgacaatcgcaaatagtgaatgaacatataaaattaataagtaaataagtcagattttgagtgaagttaacaatgtatcgagaaaaagtaagatgattggtgcttcattatttcactaatttaatttactgccaatataattatagtgaactatgtgattcccttagaacgatatttgtattggccaaggatgatgataatgatgatggcagaaatgcaaaatcacaggaccattagcagctgaacctcaaatacctacaatttgaacaaaaaacaaacagaagaataaccgtaaataagttgtattgtacaaacaatcaaaattatgcagaatttacattttgtaagaaatgtactaaactactaatgccccttcaaatcaaatctagataaggagtataacatcgagatcatgtacctcttttattatgggatgcaatgtctcactgatgtagcctactttagaagtgattagagacctcctcttgcctgcacagtacacaccaagtcatgaaaaaggttagaataaaacgattgtcctaaaacctatgtcaagccatcaagattcacatcactacaagaaaaaatagaatttactatgtctcacagaactggaactaagctagtatccaaatcacctcgagctttcatcggaatcaggacgcctttcaagacccgtatgagttgcaatgtctcactgatgtaacctacttaaaaaaagattaaagacttcgtcttgcctacatagtacacaccatgtcatgaaaaaggttagaataaaatgattgttctaatatcatattgtcaaagcatcaagattcatatcattataagaaaaaaatgggaattactatgttgcctagaactggaactaagctgatatctaaattacgtcgagccttaatctcaattaggatgtcttccacgagtcagatcatctgaacatcacataggctatagatcatcgcaataaacaaattcacgggactaaaaactgcaacagagtccacctagatgatattcatactcctgaagaacatgagaacaaattcgatgtgcaaaccttgtgacttcttctctgccaagtggaaggggcatcggcttgctctcgccgttgaactggttcacacacctatgcacggattaattgttttcacggtggcagacataatttgaagcccctccccctccacgacatgttcagatcaagaagcgagcgactgggtgtggagcaggccgatatcctcgaaccattccagctacttgaacctaagaggcgagtctttctgcaacagaaaacaactaagataagagtaaaaatgaaactcgtgtggttcatctctagcagtggttactcatcattgtagatgatgacgacaaaaagaaaaagaaaaaactttggatggttaggttgttgcc

SEQ ID NO: 89128 - DNA, 1799 bp, Zea Mays
aaaaaagtgcccagccctaggagccatgcggtatggtctcttcgcgatgggcgttgttccagggatcagatctatgtagaattccacttctctttctagtggcattcctggcaactcttccgggaacacatccatgaattcttccactactgacatgctttctgttgctaaattaaacatcataggatcattggcgggtgactgagcctaacaagagaatgactttccttggtggtctgtgagaaggactgtcttgtttgcgcaactgatgatacctttgtgcttggtcaaccaatccattcctaagatcacatcaatcccttgggatggtaagacggttaagtctgccaagaacactaccccacttaaaagaattctgacttaggagcatttgagctgacatagaaggtctgaccctggggttcgggtgaccaagggaatctctagaggggtagaggggatgccatgcttttccacaaaactagtggctataaaagaatgggatgctcctgaatcgaaaagtacagtagcgggagtaaattcaacaaggaactcaccgagcactactcccggagcttgctgagcctcctgagcatcgacgtgatttactcgtgcccttccttgatactgggtcttgttctgctggctgatggaggagggcgccttgggggcgggtgctgaggtattcttggggccattcactgagttggagtaagcaggtcctgatggcttcagctggggacagctgttcttgaagtgattgggatctccgcagtgccaacacgcattcgctggtggttggttgcttgcaactgagggggcttgaaaggagctctgactctgctgactgaaccgtgacggagtgggtccagctggtctaatgaagcttggtcccttgggtggaaatccaaatgatcgagttttctggtgccggtcttgctgctgtgctcggaggacatggaatttcctcttgagatggcctttttcttcttcctttgccctttccacttgcatggctttgttcgagaggtgcgagaaactgaggaagtcttggctggctaggatggtcttgagttctggtctaagccccttcaggaagcgggccatcttcttgacttcggtgctgacgtcatccggcgcgtagcgggccaactctgtgaatttgtgcacgtactcactgacagatcttctgtcttgagtcagttcccggaattcatcttccttgagctgaacgatcccttggggcacatggtgctcccgaaaagccgtttcaaactctgcccaggtagcatctctgatggtaacattgaaggtatcccaccaggctaaagccattccggaaagttgatgagcagccagttgaacacgctaattttccgggcatccgatggcttccagcttcctcttaatcgtgcgcagccaatcgtcagcatcgaggggattgctagatccggcaaacgtgggaggcttgagcctcaggaaatctcccatcctgtcttgtggtcttccaccattcgggcgttgattttctagacttcgagtgaggacctcgatgagtcgggtttggttggctagaacttgggctaaatctaggggtagttctggaggtgcagggaggtgagtctcacttccttccctaccggcttctctttcagctcttaggggaaaccctgctccaatcccggaggcggtaggcgtggttttatccaaatccatctgcgaggggggagagagtcactattatgcacatgccaattgttttcaaccaaattattttattcattacaccaatacattac

SEQ ID NO: 89129 - DNA, 275 bp, Zea Mays
aagtttgtgacattggctactacacatcgagtcatcatatgtgtgaaacttgatcctggtgcacatatgatgtggatctggatttatccttaaatttggatgtgatattaatagaactaccaatacaataacaatataccatatgttcatacattttccaccagcagtaagaatctgatcgtgacctgtgtacctctttgtatcggtggtgggcttctccaactcagttgtgatatgggccgagtccatataccaagtctatatactaatttgtg

SEQ ID NO: 89130 - DNA, 542 bp, Zea Mays
gtcgtgcgacaccggtcctttgcagtgggagacttggtccttcgctgaattctaacgggggaaggacagcacaagctatcaccactatgggaagggccattcatcgtatcagaggtcactcggccaggatcataccggcttactcaaatgaatgacacggaagtggggaactcatggaacatagagcacctcagaaagttctatccctagcgacgcctcaaaaattctcgaagaaacatcgtactctgtaatttggggacttcatcatcaataaagttttcgttttcaaaggcgttcagactcttgactttcagcagacttcgattggattggacttgaaatcagcacgcttattcgacttagggtgaccactataccctactaacggagcaatcggcttaagttggcgacgacttaagttggtgcgacatgctcaccctaacctgacctagggtgaccactataccctactaacagagcaatcggcttaagtcggcgacgacttaagtcggtgtgacatgctcatgcttactcgactttgg

SEQ ID NO: 89131 - DNA, 335 bp, Zea Mays
gtttggttcacttttgcaactatgataagtcgttttgaatgtcccctgggcacggaaatagcctcatcatttgaatgtcattttgcttttcgtgcacaccgcacatgatattccgtccgtatatacttggagcaaatcgcagcacgagcaggtacagtatcacgaagcggacgaattttaagtcgtcgtcgtcgtcgaatagtacaacaggccgggcgtacatgacttgtcggtttaatttgatccacacgaactcacgaacggatcatgtgtaatccaacaaccgtgtgattcaggtcttgtcatgtcgccgcaacaatcacttgccctcacct

SEQ ID NO: 89132 - DNA, 540 bp, Zea Mays
gacgatcatagatggaaggggcctcatggggcatctcggggtggtaaactaggtactctgccttggtgtcctatcgagggcactgatttgcgttggctccatcggtccagtgtacaacagcttctctcctgggtcggactcgaaagttggcactgggacaatgtagttcccggtcagaatctgtctagccacatttgaaatgacttttccaagaagttaatcaaaacctcagactgtcatgctaaggcatggtatatgatgtagttcatctcttggcgcaaggcgacagtgtgttttactgacagtgttgatagaccaatcgcttctagtagttactctggctagccagcgagccaaacattcccgaagcatttctaagtgaagcaggtgaggagattgtcagacacacctttgagagtattgtcataatagtcttgcatcttggggttgaagttgttgagttgtggagatctatccttccctagtgtgtctattggtcgtagtcgatgacaaccttttctttcctcaggcacgccatgg

SEQ ID NO: 89133 - DNA, 838 bp, Zea Mays
ttggggcacgtctcgtactccggtcatctcccccacgggtagagcggccggtgtagccgtcggtattgttcccgcgaccacgctagtgccaaggcggtccactccttttcaccaagtgatctgagtccacacacgggtgggtgaggtggacagaggagtttgccgcgacaggggcataacttcagtcggtcggaccgcatgtgttgttatggtcctgggcccacccgacgcgggcgcaatcctgcgtggggtgtaggttggttgaggtgttcgtaccttcgagtttgtcagggttgttccatctgagatcgagtgggacgagcctgcctctgcgatcggtgccctcgaagaaggcctcttcttggaaggaaccatgatgcggtgcacaacatcttctcgatccgcgatgcaggagagggatctaaagcggaaaacctccccagcgttgaagataatcggagtattgaagatgatagccatggagttgttgggaatcaatgtcgcaccccctacctagcgcgctagctgtcggcgtttatgacccaactgcgcaccacaaggttccccacatagtgcttttgagcaggacgacattgttgatgacgactcgatggtacgtgcagatgcacgtcagatcaccctacttcctgtcgggctgagtatttgagtatcactggtgaatatggattacaaatgagctgtggcggtagagagtgagttctcttgtcgatctagtggaggcacgattgctgtgagaggactaatgaggtatgaggttgccacgagctgagatgtgatgagctgagagatgagatgtgttcaaaggggtaccccctcg

SEQ ID NO: 89134 - DNA, 747 bp, Zea Mays
tttcctttaacctagacttgtttcaaccgcccgattgagatcgatggttagatctggacgttgaaccggtatgagcttgtgaccgccagatcttgatccgacggccgcgcaagcttcgccttcacccaacccaagccaccccaatcagtcactgcacacagcggtgggatcaccggagctcaccaatctggccaacccgagcgcccaaacacaaattcgcctggctctcgctagattcgcgacctcccgaacccatttcgcctcacaatttcccttgtcccacagcgcagatccacggcccacggtgcggtttaacacacggcggagcaaatcgttccgacgagcaattacaaggattagacgttttcaagcgcggcgcggtgtgggctcctatctaccaaggaatgatccgcaatccagagaggggaaagttaccgtcgaggagggccgaggggatcacttgtgcggcgttggtcgactccgcggcaatggcagcgacaaattcatgggctctccgttgccaattccgcccgactagcttggggttaccgacagagagtggatccgaagcaccctggaccgaaaggatggctcgacggcggctatcgcgaggtaatgccaggacgcagggtcggcggcaacggtggctaagcgcacggcaagaactccctgggcttgcgcgagaaacgcagcggcggtacttatctctgggtgccagacccaactcttgtgcggctagcgcaacaa

SEQ ID NO: 89135 - DNA, 370 bp, Zea Mays
gggttggttttgggacttagagaaattttgatggctctattgtgctctccacttagtgaactgatttggggtttttgttgggcatttttgtaatatatttattaatacattttgtagattttctaatatacttcatctttggtaaaggtttcctttcatgatttggccatttgcccactctttcccctttaaccccatgtttagggtttaatggcttaagaggggaattagggttttagaatctttttcatgagtgagaatggatgaaggctagggtttctttcttgttatgatcaatacttagcttaaccatgattctaaagcttttagtgccttcactttccaatttagcatatagggtaagtaggac

SEQ ID NO: 89136 - DNA, 568 bp, Zea Mays
gagtcaaggccgaacatcaaagaccagctggactattgcacccacttaagatacccaagtggaaatgggaagaaataggcatggatttcattgttggactatcccgcactcctgctgggtatgactctatttgggtgattgtggacagattgacaaaagtggctcatttcatactagtgaggactaattacacgggagccaagttagcagaattgtatatgactcggatagtttgtctacatggagtgcctaagaagatcgtgtctgaccgaggatcacagtttacttcttggttttggaagaagttgcatgagagcttgaatacacaattgaattttagttcagcctaccatcctcagactgatggccaaacagagaagactaaccaagtactggaagatatgttaagagcttgtgctcttaagcatggtggaagatgggataagagcttaccatatgcggatttctcttataataatagttaccaagccagtttgaagatgtcaccatttgaggctctatatggcagaaaatgcaggactcctctatattgggatcagactggaga

SEQ ID NO: 89137 - DNA, 687 bp, Zea Mays
caacagtaaggataaagaggaaatgctcgtggtggtcggttggttccgcgtacaaaagataagacttatcttatctagttattataactaggtgagatgtcatggcggtacacatataagatataatatttagcttatttagttgttaggcgtaaaaaaatagatctacacgcttctgtataacacatgaagtataaaaactcgtgctttaaacgattattagatattttcttttcaatgaataatacatggatcctactaattattagtggtgcgtgggtggagccctagtggggtctggttgcgttgtatgcggacactagaactagagcatgctgttgtgcggcgagcacgttgttttgtattgtttgaactttgaaccaccaccatgtgcgcactgcgctcactaattaacttgcttgcagttgcgtgctccttagattttcttagctttcgttttcttatgttttgtcccgggattgatgtgaccagcctgactgtttaattcagtgccagccagagtgtggcctatggacaatatttgaaagggaaaacgaatgcggtctccctcgtttggcaatcagtggtgtagtcgcgtagcgtagacaaggagtctggacacgggccgtggctttctaaagtttgtacaaacatataaatatatactaattacttttaatttttaag

SEQ ID NO: 89138 - DNA, 591 bp, Zea Mays
ctgccttttggtgaaggttgacgaaccaaaaacatatgaactaaacctgatgtaagtcaccggcttttcaatatggagatcattataacacgcaaccaagagcaatacaaaggaccaacactacactagacgtagggtgctaacctaaactagtataaaccccctcgagtcacacgattcaccattcggagcgagtccgtgctagcctcccccgcggaacacaaattttaatgtgtccccagtttccgaaaccacgacactatggtcttcctgctttttaattatgtacatgagaccatgggtttttagagttttggtgaagaaaggcaccatgcaactataaagaatcaacttgagacatttttgcttcttgtaagaagagtgtatgactctattagttgccatgatctcgaaagtttagctattaaaatggttaaagttgaaagacatgtagcattttcattggtctaccgcctcatcgagtcttactagtgacaataacatatgtagagagagcattttcagctaggaatataatcaagaccgttttgtgcaataagataggcgatggatggctcaattactcgatga

SEQ ID NO: 89139 - DNA, 640 bp, Zea Mays
ctatgaccatctattatcagcattcattccggataggttcgagtgcaactcgtagtataggccactacacgaggggaacacccaccccagtactcattctctaccactcgtcatagaaataagatcgatgatcataagctactaaagtgggaagcaaactatggtagtgggccaacactcagcagcacaaccacattttatgggagtgtcgacatggctgacatgcaggaacaactggcagagatcctcaaatatgaatttgggatgctaaccaaatagacggcaatcagctacacgaagcccaactcgaaagagttcaaccagataccgcctccgcccaagttcaaattgcccaaattccccaaaatcaacgacggtgatggcaccaacacgtcaaccatgtgtgctggtatacgactcaattgggaataacaacaacgatcgaaaacgtcaaccatgttcagctcttctctctatcgttatcaggacctatatttgactggtctatcactctaacccgggtccatcacttcttggacgtaaatggaggaccaatttcatgcccatatcttcttctactctctcatggccctccgacaggtgcggggaaaatcagcaaatcaatttatttagatgtcca

SEQ ID NO: 89140 - DNA, 672 bp, Zea Mays
gcagtgtgatggtttcgaaatttcatcatggggcacagaagttgccctaagatgggtgattgcgaacgtgccaagcgtgtagtgccaatttaaatcagcgtcaatttaaaccgactgctccgctagtagggcgtagtggtcaccccgggtttagataagcgtgagcatgtcgcaccgccttaagtcattgccgacttaagccaattgctccgttagtagggcatagtggtcaccctgagttagataagcgtgagcatgtcgcaccgccttaagtcattgccgacttaagccgattgctctgttagtagggcatagtggtcaccctgagttagataagcgtgagcatgtcgcaccaccttaaatcattgctgacttaagctgattgctccgttagtagggcatagtggtcaccccgagttagataagcgtgagcatgtcgcaccgccttaagtcattgccgacttaaaccgattgctccgttagtagggcatagtggtcaccctgagttagataagcgtgagcatgtcgcaccgccttaagtcattgccgacttaagccgattgctccgttaatatggcatagtggtcaccccgagttagataagcgtgagcatgtcgcaccgccttaagtcattgccgacttaagccgattgctccgttagtagggcatagt

SEQ ID NO: 89141 - DNA, 414 bp, Zea Mays
ctttggaagcattggaatgtccttgtttttcaaggagctaggccttatgttcaaagtgtagtgtttacaatggttgctgaagggcatatatggtgtttcgctagggtttgggccctccaggacctggtcctaaaagctggagcactttgagtccaatctgggtccaatttctatatattaaagttgtgcgcaaagttggcaccatgtgcgtccacatcaactcttttttaacggtcgttagatcgtcatcgaatgacatcgagcggtcggtttttgacgtctcccggcaacgtaacgattctagactcttctaagaatcggccttcctctctcccatcgcttcgtagtctcctactctctccttcacctccggccgccgccacgcgctcatggtatatgagagtgagttgtaac

SEQ ID NO: 89142 - DNA, 874 bp, Zea Mays
caaaaactggtcatcatggtttgccccgaaggcctcaaggcaaggacccccaatacttggacctggaggactatgagcagtcaatgagggcccggtgggcccttggctagctaaataggcccacatgtttgcctttcttacgtgtgtaacatttggtgtaataaggcatagggtagcactgttatataaatacccatatttggtccccagacaggagatgctggacaagatatttgagctcccctatttctgagtgtttgggcccgcgtgtcagaaccgttggaggccacctccatcaacaacaccaagaaaggcaaggtggcctttgctaaccaaatcccacaagcccctatgaaggtcgcatccatcaccaatgaaccaaacaccgacaatcaatccctcctcgccacacatgcagctggaagaccctgagcattgccccgttcaacccccagagccacccatactaggccaaagtttggctcgacctattcagaaatataccatccaactgccaccaacctaaggaagccttcaggtcttcgttcatgccaatagcacccatcccagagcaccacaaatggtcattaccaccccagcccactactgaggaagacgaagacatcctacacaacagcgaggaaattggcttaatactagggtctagttgctgctaaggagcctttaaatgaggaatgccacctacaaaagcaaaacgaggccctaatggccaaaaggcagtgcaacgaagtctagaccagaattcaacgacatatccaaaaggaaaaaagaatgatctagagctctacaacaagagatagtcgaattaatggattaggactatgcccatcagccttcgcctagaatcgccaaa

SEQ ID NO: 89143 - DNA, 303 bp, Zea Mays
ctggctcgagcggaccccaagtggtggaagaagtggggtcgggtctatcagctaaagtagtggaagcaggctcgactagggtagctagtggagtcggctcaggatcaccccaatcggcgttgtcatgatcctcctccacaaacatggcctgtaccatctgatctggacctgcaggttcaaatacaagggatggacaaggcgaagtctcatcaaaagtaagctcacaggcctccatgatgcggttagtcttcaaattaagaatacgataatcatgagaatgtaaagcataacccagaaaaatcc

SEQ ID NO: 89144 - DNA, 399 bp, Zea Mays
ccggacgggatgtggctaagggcgtcgaggtccaccaagacaacgctggggatctcggcgagacaggttaggcgtgcaccacccttaccatgtcgccctcccggccgatggtaaagtcgaggctcctgaagcgaatggatgctccaggagtgcgtttgacatgggagcctccgtcggccttcatagtcgcgccaagattcctcatgcgaaggaggtcgggcttccagggccctgatcacttatccttcaccattaaaggggaacttaagacacccaaaacgactcaccgttctaggaggtcgattatcgtcgtgccttgccatctagagcttggaggatctcgtcgcggaaccgtgccaactgttcgcgtcgcttcggcaagtaaatttattatacaag

SEQ ID NO: 89145 - DNA, 909 bp, Zea Mays
ctagtgtatctcgcgtcaacgcgtgtgtggccatctgggctacgacaacacaacaagctttcgtaacaagcgcaacaggcgcaattgtgactcaatagtcggggtacatgacaagtccataaaacatgcacaataggtacaattgtggctcgatgatcacaacagacaaacaatgcctacagggcgtgcgaaaaatacgtgactcgatgatggcggtccgactcaacgagagtgatccgattaagcgagagtgcgacatagcaatcaaatgacacaaccaagttcgtacgacacaaatactgcatcgtgttgccagggcgcagcaagtgctcagccaatgccataactcgatcgattaataacgtagtctgatcgacgtgtctgagtacccactatacaatttaatcgctcgacgtgagtccaaaagctcaacacatcataaatatttagagcggttcacgtatacaccatatagtctttacatgcattttaataattttctgctaaatatctactacgagaaataaagcagaaatataatagtagaattaaagcataagcagatcaggtgtatgaaaggcattttctcatattcaagcatatatttttctactaattatttactgcgggaaataattgattaaggtagaaactgcaatgtaaaacaaaattttattctatttgttatgttcagcaggaaaatagaataaaatagtatggcacatgcaactgctttcaaaacatgtataaattcaaccacaatttataaaaaaattgtaaagcacattaagatcctatttttttctctccttccacgaatctgtttctacgcgcacaatacatctaatccactttttcgttttctattgagctgccattttcagatcgtattgcatgcagatgcagcca

SEQ ID NO: 89146 - DNA, 1115 bp, Zea Mays
cccgagtctgctacccagtcagtgaccataggaggggtcaaggtcgtagtgcttaagaagttggccaaggactgttgatcccagcccaagttccccaccatggcgtccaagaacggggcatcgcttgatgctattgttgtggcgggtattgtggcgctgggtgggtcgggataggcgacccaccaagaggaccgaagaaccccgaggcagccatcagggcatgttgagggcgcacctgctgctgtagaggtggtcgcggcccgggccacatggtgatcgtgccaatccacaggttgtagaacgatggctatggggtgttgctgttgaaggtggagtgggtgttgccacctctgcccttgcccttccctttccctttgttattgccgcttgtagggggtaggatgacgggggcatgggcctagagggaggtgcagaaagtgcagcatgctgttactgcagcagttgctgttgtgggtggcctatggtggagtagaaggtcattgccgagtctggatcggacgtagcctccatgtcaagttcctcaagttcgaggtcgttgcgaacgacgtggaacgatgggaacggtgattgacgcttgatcagtgccttcatgtgatcaaaccgcttgttccgcccacgtagcatggtgagaacaaggtgacggtctggctggcagttcctcgccaaaggaacgaagttcgtttgccatagccttcatcttacgacaatgctcgttgatactgagggcaccctgtttgaaagcacgaaagcgttcatcaagtttgaggacgcaagaccatcgattaccgaggaactcgacttcgatcgactgccacgcatggtaggctgtctctaagggcttgtggactcgctcctggagttcgatggagagggtgtcaagaatccatgaaaggacgagcctgtcatagtggtgccagtacacggtggtcttgacattgttagggagaatgtgatcgtcaagggcgtagcggcaaagagcgagcagcaccatgtcacaccatgtggggtacttggtggtcgagagatcaaggacgatcgtgaccaaggcgcggatgtcctggatcatggttgtctgagtgtggaggtgcgcgatg

SEQ ID NO: 89147 - DNA, 536 bp, Zea Mays
gtcatgagatcaccgaaggtgggtgccaatgttggtacttgatttcaattcctctgaaggtatcgaagatcaagggaacacaagttagatgtaaaggccttcgtcctttgatgtaacacttcctcgaagtgttagaacaaaggacagaggtttttaagcagaaacatagtgaggtaatatgaaaaagacaatgtcaaaatctatataaaactcatctcttatgccttagcattttattccatctcttctgatatcatacaaatttaccaacataccttcggctcctagacataggatgacgcaaactagacaaaccttaggccctcttccaaatccatgcagatactacaatccttaggctttagaaaactgaactagacaaaccttaggctcttttccaaatccatgcagatactacaatcctaaatattctcttagccatggccactgagttaggcgatggtaattcaacgttttttttggaaagataggtggttgctgggaaaatgattacaagttttggcacctcatcttct

SEQ ID NO: 89148 - DNA, 938 bp, Zea Mays
gacaaaaccaaagatttgcctcgggctcgggctgagagacaaacccgacttgagagctccatatctttggaaccagtaggccaaatcctatgacccccacacataatcggtagcttatagggaggagaagaggttttgtgcactgaccaaggcaagagtaggcttggatgagtgactacatgcgccagaactcgggcagaagaaacgcacacacgtgttcgaccctcgtcggcacaccggcgttcccccaacccgcacgcgcgctcacctcagtgcacggtcaagtccgccacgcgcccttgcctgcgccacgcctatgaagcagtcccagggcctcggccgtaccccgtacccccacacgctcacagtcccacccaagcccgagttcatcggacttttccctgagcacgacgcgccactgcctgccaagccacccgagcttcgcccaccatgcccagctcaccccagccactcctagtccacgccagcaattcggttagctttgccagaggctcgcaaagctccccaagccctcagacctggcagagcctcaccggaggacacaaatcacctcgccggacttcttccactcaccagcgaacgtgaaccgggtaagtctctgcgccattatcaaattccttccgtgtaccgcctctatgtcacctggtcaagcctcccaagccaaccaattggactatttcaccgtgagtaggtcgggttactcgtcgccgacaaactccctcgcctgtgcacgaagacccgccaacttcgaccatctctgatgacgatccacacctcgacgtgaccaccgtaacttccccgacctccctggacacctcaccggagctatctcgctgccagtaagccccttcgccctttcctccaccgcgaacacggtttaaatagaggaaggaccgcgggtttgatttagagtcacc

SEQ ID NO: 89149 - DNA, 470 bp, Zea Mays
cttgtgccgtccctcccctgttaatactcggcggaggaccaagtctcccactgcaaaggatcgatgtcgcacagctttgtcgtggtagcgcctcaaggtctactggtacctggccgactgaattaccatgtttagttattcctcctccagcacatcaatgtcctctagcctggttgcttctgcttcggctatgctttcaaaggtcaacctaggtgccccaaagatcagatcgacaggtagcactgcctctgacccatacaccatgaagaatgggtgtttccatgtagagctcgacttggctaggttcgcaggctccaaaccacatatggtagttccctgatccacttccctaccagcttctcgcttttgtcgaacaccttcttcctaagtgcatctagtatcattctgttggctctttccacccgcccattagctcttgggtgtgccactgatgcgtacttgatttgaat

SEQ ID NO: 89150 - DNA, 979 bp, Zea Mays
tgaatgtctaaggttgaagagctctttggggttctgtggattcctcccccccatattcactcaagtggtaccgtgtggcacgataagggggtaaaaacccaggtctgacagcataaccagcatccacaaggtaaaatttacctaacatcatatatcatatattagggcattgtagaccaatattaggggataccaaggaaactagtttttaccttgtggcacttttagaccatcttctctctcaagggcatcagcaaggataagggcatcatgtgttgatccctcccagccagcaagaacatatgtaaaccttagatcaaagtctacaacagctaagatgttctgtgttatggtgtgtttcctaccaaggaaggcagccctctgatttctaggaactcttgctagcacatgagtgccatcaatggcaccaatacagtcctacacattagggcaaacatttgttactacaaacccaacataaaaagtagtggtgtgtttggatttggctgaccttgaaatatgggtaccatctgtggctatctctaattttggttggtgtagcagttgaaggtggcaagatcatttctttcctcagttcaccaatagcatacaatacttccttgaagtatctgctaatggtctcaatagaccttcgaaaggtcatgtgtataactctaaacctttggttatgacctaccacatgtaaaaacatggcaacctgctcctctactgagctatgaatgctatctctcaatagttgcctagtgcgacaactgcataaaaggggctcttctcatcctgagtaagtcaacacactcaacattagtggattcataaatgaatctcaggttgttttgcctctcttggtctctttggtgcattgggccataagtgatacacctcctagcatgcagtcagtgcctcaaccatgcatccaaccaggctgacataactgctacaaggaccactgcctttgcaa

SEQ ID NO: 89151 - DNA, 488 bp, Zea Mays
gaggagcagtaggtcgttttctcccggcaggttgcatgcgatcgagaggtccgtctagctgcacgttacgccttttctccctcccgcactcgtcgcattcttctattctatctgtacctctgtgcgtggcgtggcgtaatatggccagctggtgtataagacagaaacaaggactctggaatatactgtacgtttcgtaacagctagctagctggtcttccttcctcgattagctgtgtatctgcaagtgggtgtgtatactcgcactctcgcggtattcgtagtcagcagactggattcatcgttaaggaaggtacagctcatgcatacatatagatccaattttcgcgcccttgacggagtcgacggcgagccacagctggacgagcgaggcagtgaagatgaacgagtctgggaccaggcatcgaggtcacgcttttctacggactgcggaaatctaacgtactaattagtactgcagatttgtc

SEQ ID NO: 89152 - DNA, 684 bp, Zea Mays
cggggtcgcaagcgtcgctggttctggcggttattgtaaaaccgcgtgaaccaactggctacaagcgccggctcgtcatcccaaggctctccaccttcttctcagtgatagtcaacaaagaagacaaagcaaacataacaggtgcgaggtgagacgaggaaccacctccagagaccaggaccatggtgggtgcaccacggttctcaatattggtccgggtctggtggtcaatcactatggacttgagcttgctgaacagctcatccatggtgagagtctcgtaattgggcgactcaataatcgccaagaccttcacctcccaaacactctgatctagagcatatagcaatttcattgctctctcatgatcgtcatagggaagttacacattgttgacgcgcatcttgttcataattgactggaaccgagaaaacgtcatgtcaatggtctctccatccaactggacaaagttcatatattctcgttggtatatctcaaacagtctggtctttacatgatcatttccttcatggaatctctcaagggtagaccgaatccggtgagccgtagccaaatgtccaactcgctcaaaatcagcaagcgagggacatgagaacaaagtgtttcgagccttgttgttcgactcatggaactccaacttaataggagtgatccaagcactct

SEQ ID NO: 89153 - DNA, 509 bp, Zea Mays
gtggtagtatatgttcgttcacgcagtggccctggccgtgtatatagagctagagctagtgacctttcagtgtttcatctagtcaccccctatcgtctatcctcattggagcctagcgcgcgcgcgcggtgacaggaggccgatccggcggtcgacgggcgagaggggggatacgacaagatcggatccaagacacacaaaaaaaggtaggcagcgaccgaccctagctagctatgtatcctacgacgtgcatgcaatggtgatccatcctgtacgcttgcgtgcagtgtgtcgcctcgcctctactagccaccacacgcgcacacacacatcgatctctacgcgaccgagctgacgctgtcgtcgtcgcttactaccacttactacactacactgccgtaaaggcctgcgccgtacgtacatgctcacgctgccctggttcctggtgcctggtggtggactggtggtggtgtgtgtcgatcgtgtgcatgcatgctgccgtcccagcg

SEQ ID NO: 89154 - DNA, 547 bp, Zea Mays
agtgtggtattcggtgccatattgaacatgtctagtgccttatagagttgaagtgtgcattagacatgctctttaagtgttatttctaatgggccattcggtgtctcgttggatacgtctgatgtacactgaaaaccatggtgctcaactgaaaattatgaactaaaataggttgtattcatattaggtgccatgtatggtgcctcattgtacatgtctagtgctctctgtaaatcagcggcaatagtatttttatctctcttctcaattgagctaaccctcaaatgttttgccaaacatgttagagtctagttaacattttacagtgtttcgataaacctttttgttttctctcatgagtgtcacttcgatctatatggaatgcatgtgattctaacgcctagtggtactagatgaccaacttgtagatactttgttctcgtctcgtttcaaatgaatgcaagggtgggtcacactaacaatgaacggtcaacttttattgatattggtccggaatgacaccgttgtcactgttttttcctttatt

SEQ ID NO: 89155 - DNA, 595 bp, Zea Mays
gaacatcttcagttttactcccagaagcttcgacagaaggaggtggcattctcacagattctagaacaacttccaaaacgctagccattctccttctccttggagttcctgcggtagctggcagcttcggcaatatcgttactttcatctttggctcctctggtactttttctgttactttttctggctctggctctttgatcgggtctgcaataattccagtgggcacaacaggaacagtctctatggccagggggttatttccaccctttcacataacatgggcacatcggccgtctcgatgcgcctaggtctacgtgtcaaaactttgattttcttcgacctcgacacatcagtagatgtcgaggtagcggctttccttttcctcccttgcttccaggtgggatagcagtagtctgggtatacgaacccgataaaatcaaacaccctgtttaaccgcttctggccgcgagcgccgaaggcagttgtcatagcttcgtctttggccttagaatacgctccaagtatctcatcacttgttgcttctatggcgtccaaccaatcatcatttggctcatcaaactggttcctgaac

SEQ ID NO: 89156 - DNA, 533 bp, Zea Mays
gaatggatgcacgtctcctagggtggtctggaactgtgtagccgcttagcttggttccgtaccctaagcttgcacgctccaccactctgcgatgggcatcctagtatttggagctgtgattcagggggtccaaacatatggcttggcttcccaagctaaatcctgcaggtcctgttgcatgaatcaaaggatggccgataccagacgatgggtcctagtgggtgtgccgctaacactccctagctgaagatgtgtacaggtccaggtcccagtcgaggatacctcctgcggactaggtcaccaactctttcttaggtatgctggtatccagcctcgacacgtcgagcctacatcccagggggccaagtactaggagaggagttggtaacgccacacacagcaagaacaaataccatacagataagagttgttttaattaatagttcccaaaagtatcttacaaaaacaaaagttattacatccgccttcaagcggagccctagcctcatttctacaagtatgagctactcgac

SEQ ID NO: 89157 - DNA, 473 bp, Zea Mays
cgtgcacatcagatagatgatcaggtagctcgagttggtaggccatctccccaactcgtctaaagattctgaatggtccaataaagtggggggataatttgcctttgaccttgaatctcgtcattccatgaagtggtgacaccttgaggtacacgtggtgaccctcctcaaactccagtggtcttctttgattatcagcatagctcttttgcctggtctgagctaccctcaagttctcctggattgtacggacttgttcttctgcctcttgaataagttcaggcctaaagaactgtctttctccagtctgatcccaatatagaggagtcctgcacttcctaccatataaagcttcaaacagtgacatcttcagactggcctggtaactattattatatgaggactcagcatatggtagactcttgttccaactacctccatgctgaagggcacaagctctcaacttatcctcc

SEQ ID NO: 89158 - DNA, 538 bp, Zea Mays
aaagattagaagatgacatgaagaaaatagacgaggaggaccagcgataacaagatcaggtgctcaaggtggcggagaagtggttcctctcgcacttcagggtagattgccaccagaaggccgtccaggagagggaaataaacgttgattacatgtcatccgtgctacaacagctccccatgataggtgatgccaagtcagccgattatattccatctattaaaatttcttttgataataggattaaaagtatcacggaggatatagaaaagatggtgcatgcattaggaaaaacacatgcctaattttttatcacataaattaggcgccgaaacaattgcgccaaacacatcgtcaacaaatgggtttccccagccatattctggtatgtcgatggactcatatccaggacgaccctcacctccatctccgctaaatggtgggtcaactctaagcatgaccggaccctctgcacacgatctcggaccgtccagccctccgttagaccgttcggcaccctacatcggacagtctagag

SEQ ID NO: 89159 - DNA, 452 bp, Zea Mays
cccagagtaccaaagtttggtgtttgccactgtttctgagtaccaaagtttgaaaccagtgttctccacctccttcgctttttgccccttctattttgtctcctggacacataggatattaacacacctcctgctcactgcatcgactaactctctcagcttacctgtaagggaccttacgttccaactacctacacggatcctagtcggctcaactagcttccttacccctcgcacccgttgagacagatgtgaagacccttgcacatttgtcagtacacccgggcgccgatgtagcgcgccactaaggaagcgacgacccgatccttgctcacttgacaccgcatccagatcacgacacgacgcgccaccaagggggtggtggcccgacccttgcccatttaacaccgtacccgggttccgatatggcgtgttgctaagagggttacgcc

SEQ ID NO: 89160 - DNA, 630 bp, Zea Mays
ggagagtagagcccactggaattgcagaaaggacaatgtttcttttcttaaaactaaaaaaaaggagagcgattaaaaatggctgctgcttcttcttcttctccaggtatgcatagtgcactggaggaggagtccaccatgtcggatgaagtgccagagccaagccagccaagcatttgcctcctgttagccatgcatggcaaattgggcaatccctcggactggaaagtatagcttcacttcaccgtacatgccgcagtggggtgaacggatcgacggggatggttggtgacggtgcgccatcatagcacggcgaacggaagcatcatcatcactactcacgacgcactcaccctgctaatcatggacgagtggggatggcacgtgagcatgatccgcaaaagcatgcaccggaccggacggatggaattggatgccaattgaagacatactactactactactcgtatgcttcaacttgactgaacatccgctctacatatattgcagttgcacgcatgcatctagctgcacttccatctggtacggcccagatctagcgaagcatgcatgactgcctgtgcctgtacagaatgcaaaggcaacctttccacgtacgtacacgtcgtc

SEQ ID NO: 89161 - DNA, 345 bp, Zea Mays
ctgagttcatcttctctttcccaagtggcctcatcttccgaatgatgactccactgaactttgcacatgttaataactttactccgtgtaattctgtgagatgtttccaaaattctgactgggtactccgaataagtcaaatcctcattgacatttagttcttccatgggtaactgttcttctggtactcttaagcacttcttaagttgtgacacgtgaaatatgtcatggtcatccgataatctatcgagtagttctaaatggtaggctacttcaccttttctttccaaaatcttgaatgggccaatatagcgaggagataattttcccttagctttaaacctt

SEQ ID NO: 89162 - DNA, 657 bp, Zea Mays
aaagccccagattttacggaagatgatcaaggcacagtatggtttaagaagagaatatgtgtaccggaaatcgaacacctgtgccaacttattttgagagaagctcatgattcggcttactctattcaccctggtagtacaaagatgtaccaggatcttaaggaaaagtattggtggtacggattgaaaagagatgttgctactcatgttgcattatgtgacgtgtgtcagcgagttaaagtcgaacaccaaagaccagcaggattgctacaacctctcaaggtcttggaatggaaatgggaagaaatcagtatggatttcatagtaggactaccctgtactcgtgatggctatgattcaatatgggtcatagtagacaggttgactaaagtggcacactttatacctgtaaagacaacttactcgggagccaagttggcagagttatacatatcgaggattgtttgtctacatggagtaccgaagaagatcgtaccagatcgaggaacccagtttacctcgcgcttttggaaaagactacatgagtccatggatactaagctaaactttagttcagcttatcatccgcaaacggatgggcaaacggaaaggacaaaccaagtgttggaagatatgctaagagcttgcgctctaaag

SEQ ID NO: 89163 - DNA, 1074 bp, Zea Mays
aaaaaatggtggcttgccaacgctacgctccatgttgccttcttgaataaaggatctactaaggtggattgaacattagccctatttgataccaattgaaggaccaaaatagacgaccacatggggtgaataagagccaataaaaaactttgcacaaggcaatttgtcttgattccaaaaatttctcccaattccccatcacaacaaaactcaaagatgatatgctcctagtccaataagtgaatagatgttctcaatgataaccaatagacacagtgaagcacttgaatcaatcaaaaccaagtgcatgagagaaactttccaaaatctaaaaattaagctctctattccaataggaatgaagaaagaggtcaaacaaaaaacaccgtaaccaactagtggttgaatgcttttgaaaaatttcaagggtatataagaacctaaataaacaaaagtaccacaaaataggcatccaaaactttgaaagcattcaaaatggtgagctatctagaggaacactgtagtgctgcactcatggtctgcattgctgctccttggcactgctgtaccgcggcactgctgctccatgcgcgataatgccaagctgcttgttgccaacatcctcagccaaagctctaaaagacataaacggcccaaacaaactatgataaatctagaattttttcacaccatcttatggaagtttcataggtgttcacaaaatttaagctccaaaaggttagaacttcaagcacaaattttaaaaacaccctctcaacttggggttttctcaaaaatggttaaaaggttggatttttgtgctcgatttgaatctgcctaaaacacttggtgggaataatccatggatgtccttgcacatttctatgcaacccaaaagttcccaacaacttagattcaaaagatccaacaaaagatcaaagataggatatcaggaagggaaaatccaaagtgaaaacttcaaagaactcaatggagcatgaaaatggacttcacttcaccatgaaccatcgtggtaagcgccacatttcctagatctcaggttacatagatgaa

SEQ ID NO: 89164 - DNA, 749 bp, Zea Mays
aacgacattcttggaggtggatgaacatgtgacgttggttgcaccacttcctaagctggtttgttcggcctttgcccatgcacaaatccattcctccttgcagatgatcttgattgttttgttgaccaattatgtgaaacaacctttttattcatatatttagaaagaagctgatcacaagtagctagggtcgacagtaatgagcatgccaaatgctttaagtgtatcttgtttgcacataccagcttcttgatgttgtggtctgaaggtctgaggtagctagtctttctggttgccctcaaactgtctggactttgcatatggaccgtctgcgtctggtctagtccgtttggccttaaggctctgaccgtacgctatacgtagaacatgtgattgtgattgggctatcccattgtgcttgctccaggcacctctggtcttattagtctttctcttgtccgaagcctttagagtaacccgatgtgatacatttggcatgcgaggatcacgaatgataatgttcttgtctttgcctttattagccacaccaggccaaaccaagacttttttgttcaccagctctaatatgttgatagggaaaggttgccagctggcaatatgcttttcctgaaagcttaaccgacattcatttatagctgattctatttgccaatgaaagacattataatcattggtggcatgagaaaaggagtcatgccatttacaataagcacaacttttcaattcct

SEQ ID NO: 89165 - DNA, 715 bp, Zea Mays
cgcagcacggctcgcttcccaccccaaagagttgggggcgcgagggatggagtcgtggctcagcccgctgttcaccttcacaaggctggtgaacatccttccccccgaatgctggaggaagaagcgggaaggaccgtcgcctccacggacatcccgcggaggtaggcgatgatggctgcctgaaggatgaagcagggcgtaacatgtagaggctggaggccaagcccctccaacagcagcacgaggaaagacgggtttggcaacgccaacccgctggggagtttggagacgaagaacacaaactcttcggtagcgaggtcgtcgtgaggagaaacaccgacacggatccttctggcaaacgccagcacaccccatccgagcgggttgcgcaccaagttgagtgccacctcgggctggaggcgctcgggagggtctagcaaggccatggtggctacgacgacataagaacgtggagaactcgagggcaaaaggacgctgatgagaatggctaccacgcttgggggagtccctttttaaagaaggattcccccactgacgccccgaagagccaaagaagacctcgcccgacgcaaggtgacccagtctctggcacgggggcccgggcccatgagtcatactcttcgagcgtcggcctctgtgtgcggagaaggcgaaccgccgagtgaggagcacaccaccgcccgtggtaaatgcg

SEQ ID NO: 89166 - DNA, 379 bp, Zea Mays
gggcggggctgtagccccgacagctcctctttgcatccgcccctgaaagataaccatggctaaagatattcagccacactcaagttctaataggataaaaaatcattggttttttggtatccaataccatccccgcaccctaccgatgcccccaccatttgttatacgtggagtaagttgttatacgtggagtaaaattgtagccagcaaatcgagtacatattcatacaaaacgctgatttggtaaacaattataaaatggagtttaaaataagagacaaaataaaaatggaatagaagaactgttagagatagccaacgtttgcaattttgcctcacggttcattagaaaactgggccgcggtcgttgtgtttttag

SEQ ID NO: 89167 - DNA, 376 bp, Zea Mays
caaacatcgagcatccccactaagcgactgcaactaacattaaactaatattgactacaaatgcaggtgtcgaagggcatcttcaacgatagggacctctctgcgacctcatagatagcgtaggcctcgacaacatgggtgctactctaacgtgaggtgaaggccgacaacttcaaagtcgcaggcctttgacgagggctcgacttctcggacggcgaatgtccccaagacttcacatcgttagggatgtggcggtcagagcaaggccctaggtggagcgaaggctcgcgaccccctcatggcaagccccggatgcagcctaggccgtcaatggctacagagaccacaagacaaaggctacagaacgaatatgtca

SEQ ID NO: 89168 - DNA, 1722 bp, Zea Mays
tttcggtgcagaggttgggtcacccaattttggttagttctgctaatggctccattagtagctgtttagtttgtcaggggtgttccgtcattcttgctgatgaggtcttttctgccaatctggtggtgatttccatgggggcattcgatgttatcttgggtatggattggttatcccagtattgcgcagttatatcctgtttttggaagacagtgttattgcaggcgccgtcgggtaaggaggtggtattcatgggaagttctccaaagttcacgttatccttgttgccgcaattgcttctagatcgccgatcaaggaagtcagggatctttttctccatggtggtggagggtgaggctgccttgcgggtgcaggacatccgggtggtgtgtgactttgctgacatgtttccggcagagcttccaggcattccttcggagcacgatgtagcttttgagattaagctgattccgggtacgcagcctattcataaggccccgtatcgaatggccccaaaggagcaggttgaattgaagcggcaattggatgatctactggctaagggtttcattaggcctagcaggtcttcatgggcttccccagtattgtttgttgagaagaaggataaaagcaagcggctatgtgtggattatcgcgctttgaatcaagtgacaatcaagaataaatatccccttccccgtattgaggtcctctttgaacagttgaggggtgcccaggtgttctccaaaattgatttgaactcgggttatcatcaattgaggattcgtgaggaggatattgagaagaccgctttttgcaccaggtatgggcattatgagttcatagtcatgtcttttggcttaactaatgcccctgctgcttttatggaagcaatgaataggatgttgcatgaattcctggacgacttcgtggtcgtgttcctggatgatattctgatttattccaagaccaaggccgagcatgagcagcatctctgtctcgttctaggtgctctaaggaagaatcagttctatggcaagttgaagaagtgtgccttttggctgtccgaagtggctttcctggggcacgtgattaatcaacagggcattgcggttgatcccaagaatgttgcggcagtggtggagtggaagagaccctctagtgtctctgaaatccaaagtttcttggggctcgctggatattatcggcgctttgtaccaaatttttccagcattgctaagcctttgactagactcttggagaagggtgttctcttcgactggttcggcgattgtgaggtcagttatcagacattgaagagcaagttggtggatgcccctatcctagctttgcctgagagcggtaagcatttcacagtttatacggatgcttcgtgtattggtcttggctgtgtgttgatgcaggaaggcagagtgattgcttatggctcaaggcagttgaggaagcatgaggggaattacccaactcatgatcttgaattggtcgcggtggtttttgctctaaagtcgtggaggcattatctttatggcgaggcttgtgacatttacaccgatcataaaagtctcaagtatatttttactcagaaggagctgaatttgaggcagcgtcgatggcttgaattgattaaggattatgatttgtccattcactatcacccggggaaggctaatgtagtggctgatgcccttagcaggtccgagg

SEQ ID NO: 89169 - DNA, 595 bp, Zea Mays
atcatcatgactttactttgtcttgacataaatttaggtatgatgccacgtgcctcctcctattcctgccaaaactccaaccgagttttcaggtccaaactcgagaaactatttgcatggtggttttgagacacaaactactaaacctctcgtgagtagagtatctgatacactttctccataatttcgacatgtgtcaccaccaaccctcgattgttcaatcatcaactcctccaacgccttcgcttgaattagtcaacatagtctactctcccatatactcttgcacctacatatgtccccagatgttcgacaccatggtcaatctctggcttatctagtatatcaattcaagtgttggcacccgtcctttaccactcttagtccatcgatatggaccctagttgacctttacctttgtcgtcaacgtctccgaggtccaaacatgttgcaccgaggtccaaacatgttgcaccacgcactcatataatagttgatccataaactccactaaagctggccatctcctagataatcacccatcacaactgaacatagtaagcacatatgttatgtgttcgcaaaattacgaaat

SEQ ID NO: 89170 - DNA, 321 bp, Zea Mays
cctgtgtgtgagaggtactagactactgtttctctcgaggactgacgaccaaagcgagcacgttcggcgatctttccacgccattagaggacggacggccggtctctggtcgtggtcgagttgcgacggcatggcattggcatggcaggcagaggcgggtgcggggacagaaaggctgcctcatcattcgtactactgtcctgccttggctttgcctttgctcgctcgcttttggcagctaaatttgtgctgggttggattggatattggatatatacatgcagccaacagcaacagcaacggcaacggcaggcagctgac

SEQ ID NO: 89171 - DNA, 495 bp, Zea Mays
ctcaagttactacatgttctagatcaaaggttttgggaggtgaaggtctcgacaatcatcaagtcgccaactatgagactataactgtggatgagcttttcagaaaggtaaagtccatagagattgaccaccagacctaagccaatattgagaacactggtgcacccactatggctttggtgtctggaggtggctctttttctaacccttcacctgttatgttttctttgtcttctttgttttccatcatataatcaagtggagagacttggggatgagaagctagcagttgttgcaagttgatccatgtggttccaaaacaaccgcttgaatcagtggcgtggtggatctaaggatgaatgcttcaactgcggtgaccctgatcactacatcgctagctgccccaagacgaagagtagggcagaggccgacaagggtgaccatcactctggtcgacgcaagggcaagcaggaatacacctccggtgaacacaag

SEQ ID NO: 89172 - DNA, 1371 bp, Zea Mays
gacatgctcagggacatagcctcgaaccatcataggaagaatccgttcaatccatatgtggaagtcatgactcttcatccctaagactcacagagtagataagttcacccctactcaggttagctgcatacccgtcagggaacatcaacatcttgatccactgaagtacttccttcctctgggccctgcttaggacaaaattggccttaagccttctccatgtctttccaccactaggcggcttcatctcttggtttggtctatcacataacgctgtcggatctactctggcctttacgttatcctttgacttatcaggaatgtccataattgttgcccaaagtgcctcggcaacattcttttcagtgtgcatcacgtcaatgttgtgtggaaggagcaggtcgtcatagtaggggagctgagtcaagcccgacttatgtgtccacatatgttgctcaccatatcccacaaacccaccttctggattggccacgagcccatctatctattgatgaattttggcactagtcatcattgtaggtgggcggtctgtcactatgacacctttcgtaaagttcttgatgtctaggtagaatggatggtcaagagggagaaattgtcgatgtttatcgaacgatgaatatttgccacccttctttaaccaaattaacctaagtgcttccttgcaaattgggcatgggaattttccgtgaacacactaggcacagaatagcccatgtgtcggtaagtcatgcatggagtactggtaccaaacatgcattttgaagtttgtcatcgtagcttggtcttacgtccataccccttcctcccaagcacgtaccaattcatcaatcaaaggctccatgtacacgcccattttattcctcaggtatacaggaattatcaacgacacggatatgttttgtctttgaaagcataaaccggggggagattgattaggataacaaacacgggccaacatgtgtatgagacagcactcattccatagggattgaagccatctgtggccagcgcaacacgtacattacgagtctcttcggctttctcatgatgaatggcatcaaagtgtttccatgcttcaccattagatgtgtgcaccatcttattaggatcgtatcgtttgccatttttgtgccatgtcatctgtttcgtggattgctcggtcatgtatagacgctggatcctcggtatgaacggaaggtggcgtaggattatcacgagaatgtcgagctgcctcttctatccatcagtagagtctacctccatgaacctagatgatttatacttcggacaatactttgccttcgtgtattatttcataaattgcacatagcccttcgaacaagcatg

SEQ ID NO: 89173 - DNA, 540 bp, Zea Mays
tgcagaccatctcctctggctttagtctggtagtgtaattcatgaactcggcagaaaccttcaccgaacggttccactccctggctacgaagggcccaaatataaacgctcaatctaacgatagcattaggggtcagctaatgaaggtaaaccccaaacttcttcaaaacatcagcaatcatctcattcaaaggaaatcttaatcctgctttaaagaagcttttgaacactaccacctctttcttttctggcttcggagtaatttcctctctgccaaaacgaactagctccttttttgcttcactgaaatagcccagcttcaccattttgggaagatcagcttcagagatgatggactttccaaagtccaaatgactaggtttacttggcaccccgcagctgtactcatcttcggaaccaacttcttcaacatcagcttgtgttgcttcggcagcaggtgtgtcctttgatgaaaccagtccagaacgcctcattgcatcggaaatcggaacagtttcagcggcttcgatctcatctcca

SEQ ID NO: 89174 - DNA, 703 bp, Zea Mays
cgccatttcacgcaaaaagcgcgtattatccgcagtggcattgaccagggcagcgatagcctcggccaaagtcggtggtactggtggcgagttaggagtatcttcccgaccgcgggaagtccccgcaccatcatgtgcatgagtccgtgatggcatctgaggcaaagaaacatttggaaaatataacatgccaacatacaccatcatattacattacaaaaatgtaataattacatagactcctttgtacaacttgacttcattacttattttgcataagtataacatctaaactatactattctagtcttcatcatcctttgttgcttcatttcctgctgcaggagatcattcgtcagcaaggttcatggaaggaggggccctaaaaagtccaactccccatcaggtccttcacttgctattcctgatggcctgactcccactgcagcagcgtcagaaggcacgtccgggtgcagtcgagcatacagtacatgtacttcttcatgtaaagtattacaatacacttgcaggctgtcaagggccgcactaagctctgtcacacgagctcgagcttttgcttcgcggtcccaaatgatcgaacaagagttgacggcccaatcaatggtcgaatctcgttctgatatctcatattgcaagcggctaacgtcagctgacaatttagctatacgctggctatcctgcg

SEQ ID NO: 89175 - DNA, 997 bp, Zea Mays
ctggtttctactttcctctgtctgggcgcatgaataatcaaaagaacaggggctaaatcaaaagattcaccagactctagctacactcgcacgaggactgcaggttagttatgtgaaaggccagggtctattttgaagttttaccccgctgaagggtaccgttggattccggccattggatccaacgccgagggtccgaattagatcagaatttaaacgaaccggtacgggatatggtctgctagatcataatccaagggttggcaagggcgtccagatcggtatgcaccctcagccaatagatctagatccgatggttgaatctacatggcgcaaaagcatacactagatgtgatcatacgcgttcttctgggtttcgacgactctagattttattaaacctgatctgatcaaccccgttggctcgttcatcaacgaacacggttcaataccgcgaagagttccctagaatcaaatcctagccttacatccactgatcgagggttctcaacaggttacacccggaactaatcccatctgcgcaatcccaatcggacaacgcgagatcatcgttccccccaaccagcactggcggcaccgccacgaccgcggcagattcctcgctggagttagctagatcagtgccagcgcaccaattaacacaaatcgatagcctctacacgccccaagctcgacaatggactcaaccgaaaagaacgcataccagagtatggcgtcgcaggttcggtccacgggatgggcggcacagcgacagtcggagagggatgacaagcgattcgatcacacccggaccccacgcccgcggtgattgctcctaatgtattcttgatacaccaccggaccaccagcgccagacctcgctggcacgagagtgctacctgagttgattgcctgcgacagcggtgaaccgttcgggcgacgatgaactagctgcggaagcactagtctttggttgcggaatccaaggcggccgcgc

SEQ ID NO: 89176 - DNA, 711 bp, Zea Mays
atctttccttgttaggaattagtctattggatctttggcgaagaccatttcttcatgaaaaattataggtgttagccttccatattgctaaaaatggtcgttcaaatccgtgcattcaactgagtgcatgaattgaggtagggtcttttcagacaatggttactgatatgtggtaagcccataaatatggtagctagctggtttctccatgtacaataacatgcgccataggaaaatatagtttgtgagaaagggtacatctagaagattgttgactgcttttagatatgccgttgtgataagattgaaattgcaaaacttgttacctacgagtgggatgcacggggaataggagctagattgctagaacggagctgccgagtccaacttggtttcaccggctaggacaccaaagcaagtcacgcgtgaccacaacaccgtgctcaaaagcattgtgtgtggcacgacttcaaaagaggctctcatacaaacacaacaactagcattctagaaacaacactggacataatagtgataaacacgacctagcagtaacctccaagtattgcttgttggtagcctagctactggtccgggtttaagtgctttacatagtttgtcctttgcttggggctatgtggacatttcactttgcctcctacttgctaagggatagcgcaggggaggttaagggtcttctctcactggaac

SEQ ID NO: 89177 - DNA, 368 bp, Zea Mays
ctaatatgtagcctcgtgaattagattgcataaattttttgggttcaggtctggtgctagatgtcaaaacgcgaaggcttctcacctccgtgaaaccctctcacgcgatgaaacgagggcaagttttaataacagacatactttgcaaaggccaattgtcaacataaagagcaaaggcttaaagggggtcaccttgcctgaatgccattcaagagcattcaaaaggttccaatgataattaggcttacctagttgatccattttttctaaaaaccctttatgtttgagggcttgtaagatcactagatgttcaatcatatcaaaaaccttttcgaatgttattttgagaatagttattcctttttttg

SEQ ID NO: 89178 - DNA, 349 bp, Zea Mays
tgctggtgctcactgaagtaatggagccgaatgcttttggcgcgcttttttcctgctgcgaattgcgttgttttactgtttgtgaggtgttaagattgcaatgtgatgtggtttcgatgctgatttgttgtttatgcggatgagagatgttcggcgagtcacatagatgtgcaaattcaaaatagttttcctttttcttgagtacagtttactcacggttggaaatattgttagttgaagcgacaaatggtcataaattcagaattgtcgtgcactgaaaccatttttcatttttgtcattcatagcgtttctcccaacttgtacaaggtggacttttgctcaacaatt

SEQ ID NO: 89179 - DNA, 763 bp, Zea Mays
cccgttccgtgcacgccagctaagtagtactgcacaaccaggatcgatcgcctcttgcgttctactactactaactaccagccacatttttttctttaaaaaaaaggctcctggatttaggaagaaaccgacaattattgattggatcataggacgacaaaacgcggcagacggccactggtcgcgtcgtaattattgggttccaagcaggcaggcagcaggcagcctcggaatgcttgcttgattggaccagcattaactaaccggtacgtagtaatggtgttgttctgtcgtggagggtatcagcatcagcgacatgaaacgcgtgtggcatggcacgacgggatttgtgcacaaggacgacgccatggaccagtagttttttttagacacggggcggcaggcaagagaccgcgagaaactgatggccggtgactaggacaagaaccgatgcgtctaccgctagctagcgacttgcatcgaagaagcaagcaggaatgcaggatccgcgatcagatatattattggtcattaagtccataaagacattgcagatatgggctgggaaaacggcccatcttgttcgaaggacctcgacgaagacacgaacacgaggcgcacaacgtagaaaggcaattcgctgccgcctaaaattgggccttggctctctctctctctcccgcggcaccgccgctcggtcctccttttccctcccaagtaaacacatgttgtccacgtacatgaaacaaagattggatcgagt

SEQ ID NO: 89180 - DNA, 368 bp, Zea Mays
gacggaccactgccgcgctggacggacggtttcccttcctgtatcgcaccactgtcacacgcccgtccatctcccttccccactctcgcgctttcaatgggcactgagccacactgatagtgcgccattgatgctgtcgtaaagcttttctcctcactctggcacccccttctcctctccacaactgtcgtgaccattcctcttctccgcgacgacagtttctccttgccattaatggtatttcgtgtggacgtttctctacggcaatcaaatttgaggccatgatttccttctaccagcctataaatggtgccgaccttcatcccttttctccctgctcgacccttgctcagctgctaccgcactcg

SEQ ID NO: 89181 - DNA, 526 bp, Zea Mays
agaagacggtgccgtggacgccaggaaagagagagcatcaaactgcctgtgttgccgccatgccacgaggtcggccttcgtcgcttcaacccgaggaccaatcgccaccgtggcggggtggctactttgtcaggctccatcttttgccgccatgggccgccgtggggaaaacccaatgtgcgccaccgttcgaggtccgacccgtgcggggctgcttcaaggtgatgtaaggaagaagagcgatagaaactactggtgttgggtcatgtgatcgacgcgaatttgccgccgtcgtatcagctccgccgcggatccgccttgatgcgtggtctgcttcgtcggtatactaagcctcgataaggtgtgtcttaccatgatctcctcaccgcctagcgtcgttcggggtattggttgatgggcagaatcacggagtcgtctcacgccggtgaagttgccgctgtgagggcttggcggcggcgcctgggcagtgtcaagggaagtggatgagagctggagcgttgatcgg

SEQ ID NO: 89182 - DNA, 416 bp, Zea Mays
aaatgtttggtctataaaatacccgtgtttcttctatttcactctattctttttcctatcagactaactaggcaatgcagtgttgtcatatattatttttttttgtaacaagtcacttttctgggtagtgagactgactgaacgtaaacttgcacttgcacggatgaagggatcagatcgccagtatcttatcttgttatcgtctaggattgctatagcgatagtataggctagcgagcaaatggccggtgcgctatgatagggaggagtggatggaaggtgcggtcagtgatagcacgaacactgaacaccaatgcgacacgactacccgatgatgcgtacgtccttgccaaacgggtgcaagcaagttctgatggacaggcactagactgatgtcctcatcgcaagcatccgct

SEQ ID NO: 89183 - DNA, 389 bp, Zea Mays
cacacaggatctataagcacaaccaccacatgatatatagagagaaatcgcagtatgtgcctatgtggttgctggcagcaacagcttcaataattcgaaagaaaacagcgtatactactaccatacaacaagtaattactaccctgtctaaatccggtcaaaattgggccccgcataggacaatgaataattgttagtgtgataggctgtctataactccactgttggttttgcgtacagcgcagtgctgtaacacccgagtacaaccaatatagtagatcaacaagaacaacccaagaacacaatcgaagggagtggcgatatgtggtgttcacttgttttttattgtgatatgatattaaaaacaaggcaacacagattagggagtt

SEQ ID NO: 89184 - DNA, 381 bp, Zea Mays
gcaggtaaaagaattcaagcgcaacacgtcctcacaggcatgatcatttacctagctatggctattgattttccttcttgggccttggatgccattgataagatccgaaaaggcttcctatggcgaggacacaaagaagtaaagggggccactgccttctgtcttggggaagagtgtgtcagccccttaagctgggaggtttgggtatttccaacctgcatgagttgtgctgggcacttcgtatgagatggctatggctgcataaaactgatccagggcgtccttgggcaaacctacctattcaagttccttataaagctcggccttctccattgttctaatctcggaggtgggaaatggggccaacaccttgttttggac

SEQ ID NO: 89185 - DNA, 994 bp, Zea Mays
gccatctgtagcaggggccatgtgggttgtatcaattgggtcaagcatgaaggttgtttttttatctcttgcacacctctagcaattgtcacacttctgcacaaattatgttgtatctgaagctgcctacggccagtaaaaatcttgatgaaagattttccccagtagagccctggggccaatatgtgatccacatatactagaataaattgcccttcagctcttgatctttgtctctagaaatacactttagcaaggttgagaaaataccttccttgtacaattccccttctatcatcttatacggcctcattcttacctacatccttttaatgtgggcttcgtcattgactaaatgatttccccgaaggaaggttaaaatctctgttctccagtcttcattgtgtgtaggagatactatcaagatggctctttccatcaattctgccaaaggtgcctttaatattttaaagaacactttgggggtagagggagcccctgggtggcagacttggccaatatatcagcatgctcactgtccagcctctagatattttttactgtgaaccctttgaaggaacactccattctttggaccatatcaaggtacctttctaaggctaggctcttttccttgcttgacttgtccaactagcctgtgatgacctaagagtctgatttcaagattgctcttcttacacccattgccttcaatttcctcaagcccagcagtatagcgtcgtaatctgctatgttgtctgtgcactaaaattgtagcttggcaacatatgatgtctttactttggatggtgaaataacaataactacaacacctgccccgaaggatccccatgaaccatcataaaaactgtccagacatcttcatctaatgagctagcttcgacttgtgggctaggagtccaatcagcaatgaagtctattagtgcttgggattggatagacgatttgtgcacaaaatcaatgacgaactcgt

SEQ ID NO: 89186 - DNA, 609 bp, Zea Mays
cgcaggaaaccgttggatgtaaaaacgacgggtaggattttattactctagatttgtttccacccgcccgatccagatgaacggaccaaatcaactcaacgtgagagggtaaacagggactaatcctagccgtccggaagaagatcaacggcccacatgatttcccccaatcaccctacgagcgacggcggcgccgcccggaaccacggtggttcgccaccggaatccggccaagtccgcacccagagcgccaatcccgcgttcctacaggcactatgcatagccctatcgactacgaacccgatgacggctcttccttccctggattccaaacacagagccccgcccgcgtaaggttacggcgacgccattgccggcgatgtgaatcctcaacaaaggtgcaccaatcctcaaatcaaacagttctactcgttgcggacacgcaggcgaacaagggcaagggatccataccgtgaatcgtgcgcgtaggtgtgcagtccacggcgaagcgcggtccgcgacggcggtgataacaacagtgaaaaatctccgccgttccgcagcttctcacgcccgattacgcccttgcgcacaatcaacacttgcttt

SEQ ID NO: 89187 - DNA, 436 bp, Zea Mays
caatcggaaaggacgggaggtcataatgttcaattaagacctaacgtacctacatggacacctccaccaccatatccacctatgccatatccatacacatacatacctccaccatatgtcccaaatcaaatgtggggcatgccaccatacccatttgggatgccacagtaccccgcttggggggcaccctaaacatctgtattcaataggttgacacctccagtacaagaccgattaagagcccctcaatctggtccacgagcacaggcccagcaagattgccgaacaactcggtcccaaaggctgactaatccggcaggggggcatacaactacaacctccaacagtacgaaaaaaggagacgtcattaaaataggaacgacagatgtcgtcgtacaacaaaataacgaagggccgatgatttttggtgaatcgg

SEQ ID NO: 89188 - DNA, 431 bp, Zea Mays
cccatctactgaaactctcccttgtctctaagtatccccatgtattatcatgtatcactctgtatcactcccctttggcatcaattgctagaaaggaggacttcactgaccgtctgctggagggcgagggtacatgttgtagtagtggctgctgaagctatcaaagatcggggtaaaccgagagaaatcattctggagttgccgccgcctctgatctagcttatgaatgttgtctctagtagaaagtgactcaaaatggtaggagagagcacccatgttgccttgaaaactttgttgcatattgttcatcctggtcatgacggagttatgaacctgttcttagatatgttcacgaagtgaagaagactcaggctttgccatcaatcttttcaccaatagctgcaaatctggagttcatttcgttgaactac

SEQ ID NO: 89189 - DNA, 397 bp, Zea Mays
ccccacgaatgcccttgaccacgacacgcacgtcgctcgtccctgacgtggtccgtaccggccatggctggcgacgactgttacggctaactaccggggaggcattattagcttaaggcgacctaggaacacgcatcaatttgacaagaacgcactgagaacggcctgtccacgtgcacggcggaaaccgcggtgtcaatcccgtgttctcaattatccacgctcggattggttaaacggccactacgaggagcttcatgaacacatagatctgctaaaacaaggcttgaatcggacagggacttaccagagagggctggccacggagcgcagggctttacgttcgccggagacagagaaagggggaaatcggtgtcacggcggctctggttgaaat

SEQ ID NO: 89190 - DNA, 722 bp, Zea Mays
ttctgcttgatgcggttccggtgagtccgtgcatgtgccgtgcccgttggcggctatgggaaatcgcttcttcctggattcgtcattaatcgattctcggtctgcagggatacattgatgctcgtttaattcctcgttttcacagcaaacgtttaaattgcggcatttgaaggtgctaagaaaatgcagtttgtgaatgcctcgtcattattcctaactcatgatcgataagcggggttgccccacagtatttgctttttgggtacgcctggccttatccttttgtacatttctgggaggaaggaaaccgcacttttggttacctggttgtgcatgctttgtgccttttttggtaatgctgggttttgcagtgtaatgccatgccatttctcgaagcttgtaccgttccctgatggaaggggaaaaaatgatgtccagtgctgctgcttgttggtgttggagatttgtagtctcattcggtctgtcttcacccctgagctccccattagtgtggattttggagccatgacagaaggtggtagaaaaagctagatttggcttgtgcgcattgcatgattgttgtattgtctgataggttgtttggaatggatgataaaaaatgatcgagtgcattcttcaggtatgtagctggattgcatttttagtgcttagttgcatccaggaaattctggtgattgtttggatccctactaaaactttgc

SEQ ID NO: 89191 - DNA, 532 bp, Zea Mays
catcttttctgtagcaggcagtgcaacaaccctctctaaggaatgcaacttcggcagatgagtcaaaactttagtctttttcagcttcggtgcagcggaagaggtcatagttgcgattttcatctttgatccttgtttctgtgcgggaaaacagtagtcagaataggctaatccaattacatcaaaaactctattcaaccttctcttcctatgagcaccgaaggcagtactcatggctttgtcccctaccttcgaataagcccccaacaattcatcactggtcacctcaacggcttcaagccactcatcatttggctcgccaaactgacttttataacgataagtgtatttcagaaaaaccagactcccttgaaagcaatgtgctcctggaccaaatctctggtgcaaatgtagctgcacacggtgttgaaggccaacatgcatgattgaactttgttaccacctgctatcgaaggtctcctaataccgaagcacgatcgtatagggcgctgaattactcccttcacatcct

SEQ ID NO: 89192 - DNA, 683 bp, Zea Mays
aatttattgagatactgcattacagtatctcccccttgctttaaccggatgaactcttcttgtttcatatggagcactccctcaggaacataatgctcccagaaggctagcttgaattcctcttaggtaacctgatgcccggctggttggattgctgagaaatttgccaagtgctggtagaccctcttagctgttgtgcgccgaaaagtggcttttgtatctccgtgcatcgaatcaacccaaacttctgttccatcactcttacccactcatcggcttctagaggttcttctgctttgatgaagagcgggggtcgagtcttagagaattccagatatgtagtatcacgcggtccttgaggaggagctctgcctccatgctattggaactgattgcccgccatttcgcgcaagaagcgcatattatccgcagtggcattgaccagggcagcgatagcctcggccaaagtcggtggtactggtggcgggttaggagtatcctccctactgcgaaaagtccccgcaccatcatgtgtgcgagtccgtgatggcatctgaggcaaagaaacatttggaaaatataacatgccagcatacaccatcatattacattaccaaaatgtaataattatacagactccattgtacaacttgacttcattacttattttacataagtataac

SEQ ID NO: 89193 - DNA, 354 bp, Zea Mays
tgtccatttgttgaggagcgatcgcaatcagggcatggcgtggacgtctttgggacctttggtccgagatctagcagtgtatgatgcgtaccatttcgaattaagaagtgatcgaatagtagtcgtagatgtctgatcgaagggaggacatacaccaataccgtttcgaccgagcgagtttgcaaaagagtccccgcaatgtttaaataataagtcgtcgtccaccagttcaaagaatatcacaagtaggtcctaatttttatgatttatacctcgagtttctagggaaattataaaataaaatcagaaatcggtttctagtatgaaaataattctaaaaaccatagaaaaaaa

SEQ ID NO: 89194 - DNA, 616 bp, Zea Mays
cggaatgatgactggctgaatgccatagaagcgattagtgacgagctgcttggagcatattcaaaggccaaatatgaaaccatgacaactgccttcggagctcgtggcaaaaagagattaaatagagtgttcgatgttaccgggtttgtgtacccggactactgctatccttcgcggaaacaagggaaaaagaggaaagctgctacctcgacgacttctagtgcgtcgatgtcaaaaaaggttaaagttttgacacatcagcccaggcgcattgaaacgaccgacgtgccgaagctaattgaagggtccgctcctattgtagagccaagttgctctgtgtcagtcgaagctaggacaataccggttgaagagccgaaactggagaaggtagcagagcaattaaaagcactgagtccaccatgtacaacggaattgccgaatccatcaagcatccctgcaacaactccaaggaaaagaagaatggccagcgtgctagatgttgttatggaatctgtgaagacatcaactcctacttctactgaagcgcctaacatagagggtaaagtttcaaagaaatctaacgaggccagcatggtgcaaactatttctgaaactg

SEQ ID NO: 89195 - DNA, 581 bp, Zea Mays
ccataacaaccaaagttgttgtgatactgctctttgccagtggccttcgactcatacaatagttcatgcatactgcaaaaacacttcacgctcggttccagcccctgtcttcttacagcccaaacaaacaagcccattctaattatagctttgggagtaagttgatgaacaaagatctgaaatatctttagcacttgaaccaaaaatctgcttaatgggaaccgaagacccgccttcaaaaggcttttgtaaacaaccacctcattttcttcaggagcaggggtggtgctgtctcctccaaccctcacaatagacatgtcacgaaagtatcttcccttcatggcgtcaacatgactttgcttaatagtcgactttccgaagatggtatggcttggtcgctagggccggtcctcagaatcttcatctccactttccacatcatagtcatcgctatcgtctgaatcctcagacaaatccgccattatttccttcgtgatcttttctgtatttgtctttgccatagattcataaaacccagcaagaaaagggtccacaaccttcttctcctcatatagtttctc

SEQ ID NO: 89196 - DNA, 401 bp, Zea Mays
aggtcgttttctgacgaaggttgttttggcagagtatactactaagtaaagtgctaaaaatgcaacaagatcttgaagaggagaaaaacaaagctatcatcaaagatttagaagacaaagttgaaaattacgaagctgttctgaagaagaaggatttcgtcattcaagaccttgaaatcatagctaaagaacacgaagctgccttagaaaagaaagacttcgttattcattctatggaaggctcactggctgaggtccaagccaaaaatgataggttaaacaataaattactcaaaaagtcagaaaaatttgagcaggaaaagaacaacctcgaaacaagtctcaagactgagatcgaaaagaattcaaatctgcaaaagtcattaaaggagcttcaggag

SEQ ID NO: 89197 - DNA, 965 bp, Zea Mays
gagaaacccagggggctcggagtaagactctgcagacacagagcacagctcccgtggatggcgggttctatttcaaggaaaccgaggggttcatatgaaagagtgcacccgcgaaggggtacggtgcattatgggccgttcgattagatatcaacacgccagattggatcgacttcaactaaataggtacgcaaagatagccgcacgatcgaccctcaatgttccagatttaaatacaaaagaaccatcgagatccatctgatccctgctcaatgccctatatcatcccaacccgaaacgatactcagatctaatctagaccgtatatgagtagatcaacggatccgggacgttaaactaaacgagtgcgcccggtatgatctgcaccatccaataaccatctaatggtgaaggcgatcgtcttcttccccggaacatgccacatataggatagcgacggcgcgcgtatcacactagtgaaatggaccgacgtgaccctgtccgtggactcgcccgacactacgcgcacattgaaggtttagcagggaccgagcaggggaactcaccgctaatggagagaactggccgacaacgccacaagggagtggacaatttgatggcggcgcacgatgatgcccggccgaattcctcccccgcgtggtatagcaggtcgccgaggtctgccccgaggctctacccgcacgcaccactgctctgttgaccgcaccagacctctacgccccttccttcctcctctcttcttcttctcgttccgcggcaatggcaagcagacgctctcacggagatgctggtggattaagtgcgcaaggggagggcgaggtcaaggatgttcatataggcgcgagaaccgggctggggttagctgatccctcggtcagttgttgaagtccgcccatcgagcagcgctcagcccccagaaagtcgctggggtttgttggggtagc

SEQ ID NO: 89198 - DNA, 456 bp, Zea Mays
ggcgatcctgcgggagtgggagacgcttgaggccgaacaccagcgcctcagtgattgaattacccagctggaggagcgcaccaaggcagcgtcccgccagtttgcctccgagcggtccgagcttgagcgggaccacaaggactacaagaaggacctctagaaggtgtacgcctgggagctggaggtgggccaaaaggagaagaagttggccaagaaggaggagcacttggaccagagggaggaggtcatcacggagctgtaggccaagatgggtgccttcaataagatgctggaggagcagtgggtccaaaataccgtggctgtggagaccctacgaaggctgcagcaggggttggatgacagggccagcagccttgccctggctgaagagaacctcaaggagaaggatgcttccctagataagcgggcgacggatctcgcctggcaggagaagga

SEQ ID NO: 89199 - DNA, 549 bp, Zea Mays
gaactttctgaggtgttctatgttccaggagttcccgacttctgtgccatccatctgagtgagacgatacgatccgggccgagcgacttctgctaccatgaagggtccttcccataagggtgataacttgtgccgtccctcccccgttagaattcggcggaggacgagatctcctattgagaaggatcgttgtcgcacaaccttgtcgtgatagcgccttagagtctactggtaccgtgctgattggattactgtatttagccgttcttcttcaagtacatcaatgtcctctagcctggtagcctcagcttctgctatgttttcgaagatcaaccttggcgccccaaacttgagatcggcgggtagcactgcctccgtcccatagaccatgaagaaaggagtgtttccatgcagggctcggctaggttgggttcttaggctccaaacgacataaggcagttcccttatccactttcctgcgaacttttcattttatcgaagacctttttcctcagtgcctccaatatcatcccgttggctcgctcaacc

SEQ ID NO: 89200 - DNA, 640 bp, Zea Mays
aattttctatgcattttacaagtttctagatttgtttttgtattaaaaacgaaattctgtaattatttctctgtttttaaacatcccaggactcggcctcaataacagggaaaactggggtttagagcgcaaaaatgcctaagacacagaggcgcaccagccaaggacggcaggttgaatctctaattttataaggggttttctgcaaagtggttacgcgaaggggtatcggtccgttctggccgtccgatctgcaatctagggtccagattagatcccacagactgcgaatcggtacgctgcgcgagacggtggattcacatcggacggtttaaaacgtatgctcccgtggtctaatttcgtgcatccgatccaaaatggacggctcacgctaacctaacccaaccggtccccaaggtctaatctgggccgtcactggagaatccaatggcccgcgccacatcttctttccacggattgagcacgtcgacgctaacagtcagcacggcggcacgcccagtggctacggcgagccatcgtctgagccacacaactagagcccgaacgcgcatcattttccaatccaagacacgctacgcgcagaggaagataatgtgaatcgagggaaggtagtctcacc

SEQ ID NO: 89201 - DNA, 660 bp, Zea Mays
catggacaaggagggtgagggcggacctaagagcggctggtcacggtggggtgacacacggtggcgcagacggccgatttggtggaagcaagaaattctccggctatggtggctaatcgacgacgagggttggtgctctggcttcgtaacaatctagtggagctagttgtgcactaaatttatagtatccgtgagcggtggctccgaatttggaagagggaagctggcggccgaagagacgggtgagtcacaggtgcgaacttccgtggcgttcaccgggcaaaaggttacaactgtcacttggttatcctacacaacccgtgacgacatggtagaatagcttaaggcgtgtcgtgaccgaggtaagtggaggcacaacgacaacggtcgagcggccacgtcgccggtgcaagtgggtacgatgaagccggctcaatccattcccccttcgatctttttgcgtcctcggtaatatcctacccgagctgagcatgaatcgtggcagacagcacggatcgcagcacggagatctctggcggcgaagttcattgaatctgatcttgttcagttactgtaccatcgcgaacacccatcagtgcgtctgccagagcaagttagatggctttgttctccaatttctatacaacaacccattaatcc

SEQ ID NO: 89202 - DNA, 578 bp, Zea Mays
aaaatttagaaaactaaaactttgctgccactatttgaatagttagaggcccataattctttgtagagtacgcaataaaatagtatgtattcaataaattactaaccttagtctctactgtatcaccagtttccacggtcattgtgctccctgttgagacgaaggttgaaccagaccttgatcaatcctcacgttgatcccacacaaccacattgaccttgtctacgtatgtagggcaccaatacaacacaaataagtcttaggccaaaggggtcaaatgcctctaagacttagctcctgaccgccattttgcttcggagcggccaatcttggccaaggcgagggcttaggcgcagcgaagggtaactaccccctcgacgtcatattagaagatctagggactttgaaggcttcaggacaaaggcctctaggacttgggaccggaagactatgttcaactagtggaagcccaacgggccctatatgtacaaacaaggccctcctatcatcctctcccatgggtatagcaccccacctagtaaggtctagtctggcactattccgcaataatccccatt

SEQ ID NO: 89203 - DNA, 915 bp, Zea Mays
gccaatagtaggaggtggctgaggcaagcatggacttgtgatcagttaggtcagtgtcaccatcatagatgagtttgatatagttatgttggcggtgatagtttgcggcgatatgatgaaaagtagtgttggagtccccatccaacaaagcgtgaacagtgagaccaatttgtcatggcatacacaacggagttcctcttcagggagagagtggttgtccttcttctagccagttgaagagtgtgacgatgaacttgcagtgctcaatggaagtttggaggtttttatgagcacgcactcatgccttagctctccggtggacctgcttaaggttagcagcgagacccctagtcgcatcacatttggtagcaatgggacgccgagccgagaggatgaaaggtagataatcggggtttcggagccaagcattttgaaagtggtagatgggacgcaagggggtgccgaggaggggtttacaaggaactgaaggaaggggtggtgatctgagacatggtgaggtaaggcagtcagagatgattcaaggaagacgttggcaaaagaggaataagtgtaaaattggttaagcctagccaaggccgggatctctcgaccattggaccaagtaaacaagcacccatgaagagggagttccatgagccccaaggagtcaatgagattattgaagagatcacagagatgcaagtcgaagcaacgcgagctaattttactagggtgttgtacaaggttaaattctcctaagattagccacagggagatgcaactggagacgtccaggaggtctgtaagtaaggaaggggactcattgtggttagagggggcatagacattagtcacggtgagggggtgttggatgcgcacatggagaaggtggtggtcaggcagaagggggaggag

SEQ ID NO: 89204 - DNA, 681 bp, Zea Mays
ggcgacttttgcgcggagtgtcgcacgcgagggtagtctgcgctacctctcgtggtgacttcggagtggtcgaatgccgaagaccgtcgatgcagtcttttttgacatgctgtatctgagtttttgtgggggatttttgcaggtatattacatggctctgcctcattaaaaacctcaccccctgggaggaaaagagtgcgggccggaatagtactgtttggtgaaatacaagggcgcgtaggccctgaggatttacacaaaaaatttgcggagattgtcaatattccaagagtggtctaggtcttcgccggatgacgttgttagcctataagcgcttggggatgccttcgacttgacgatgaatggaccctcccactttggctctagcttgcccctcgactctgtccgggtggttcggacaagcacgaggtccccttcgttgaattctcttgggatgattgcgtggtcgcgccaggccttcgtttgagcttggtatttgttgagggcctgcagggcgaagacgcggtctccatcgatgaggtctttggacgttggctcgtctacgtaggggacggctgatgcacttgttcgaggtgacccgtgctttatttcttatggagtcatggcctccgatccatacagtagacgaaaaggagtgaatcccgtcgtccggcattcggt

SEQ ID NO: 89205 - DNA, 335 bp, Zea Mays
ctctccaatttttatgtgacaatctcataattcatctatatcaaagctatagatctataatccatgttcacttttgctttagcaacaaccatcaatcgagcaacagatctagctcaaaatggctcacaaacctagttctaggccactgttagtctgatttcagactcaagacagcctgacaggtcaacttggagtcgaattttctccaaattgcttatgtaacccaagcataatctctgtagaaaagttgctctccttacatagctctaccaatttgatgtactgacctagggcaaaatccttatggtttggaagttacaaggccccaaagttga

SEQ ID NO: 89206 - DNA, 687 bp, Zea Mays
gtggggtcagggttggtccgcgccgacgggttgggccaccgcggagagctctactctaccgtgcttcagcagcataggagaagcgtgcgacggtcgttgatctagtgagaaacggttgtgattaagagcagaggataccccttcgatgcttaagatctgtgtcgttgaaatcgtcagggacaatagagatcagatgtttgttgttttgaatcatggttgttagattgagatgagcggctgaggtcataacacgcgtaccctttcacatttttaatctggggccacagatctaataaccgacgtcccgggggtgaaccacttaacgcatgtgcgttggggtggtggggatccggtgttgatagaatcttgtgcgctctcactgcgtgtgcctttgtgtggcacggttccagctagtcgttcggtgccgcttgtacctaagccagcgtcctaggtcaatttttgcataagacacctcggagaacttgccaatcaacctgcagtacaagtatgtgtaaagatttgaacaattgggtcctagatttaatagatttgaccctaaactatctaaaaataggattcacagtccaggaatatctgaaattctataaataattaaaatgattttaatttaaaattaatccctaaagctaagaaaattcataacttttatgttctagctccaaattt

SEQ ID NO: 89207 - DNA, 564 bp, Zea Mays
caactcatgacctggagttagctgcggtggttcatgccctaaaaatatggcgtcattatctgctggggaatgtctgtcacatttatacagatgataaaagtttgaagtacatctttacccagtcagagcttaatatgagacgaaggagatggctcgagctggtaaaggattatgaattagagattcactatcacccaggaaaagccaatgtagtggcagatgcgttaagtcgtaaggcattctgtcattgtcttaccatgaagacttctgacattacgttatgccaagaaatggagaagttgaacctgggaatgatataacatgaaactataaatcacttgaggcttgagtcagtcatcctgcaaagaataattgaagcacaaagaaatgatgagggaatgaaacacattcatgagaaaatggaggccggtaaagccaactgcttcagaagagattatcaaggtgttgtatggtttaaccaccgcatagttgtgcctaagaatgatgagatccgccagcaaattttggatgaagcacatcttagtcgctattctattcatcccg

SEQ ID NO: 89208 - DNA, 344 bp, Zea Mays
gtaaatgtgttgtcgtctttatcgatgacattttaatcttcagcaaatcttgggaccttcacctacagcatgttcgaacagtcttttcccttttgcagcaacatcaatttaaagtcaagctttcgaagtgtacctttgctcaaacaaagttatattaccttggacatgttattagtcaagagggagtggcgacagatccggaaaaagttgctgcagttcagtcttggccgaccccaaccaatgtcaaagagctccgcagttttttgggtttagctggttactacagaaaatttgtaaaaaattttggcatcatatcccgccctcttacgaatttgttgaaaaag

SEQ ID NO: 89209 - DNA, 374 bp, Zea Mays
aagaaacagagaatttcagcagagccgaagctttcggctcccaaaaagcgaaaatcttcaactctggcccttatcgagacgaaggtacaaggttcaccagcgaagattgctggaacctcttcgtcctcttctatcggcgtaacataaattcagaaggtaatgactgaacctttcccgtttgctatgctaagtcctctagggtcagatctgactagcttattgtagtcaaaggagaagggggttgaaaaaggtgcggaagacgggaagaagactgcttcggcaaccagtggaaatgagggcggtcagaagaaacgacgcatgattgctatgatgaggaccgtcctaaccccacccccgctcgcgacagaaaaaat

SEQ ID NO: 89210 - DNA, 1302 bp, Zea Mays
tgaatcttgagaagctgcactctgaagtaagcaacccagaaagagatcctcccaatccgcagaaccgaacatcctatccagacgtaccaaggtggggttactctgcccgtttgaccaagtgtatttgcgaccagtcaagggaatttcaagaagagccaaatcatccttccatcttctgaatctccccatcatagcccgatcaaggttggaattgtttttatcttcgttgcttaggatcatgttgaaatcaccaaccactagccacggacccaggcaatgagctctaacagtcgtgagctcatgcaggaattgtattttttcagaattaccttggggagcatacacacaagacaaccaccatgacacgccatcctccagccgaaaattcaccgaaacacagtgatcatcaatcctcgacccaagagaagtaacatgactcctccaagcaaccagaatacctccacttgcgccattcgagggagagaaaacgaaattgccaaagtctgaaccaaaactacgacaaaccaaccacttggtaacatccgacattttagtttcttgaatacagatcacatctgctttgacgttgtccactaaacatcgaaccacatcttgtcggaccgaactattaaggcctcgcacattccagcaaagaatttttgaaggatccattgggaaaacaaaaaagcacgaccgcagaagcaccaaggcttagaccaccactgatgaaggctcccccaacaaatcctctaggatggacatgttgagaagcaacaccaaagctttgagctacagatctaagggccgctttacaaaaaccttagcgtaatcatccagaacacttggagacaacacatcgtcatgatcagcctgcagaagacccagctccttcacaatcctcagcttgcccttctgaacacgctgagggactaacagtttctccactccagccccggcaagacgcctgctgcggtgagggaaggcactgccagcttggggcctggaacgttgctgtcgcttcttaggaacgccgaggatggaatcaacagtctttgacattctttcaatgaaacccgcctaagcatgggctagcgagagcactcgggaagcagccgcccttcgtcttctacagaagtaggtaattgggggacgggtccaaaccctcatgcctggagccaacatcttcatgggcgacttcatcccgaccaactccgcagggggcgcggccggcgacaaaggaggatccccagacccgtcatcgggcaaggggacactggagccgagcccctgcgactcccccac

SEQ ID NO: 89211 - DNA, 1207 bp, Zea Mays
aagaatctagtcttccttcaaaattctttcggcagcttcatgtaaaagtttgtcgacgacttcgtcaacaacttcgttagcaatttgcataacatctaaagcttctttcataaccgaatcagcttcggggttatatggctccggtggcggagagaggccgactgtaaaaaatatatgatggtgaatttcgaaggtaaaaacgagcaacaaggcaaaaagtttcaaataaaagtacctataatcatggcgcgttcggcagcttcctcagcttgcttagcttccttgcggatgtcgtgagattctttctcagtcttcttaatagcttcgtcagccatctcacaaccacccttcatccacacatcggaatagaatttgccgcccattgtagaagcctcagctgaggggtcattaatattctcagctaagagaatagattctggttgggctgcggccttgacatgttcacgcccaaccttttctagaattgccgcaacccctcgggcaccggaaaaatcacaaaaatccccgcgatcgctaaggatctcatcgaaagcttcggcttcttcacctatccattggataactccttcgaggtcgtcgtgaataaatttttgttctgaagaatacgcccccacctttgcaaagttgtcttttagcttcttcgcgcaatccaaggatctttcatagcacctctccctagaatcacgaagctcttcaacattcttttgtagcctagaacttgtccactcgcttatctcttgctttgccttcgcaacttcataattttcattcatttcggcaagttttttctttagatcgtcaactttggctttgtgagtttcggtttgtgcattaagcctgggttcgctgatttttagcctatccacaaaggagagcagaatcttatctttttcaagggcttcattcctcagtgtaatgacctctgaccgaagattcccaagtgcaatctgacagctttcgtcatcagcttctttttgagcccgtaaagctttactaagaattaagccctaatcacaaaaatatatgtgtaagaacataaaaacagtaagaaaaccaacaaacataacttattttacgagcaaaagtatatatatcttcaagctattataagcaaggctatctgcaagttcatcctttgacatcacagataagccaagctctagcttcggaaatcccatattctttg

SEQ ID NO: 89212 - DNA, 1250 bp, Zea Mays
cccgtagtaaataattagcagaaaattattaaaatgcatgtgaaggttatattgtgtatactcaaatcgctctaaatatttgtgttgcgttgagcttttgaactcacgtcgagcgattgaattgtatcgtgggtacccggacatgccgatcaggctaaattattaaacagctgagttttggcattggctgcgccctggcaacacgacgcagtatttgtgtcgtacgaacttggctgcgtcatgtgattgctatgtagcactctcgtttaatcggacaactcccgttgagtcgaaccgccatcgcggagtcgcgtatttttcgcatgccctgtaggaactttctgtctgccgtgatcatcgagccacgattgcgcctggtgcacacgttgcgtggatttatcgtgtaccccaattaccgagtaataattttgcctgttgtacttattacaaaggcttgttgtgttgtcgtagccctgatggtcgcccacgcgttgactccagatacaatagagcttgtactcacgtagattgtggtgggttgttcaagcccctaaagttacatcataacgcaaccttcgtaaacaattttatttggctctatattttatttgattgtgctgtgtgacatcatatatttatatatatcgccaagtggccttaacaattatatcaagctctatagtgcttggaaatctgggaaattaaattgaaatacaatgaaacacagataagttaattctttgctctctcctcatgcataaagttttacccgaagtaacccgaagatatataatataatgcatgaaagccattttggcatagaagacatcacaaattgggattctattagtaagcaaaaggccttaccaaatgatttaaaactaaatctcagccatacattgctcaaccagatgttagcacattgctctctttgtcgctaaatgacatgaagcaaactatgagataaaaggacatgtaatggccagcaacacgaagttgcgagtataccgagaggttattctgagaattttttcactatgttggtgtgaaaaccatagtgtgttcctgtcgaaccactttactcgttctatctaggacctatatgcttgtgtcgcatacatcactcggaattgtaaatacttatagtcactgaattgactcgggatagtcctttgacaatttggtatacactgcaagctaaatggtaaaggtcggtcctgaatggacacatacctggggtttatgtagcc

SEQ ID NO: 89213 - DNA, 655 bp, Zea Mays
aaactacagatcccctttaacgcaaagcatgccaataaagcatagaggttactgatgtaaattggatgcttctgcagtaaccctactctcctaattaattaaccagtatagccaagtccattcacacagtgtgatgatgctgacgaaaactctaagcgaattagcaattcagcattgccaaccagcatatgctttgcaatgccagttctcgtcagtaaaaaagtactatcaaacttcctgcatcttgagccttagaagaactacataagtgttttaacgcttctgtaattgaacaagtagtattgaggcttagaataactacataagtgttttaacgcaaagcatgccaataaaatggaagtcaccttagcaacaaattgaaggtcccttcttgtcatgtccaacgcaaagcatgccaataaaatgacccttacacgatccaagaatcaaccaaaatttatggaacaatcttagaagtgttttactgtaccattttttcagcctgccgtcatgttgatcagaattgttctttttcagattcagattgtagagcagctctatgtgtttgtcaccttggaacacagaatccctactactctctccccattttttcagcctgccatcatgttgatcaggagtgtgattttttttctcc

SEQ ID NO: 89214 - DNA, 463 bp, Zea Mays
tttgggattgcggggctgtgtcatgtcggccatggcgccgccgcttggctttggggcgccgccgccctgtgtccggtgggggaagagatgagagagctgtgttgaaggggataagatggggaccctagatctggaaaatgacggatgagagtcgactgtgggcggtattaaatccaaaccgtagtttcttcatccagcggctatggggagaatagggtgtcgcgaaccgtggaccgtggatacgtgatccagtggttgaaatgcaatgatgggccctcgggaactcgatctaatccgagcgcttgattggggatccaacggctctcaaccgcccgtaccccttcggccaagatatcttactaaagagacccttactttttcagtaactaacccccgatccactgttgatgtgcgctgggtctcgggattcttacgtggtggcccctgccttctcaagtatttg

SEQ ID NO: 89215 - DNA, 694 bp, Zea Mays
gggagaccccgctcggacaccctcgggggctaggtcatagtttgcactgcccacttgagccggatcatccccggcagcaccctcgggggctgggcagtggcttacacttcccacctgaaccaagtcatctccggcgacatcctcgggggctgggcatgtgtcaacaccatccttggggcccaaattctctgcggtagccacttctaaggctgataggccctcagttacttccatgagaccaggacgatccaagtcagtctcccgaccctcgagatcgcgctccaaggtcaacgaggcacgggatgatctcaaccctgcatcaggcacgtcaacgcaagcctccattgcaccatcatccactggctccgataacaagtcttctgggaccatatcttcaagagtctgatcaaagttggctagggacagttcttgcagaccaatgagggcagacaaagcaggagagggaactccactactttcaccgctggcgatgaactgccgactgtttttccgagtcaaaggagcttcattttcttcttcctcatcatccacattggcaacacaagcagcacccccattgggatcagcaacagatggagcacccacattgggatcagcagcagattgggtacacccattggggtcagcatcaataagtctagtcgcaggcatttcttcagtagcaggaaccgag

SEQ ID NO: 89216 - DNA, 774 bp, Zea Mays
cgccggggaacttgccacggcaatagccacgtattcaccgcgccaggcttcttcctcccctccggccgccgcgttgctcgtccaaaatttgcggccaccgatcactccgcctataaattgaagcccccactagcttcgcaacatcatcacccacctagccaccgtgaatcgctagcaatcgtgcaccagtgcgcttgaatttcggttttcccccaaatcaagtttccgccacccgaaatcaacctcaccgtcgccagcccaattccggtcagctcccgttccctgcttcctcgtttaagctttctcacatgccttggatgcttgccaagccattgaattgaacttcgggctctctggtcaccaggaacacgaccatatggccgctatgcttacggtcaccgtggctggagctccgtagttgatcattcgtgcaattaaattaggggaaacactcttcgggtagtgaatttggtttacgccatagctaggcgcctgtcattgccctaatcggccggcgtagatgctcgtcggagctcctccgtgcgtgaacggcgtcgagggcgcgtcgggtaaaggaatagataattggaggacttttctgcatttggtcagtgacacaaaagagcagtgagcaaacctgttttgatttagttaatagatcggggtcttctgtgcaaaactcccacgggcgcgcacgcgtgggcgtatttctgctggttactgggccgcctgggctggattcggcccagtactattctattgttttcctttttc

SEQ ID NO: 89217 - DNA, 669 bp, Zea Mays
cacattctcatctgcttccatgtcctgatgcatttcctggtgatgcatgtccatgtgctcgtttgcctcctcgagctgttgttgggtagtttggagctgcttctctagaagttcaatagtgtggttccttttctccacttgctcttcaagctcatggattcgggtacccatctgctcagtctagagatccttctccaccaactcagtagataagtctaccataagatcttctttgtcgctgatggtgaccattgcatcctgcgctaggccaatcaaatgtgacatagcctcgtgcttcagggcctacaacaagtatagcacactcatgcaccaaacagttagtcgagcggtggctcccggtagattgtccatatatccttggcgtggtcaacccgatccctccacattggctcatcttccttctcagcggggaatagactgatggggtgagtcaccatctctagctggtgaaatccgcataaggtcgtcagtgcatgcatggctgcttctcaatggtgtcgtgggcccagaaaccaagtgtctcacagtccaacaaacgccaccctagctgcaaggggtggggctccaaggctagccacaccttacaatgaggcactccatgctcctcaaacaattgcactatatactgtggaggtttaaggtatcctg

SEQ ID NO: 89218 - DNA, 560 bp, Zea Mays
ggacgcccgacgtcatcagaaactgcagagctaatgcactagttgagaagcttttttccatacttagtacggtgtcaaccactacagtatggccaacccctcgccaggggggctcgggtacgtgaccgagcccttaggcttggcctcggctctcagcaggaactaagtgggcataagtcaacaacaagtgcatcccctcacaatgcgcagccaactcccgtcctccaggcagctcctcttggaggctataaataggatagcccacggcttctgaaagacacaggaaaacacttcacaagttttctcctccacacggtattggcgcttgcctcaatcatcccttgggacttgggatccttccctctctcgctctgcttgtactccctactgcaagcacttaggtgcaagtaatataaatctcatcaccttctactggaagtaggatctcttcttgtccgaaccaggataaaagacttgcgtcaacttacatcaccatctgggtcaggggcatgcaacattaggtcctcagatccaaacactgactactatatatacacttg

SEQ ID NO: 89219 - DNA, 435 bp, Zea Mays
gaacaagatcagattcaatgaccttcgccgccggcgatctccacaccgcgatccgtgctgtccgccatgattcgtgctcagctcgggcaggatattaccgcgaatgcgaaaagatcggagggggaatggattgagccggcttcaccgtacccacttgcaccggcgacatggtcgcgcgaccgccatcgtcgtgccaccatttacctcactcacgacatgccttaggctattctaccacgtcgtcgtgggttatggaggataaccaagtgacggccgcaaccttttgccccgtgaacgccatggtagttcgcgccggtgactcaccccctctctttggccgccagcttccctcttccaaattcggagccacctctcacggatactataaattgagtgcatagctagctccgctagattgttacgaagccagggcac

SEQ ID NO: 89220 - DNA, 1085 bp, Zea Mays
ttcaagccccaattttgtcgaggaagttgtggctttgttcttcaaggattcatcaagattgatggcgaacatagagcaagcactgtaagcaatatatggcttaacataatgtccggggctatgtgccgagtttttttagtactacaatttatatacgcgacttcgaatttctgcagtgagaagtaccctctggatttctacaggctggattctctggtgcaccagttcaaaggcagtggatcaaggtatagatagaggggatgaatatgcccagaaattgcattgcggcaatacagaatcttgtgataacctactctggcctggcttttagagttgtcatcagctcactgatacaaaaactgattagtaagatatagatagcacttggttacaagttcactaaaaaggtggcctcgcttttggcgcagcattggtgcactgaggatgaagaatgagtgctccatgctgaaggcccactgcaacggcaggaatctggaagggtaccgtgtacacctgacgactcttcctatttccctctcattctttgcttgcattgagcggcggtgcatctcattccatggctcgctcagatgccgccggtcgctccagaagatgaagcgggagcatgccactctgaagcagaagctggagacgtattttcaggtaaacacaaacactctttaagaatggttgcggtgtttctgtacatagataacgatcgagcaactgatcttagctgctgttttgctgcgtgctgatgagacagttgctgaggcaagtcggtcctccagaacgcgcggtgaactcatggaagtaacaagagtagctaagcatgggaggcagttccaagggaaacaagagggtgggctactacctctgctccattggaagagtatcgtatactcctcgaagttttgctcagttacttactgctggtgtgccggcccttttctttgctgctcatatgggggatgtgtctgtctctggtgtggtttctgtaccgtctactctgaaatgtgcaatggtatcatcaatatatttggtcgaattttgtcgtaaggcgttcatactgcctcatgattttc

SEQ ID NO: 89221 - DNA, 530 bp, Zea Mays
tttttgtgacgctggtgttttagaggtaatagccgagtccttttgagccacgtcagcgcttcaggaatgatggccgattgattgctggtgacgtcggcattttagaaataacaactgagtgattactggtcacgtcggtgttttagagataacgaccgagtgaatactggtaacgccagccgttttagaaataacggctgagttatattgggccacgtcggcattttggaaacaacgatcgagtgatgactgggcacttcactgtttttagaaataacagctgagttatactgggtcacgttggcattttggaaacaacagccgagtgatgactgggcactttttggacatggcatctggcccgggaaaaccccatttgtaccgcgctgtcgtatgcctctgcattctgagccctagccctgcttttccgcttccagaccttctctgtttccttgtgattttgcttccgctcagttcgtcagcgagattgagatggcgcccaagcggaagagtcagaattcctctgctgc

SEQ ID NO: 89222 - DNA, 697 bp, Zea Mays
ttcttggcttgtcaccttctcgggacagaaccatgcttggacgtacgctataaaacgatcatgtgcacggctaattttaatcagttgaaacttatcagatactaatgtatctacagaagtgcgtaaaacgtttttacacaaatggccagtaaaagcaatttcactagtgttgtacacagactaccggctcacgtgattacatttcttttcctcccactgaatacatttatttcctaccactgacaggtgttttcaacttgatcaaataccgatatagcatacctccagtcaatcaatcacgttccaacggatacagaaattcaaaattttcaatgacaaaaacttaggcccaatcagcataacatatggcctgtgatcccagccgaatcaagactgccagaagaaacttcatccctcccatctcaaaataaatcaacttttagagttgtcctaaatcaaattatttcagggtttgaccaaatttatataaaaatcacgggcatagtatcactaggtacatcatgaaatgtactgccataatctacttaattggtgtaataaatgtttcttctttcctacaaagttggtccaagttgattatagaagttgatttattttgagacgaaggtagtgtctgaaaactaaaagttgtgtaaaatacttctagtaagcaaagcagatcctcaggcaatattca

SEQ ID NO: 89223 - DNA, 559 bp, Zea Mays
gaccgaggcgttgcgagactgagaactgaagataaatggacaaagaggcacatgaatttagataggtatagagtctcaatatgagataatacttatgtctttgtgatggtgactagtgtttatgatctgatgacccgccctcttgaggctaaggagagggggatagttcatgttcgaatcaaggtcagtcgttaaattaatatggatagacgctcaacctaacctaagcgctcaacctagccgagcctatctccaactaggttgcctaatctgaccaggtttttaccatcttgatttccttgaggtcttccttgtattaggtgaacgcgtgttgcttgtattggggatattgaacgcaggttgcttgtattgggtgtatatattggagttgtgcaattgtgttgcatatcctagattgaactataagaatgcaccacgtgagcgtgttgcatatcgattggcaggtcataaatttacgttttgttggttgtggatgcatatctgaaatatttgaaattcgtgcagttgtgcacagaaggctcactatcttgtaacgacc

SEQ ID NO: 89224 - DNA, 706 bp, Zea Mays
tgttgttgttgattttgttttcaagaatattcaacctttgaaggacagaatttacccttcctacatgtacactcgggttaatgaccctactcgaattaccaccaaacggatttctaaggaagacatgttgagctgagttgatttgatgctgagaggaaagatttcaaatgtcggtgctcccttatcatattctgtctagaatcttccccaacagagccctttttccatgtttgtttccaaccctcatgttcaagacgacagtccgggctaaagagtgtgactctctctagaagatattgaggccttcattgctccataccaaaatctccatgaagaagaaagacagacccatctccagatgcagacgattgctgatgaggctgaggtgaatgttgttctcaatacgctggcgggtgaattgtctgactctgcccgtactgagtcggtgagtgttgcagctggacatggccttggcgaggatgaaggagctcacagtcctagaagtgtttgtcataaatgattatgtcgaatgagccatctagccgtgcctgccgaggggaagaaaagaaagaaaagactttggtggtcatctggcttggaactaggtgctgactctactgtctcagtccttggcggtggctcgacgagcgccaaccttgaggatgatattgaaaattgtgatggtgccaaaattggtggccgtgtg

SEQ ID NO: 89225 - DNA, 1008 bp, Zea Mays
ctcgagtaccacatgagagctaggcctttgagggcaatgatgaatgacttggacatagtataatcatctcccctgatgatgcgacggtgacatgttaactcattatgcactctgatgggtcggtgttgccattatactttgggcatgtgcctgccctgtaattatgtggccatggtgtggcctggagatgtgcggagagagggcttcgctcatcaagaaagttgaggccatggaatgcacctagctcttggacaggaatgagaaactggttgatgttttgatgatgggatgcaccgacctattaccaatgagggggcctttgtgttgtagctctgatatttcttactgtagtgctcttgctttttcttcctcgtcttggatcagttgtctgattctactctgcatcatggttctctgtcttctagccgtgaggacctccatctgcttctcgaggtggttgtttttcatgcaaaggctatgtagctttagctgatcctctatgttgatgcctaggtctttgccttctggtaggtcttcgtcatcatctagggtgggcatccccagcagaggctggcgacttgcgtaaacctcatagcctagggaatttacgacctgtatcttgttaagtctgaccatattatggattggttgggttggctttttagattgggtggtgggtctcttggggtgtctgagctagaatatgaacttctaactcggggggggggggtatctgcttttgtcttgcggtgtggtctttgccttctagctcagtggtggttttgggattgttgggtggtggtgggatttcgtcggcgaaggccaccttgccctttttggtggcgagggtcactcttgctgcgtcgtcctcggctggagagctagctcgggtgttcttcctgggaggcatcatgggttggtcttcactgcacaaacggtgagcgccatatgttggacctgctgataggtggtcaggtgggcccaaacactcgggagctgataaggggt

SEQ ID NO: 89226 - DNA, 635 bp, Zea Mays
gttttcccctcgctcaagcaacccttcgtaattcaccaagctaatcgcccatacctggccacttcaacactaggggcttgatattgtcagacctctgcctacggctcaagggaaccttaagttcacctttgttgccgttgaatacttcaccaagtggatcgaggccggagcagtatccacaataacgtcgaagagcgcccaaaagttcttctggcaaaatattgtgtgccgcttcggagtcccgtccaaactcacagtcgacaacggcaaacagtttaatagccaagacttcagggatttcggtttctccatcagcaccaagcctatcttcgcctcggtatatcacccgcaatccaacggcgtcattgagtgcgccaacggcaagattttcactgccatcaagaaaagactcctcgacgacaaaaagggcaaatgggccgaccaactacctgaagtggtatgggccctaaacacgacagaatgccgggcaaccggattcacaccatttcgcctattgtatggatccgaggccatgacgccgcaagagataaagcatgggtcgccccgaacaagcacatcagcagtcttagacgtcgacgaaccaacgtcccaagatctcatcgatggagaccacg

SEQ ID NO: 89227 - DNA, 402 bp, Zea Mays
gttttcaggagtttcttcagagcgggattgagatttcctttgaacgtaatgattggggacattttggaaaattacgaaatctatcttcatcagttgactccaaacgctatcgttaggctgagcgtgtacatctgggcactccaaagtcaaggaatggaaccgaatgctgaagctttttgccgagtgcacgaacttcattataagacgaaggccagagaagatggtcttcatgaaaattttggttgttacaacttcgcttaccacaaagatatgaagtctccagtggttagctatagcaccaagtggccaaccggttggaaaaatgagtggttttatgttaaagccgatgagaagaagagggagaagctcaagacgctagtactgagcccgctgagcttaagc

SEQ ID NO: 89228 - DNA, 999 bp, Zea Mays
tgatatgggaccaatttgtgcacaccatatctttgaattcgttcggttttgacccaagaatcctatagtgagtttgtagactgatgtttagtgaacaaattctgttaagaaaggttgctctgttcttaacaaaaatccagagataaagagggaagaaggtagtcggttcagacaagaactgaagatcaagcactgacaaatatctgatgaacgcgataagatcagcggcactgtggaattggatgagctcggatgaatcgatggggaattaatccgggatggataacttcaaacgtggtgcgattccatgaatccagtcgagcgtggccggagttagtcaccggcgtccaccgtgactcagttgattttcggtgcagtgtcatccatgcctcgatctccctcactatgtctctttcctatgtggtaagcatgcgctaacgaagttatccgtggccggagatcgctagccggactatcttggctataaatagcactatgaactacggcgagggatgcacacctccactcagtgagatgatccaagcccaaattcgcagcctctgccccctcctcccaaattgattgcgcacggtgaaactacagtctcttacggccatatagccccaatctccacccccaatttcacccagaatcgccgtgacaccattttctcccttttctctgtcaccagcaagccaaagttcaccgcgccccgtggctagcccactctagtaaggctctgcgcctcccgaatgtcgttttagcagcttagtgtgcccaggaagctcatcgtggcaactgtttggtcaattcggccatgattgagcgggaacgcgagcttgatgtcacggtctcggccgtgcacatgggcagaccattctcgaagtgttcaagccgaaattaacaagtgctcctaagtcaccttgggtcggttatgccttccctgtagctatactaggcagccctcgccagccatggccagtacgggccgcgtcggtg

SEQ ID NO: 89229 - DNA, 438 bp, Zea Mays
tcatgcggtcagcgcacgcgctcacccagtgcacctgaaccgtggggccgagtcgtcagccgcgaacgcacccagctcgccactaatggcggacgcgcgtctggaaattgggggaaggttgttgaagaccgggtcgccctgctcctcggactataagagctctaccatcgtaaccctctcctcatccgcatgcgccgacatcctctgccctaatgccgtagtccatcgccgagaacacagagagaggagtggaggtctacggcgccgccgacgtcgtctgtggccatcactgtcgttcagtactcgcgtaaagatttcggggaagcttcgtgccgtgagggacctgggcggacctctctcgcatgggaatttggctggactcgccgggaatttctctccgtcgctcacggttcgccgccgaccacatcacgacgtggc

SEQ ID NO: 89230 - DNA, 675 bp, Zea Mays
cgagtgttccgctatgatttctatattgacccgttcgattcgtatttatggacattttgatcgttttcattttttgtttttgataaatgtgaaaatatggcataaacaatatggatgttttttcttattgttttcgcttttcccattttagttgggatatcctgttttttgtatataatatcccattttagatatgatagttgcctagaggggtgtggataggcaacacctgaaaattcaacacttaaaacaaaattagatcctaaattagttgttagcgcggtagagaatcaaatcagagtagtagggagagaaaagttctcttgcacttgttgctcgtatggatgcagaattaagttagaaagcaaatcaagtgatttgaaacaaagtccaagcaagagatattagagagggaagaacaaatcataggccaatgcaaaacacacagagacacttgatttgatttaccggagtgcggttccaaagaacctatgtctctgttgaggtgtccctagggacggggtctctttcaaccctatcaagagaatccagcaatcaaacttgatccctcagatcttctgacgtcagagacagtcttaacaaggtactccacaaattggagcctcttgctagcctttacaatcgatgaacaccaacacaaaagcaagaatacag

SEQ ID NO: 89231 - DNA, 316 bp, Zea Mays
cttgtgtagccaccctaggacaaactggctagagtgtggagctagcctagccgagttggcagcttgggcggactgaggtaccggtctaaccgattttcacgaccgctcttagaaagtttctcctaaaatctccaaatcctacgtttcaaatccaattatgataaaatttggcacaaagctttaaaaggaggttaggatggtatctggagagttttaattagttgcatccatcgaattggcagaaatccaacacatcattctctaaatgaggggttttctcaacaatcgacaaaattaccaaagtttttgatgttcg

SEQ ID NO: 89232 - DNA, 520 bp, Zea Mays
gggtttagtaggtagttatatgctagatgggattagttgtgtaacttgttttgtaggtcaagttgttgggtagggtcgagttgatctaagatctcaaacttgtttataggagcagggtctaatgtatttccccaaccttagctaatcatgttggagtgactcacattaggtttgatcataatagattagataggattggatatgactagagtagactagtttagtttagatagatctaatagggtagaatatatattgttaggatatgttagaatctcttgagataggatggattatggtgtaggtagatcatcatttttatcaggttaaaacagaggggttatgcaaccatcagatggttaaggtagttgcatgaggccgagttggtctgttgttcttaatttagtgcagagtgaattaaaacatattttacaggagtatagtctcatttatttcatcagtattatccttcttgttaagcaacttacattagattagctctactttagccttcgttagg

SEQ ID NO: 89233 - DNA, 485 bp, Zea Mays
gggccctaaacatgacggagtgccgggcaaccgggttcacacccttccacctaatgtatggatctgaggccataacgccgcaagaattaaagcacgggtcccctcgaacaaacaattcagcagcacccgatgttgacgaaccaacttccaaagatgtcatcgacgtagaccgtgtcctcgccctgtaggccctcaacaaatatcaggttcagacaaaagcctggcatgacaacacagtcatcccaagagaattcagcgaaggggacctcgtactcgtaagaaccacccggacagagtcccggggcaagctagaaccaaagtgggaaggtccatacatagtcaagacgaaggcatcctccagtgcttacaggttggcaacgtcatccggcgaagatttagaacattcctagaacatcgataatctccgaatttttttgtttaagtcacagggcctacgcgtctttgtaattctacaagcaatgcta

SEQ ID NO: 89234 - DNA, 336 bp, Zea Mays
aactgtagaaagcacacacgtatcagatctgactctgcagtctttcagcataagaaaaagatatatggaaatcttcataacactgaacaattcatcatcttcactgactcctaactcagcttctcatatagaggaaagtggaaatagatgggttgcccaactaaataactgagtttattaataactataccaagttgtaggagatgcccacaccttggtgacaatcattacaaagatccaacttaattacaagttcatcacgacaagcatcaagacatatgataagcaaactaagtctaagtaagactagctgagactaagacactaaattaagca

SEQ ID NO: 89235 - DNA, 423 bp, Zea Mays
acctcaccaactcctccacaaacgcctcccggactactcctcacttcgcattttaggatgcctttgctatccgaatctcaccgccacctctccccacaaactcgccccacgatcagcaccctgtgtcttcttaggctatccctcctcccacaagggatatcgctgccttggcatgtccacccgtcgcattatcatctctcgccatgtaatatttgatgagtccgtgttcccgttctcggcagcaccttcggcggcctccgtgccgtcctcacttgattttctgatgcagggactatcttcacagtcggcacctgcgagcactgcttgcctgcctgctgtacccacggctgccccgcccctggacgaatctccagacattcatgatctggccattctctagctgggcccccatgctgctcctac

SEQ ID NO: 89236 - DNA, 422 bp, Zea Mays
gggatttggagacatttctttgactgtgaaacatgaagcacatcgtgtacatccgataggtgactaggtaactccaactggtaggccacttgcctgactctatttaggattttaaggggttcaataaagcaaggggacaactttcctttaaccttgaatctccgcatacccctgattggtgacacttttaggtacacgtgatctccctcctcaaaatccaattgtcttcttggggtatcagcataaattttctgccttgaatatgttgttctcataattatctgaacctgatcttctgcttcttggatgatttcttgcccaaagaactatctctcactagtttggtcctagtataacggggttctacacttccttccatacaatgcctcaaatggagacaccatcagactggcttgttaact

SEQ ID NO: 89237 - DNA, 1369 bp, Zea Mays
tgaaggcgctccgctttggcggcaaccagatggaagggcaggtcgcgccggagatcggcaacctgcgccggctccagttcctgtccttgaccataaactcgttcaccaacatcagcggcatgttctggaacctccaggggtgcgagaacctcaccgcgcttctagtgtcgtacaacttctacggcgaggccctgctggacgccggctgggtcggggaccatctcaggggtctccggcttctggtgatggagaactgcgagctgacgggtcagataccaacgtggctgtcgaagctgcaggacctcagtatcttgaatctcggcgataaccgcctcaccggcccgatcccgcgctggatcggcggcatgaagaagctctactacctggacgtgtccggcaatctgctgtccggtgggattccgccgtcgctggcggagttgccgcttctcacgtcggagcaggccatggcaaacttcagcacaggccacatgccactcaccttcaccctgacgcccaacaacggagcggcgagcaggcaaggccgcgggtactaccagatgtccggcgtcgccacgacgctcaacttcagcaacaactacctcaccggcacgataccgcgcgagatcgggcggctggtgactctgcaggtgcttaacgtcggcaacaacaacctctccggcggaatcccgccggagctctgcagccttaccaagctgcagtttctgatcctgcgccggaaccgtctgacggggccaatcccgccggcgctcaaccggctcaacttcctcgccgtcttcagcgtctcgtacaacgatctggaggggccgattccgacgggcggccagttcgacgcgttcccgccggggagctttcgggagaaccccaagctctgcggcaaggtgatcgccgtcccgtgtacgaagcccaatgccggaggcgtgtcggcttcgtccaaactagttagcaaaaggactctcgtgaccatcgtccttgcagtttgctctggagtggtcgccatcgtcgtcttggcaggatgcatggtgatcgccgtcaggagggtgaaaccgaaggggtcagtcgacgacgccggcaagtttgcggaggcgtccatgttcgactcgacgacagacttatacggcgacgactccaaggacacggtcctgttcatgtcggaggccggcggcgacgcggcgaggcatgtcacgttctcggacatcctcatggcgaccaacaacttgggcccggcgagcatcatcgggtcgggcggctatggcctggtgtacctcgcggagctggaggacggcacgcgcctcgcggtgaagaagctcaacggcgacatgtgcctggcggatcgcgagttccgcgcgga

SEQ ID NO: 89238 - DNA, 453 bp, Zea Mays
caaaatggggtggatgggtagagaagacggaccattttttgtagttggttcaattgtgtatttgagtaagcttaattgcatgaagcccacgccaaaagattcttgtgaagtatagtttgaatgtttatcttttggtacacactaatgtgttaatggctcagtgctggtctgttagataaagaatctacaaacccatatgggagtttaaatgttcttatattgattgtccatggccaaatcagtgctgtgaaattgtactcagagtttgtttctgccagaaactacacacatttttgttgatatactcttataagatattgtacataaacagctgcatagcttcacccattgttccctatttgaactaagcccgcccgatctatacatggttcaccatttctcccatctaacaagttacctatactcttcacttttttcagccaagtttaatta

SEQ ID NO: 89239 - DNA, 363 bp, Zea Mays
atgattttaaacataatgaattcactttataattgtataattgttcgagatttaaaattatatatattaccttaaagatcttctatattttttaagctcttaaagtgaaatagtgcatggactagcacggacactattagatgttagtgacgtatagtgtcggcacgacccggatatgcattatagtgtagtgtctgggtcgctagttaggcactattatcggcacgattaccaatagtgttgtgtctaatagtgttagtggcagtgcggtatgaattgtatcgtttgaccatctatagacctggcctgcataataatcaccatttttgttctgttttgcttctgttcctggcaaattggtac

SEQ ID NO: 89240 - DNA, 525 bp, Zea Mays
agggcatcttatttgagcggtaggcatcccacgattaaggatgatcttggcttacaaaagggagctaaagacaaatccaataggagccatgagtgtcctaaatttgtcaaggaaaagggaaaggattctgtgatccaaaatgttcattcttcttatgctaatgttgctcatattattcataatgttcatgtgaagaatgctcatattgctcataaatgcttaaattcctcataccatgattgctagctcctataaatcctcatttgctaaagcatctcatggtagacataggcataatgctcataatgctagacctgccaatgtgccttaaaagaagaatgtagcaaatggtccttttattccatatcatacttttgatgcatcatatgtgttttcatgtaaatatggtaaggttattactactcaagttggtcctaggtacaggaatggtaaaacttgtgtatgggttcaaaaatcttatgtccctaaccttaaaggacccaactctatttgggtccctaaaac

SEQ ID NO: 89241 - DNA, 405 bp, Zea Mays
tacacatcgaatattacagttttgttacaacagagctacattgaccatctaaaaatgtttttacaataagtactagtcctcttccaggatcttctccgcaacttcatttagcaatttgttaacgacttcgtcaacaatagattcggccatattaatgatctctagtgcttccttcgtttctggatcggccagggggtcgaatggttccggtggcgaagataattcagctacaatggaaaaaattaatcagtctgaagccacataaacaaatgccgaagcaagatgccgcgaaacaatacctatgcgtctctcgcgctttgcagcttcttcagcttgttttgcttgtactcgggcgtcatggatgtctttctcacttttcttcataatttcgtgagccatctctcg

SEQ ID NO: 89242 - DNA, 372 bp, Zea Mays
ttggatctccttcacaaagtctttgacagacctcccccttaaatcagcataaagggagggctcaacactgcccttgcaaggtctccaaccatccattccaacttaagggccaggctccatgtgccacaaactcttcgacaaggtcacaccctttgctgacaatagttgtgtaaccaaaagccttatcattagggccattcgccccccacgctgaatcttggaaaggacgtgtaatcatacaaagtcatcttgctagcatgcggccaacaagataccccatcgccttcaacctttacataaaatcaatattcaagccagctgccacaatgatccttggcatagggaactaactcagtcaccgcctccctggtc

SEQ ID NO: 89243 - DNA, 456 bp, Zea Mays
catgctcaacacgtccatgaccgtcgttgaaaagagagccctcatgttcaccagagagaagaaatcgaggggaggacgccggtgagagggagatttggctgccgatcacaacctcgtgcctcgggatcgctttgggctccacaatagagtgggaggagtcaccagggaccaaggaaggtactcgagtaatctatagggcatggggaaccaatagtcgcccaatttctcgtcggaccgcgcaaaaccactgcgggtcgttgcgtgccgtgggcggcactccgagcatcgttcctgtctccagtaagtgtcccatcacatacaccttgttctcctttgcgcgtaatcccagtgggtttgaggaatcattcgttggctggccgggacggatgtcaccggcgggagctccaccgtggcattgtgtgcaccaacgccgtatcacggcataggagagagaag

SEQ ID NO: 89244 - DNA, 700 bp, Zea Mays
cacatagaatgaatgagtcccttgtcgcaaacggtccgacttctgaggccggacggttcggtcttttacagaacagttcagcttttaagaccgaatatccaccgtagtataaaaccagtgtcgcggacgatccagcctctgagaccgaagggtccaccgtcacacaaagatcatctaattcctctgtgggagacataatagaggaattcaaagatcttgacaaattaggacaggggtttacgttggctgatcctttggagaaaatcaatataggagatggtaaaactccaaggccaacttttgtgaacaagaccctggagactgatcctagagatgaaatgatcggtctattgaaagaatattctgattgctttgcttggaattacactgagatgccaggattaagccgagagatagtagagcatcgactgcctattaagtccggtttcggtcctttcaagtagaaagctagaacatttcgtctagacctactctcacgaataaaagttggaattcaccagctgctagaagctaattttattagaccttgtagatacgtagagtgggtctccaatattgtgttggtggagaagaaagaatcagataagctcagagtatgcattgattttcgcaatttgaatagagcaactcctaaagatgaatattccatgcccatagccgacacgttgatcaataatgc

SEQ ID NO: 89245 - DNA, 533 bp, Zea Mays
ttgagaaaagaaaagatgaactcaagtttgatctttgtgatcacttgagcgaggaaagggttgagagaaacccggtcctcaatggactcctcaacaaagatgtaggtttctttgtgaaatcgaactcttgtaacaaattgtcgtgtgtttcttccttttgtcttgcaatttgttcttaatctttcctccctattcttatgcttatttgcactaaaattctattccattgtgttgctaagtccaattccgcatttatacttactagcaaccttgtgcaagtattgtgctcaactactcatactaacccggactagcacatcttgttctaaagcttaatatcataatctcggatcgagtttggattattttgaattaaatttccagtgtctcttattcacccctagctaggcgactattaatacacctttgtgccccgactaacaaacgacattaatgtctatgaggtcatgacattaagagcctaacacacaaagagttttatagatactcgtgtcatattgtgtgcaatactc

SEQ ID NO: 89246 - DNA, 787 bp, Zea Mays
caccttcatgctttctaacaactgtgataaggactaattgaagttggtgagcaaagcaatgaacataataagctgagggactttctctcatgattagtgattgcaatccattaaattcacctctcatattactggcaccatcatagccttggcctctgacttgctttaagcttagtttaagttttgcaaacatgacatcaatagaagacttgagggaaatgatgttgtttctgcaacataaaccaaaccaacaaatctctctttgacaattccacattgatcaacataccgcaaaacaatagccatttgttctttccaagaaacatctctagactcatcaactagcaaggaaaaaacatcagctccaagttcctcaagaatagaatgcaatatttcatttgcaaagcacttaacaatatccctctggatttcaggagccactaaaagactattagctgatgcatttttacctgttaccttacgcaattctggattttgctctgttgtgtaatcacgaaattccctaaaatttcctttgttgtaagacttctcagattcatcatgaccccgaaaagacaagccttgcttcactaatatcctagcgacattaatggacccatttagatgagtcaaatatgccttctttcccgcttcactttgacttctaaatgcaacattaatatgttgttttgttttcaatagatcatcacacttcttcattgctttgttgtgtaagctaccaacattgcccacatgtaattttagcctttcttttctatgatagcca

SEQ ID NO: 89247 - DNA, 635 bp, Zea Mays
gttgttattaataatggtgaataaagtctactaaattgatggtttgatgtttataacaatttatatttgtcggggataagatccctagtccctggagttcatcggtcaacaagcacatccgaggaaagccacaaacaactgaggctcgtcggtcagctggaggagacaggtagcgcctgctctgcaggaacccacccccagacgaaccccacggcaccaatcctagggtcatacgtggatgagtctaaaggggggggacgggcgtaccaaacggaaaccacttgagtggatccctcgtcaggcctgagactaatccatcatatgtaaccagctacaagccccttggacgacagagcactcatgacccacgaaccccttggattgtggcgcatttatggctcgcgcacccatgacctacgacgcactcatgacctactaggactaggcctgagtgcgcagacctctggtagggcacaacatggcgaaccacgtcgagccttatgctacgaaggccaggggtcaacatagcccgaatgatagcgctcaggccacacgccgcccaccataaagagtatgagacaaccaaacaaccacgagcacgcttggctttaccccatggtagaacgctcggtttt

SEQ ID NO: 89248 - DNA, 937 bp, Zea Mays
atggactcgtcgtgccaacaccatggcttccctgtccaccacaagctccgggagtgcgaagttcttcatctccaagcccctcgccaagaaagtaaagccagaggagctggccaagccagcggagcaggaggctcccaccgaggatttccctgagacaacagggtgcctcataatattcagtggggccaaggcgtatggcgacaagtgccggcggcccaatgcgaggtgcacgctgtacagagcctgtcgtcccgcagtatctacgatggtcggagttccacatcgtcttcaaccaccgtgaccacccggataggatcccgcacccaaggacataccccctcattgtcgaatcaatcatgggctcaaagtgcctctccaaggtgctcatggatgtatattgagaccttcgatgacctagggatcacacgctccacgctgcgaccaagctcatcgccgtttcacgacgtcatccccggccaccaagcctactcgctcgggcgaatcaccatgaccatcactttagcgacccctccaactttcgcaccgagcggctgcaatttgaggtggtggacttttccagggtcctacaatgccactcataaggccgtgctacgccaagttcatggccatgccgatctacacatatttgaagctggagatgcctagaccacataggatcatgatggcttcattcaaggtcgcgtacacttgcgagcaagctaattgcgagctcgccttggtgttggctggtctataaaaagccgctcctagagcactaatggcaaggtggacccttgaccgatgccacggatgacaccaagcgcgcgcggatcgacgcatagccgggcacaagggaaatagaggagaagtcacacaaggttcttacaaacagggttggtaagaaaacaaatccacctattgagattcacaaatcatg

SEQ ID NO: 89249 - DNA, 493 bp, Zea Mays
aatacagaaactgaatatggacggtcagtgagttttgaagaactttaggcttgattcatgctcaaaggagtaagcagctgaacatgatctctatagcagaattgtagtttgtatatagggctacaagtttgctacaaacagattagcaagttgtcatgcaaaattcaagaaaaatgcctctgaagatcctcggtcagaacaactgatgaagcttccaatggtacagtgcactgaaatatcccagggttcagtccccctcgccgccggtgatccgcgcgcctggatgcgtgtcggtcgccgtgattcgtgcctggcacgccgtggatattcgcggggaggtagctttggacgtgtcgcgatctcgcggacctagcccgagcctagtcagagataattcaccggcggccaccgtggctcggtcatttccgccactgtgtcgtccatgcctctctcctccctcattgtgtcccttatttacgtggtaaccatgcac

SEQ ID NO: 89250 - DNA, 404 bp, Zea Mays
gccgaagccaccgagacagccccgatctccgaagtcatgagacaatcgggattggttgtgacggagggagccattgacgaaggtgcacctactgccgaagctgaacaagttgatatcgaggaagaaaatgttgatgaagaagaggaagactataacactctgatcccatcaaaacccaaccacttggattttgaaaaatctactgtgtctgaggccgacgtgcccatgatgatgaagctgggttacttcggagaagctgagaagaagcttattcgatttgccaagaagaaaccactccaaagccgaaagatgacgaagtagtagtttttaaaagttttttcagagcgggattacggttttcgcttcacgagatgatttgagaagttttcgataattatgaaatc

SEQ ID NO: 89251 - DNA, 883 bp, Zea Mays
ttatgctaccgctgatatggacaagggttacatgcttctctactcttaaaagtctttcgctccgaatctcgggacaagattcttttaagggggagggctgtaacaccctaggtgttatctcccgttaaacaatgattacggacttaagtatggtatgtcagtgaggataacaatattcatatcctaatcatcttcgtctatcgcgattttaataccgcatctgtttctgtctatttagactcttcctaaaattttcgcgaatttcggaacgtagttgttctgaaagtttgctagtcctgtgcccaattaaaatccatcgagtaagcgaatacgaatttggaagctcgacctactcttcgatttttatcccgtgcaaattaatttgaactcgacgactaaaatgttcggggaaaaataatctgaatcgcgcattgtctgagagaaatcatgcacgaggttgataatcaaggaattataattgagattcaatttaccatgcaaattactcgtgaccatagaatcgggtgttcagaccgcagataaaatttatcgggtttcgaatcaaatcaaaccatgtcgcaagtactgtcgaccctttagccagcgctaataatcccaattctaaatatctgcagttctctttaaaaagaagaaaaatctgaaaaatctcctccacgccgcttccatcttcagatttttttcagccgtcaccgcttccttcttcaaatatcccaacgccgctctctctccctgcgctctcctctccagccgtgcccatcttcctgcgagcgcctctgctcctccctgctcccagctcgaccgctcctcctctcttccagcgtgtcttcctctttgcctcgcccagccgagctcgcccctgcac

SEQ ID NO: 89252 - DNA, 879 bp, Zea Mays
catatcctccatcgacaagataatatttccctcgggaacatggaatcctgcaagtagtacagaccttagaaccctagcatctgtagctaacccctcccaaccagatgatataaaagtgaagttcaagtcaaaatcacaaaccaacattacattttgacttagtgtgccttttcgattcctatagggggcttgcttttctgccgaaatggtaattggaacatgtgttccatcaatagctccaatgcaattttggaagtaaggaaagaaccgttcatccgtgctaatcttccaatgaactgaaattccagtggcgggcttcacaaatctatacatgagagtgggattacatggaaaactgattggatgtgtcgatggatagtttcaccgctatgtttgaattcatgttgtaaatactcataactagcattataggacaacatgaaaaggaacattcctagtttttcttccatggtaacaccccttgtgtcatgtaggatgtgttcttctctaagaaatgttactatatctttgaatatacgaggctccatacggaatgcgacaagacatttcttcccatgcccttcaagaatctctttaagtctctccttgccaggtagaatagaagcatgccttgctcttttctctctctccctccattagtaattagataaagagcagggaaaagaaagagcattaactcctcgtcctcctcttctcttctattcctagttcgcttatccatttttcttatccttggcacaattcaatctgatatcatagcatacaaaaaaagaaatgggctaataaatttcagaatataacaaatcaaaggttaagagccatcgtatatgcaaaacttaattattattgctaacatgt

SEQ ID NO: 89253 - DNA, 508 bp, Zea Mays
gtctttctccaccgtgtgctgactataaagtcagcgagctcccagtcctttatggaggacaaaacttcaaccatatcaggagttaggcgccgccgccggtcttcaagcaccctgccggctaaactgaaagtggactctgatgatacagtggatgcaccggagaagagaggaagatggagatctggccagcagagatggtgacttgaccaaaacgacggaggattaagagaagccgagagcgacttaggttagggacttagggattagggttagggttaactacttagctgcctgggaggagatccacaaccacaagacgcgccaggagcacacagacgagggaggcacggagcagaccaccggcgatgtactgtaagtcgagaaggagagctagtccatgccatacccgccatggtccgtggatgacaggagggagagaagagggagatcctgtgagtcgccggtgattgatccacaccgacgaggcgacgaccgagcggcgagcgcg

SEQ ID NO: 89254 - DNA, 400 bp, Zea Mays
ctcggggtagttgcggaagactgaacagataagttttcagaaccagtgcagcgactcgaggcatctcgcacatggcccaacagtggcattcagtacgaaggacacgggctagtcaaccgtgggaataggcgtggcagacgacattaccataggcgagccgacagtaattgcgtcaataggcgcgcaggagcagcaagccaaccgctaatcaaactttggccccacctgcaggctcgcatcctcccctgacatgggcccgggggccactgtcggtaccctgaatcaggggtaccctcttctacagtatgaagacgctgcacccgaacgacacctacaggccacacggagaacagcacccgaccccaccatatgggcaggtttaagggcaccacgtggcaag

SEQ ID NO: 89255 - DNA, 403 bp, Zea Mays
tgactgggtagaacctcctttcaaattgcctgatgaagacatcccaagtcaggactcctggtgaggaggagtgcgctgcctgcacgcctctccaccaaatttgagcctctcccttcaacagctgtgtgccaaagcgaacacgatcacaatacacaatctcaaagacattcatcttatcctccacgtaagttagccaatctgtcgcctcgaccggagtaccactgccatcaaaagcatccagcttcatgcccatccactgcatcagagaaagaccactgactagaagaggcacctcagcctcgccacctggagcagcacccgcagggacagcgcccccgggcactcctcctccaccagcaccctgagcagcacccgcaggggcaacaggaatagcttgcctcag

SEQ ID NO: 89256 - DNA, 350 bp, Zea Mays
ctgagccgtccaccagaaatcgacgtttatcccatcgtcttccttctcagcccccagcagcagtggcccgcgcgacacacccggcggcgcggcactccacggcgaacatccagtcgatcccgaagcaggaggagaactgcccggagcgagcgattgcgctgcccgagatcttccacggcggcatgttcgcccacacggttccggcgaccgaacgccctaccctattttctctcttcttgcatctctgaaagttgcctagagggggggtgaataggcaagttaaaactttttcaacaaaaactagaagcaaactgggtaaaactgaattgatctcaaaattcacccagtta

SEQ ID NO: 89257 - DNA, 325 bp, Zea Mays
caataagttctgatcttggtggtgtatcttgtcgaattaattgattgtctttcttggatacaatttctttctgatatctagatctaggtgcaccaccaatgggtgtagcccttgagctttgagctgacttgagcaacaatcaactcgaaggtaccaaatgaaatcctcctcaaatggatctttagtcttgtcttgtaatagtaaactgttgcccctcatgaatttgaatgtgtaaatgaagcctgctcgactgaagtccgtctggatgtggtctattaggttcacccaactgaaatctaagcaactaggttgttcgactgaaatc

SEQ ID NO: 89258 - DNA, 333 bp, Zea Mays
attaaactattgaagtggttccatcaaattcttcacattatttcctttgcgaggcttcggcagttctttagccctcttgattcttttactcctcccctttgatcgaacatcatttggcagatgtatttgtatttcttctggaatttcgcaaccaacaaaactctcatattcttcttgtgtatgcggcaccatggtaggtatgatattgcctaaagaaccttctatttccaacacacttgaaactaaaaaatctatggcatcaattgaactctttgctctttgaatcaaatcttctacattgtttcgcaccaccgctagctttttttcttcttt

SEQ ID NO: 89259 - DNA, 454 bp, Zea Mays
ggaaaggggagtgaaccctgacctaggtccaactaggtgcctaccaacgcggatattcatgaaattgaaagaagtactaaaagaagttccatcccttgaccgttacaaaaattcaggttttcctgaactcctcacgggaggggcactaccaagcacggtgactcccagtttccaagcaaaaggcttcacgtctttcaccatttaagcaagcttcacatcactccaggcatcatagtaaccttcgctcaaggcctccggctcgattccccctcaaaatgggatgttgcaatggcgaaggcctaacagatcccttagcagaaggattctgcttcaagctcttgggtccgacctgtgaggctctcgaggcgagaggagagctacttaggcacatgcgaagaaggtgccccaaatcgtttgtgtacgacatccaccgcgttcgacaggtaacttttcc

SEQ ID NO: 89260 - DNA, 546 bp, Zea Mays
aaaaaatcttcgccagctgcccggggtatcgaatcattcctaggccatcgaccctagtaaccttcagcatgcgcaaagaggtttcctggagctcggacgaagacatcaattccccgagagccgcacacgtttccagcaattcctcaacaaaacaaccagttgccctctgccccaactcttcatctgtcgtacctaattttctctttcggacagctacacccagagccctatcccttgaggggccttcatcggccgagtgcttcacttgcttccctcggagatcagcggtgtcgtcggagtatccctccgggtaaggaccatagggcatcagttcaaacacatggttcgacctgacattggaaccgcagatatcccaactcctcaatgtttctgtcttcggcacgtatttaccgacgatcttgacggcttcggcctcgacttcacaaacaaatgcagtcgcatctcggccgcgcaggtccacggagaaggccaaacttcacaccagttagccacccaaagtcggcattcgacggggggtaatctcac

SEQ ID NO: 89261 - DNA, 881 bp, Zea Mays
gattggataatgttggctaccattcaaccgcattatctcacacatataggactggtgtgtgagaaaaatccggttgctaacattggccgagtagtcgttgtaagctttctctaccttctgcacaatatcagcaataccctttggtgaagttttttgatatgcagactgaagtgaagagaagaaaccaaggtccaaaatatttaggtcaggagagtttggtggttgacacatcaaccttatgtcaaacccatctgcagatgctgcctcaccaaaaaaaggatcatcagcagcaacatgtgccttggcattgtcttgttgtatgaatacaggggtaccacgttcctctggtggccacttctcctttattgcgggcaataccttgttcacaagataatcacggctaacatctttggttactgatggcagcaccttagtaaccattgtacctgtcggcctattgacactactccttttagctggctccactgtaacgaatgcccaagtaccaatctttcctgaaaatatacagttcccatcactatcaaacctaggcctagcgactgccgtcaaaaacatcaccttctctataaagttcttgctctaggttgttctctcgggtacagtctcatctacagccaagtagtacttctgagttttcttagtgcgataaaaccatttctcatcaatgtgcacaatgttgtacattccattaaaacttggttcatgtggcacactagatggttcgagcattgagagacaaaaccttactctagcctttttgttttcttcattcaatgttggcttgattgcatttgagtgacagtctaaactccccctctttgaatctcctatgaagtgttgacagtgacataccgagcgca

SEQ ID NO: 89262 - DNA, 602 bp, Zea Mays
ggaatagtaactgtagcaaagaaagtggtggagcggcttaccggcggcggtagcactctggcggggtagtcggtgaggtcggggatgctcttaggatcacgtcggtggttggatcatcttcgtagatggtcgaagctgctcagtccatgttcgcaggtggcggtggtcgacgacggctccaaatttcagccaacgacaatggtgggcaagctttatggagttgtggtggtgctaggtttcaatggaattagactaaggtgggctgcggaagtcggcccacattcaccggtggagcttcagtctccagtgaagccgattccactgttccggtgaggttttgttcgggctctgactcagggaggctttaggaggctctggggagttactgatgtggctgagtggggtggaacacgattggggtgggttagccgcagtggtcgtgcttgagcgataatggcgacgcgcacgaagctcgtcggagttagcaacgtctcgggcggagctaagcattgggctgaaggagtgacgaaggcaatgactgtgggcttgggcagcctttataggtgcaggcacgagtggggcgctgcggtggccaaccagcc

SEQ ID NO: 89263 - DNA, 519 bp, Zea Mays
caaatttttaatttggatagagggagtatgatatttggatcatagattttactgtagtctctccgtccctatttaagactgtgtgatttatatccgtcaacttttattaaatttggttaagttggtagaaaatattatcgggcacctaggaacgaagtacccaaggtgaggcccataaacatacccaaggcaaggcccgaggaacgaagtacccaaggtgatttatcgaccaagtcctcaccgagtgagtctacgagacggggcgaacgatcaagcccccgccgagcgagtctacgaggcggggccaacgaccaagcccccatcgagccagtctatgaggcggggagaatgaccaaactccgtcaagcaagtctatgaggcggggagaatgactaaaccccaccgagcgagtccacgaggcaggttaaacgaccaagtgtccaccaagtggatctataaggagggaacctaggacgacgctgcaagcccacggcggccctaacaagacgcaacatcgcc

SEQ ID NO: 89264 - DNA, 858 bp, Zea Mays
gcgtttctcaaatgaactccaccaacatcatcaaggttttcattttcatcttgagaaccatttgtttcatcgaactctacatcatatgcttcttcaatgatcccatgagttttgttgaaaactctatatgccttgctatttgatgaatatccaaggagaaagccttcatcacattttttctcaaatttagagagtcgactacccttccacaaaatatagcatttgcaaccgaacaccctaaaataagaaatgtttggctttcttccaataagcaattcatagggagtctttttcaagagcttgtggcaatataatctatttgatgcatgacaagtggtattaatagcttcggcccaataggagtctggcacattatattcggctaacatagacctagccatatcaataagagtcctatttttcctttcaacaattccattttgttccggtgtgtatttggaagagaattcatgtttaatgcccttgtcatcacaatattcatcaattctagcattttttaattccgacccattatcacttctaactttcttgatgtcaaaatcaaattgattttgggccaatatagcaaatgacttaaatgtttcaaatacatttgatttatctcgaagaaaatagacccaagtaaatctagaataatcatccacaattacgagacaataggaattaccaccaatactcatgaaggatgttggtccaataagatccatgtgaagtaattccaatggtctatgagtagacatttgactcttgtagggatgagtatttgccactcgcttcccgacttgacatgaactacacaatttgttcttttcaaatttcacatccttcaaccctcga

SEQ ID NO: 89265 - DNA, 767 bp, Zea Mays
cacgaatggctccactggttgcgtaagtacctaacagagcgagtggtagtggcaatttataggaggcttaggcggtggtgctcaatttagccgagcaaagctggcggtcggaggggaaaagagctctggcgtatgacacaggtggcctttcaccgtggcaggtgctccggtgatcaccggacatgcaccacatgattcaccgtgatgagagctagcgcataagcacgtggcgcgcaacggcgacagctcgacggcggtgagagttatccgagcgaccggcggcaaggggggtacgtcaagcttagccgcaatccgagcgcaagttgatcagatgtcgagatctttattcggctgagcttatctgctgaccacggcgcacgaatcatggcgaacaatcaaccactggcgacagatcaccggcgagggggggatcgtgatcttcttcagtttgggacttactgtaccatggcgtttgctcttcagtcagtctgacagacagagtttgggcctcattttctctcaaatttctgtggcaacacatccagatctctgcagcaatattatagtgctataaaccagctacaactcaactatagggattaaacttagttgagcactggatcaaggttgaatccaagtccaaagttagctctgttacactgaaattctgaattccagagttcatcagcctgacagtccaactttgggcttaattatctccaatatcttcttaacaactatgcttacactcttaagcaaagttgttc

SEQ ID NO: 89266 - DNA, 834 bp, Zea Mays
ccgccataaagagcgaccagggaagcctagacgaccgaggtacatacggacaaacacaactttaccaaggtcgaacaccccagtgtaccacaacagagtagctccttcctttggaagctaccggtattcgacccccaccttggcctataaaaaggaagaggtcaccaaaacatagaggacgaaggggacacacatacatacatgcacacggacgacgagaccaaaagacctagaggccgaagccaagggagcctaggcctaagagcactagtcgcctacaggaccctcaacacgatgggccgcaccgagaccgaggctacgatggccaggggtcggcgcgacatagagacgtcaatgatggcaccgatgctcttcggcacccacgccgcccgccataaagagcgactagggaagcctagacgaccgaggcacatacggacaaacacaactttaccaaggtcgaacaccctagtgtataacaactgagtagctccttccttgggaagctaccggtattcgacccccaccttggcctataaaaaggaggaggtcaccaaagcatagaggatgaaggggacacacatacatacatgcacacggacgacaagaccagaagacccagaggccgaagccaagggagcctaggcctaagagcactagtcgcctacaggaccctcaacacgatgggtcgcaccgagacccaggctacgatggccaggggtcggcgcgacatagagacgtcaatgatggcgccgatgctcttcggcacccacgtcgcccaccataaagagcgaccagggaagcctagacgatcgaggcacatacgaacaaaca

SEQ ID NO: 89267 - DNA, 947 bp, Zea Mays
agcctgtactggccaagacaagcaatggtcgatgctctaacttggctaatacctagttcaacatctaacaaacgtttcccctcgatcaattgcacggttcgagctcccaacctctctactcacggtgaccgcgcaaaccgaggacaatccgtggtgttcccggtgatctggccaaatctagcttaattggtcgggtagctaagcattcataacacacagagatactgaaacgagagtaaggaagccatgaacggacctgaaacgagctagccacggtgagctcacaccgcactgtgtttttgattgatttgggggaaatcccaaattggggttctctggtgaacgatttgagacacgagtgggtgcactgggttcttgaatacctagcggagctgagggcatgctcaaattataggatccacgagcggtggcggctaatttggggaaagacgcgcggcggccggagagggggaagagtttctggttgctcagtcgtggcgattgccagtgcaataactcttgaggtggtaaattcagatgcgccacgattactacagcatggtaaaggactacgacgtggcacatttggggtcgtcggcgtaccacgacgacaccaatgatccgaccacgttgcacgactgcaggcatggttgataagcttcaacccgcgatcaaatccactcccttactgatcttttcaccctcccggtgctatcctgcccgagttctacatgaatcactgcgatcagtgtgaatccttgcatggaggtcgccgacggcgaggttcactgaatctgatcctatccattcactgtaccattggaaccgttcatcagagcgcctgacagagcagattaaagaccttggttctccaatttttgtgtgacaacttgataagccctctgtaacaaagttgttgttctatatatcaactacaattcgactac

SEQ ID NO: 89268 - DNA, 692 bp, Zea Mays
gatcgacagagtcggattccgtaataatgcttaattcagtgtcttagtcttagttagagttagtttgcttatcatatgttttgatgcttgccatgatgaacttgtaatgaagttggatctttgtaatgaatgtcatcaagttgtgggcatcccctgcaacttggtgtagttattaataaagttagttgtttagttgggcaacctatttattccaactttcctctttatctgagaagttgtgttggctgtgttgagagttagtgaagatgatcaattgttcagtgctatgaatatttacatatatcttttcttatgctgaaagactgtagagtcagatctgatgtgtgtgtgctttctacagatgtctaagaacaggcacagaggtggaaggcgtgctcagtagaagcagcatgcaccctaggaggaggtagctcagcagcagttgccaccgctacccccgatgactattgagcagatgttcctgatgcaaacccaaacagtccaagcgattggttagactttagcagcaatgcagcaggtgcagcagcagcaacccccatctcaacctcaggtgcaagtccaaatgccacaagtgcccagagaaaagcgggcataattcatgaggggccatcccctgtctttgcccattctgcagatcccatggacgtcgaaggttggctcgtacagtggag

SEQ ID NO: 89269 - DNA, 524 bp, Zea Mays
ttccaacattgggtgtactgatacatcattttatagccttacaatatcctaagtgggtactcaaactgattgataagatcaagtggggctttctttggaaagggcacaataacattaagggtggacagtacctaattagatgggaacatgtgcgtagatcggtggaacttggaggatttggaagtcataacgaggaagtccttagatgggccttgaacatgaaatggttgtggagcaggaaaactcgacttgatataccttggatagacctatatatcaaggtccatcccaactctacgccttattcactacatgtgtagtttcaatcattggggatggcacaaaaaccctgttttggatacaaagataggtggctacacagacagtcaatctcttctttggcacctgccctagtcgatgttgttcctggacgtatcatcaacaaaagaatgttggaggaacctctttcaaacctgcagtgggtcagagatcttggacggcaacatctttctactcaagcgttg

SEQ ID NO: 89270 - DNA, 888 bp, Zea Mays
cccgtccccacaaattagtactgaaggctgggctccgcactatctgatcccctaacgtcggcattgggcgaggcctaacatcgcccatatcccacccgtgcgccagtggccacactccacaggcaacaaactcttccactagatctcggccgctgctcagctgggccgtgtagcgaagggtctcctcattccgaccccccttcttcactttaaattgtggaaaggccacataggaatgcgagcacaaaatagccgggggcaaggcaggcaattttttgacatccccaggcgccacataaaaccaaaagtcccacaagttgccccacttactctttgcacaaggaacaatttcaatcacctcagtcgaagtcttcctagtcctcggcgtgaacgtgcaggacccaaattgtgcaatcaaaccacctatctttatttcatgtcaatgcaagcaataattcttggcgaagacctcagcagatggttctccgccatacgatgacacaacccagacatacttcgttaatgcaaccataacatttggcgtcaattgatgaatttgaatttcaaacttccgcagaacttccactatgaagcgatgtgccggtaagagaaggccagcagtgaaaaacgcctcaaacacaaccaactccccctccggctccgagacatcttgagcccccgacgccctcccgactccgttctcaaaataacctagacactgcatctcgagcacgtggcccgactaaattctcgatgtaccaaactcaaccgtatgcccatgttgtaactccacaaccgtcactggatcactaatcgtcttctccgacgacgacgtgttcgaggacgcagtcgcggtagacgatgacgagtaagaagacggcatgatca

SEQ ID NO: 89271 - DNA, 580 bp, Zea Mays
ccacctaatggtgaacaactttatgaaaggatgatggacatgatcgcacataaaaagtgaagtaacagctgctcaaaggatggactgtctggtggctagtgattaatatatggagtatgagacccacatttggtgctctctggtaattaatatatggagtatgagccctacttcatgtagaaaagttaaataccattgtcatcattgtcacgggattccagacactacaagctcaagcgatcgatcggtgatccttgggttgtggggctatggtttttggttgaggctaatgcattggcttaggaatgccagccccaaaaccccctttgtattgcgcttagtgaccggggccgcaaccattatggttaagtggcgccctcaatctgggcaatatggttaagtggtcgcaaccattatggttaagtggccgcaaccattgttaaatgaaatgggatgaatcacttaacaaaacatggaccttattaccatgttaaattaaatagtatgaatctcttaacaaacaaatggactcgactaccatgttaaataaaataccatgaatctcatgtaaaaagtagac

SEQ ID NO: 89272 - DNA, 1208 bp, Zea Mays
gccaacacccgtgaagcctaccgaaccctaaagatggattatgataagaagttgaagaagctcgcccccacaaagaaaatccaaaagaagaccaagaaccaaggaggccaagctgagcggagggagaaggctcccccagcactagcttccgccaggatagagaatttgtccgtcgtcgaggatatgtccctagctagccttgatgaccttctcaaggaatttagggacactttagaaaaagagttcagtagtacctctgagaacgctcgcgtgtagtacgacttgtagtagctgtatgcttgtaatgtattggtgtaatgaataaaataacttggttgaaaacaattggcatgtgcatactagtaactctcccttctcccaggcagatggcttcggataaaaccacgcctaccacctctgggattggaactaggtttcccctgagagctgaaagagaagccgatagagaggaaagtgagacccacctccccgcacctctagaactaccctaagatttagcccaagttctagccaaccaaacccgactcatcgaggtcctcactcgaagtttggaaaatcaacgtccgaatggtggaagaccacaagacaggatgggagatttcctgaggctcaagcctcccagatttgctggatctagcaatcccctcgatgctgatgattggctgcgcacaattaaaagaaaactggaagccatcggatgcccggaaaatcaccgtgttcaactggctgctcatcaactttccggaatggccttagcttggtgggataccttcaatgtcaccatcagagatgctacctggatggagtttgaaacagctttccgggagcaccatgtgccccaagggatcgttcagctcaaggaagatgaattctgggaactgactcaagacagaagatctgtcagtgaatatgtgcacaagttcacggagttggcccgctacgcaccagatgacgtcaacactgaagccaagaagatggcctgcttcctaaaggggctcagaccagaactcaagatcatcctggccagccaagacttcctcagtttctcgcacctctccaacaaagccatgcaagtcgaaagggcaaaaaaagaagaaaaaggccatctcaagaggaaattccaagtcctccgaccagcagcaagatcagcaccagaaaactcgatccgttggatttccacccaaggg

SEQ ID NO: 89273 - DNA, 700 bp, Zea Mays
gtagaatcatcgccaaccgaagctcaagcgctctgctcgccgacccctacctccgacgccgcgcctcctcctttgacctccatcgctagatcgtcctcgtcccgacgcctctcttcgctgtcgtgcccaaatcctctcactggccggagctctagcgctctctattgttgtggacaaagaagaggcagaagatgaacgtgttttatttttagtctctatttgtatgtaaaaaaattgtttaggtagttttctagtttaaaagaaattggaaagagatccggtgatttgtttgtgctaccctcattagtatatagttaattgtgatctaatttctatttcgttatgtaattttagttgtatatttttgactttgaaatcatatgtatactaaacgattaatgtcatgtgtatgtgataatctgttttaattactgtatgctatattttgcatttgtgtatcttaatttggttatgtcggttgaaaatttatttaaatacagattaccagagtgaaggattaagggataggtaggccacatatttataacaaaagcattggatgaaaaattctatggttatatttgcttagcatgaactgtagatttttagtcaaactgtatctgtttgtatgtgcgattatacacaaattgtttgttcactaagttatgctagagtctcgattaatactaaaataatatag

SEQ ID NO: 89274 - DNA, 854 bp, Zea Mays
taaagaagggcaacgctctctcagccaacctcgagatgaagcagctaagggcggctagtgaccccgtgagtttctggacatccttgactcgggtggggggcctcatcgctttgatcgccctgatcttctctgggtttgcttcaatgcctcagtatgaaaccaggaatccaagcagcttcgcggtggaaatgccaaaaacacatttgtccgggttcagcttcgtgcgggttgctcgcagcttgtcgaaaaccagggttaagtcttcctctagggtcgacctcctcttggtcttgactatgatgtcgtcgacgtagacctctactttgtccctgatcaggtccccgaaggtcttactcatcgcccgcacaaatgtcggcagggcgtttttcagaccatacgacattacaacatagcagtacaatccatccattgttacaaaagccgtatgcttcctatcttccctggacatctagatttgatggaaaccagagtatgcgtctaggaacgataacagatcgcatcccgaggtagaatccacgatttggtctatacgtggtagtggatatgggtctttaggacaggccttattcaggctggtgtagtcgatacacatccaaagttttccatttgctttggggacgatgactgggttggccagccatatcgggtgatgtacctcttcgatgaagccagcgtctagtagctttcggacctcctctcggatgaagtcctgttgctcaataaactgtctgcgaggcttctggcttactggcctggcgtcggggtcaatcttcaggcagtgctcgatcacctccctggggatcccaggcatctgcgacggctcccatgcgaac

SEQ ID NO: 89275 - DNA, 669 bp, Zea Mays
aaatctacatctgtgcccatagctgatcggattaggttaaaattaggcctggccactgcttattgggtgctcgggctctccaccgccgtggcgtggccggggaaatccatctgcgccgccggtcggggtccgggacccaattttaaaagacaaaggacgtggagggggcaagatataatgtgtcagtgacaccttaagatcagagaagggccaactgggccaatggtgtctttgccaacgggtaatagtggaggatgtcctcatcattgatgatacacccagcccaggtggggttggccgaggcccaacaaattagggttgccagagcccaatagttcatcaagcacaaccaactcagggaaaggcccaatcgccccaaaagactagtccaatgggggaagggtggctctcccttttaaagtggcttcctcctcccaagttgagcgaggtgggataattctgaggctcacacggtcgtcgtccgactacaatttggccaactgggccaattgtgtctttgccaacgggtaatagtggaggatgtcctcatcattcccaccttcttaaaatgggccctagctctgataccagatgatacacccaacccaggtggggttggccgaggcccaacaaattagggttgcccggagcccaatagttcatcaagca

SEQ ID NO: 89276 - DNA, 1089 bp, Zea Mays
ccggtgcacccatatcgcgttttaaaaaaaggcctccaacccgagaccgagccagaggctctcttttccctctgtgctctctggctatctgccctctctggtgattccccgtctgctcactggcggtgatcgtcggcgacgtgctcctgtgactttctccagcgtgggcacctctgcctcctctcggtgagcagccttgccttccctctctctaatctctacttcgctggtcagtgagcttgccaccccttgattgctcaaattccaaattccttccgaattctgtgaatctctgtgcttgaatgagtccctagtgccacattatatccccctgcaggttcctagctccttagggagggcttcatattctcacatgagcttttctccaaaaccctaattccctgcacgccacgtgctcggtgaaatgtccaaaccactcaaaattgctccgattgaacccaaacttttcaggcaccttcataacactttcagtaacatattcgcgcaatttcacgccaatccgatataccaggcttcaatttcacacaattccccgtttcggcgatcggttccgagccgagtgccaaaatttcattttctttgcctaaattcaaaccaagcacacacttcactcatatttacccatataaacctattcatgaagtatcggctcaattccacgtaatttcatgcctcaattcgaattccaaacctcctatggcactatttctcgttcaaacgtcgttttcgcgtcgtttgacctctcgattgccatatctctcgttttctgtgccataattctctgtgtatgtatttattcacatttcatatacttatgactatgtgactaatatgtgttcacctcttctatcatttcagtgaccttgcctgcccgtgagccgtctcctgtcctacctggattttcacctctcgtgtgagctttccaggtagacatccactcttctgatattctatcggcagttatcgacttgtgcttagcttctctctctcatttgcagtcatcaggtcaggatgccgcgcacgaagaatgtgtcggcgccagggggaggagatgacgaggatcctcct

SEQ ID NO: 89277 - DNA, 527 bp, Zea Mays
gccctgtcctggtgggataccttcagcgctgccgttagagatgctacctgggcagaatttgaagccaccttccgagagcatcatgtgcccctagggatcgtccagctcaaggaagaagaatttcgggaattaacccaaggagggagatctgttagtgagtacatccacaagttcacagaattggctctctatgcgcctaatgatgtcagcacaaaagccaagaagatggcccgtttcttgaaggggctaagaccagaactcaagactatcctcgccagacaagattttctcagcttctcgcacctctcaaacaaggccatacaagtgcaaagggctagagaagaagaaaaggatcacctcaagaggaagtttcaagtcctctgagctcagcagcaggacaggcaccagagagttcgatctcttgggtttccacccaagggaccaagcttcaacaagccagctgggtccactctgtcacgtttcagtcagcagggtcaaagttccctccaggccccctccgttgcaag

SEQ ID NO: 89278 - DNA, 711 bp, Zea Mays
gagttgtaacgtcgccaagttgttagtgtcagacagccgagtcccgaggacaaactgcgccaaaatcgtgtcaaacgatttttgtttgagttcaaacttcaccagagcatgttcaaggaaatttggcgccactttgatatttggactttattgattcgagttttggaaaaacagggaacacatctgaacttggaaagggttctgaaattcagaattctgatttctgaattttcccatagggccttagttcatgggctgatttggggattttggaaaatttaaatggctaaactttcttactatattttgttggttatttagtgcactaaaactttgttatttggtccatatcaaaattttgtatttttccccaagtcttttctcaatttccctttatgtgcttaaatggcccacttaggattatttagggtttgagagttcttcttaccttgaggtgcatggcatgattatggagaatttctttaagatgaaaaagacttacttaaacctttgttattaatttatgatgtcctttccttagtttggttcacatgtgataatggttttgagtcagctctaaggagaaaccctaggtgacactggggtgtcacatcggctctcagtatgaaaaaagcaagctcaagtcaacaacgcaatgccaagtcatgtcacccacaggacgccaagacatctcccctgggaacacgacga

SEQ ID NO: 89279 - DNA, 797 bp, Zea Mays
atggcgacagtgcggatggtcatatggatgaacgtgttccgaccaaccgacggcgtggatgaccaaattgaggctggggaaaggttcccgggttcaccagaggttaggtacatgctttaatttggacaaaacaagagctgaagagtgggtcgacataggggttgtcacgacggcgttctacggagcagaggagtgttccggtgttaggcttctgccgaacttcaattggttgactatgagagcaataggaggctataaataggctagaacagaaagcaattgggaagttactaacccgaggagtgctggccacggtggagttcttcacggccgtgcgaagaacagggcggactgattttgtgggcggtgggagttcttctggtgcaattgagctaattactcacgggctagtgtgcgtgatgcagtgaagaaggaagatccgggctcaatttataggctgctggctgggaatggatgagattcaccaagttgggattgtgctggcgagctcacccgcgcgatagagccacagcgaaagtacggtggccgccgattaaccgggtaacgccacctccctgctttaacgccacgtcgcgggactcctttaccgtggccgctgacccatccctgaccgcagtggcgttcttatcgccggcgaggttgtttctgtaattccgatgaacagtgcttagattcagtaaaaatttgtctgacagcccatcttcagatcaaaatagctccagatttcatatggtaccaggcccaaacacctatagcaaagttgttcctctacaatg

SEQ ID NO: 89280 - DNA, 1040 bp, Zea Mays
ttgggtccacgacacctgggattgtcaacttatgaaaaggaatgtttagccattcttatggcagtggaccattggcgctcgtatctgttggggggcgaattcatcatacgcactgatcagcgcagtcttgtacaccttgatgatcaaagcctgaccactcaatggcaacaaaaggctctcaccaaacttttgggactgagatataaaatatgctacaaacaaggacaaaacaacagggtggccgatgccttatcgcggagaaccatggatcagctcatcgcagtttctgttactcaacccacctggctgaaggatctggcagacacttatctccagtttccagaaacaaccaaaattcttcaagctgtttctactgattcttattcaggatcttactccttgaaagacggtctcatatatctcaaaaaccgaattctgttgccagcaacatcaggattcccttggaaagtattccttagtcttcatgcatctccaattgggggtcactctgggtttgcagttacgtatcacaaagtcaagaagctgttcgtgtggacaggaatgaaaaagatgatacaaaattggtgcagtgagtgctccgtgtgccaacaatcaaaaccagaaagagtcaaataccccggactgctccaaccaatcccagtccctgatggtgcttggaaaacaatatcaatggattttattgaaggactccctaattcttgccactccaactgcattttagtggttgtagatactttttctaagtatggtcattttatcccaatgactcatcctttcacagctttatcggtggcacaacagttcatggatcaagtgttcaaacttcacgggttcccgcaagccattatttctgatcgggacaagatctttaccagcgctttctggaaagaattattcaagttagtgggagtagatcttcgcatgaccacagcatatcacccacaatctgacggccaaactgaaagggtgaaccaatgtcttgagacctacttgcgctgttttgttcatgcttgccccac

SEQ ID NO: 89281 - DNA, 525 bp, Zea Mays
gtctagttcaatccgaggggtcaaatagcttgaggaggacctaagaacgctagaacaaacgatcaaagcgcttagactgacctggaataagctggctgcggtgaggctaaaccgagtggagttcggaagtgaattggggagaatccaaaattagagttctctggtggaggatttgaggtgcgggtgagtgcgttagcttcttgaatacatggcggagccgaggggtgctcaatttataggcctagtgagcggtggccgggaatttgggttgagcgcgatggcggtcagagaagaagtgagtcaccggcatggtgattcgtggccccttaccgtggcggccctcccggcgatcatcggaccagtatggcaccagggttgcgacgtggtgactacggaggcacgtggcgttcggtcgtcgggcagccaactccggcgaggataatttcgactgaccgcgcggcaagtgggcatgatggccgaaatagtttactggccggagttatccacgacgatgatatttgtgtg

SEQ ID NO: 89282 - DNA, 586 bp, Zea Mays
cttgtaagttccctgactttttgctccaggctttccacccgggagtttaggtgagtgcagtgggaggcaaggtcatcatattggttatctagggtgtgaaggtatccagccatgtagacgatggtggggtcatcctcaatagggtctcctcctgacagggcctgaagtcttttcctccaggtgggggtatctttgttgctgggtgggaagtagcgaaggggggtttcaaagatcactctgttgtagctctggcatagttgtcggagggctttctgggcaacattttggcaagtatctgggaagcggcatccggtgaaagtgacttggaaagaaggatggtttggatagtttcggctttctcccaggtagactgccatagagcacttttccataccgttctcaagatactccttccagacatattctggctttttgcggattcccatgcgaagcgcacaacttcgcaacagatgtgggaacccttccatctctgagcagtaggatgtcctaatgaccagagagtcctccatctggaataggaaaagaagggtctattaatatcggggaagaggagagaagacttttc

SEQ ID NO: 89283 - DNA, 294 bp, Zea Mays
aggtaagattgagagatgcgaagggtaaaggcaataagaagcaaaagcacaacaaaggatgaggttacaaactcacgagccaaagaagaggatacaaccaagagaaagaaggtatgagacggaagaggggcgattttaaagggcaggtatgagacaaacatcaatgtaggatatagaggtgtcaagggtgcatatgataataattaaaaagcataacaaaagatatagttaagacaagactcgcgaacgacaaagtggagaaaacaatcaagggtaagatcggtaaggttccaa

SEQ ID NO: 89284 - DNA, 571 bp, Zea Mays
gtcatatttcttgctacagaatggaatggatacatcatcccctttagcaggggctgcagcttctacatatgctcagtaaatggagcagtgcttcttatcaggtagctgagatcaacccctctgtatttcagccaagctcttagaattatggtagtgttggttatggtttgtacaatttgcattaagcaatgaaaaagtaaatgtgcatccctttacctgagatagcaatgatttcacatacactgcaggaaaatccacatcttcaatgagtcaccactgaagccaggaaagtgggcattggtaggcacactaatgaggctcctgcctttgctgctgcacaaatctgtataagtccaatcgaacaagccataccttgcactaatcatctcccatgaaaaatttcaatgcctacaggaaatactcaacattgttaccaacttattcaacgtgttccccaaaccagctgaaggtatgtgcttcaacaaaaattccgtatagactgttactatctaaatctagctaagcatactgatatccctacaggtttcctcaaggatccagaagcagtagc

SEQ ID NO: 89285 - DNA, 723 bp, Zea Mays
ctcttggataaggtgcctacaatttttgccccggcatggtcgcgaatgcatcccaaatttcttcgtcgaccccgccgaagagtatggactctggctggtaaccataggatatagcaaattcttttaactctgtcttatcctctttggaaagttcttggccacccaggtgccgaaggtcaaaatatttctcttccgaagaggcatctacaattctctttcctttatcaggcgttgcggccatgttttcttcagcaaccacatctgatatgagtttgtcaatttctaacattctggttgtgagttctttagcttcggctctagcaacatcttcagtatcggcaggaattgtcgcttttgccaccgaagctgagggcggcgtttgctcaattgcttgcattacattcacaacccgtcgtttcttctgcccccgaccttctcctccgcagccaaggcggtttcctttgattgtaaaaggctagtcagatctaacctcagtggacttagcagtgcaaatggtatagattcagtcattaccttcagaatctccgacacttcagtagcagagggtgaaggagaacttgtaatcttctctggcacatcttgtaccttggcttcggcataagatatcttgtcacgttttcgcttctcgggagccgcatcctttggctccggaagagtcttttgttttttcaaagctttataatcctctttgacagaccgggc

SEQ ID NO: 89286 - DNA, 403 bp, Zea Mays
acaacatcaaaggctatttgcttgtccttgcattatttgttgttccaaaagatattggaaatactattcttcctatggtatgtatacttttttactccaatattgtatatagggttgtctactcgttgtaatacttttttgtccattttcattgcattaagtgttggtgcgaagataatgtctatggagcttgccccgtcaactaatactttggagattgttcgtcctcctatgtttgcttttattaccattgcatccatgtgtggataatcttttgatggaagatcttctttggagaatgatattggtagactaggagctcttggccgcactgccaaactctttcctcgattggcccacagcacgactgcccttcgtccttgtcgccattgaatcattgttc

SEQ ID NO: 89287 - DNA, 611 bp, Zea Mays
cgctgacgtacggtggtggagctatgccgacgagatacgtatagtagccctgattaaacaaaatctgaaatcgactagggcaacatggtgccccgagaatggtgattcaatgggggagatcctcacccgaaatcatgacgagagagtgcaaggccatggtgcgaagcggctcagctgcaaacccgacatccgacgagcaatctgtgaccaatcggcgcactactcggcacaagtttgacactacccgaggagagggatgaggcgacaataaggaagaaggtctcactgaggggggaggcggggatgacgcaggacccgacgggaggcggattgttggtcccggaagcacctcgacgaggaattgtgtagcatccggtcagttgcacgtgtggcaacccacaccaaaatgatcctcgaccccaagcggatcttcacgaccatcggatgaagcctgggggtgaagaccggggctaatcacagaggcagcgacgacaacctaactcggttctccctaaatcactacttctccctcgatggtgttgatggacttggtgcgtttgtgtgacgaagaaccggaggggaggttgcggtatttgtaggcacgtgaagat

SEQ ID NO: 89288 - DNA, 1217 bp, Zea Mays
ataactttgcttaatagagtaagcatggttgttatgaagaaattggagaaaaatgcacccaaagttgggctgtcaggctgtttggtgtctgaatttcagactaacagtgcaactgcaagaactttgggcacgaattcaagtatgatcgagcaagaattttcctagggttgctataccaagattatagctggatcctagagctataactttgctaaatagtgtcgatcatgttactacataaaattgagagaaaattcgccctaatcatagactgacacactgactgaatgggctaagccatggtacagtgatctgaaatagatcagaccgctagctcagtttttcgccgccgacgatctccgccgcgattcgtgccgccgccgtctcgattcgtgctcgggttgatcggataacgctcggagtcacgccgctgtggataagctccggccagtaaataattccggccaccgtaccacgctcgccgcggtggattaagatgagatcaccggtgactgccgccttttggccttgtgccgcgtgtctaggcatctccaccgcatcgctgtgacctgttttagctctccgttgatcaccggagtgaacgccccggtataggacaccaatccactgcgctagtgaaactccccctcctccgaccgccgcgcgtcatcgctcaaattcctggccactgctcactaggcctataaattgagcaccccctcggctccgccatgtattcaagcagctaacgcacccacccgcacctcaaatcctccaccagagagctctaattttggattctccccaaatcacgtccaaactccgctcggtttagcctcaccgcgacctgctcaattcaggtcagttcaagtttctccgtcgcttgttctagcatccttaggctctcctcaagctcttcgacccctttgattgaactggaccgccatgaatcaccgggaacacgttgttctttgggttgtccgcgctgtcaccgtggccagagacattggggtagctgttcatgaaattgaatgaggggaaacactcctcagggctggaattaggtttaaaccaaagattagcgtcggtcctgaagcgagtcagctggtacgtgagctcgccggagctctacagcaccgctcgacgacggggacttcaagttgtaaagggaaggaagtgtaggggttctttggtaaatgtcagtgactgtattaaat

SEQ ID NO: 89289 - DNA, 477 bp, Zea Mays
caccgacggatgggccagtcgctcagatcatcttcctcctaaccacctgcgcaacaaccgcgcgcctgctgtggggtcgggcgctgggaaactcggacttggcctcgcgcttactcaaacttgagctaaccccgatctgtagggtccgcctcgctaggcgtatcctcttctccatccataacagccatggccaaactccatggccggtcccccgcttgcatgcaccgatttgagctccatggctcaaccgcccatgcagagtcgtcgggttctgttacaaccacccgttctcccagctggccgccaggtgcggactccatgggccatataaagtcgtgcccgggtctcctgttgtgtggtgagtggaagccgagggccgccgcggttgcaagaactgggctgtggtgcacgccgaagcgaaccatgggctaatagagcgaaggtagtgcttggagttcgaaggaaagtttgccagag

SEQ ID NO: 89290 - DNA, 1089 bp, Zea Mays
gggtccttcctatgccactgaccctcggtaaccttcaacattcgcgaagatgtttcctagagattgggaaaagtcataacctccccaggcccagcacatgtcatcgccaattcctcaacaaaacacttacaggctgaaggcctcaccattatcctctctatacctttcgcctctattttccacttccgagtcactgcactcatagccttccccttcgaggtgccctattttgatcgggtcttcacctttttccctcgatcgtccccagcatcagtagaatcccccattgggtaaggaccgtaccgcaaaccattcagttcaaaaactcggttaaacctgttgttggaacctcgtatatcccaggtccttatcaactctgtcttcgtcgtatatttaccaacaattttaatagcctctgactcaacttccctaacgaaggcggccgcatcccgccctcgcagatcaatggcaaaggcagggctctgcaccttctggccacccaaaaaaggcattgggtgaggcttgatttcacctagatcccacccgtgagccagcagccacacaccataggcaacaaattcttcaaccaaatcttggctgctgctcaaccgggctgcgtgtcgaagggcctcttcgttcttatcacctttcttcacttgaaataatagtgcgggcacaggatagatgggggcaggctgggcaccccttcgatgttctccggtgccacataaaaatcagaaatcccaccaattaccacacttgtttttggcacacgacacaatctcaacaacttagccaacatcttcccagtgctcgacgtaaatgtgcaagacccaaattaggcaatcaacccacaaatcttctttttctgccaatgaagatagtagttcttggtgaagacctcaaccgacggttccccaccatacaaactcaccgcctagacaaaccttgccagcgctaccatagtgttcagcgtcaaataatggatttgaatttcaaacttctgaagcacttccactataaaccggtgcagaggcaagcaaagtccagcagtaaaaaaggtctaaaacacaactaccctgtcacacc

SEQ ID NO: 89291 - DNA, 868 bp, Zea Mays
ggaaaaccctaaattgcaacccttgggggctaagtgtaaaattggtgcacttttggaccaaagtgcaaaaaccaaggtattagggcacctcaaatcatatgtttcacacatttgaggaattgcaaatcaaattatgagaattgggcttatttgcaaaaagacaccctatacctctcatatggctaagtccaaaatcagttgaatagggctggctgactttggagctctgtatttctaaaaatgcaaggaatttgcctagggtcaacacatcaaacttgtagagctataataggagtgcaactttgtttaagtaactaagccttgatcacatacaaagtttggagtaaaatgagcacaaagttgagctgtcggttgcaatgataactgaattatggttaccagtgacattggcaggactttgaggtcgaattggagtgagatctagtggtcagttgagtatagttactatagcaagattgtagctggattatagggctacaatgttgttacagagaggttaacacattctcacacaaaaatctgagattagggcactgcaaactgtgctgtcagatgctctaaatgaccccttgatggtacagtgccagaaatatctctggtgcagagcacctcaccgccggcgaccatgtgctcggatttgcgccaggcgctgcgattcatgctcaacgaagtactgatagttgctcggggtagtaaatatctccttaaggatgaacttaggcctctgttcaaccccggccgccgtgtcagcctgactcacagctggttcagataagatcgccggagttggccgcctatcgaccgcgcgccacgtgcctaggtgccttaccacgtcgcagtaactcgt

SEQ ID NO: 89292 - DNA, 613 bp, Zea Mays
ctttaagtttgtgaaaacttctctcctctatgcaatgaaggaccttggccgatctgaatgagtgttgcctctttctttaagtgtttgatagtttgcttttgcatctaatgttgttggcgttataaaaaataatcaccgagcgatagctgatgataccggcgttttagaagtaacagccgagttatgcttgacactgccggtgttttagagataatgaacgggtagtgcttgatgttgtcggcgcttttagaggtaacggccaagttatgcttgataccgccagcgttttagagataacgaccgggtagtgcttgatgctgtcggcgcttttagaggtaacaaccaagttatgcttgatactgccggtgttttagagataacggtcgggtagtgcttcatgttgtcggcgcttttataggtaacaaccgagttatgttgaaaatctcattttcccgagtgatgacttggccctttttagaaatggcgtccgacccaggaaaaccccatttatgctcatgccaacatgcgcttttgatttctgagccctaacttcgcatttccgcctcaaacctcttttttgcttctctgaaattttgctcccctttgtcccggc

SEQ ID NO: 89293 - DNA, 777 bp, Zea Mays
aaggaccagcgcccttcttcccctcctaacctagccgtcgttagcaccaagggtgaggagaggaagtgtgtcggccgccgctgctgtggtattcgactgggcaccgtctcgggatcgaattcgtgccgtggaggtgtgcgccgcctcgtggaagtggttccggtcaacaatcgggcgcgcacgacagtgaactgaaggcaatttcacgccggagtcagcgtgccgccacgaatccacgtattaccgtgggcagcgcttcgtcgcgagtaattttaggtgagtacctctccgatagcttcgaatttatcctcgcatcgtgtagagacatgaagaggaaccttttgggctcggaatggtggtccggccaagtctggcgatgccgttgccgtggttgctccggtcactgccggcctccgccgattagaatacgggagatgtgcgccgatcgtcgatctagggaggtgcggtcaagatcagatctcagcgtaccagttcgctaggtgggaatctggagcgttgatgcggtaacagacggtttaggttagatcggggcaggagcacccctcatccgtcggtttcggatctgacgatcatggcgggttacacgttacctatatcgcgatgatctaatctggtgcgtcgggtatggatcggactgtccgatattcccgatacccttcaaccgatcaggttttcaaaagagcccttatgaattttggtaaacaaccagccatccattgcgtatataaagtaattacatgcgtgctctacaaattt

SEQ ID NO: 89294 - DNA, 473 bp, Zea Mays
ggtcggaggagggggagtttcactggcgtagtggattggtgtcctataccgtgacattcactccggtgatcaacgaagagttaaagcaggtcacggcgatgcggtggagatgcctagacacgcggcacaaggccggaaggtggcggtcatcggcgaattcatcctaatccaccgcggcgagctcggtacggtggccgaaataatttactagccggagcttatccacaacagcgtgactccgagcgttatctgatcaacccgagcacgaatcgatacggcagcggcacgaatcgcggcggagagatcgtcggcggcaagaaaaaactgagctggcggtctgatccattttagatcactataccatggcgaaggatcttcagagcgtctgacagtccattttcaggtctagatttctccaaatttcatatggtaccaagcccaaacacctatagcaaagttgttcctctacaatg

SEQ ID NO: 89295 - DNA, 1094 bp, Zea Mays
actactttccccactggcgacatactgccgactgttcttccgagtcaaagggacctcatcttcttcctccccgtcgttttcatcagcgacacagacaacacccccattgggttcagcgacagatggagcacacccattgggatcagcgatagatggatcacccccattggggtcagcgtcagtaaattcaggcacaagtacttcctcagcaacaggaaccgaaggaccaacgccccgatccaaactagatactcgccgaagacgtctctttttctttttctgctcatcagcaggagaatcaggttgattgactcggcaagggcgtttcaggcgaacactgataggtctctgaatatccaaggttgtaccagcttctgggagaggcgccaccaccaatgtcccagcaggagcagcatcagaagagtcctcggccagcaaatcaagcatagcacttatctctgcatcactaggatccaaaggcacctcaaaatggacctgtcgttcatcatcaggaatttctccgagcgaagcaaccaaagcgcaaacttcttcggcagagggtcgcgctctaaggcccaaaccgctatcagcgacaagtggattcgacacaaaatgagtgaaggccttggaaggaggcgggttctaggccgagtatgccactagggcaccaacatttgataccttgcctctaagaatcatttcaagtccgttcaccaagtctacaacaggaattattctgttggtaacccaggttgagtcagctagacctcggtacagataagccgggtacgctctgtccttcaacggctgaattttcttgaagacaaaatcagcaaccacagcctctgcagtcagacccctctccttcagcagtccaacttcagctagcaaagcccctgcctcagccacctcctgatccgagggggactcggtccaactcggagtgcgaacatccggctgtctccccgaccgtgggggagagaatttccgtggttctcaataataaaccactccaggcgccatcccttgatactatccttgagcgggatttcaagataatcagttttcctcccacggcgcatctccaaactcgc

SEQ ID NO: 89296 - DNA, 351 bp, Zea Mays
cgactctggcatcagaaacgacactagcattggcaacaccaatttcgacgacaaccgaaacaagggcaacaactaccgcaatagcggcattggcggcgtcacacacagcctcaacaatgattgtggtggcttctctagcacatctgccacactttctgtgggagctgggagcaccgacggcaaggtgacgccctcgtggtcaacatacgtccacccatggcatggggcacattgctatgtacctcggatgattttactccttatctctggatgattttacgccctcgtggtcaacatacgtccaccctacgctagctataagtactatttaatcctcttggatgattttac

SEQ ID NO: 89297 - DNA, 334 bp, Zea Mays
cggagaccgagtcttcgccctacaggccctgaacaagtaccaagcccagaccaaagcatggcgcgaccactcagtcatcccgagggagttcagcgagggggacctcgtactcatccggacagctcggacggagtcaaagggcaagctggagcccagatgggagggcccctttatagtcaagacaaaagcttcccccagtgcttacagactcacaacgccaagcggcgaggacctggagcactcctggaacatcgacaacctccgtaaattttttgtttaactcttcagggctgatttcgcccttgtaattcgcaaaaacaatattgtatcggcc

SEQ ID NO: 89298 - DNA, 1561 bp, Zea Mays
gttgggaaatcagctattgtcagaaatttttactgcgacaggatacttgagaatcagcaatttcaagaatacggttgggtggatttatcacactcccaacccttcaatttgaaggacttctcacagaacttgcttacgaattttcaatcagattctcttcaagccaatgaaactacaccctctcgtggtatactggggacagtccgaaaatgttgtgagtttctaagtacacgtcattgcctcgtggtcatagatggccttcagtccaaagaggaatgggatttgatacaatcatcattggtatctagatactctaaatctaatactattatcattgtgataacaactgaagcaagcattgcagcatactgcgcagataaggatgaccttgtgtttaatgtcaaaactttagaaactgatgcagcctttgatctcttcgaaaatgaggtgcatacatttcttcagcatagatcagaagtaatagaactatatactttttatgtatatatgtccctcctgctgctccagtaatctcgatattttccagcatacatgcgtgtccttactcgcattcctcatttcacttggggacattaatgaaatggcatgatattattgtgccaacattatttaattatatattagtcttaaagaatttattcttgcttctcagattggaacatatgagggtgaataactgaatacactcctttctaagtataatgctgtatgatgttacccctgatgttgtatgatgtttctctaaacaatgttatatgatgtgatgcagcagtaaccccttcgcgaaaagtacctctagttctttatgaatttttagatttgttgtatgattatgtgggtacatttgtcaacagaaactctattatattacagttttatattcttctaaatctaaataaaagatgttataagttttatcatatattacagttcaagttagttatagcttagatgttataattctcgtgatcatatattagcgttcaagttggttatagcttatttctagattgtacaccaagtgcctataatgtcatgcagaaaagtttttaaaatacttttggtctatttttgttacagtgggtggttatgctaagtctaagagcatctctaaggctcttctaaaatttactctctaaatcattatttggggagccatttgagtaaaaattgctttctatatcttcgtaccctccaacaacttttctatatcttggacactctagacagccatccttactctatatctttggctagcgagaaatctggaatagcggatatctatatttggagatccaattaaagaggctgttaggggatactttttttaaccaaaatctctatttctataaattagagagaatataaagactcagagtttctctaagtacatagctatactttcctcttattttctcttgcactgttgcacccatgcatatataatacatttatgtgaatattgtattcaaatggtaactaaggtcaattgttgatttgtatgaacatacaacagatatctaagaaggctccgttgtgg

SEQ ID NO: 89299 - DNA, 598 bp, Zea Mays
aagagagcaagtgatcaagggcgagtgaagaaagcagccaaggcaagtgggctatttaaagaggccgaggggtgatcgtccacttcctaccccgctcaccgaacagttgcaagaattcaataagcaattcaagccgcctgaaaatgagtcaggcaactggcgtcgtctcacgtaacacggcatcggttggactcaagtcaactgctcaggcaaatatcaaattactacttcaggacaacgagataaacacctttcgtggagcagacaccctttaggcacacccattgggtgtaccgcccggaatcctcaagattttctgaagtggcgatacccacaaaatatacacaatgaatgtaccacgacaaaaaaaagatcggctgaaatgggaggaagtccaaatgtggttaccgaagcgcaagtccaatcaacaaaagcattaaagtacatggatgagtggtgtccagtcaagggtcttctgtttcaaccggccagatgtccaacttgtcaccgatcaaattgattccagacctaacaagacatggacagatgtcatcacttggttattctaaaaattattttgaaaaacagcacaagatga

SEQ ID NO: 89300 - DNA, 301 bp, Zea Mays
agatattggagataattaagcccaaagttggactgtcaggctgatggaactctgaaattcagaattgcagtgtaacagagctaacattggacttggattcaaccttgatccagtgctcaactaagtttaatcccagtagtcgagttgtagctggtttatagcactataatattgctgcagagatctggatgtgttgccacagaaatttggaagaaatctggccctaaactatggctgtcaggcttactgaaggagcactcgccatggtacagtaagtcccaaactgaagaagatcacgatt

SEQ ID NO: 89301 - DNA, 361 bp, Zea Mays
gccatattctgaacctagttgcaagggatggactaagtgtaattgcacccacaattgagaatataaggcaattagtgcttgctgtgaagggatctccattgcaatgggatgagctaatgaaacgagcagctgagtgtggattggatacaaaaaagggcctctctcttgatgttgcaaccaggtggaactcaacctatatgatgatacgagatgctttatattacaaggctgcattcatgaggcagaaatcatctgatcgtcgtaggtatgagaaaatcaccccctctcctagtgaatgggccatggcatacaaattgtttcaatgcttaaagaagttctatgatctcactgaacttttctc

SEQ ID NO: 89302 - DNA, 1054 bp, Zea Mays
gaactcggacacgccgatcaggctgcgttattaatcggctgagttttgacattagctaagcattggttgcgccctggcaacacgacgcagtatttgtgtcgtacgaacttggctgcgtcaggtgattgctatgtcgcactctcgcttaatcggaccactcccgttgagtcggactgccaccatcgagttgcgtattttttcgtatgccctgtaggcactattcgtctgtcatgatcatcgaaccacaaatgcgcctgttgcgcacgttgtgtggacttattgtgtaccccgactattgagccaatattgtgcctgttgcgcttattacaaaggcttgttatgctgtcgtagccctgatggtcgcacatgcgttgacgccacatacgctagagcttgtactcgcgtggattgtggtgggttgttcaagcccctaaagtcgcattatacgcaaccttcgtaaacaattttgttttcactttatattttgtttgattgtgttgtgtggcatcgtatatttatatatatcgtcaagtggccataacaactataccaaatctgggaaattaagtcaaaatacaataaaacacagataagttaattctctgctctctcctcatgcataaagttttactcgaagtaacccgaaggtatataatatgatgcatgaaagcctttttggcacagaagacatcacaaattgggattctattagtaagcaatatgaccttgccaaatgaataaaggctagaaatttcagtcatatattgctcaaccagttgttgacacattgctctctttgtcgctgaacgacatgaagcaaattctgagataaaaggacatgtaacccctagcaacccggagttgcgagtataggttattctgagataacattcactatgttggtgtgaaaaaccattgtgtgtttccgtcgaaccactttaatcgtcctatacaggatatcatgcttatgttgcatatatctctcagaattgtaaatatttatagtcgctgaattgactcgagatagtcctttgactgctatgatatactttta

SEQ ID NO: 89303 - DNA, 375 bp, Zea Mays
gggtgagacagagtttgcgccctagggctggtctacgcacctgtcatattacatgtcccgtcaagggttggtagatggcatgcgcgtacagtggtcgcactcgtaatcatagaatctttgacaagaccgtggtcttgttgtcactgtatgcacgtaggcctgagcggggtaggtacgtgcattgaatgcggctgtcccccagtggtcttcaggaggccttactctgagcttgtcctactcgcccgaggcaggctcgagcgaggtggagtttgtcgttcaggggtgacgtgacctcggtcgagattgagattctctcgagtactcgccccatctgagatcgggctcgggcgaggcggagttttgggaacacccatg

SEQ ID NO: 89304 - DNA, 350 bp, Zea Mays
gaaataaattacaatattttacatatttgattcaaagttacacacatcaaatattacagtcttgttacagtagaagcataatgtccattctagtgtctcatacatcgaccatttcgaaatgttttttacaataaagtttattcttctctgagaactttttctgtaacttcgtttaaaagtttgtcgacaacttcgtcgataatggaatccgccatatttataatgtccagcgcttccttcatttctggatcagctaggggatcgtacggttccggcggcggagatagttcagctgaagtaggaaaaaataattaatccgaagccacaaaacaaataccgaagctaaaaac

SEQ ID NO: 89305 - DNA, 300 bp, Zea Mays
gtagaagatgatctctggaccgtaggatcaaaatccagcgatcaggggcgtaccgagtcgtgggggtatctgagtcgtagatctaagtggctacggttcagatcaatgagggggaaacatttcactattttaaatctaggccatcgatttgagatccgatgacgcgaattagtgcgtggtgtgggtaatatgggggccatagatctatgatccatgggccacggtcgctcgttgtctcatttaagcgctgatgtaatccaaaccataggatctgatctgaacgaccctcatcagcggata

SEQ ID NO: 89306 - DNA, 339 bp, Zea Mays
tttcatttcatccttagcatcatcttgctagaaacaagtgaaactagataccacatgagatcataataaatagggttctagttactcctttcacactaaggctaggcttataaatatcactaaatcaatcatcatccaagtcttagttctagcaaacacttacacacaagtatgtaggaatataagacaaatgtgatgcaagcaagaaatgtagtgcaaacaaatgcatcaaacatatattcacgagcttgctccccctacttgtgtgcatctcttgttcaataaaatatcataccattataccttgctcttgatccatttgtattcattctaactcaa

SEQ ID NO: 89307 - DNA, 918 bp, Zea Mays
cggtccaatatattagagtaggagaaaacacttacaagacacacacgaagacgaaaaagagagagggggtggtaagaaagaagaagaacaaaactcgactgtctactaagattaaaaaaacaactccaaagccactaggcccaaaactaacccactagagcgtcaacaagctctctcactaaataagctacctgatctgaattcttttgctgatttctgaagatcctgttgtttctttctaaccataagctccaccaaaagtagatcagaagcccatcgaattttttcctagattgcctattacagagatctcttagattcctccaccaatcatacaacgactccgatgtctggtttcctcccaggaaaaaacagttccccatatcaaaattttgttccacacctctctactgaaagggcaatctttgcataaatgggttaccgtctctagtgctgagttacaaagacagcaaactgggttgcactgccaatgtcttttctgaaggttgtcagcagtcagcactttattatgcaaaagagtccatgcaaaaaaacggcacttaggttcagtttttgctttccaaatggggtcaattttcattgtacaataatttgctgcaaattggatcttataagcgttgcttgcactgtactcaccatcttctgtccatctccaagaaatggagtcttctagatcgttgagctcgtgtgtactattgatggcctgccaaaggccgagcaattccttgaattcttctgcaccatcgtagggagagcataactggatccaacggttgtttctcagggcctggaaagtcgaaatgttcttcctttttgctttgttgaaaagacttggtgcaatgttttttggtgcttgaccatggatccaactagatttccaaaatacagcagttttcc

SEQ ID NO: 89308 - DNA, 655 bp, Zea Mays
taagtgcgcgacatcacccacagggtgcgaagtctttactaaaagacacgtccgagcaaaagccgcctaagggtgcagccgggcacgcacaataagtgcgcgacatcacccacagggtgcaaagtctttactaaaagacacgtccgagcaaaagccgcgtaagggtgcagccgggcatgcacaataagtgcgcgacatcacccacaggatgcgaagtctttactaaaagacacgtccgagcaaaagcttcctaagggtgcagccggccaagcgcaacaagtgcgagacatcacccgcaggaagcgaagtcctcatcccaccgaagtgtcgcacaaacacgattacaaatcaaagcaatctcgcaataaatgcagcacgcaatatgccatcgtagcttacatacataaaatgcaaggccagtcggccacatcgcataataatacaaatcacattttgtcgccctttctctctattgcgaagagggggagggcagcgttttcactcagtatcacaacacgagagtgagcccagcaaaaatgttacattagctccgcctttggaataagacccgcctctaggaaattaaacaacatcatccttaactcttcgccctcaaatagattccgcaagtccccctccccaatacacgtcccgg

SEQ ID NO: 89309 - DNA, 559 bp, Zea Mays
gcctcttatgttttagagagatagcaaaatctatctaagtctgtggtagttttgcaataatgcaacatgccacaaccttctcaagcagcgcacaaccaaattctttgagttatttcaccagtaaatgcatatcataagcttgttctactactaagcgaccatcaatcattctatatttatgaaaatgctccatgatatacaactcactatcgatgttaggcaccctatatttggcctccagtacatcccacatctcttttctagtggacaacatcacataagagtctgttgtagaatctcctagcacctactattgcccccttgaacatagcatccacatccttgaacacattttcctctctgtcggtggtgaagccagatggtaacagaagcttgggcaccacatgccaccgtcgcacctcgaaatttcatcgaacacctcgaggacacagaacgacaagagcatagaatgtgggagctagaaaccttaccatgctctaagaggaaggagaacacaagttcacacttttggtcctagatttggcaatgagcacgcgat

SEQ ID NO: 89310 - DNA, 378 bp, Zea Mays
gatgaaccttcagaaaatcgacgtgcaacttgtgactctgtttgcactgtaagtgtcgctcatatttccacatatatgtattattattattagtgagccgtataaattttcaatatctgacacatgcacgtgtgacttgtagaatacaacatgatcaacaagagatcctttacgataccaagcccggtgctagtaccagtaaaaggattaggtatctgaatccaatactgatatctaaggaaagccacactttcagaatcagcaaagacaatgaagagttaaagggaaagacggacgaagaagttgaggagcgtataaatactatgaagaaggattttgaagcaagatacgccacctacataggaaatgcaatgctta

SEQ ID NO: 89311 - DNA, 640 bp, Zea Mays
actgaactcattgtgtacactgatgctgattgggcaggctgtcctaacactcgccggtccacttcaggctatgcagtcttcctgggtgacaatcttgtgtcttggtcctggttgcggctaatggtgttgtagaggtttcctggttgcggcagctcttgatggaactacattctcctttgactcgcagcagcttggtctattgtgacaatgttagtgccatctacgtgtcctctaatccggttcagcaccagcataccaagcatattgagattgatcttcactttgttcgcgacaaggtcgccattggggatgttcgtgttcttcatgttccgacgacatctcagtttgctgacattttcactaaaggtctgccgtcctcgctcttcaccaactttaggtccagtctcaacatctgtcgtggctaaagttgggactgcggggccttatgtgtgtggggggccgggctgttctacgtttgtacacgcccggccataggtgctgcgccacctcttctgggaggtttttcccctgtcatgtcgccaccctcctataggcggcagccctagggtttccttccctcctgtctgcctatatatgttgcctccttagggccctatcaatataacacaaattataggcg

SEQ ID NO: 89312 - DNA, 603 bp, Zea Mays
gtatcatagatcgtcgactggacagttctccctgatgcgtcctccaggtgccattgttgattgccctagaaacgagacgccacctgcaactctacgaggacctggtagccatgagatctatggagaagatggtgttctgacaataatgatgcgtgggccgatgaatacaataggatctggtgaggtggatacatcaaatatattacaatcgcacgtaagttcaatgcttataagtatgtttatgatttgaattcactgacgatgatattgtgttcgggagaaatgaagatttgatgttaatgtaaggatttttttatgttgtacacagccagattcgattgatcctagtttaattcctaggattggtatggtgttccgagatgttgatgatgcatatgatttctataaacgatatgcatatgaggtcggatttcctttgaaaaggtatagggaaaagacaaactgcaaatggttgaattgctctagagaggggagatgtgtaaaataaaacatggtaaccctggagtccggaataaatacacaggtcgaacccagtgcaaagcaggaataaagcttaggaaaatttatgatgatgcaaaaaag

SEQ ID NO: 89313 - DNA, 456 bp, Zea Mays
cagggacccacagcgatgttctaaggtccaggccagcagcagacgtacgtggtcccatccggcagcggcagcacgctcagtagcaggcatgcatgcagtggagggcagacgtggcagcggcagcacaggctctcattcccatttacacccaccggtcacctgtgcgacgccattaattccgcctctaggcaaagggcagccgcttccatctaactgacatgtatgcccagcaacggttgctcccacatgtcattgtctatatgttgagtagacgaggattttagtggagacaaaactaggagccgttacgcagaaggcagagcagagcgggtgctgatgtgatgcggatccctacgaccttgtcattactagggcacaccacgagatcgacgtggtctccaattctcccaggaccacatgtcagagacccaccggcctgcaccggctcacacaccc

SEQ ID NO: 89314 - DNA, 527 bp, Zea Mays
cgaccacgttcccgttggtctcgccgtacaccaacggcgcgctgctcaagccatggacgcccgaggcggaaaagtaccgcgtcggtgtggtgcacgagttcctgaacctgacgctggagaagcgagcgatgatccaccacatcgtcgagttcaaggaggagttcgggctcacgcggcacatgtacgagtcgttacagaagcagaaccgcgctttctacctcgccggcacagagatgaactgggccttattcctcagggacgcgtatgacgaaaatggcgtgctcaaggagaaggatcccctcgtgctgttcaatgagaagcttcagcactatgcgtgtatgagcaagatagattccagagagaccatgattgatactgcaggcttgactgaataaggtcagctttcagttggttctgccgccagaattcaattgtgcttatttgcagccaggtatatacagtttcctcttgaattatatttcgttctttgatgcctatcttttttcaattgttattgagcatttgag

SEQ ID NO: 89315 - DNA, 573 bp, Zea Mays
cggagatgccaggggtgaagatggggccaccagggtcgccagcggttcgagaaagtttggcgggaaggcacatggtctgatcgagggcgatagggcagtctggagggagtccagtggcatcagtgccgcaggcgggagtggtgtgaaaaaacaaagggtgcttgaccatagggagccatggggtcagggtcaagaagatagttcaactcaggaaagaagtcaatggtgggctggaagggactcgtgaagggaaaatccgtcttgatgaagatgtcgtgttgggagatcaataggcgatgagtggtgaggttaagacattgataccctttgtgatccgggagtaaccgaggaagacacaatggttggagcgagggttaagcttatggggagcagtgacagaaaggttggggtagcatgcacactcaaagacgccaaatggtcataggatggagtggcgctaaaaagagaaaagtggggtgtgcagatgcaaatcaacccagtaggaagcaagaacggatgcctaaatagcaaggagcacatgatattgttagtagtgtgaatcaggcacgcaac

SEQ ID NO: 89316 - DNA, 315 bp, Zea Mays
gcttatacttatgttgtttaatttccgggaggctggcctaatcccaaaggcggagcctatgtaaaatgtaggcgttgacatggccgttctttagtgaaattaattggaaacgctgccctcacccccttcaccaaaggacgactatgagagccttctgacagaacgaaataccttgtatatgaatggtaatttcacgctcgttgttttcacgcacttgaattgagtaagttgcatcctttggtggttgtgttatagaagattctacatgcggaatactttgcacccttggatttttagggatgtgttatatttttt

SEQ ID NO: 89317 - DNA, 576 bp, Zea Mays
cggcaagcttagccgcaatccgagcacaagttgatcagacgccgagatttttactgggctgtgcttatctgatggccacgacgcacgaatcgcggcgagcaatcgatcaacggcgatgggccaccggcgacgagatctttttggcattagcggtctgatcatctcgggacactgtaccatggcgagcacccatcagatgaactgacagagcgacttggagcacgatttactccagattttgtgtggtgaccagaccagatctctgtaccaaagtcatagcttaataaaccagctttaactttgttacatggtgcacacaaaaaagatcacaggatcatacccaaaatcgagcactaagttcatccaatcttactgttattggagaattcagacttaaatcgacctgacatcccatctttaggtctgattttctccaatttcttcataacaactttgcttacattcttaagcaaagttgttctcctttgtttgatctacaagtttgatgtggtgacctagggcaaaaaccctagaatttgaaagttacaaagctcaaaagttgagcccataacactg

SEQ ID NO: 89318 - DNA, 707 bp, Zea Mays
gttgcaccgttttaagccatcgccgacttaagtcgattgctccgttagtagggtatagtggtcaccctaagtcaagtgagcgcgatgatgttgcaccgtcttaagtcgtcaccgacttaacccgattgctctgttagtagggtatagtggtcaccctaagtcggataagcgcgagcatgttgcaccgtcttaagtcgtcgtcgacttaacccgattgctccgttagtagggtatagtggtcaccctaagtcaagtaaacgcgagcttgttgcactgtcttaagtcatcaccgacttaaatcgattgctccgttagtagggtatagtggtcaccctaagtcaagtaagcgtgaacatgttgcactgtcttaagtcatcgtcgacttaagtcgattgctccgttagtagggtatagtggtcaccctaagttgagtaagcgtgttgattccaagtccaatcgaatcgaagtcaagtgatagttaacagtttgaatgcccttgaaaatgaaacctttattgacgatgtattatcccattatagagtacaatgttgctccgatagctttcgaggttttgctaagggtaaaactttctaagatgctctatgttccatgaattccctactgccgtaccatccatttgagtaagctggtatgatcctggccgagtgacctccgatacaatgaatggcccttcccatagtggtgac

SEQ ID NO: 89319 - DNA, 311 bp, Zea Mays
tcctgctctgtctgccctcattggtctacaagagttgtccctggcaaactttgatcagactcttgaagacatggttccagaagacctgctatcagagccagcggatgatggtgtgatggaggtttgtgccgatgtgctcgacgccgggttgggatcatcccgggcagcgtcccgcgcttcgtcgaccttagagcgcggtcttgagggtcgagaaactgacttggatcgtcttgctcccatggaagtaattgagggaccatcagccttagaggaggctactgcagagaacttggccctcaagtatggtgttg

SEQ ID NO: 89320 - DNA, 1494 bp, Zea Mays
tgggaagccatcattcatctcgaccatgtgatgctcaggccgcgtcggttggctaaactcagaccctaccgacccaattcccccagcagtgggacatcggatggtggtgcgagtcccatgcctcctcaaacggctaagctattgttgaactaccgatgctcgagctcggggaaaataaaacactccccgacttccatagggtagccacgcacctcagacgctatgcgtgaaccatctctgtccttcgaacgcaatcctccccgatgacgaggaggttgcaactccactgtggtcgacatctggtgtcgggaggatgatgccaatgggaggaactccaaaggagggatggcctctcgcggcaagacccacggctgaggaagcacgatgtcaactacacccacatgctcctgagtcgtcaacaagaaatgtacaactaggaaagtggtccccagcggtgcctgggtcttgcccaaaggtggcattaaactcaaaaaaggttcgggaggatttcgctctctgaaaactgctaccctaggtagagtgtcggggcgacagaatgaagacgtcatcacaaaccgcccttggggcaccgaatccccaatcggaaaggactacaagatcaacagaataaatttattaggcccatgaggtaagggaaggaacccaaggtagcgacgaaagctacttacgaattcgaagaagcccagctcagggcgcatcggggggcactcaggggctataggcatggatatatgcgccgccccctgtgcctccatctgtatttccaaagcttggctcacccatcgttagcatccgagtcgcttggaaggaccccggcgcctggggacagaaaatccttccacacctcgtataggggcacagatcaagcctccagaggagccacccttccattgacgcccacacctatgatgtctttctttcggaggaagagcacccccaacagattgctttggattcgagttttctcctgaagcgtaacatcgtagcaccaattaatgggagcctcgaacgaagtgctccagttgacacctcggagctgtggccccagaaaaggcctcctaccggcatctcacaaataaaaccatcacctatacttgcccttgttagaaagggaaagggggatcgggatgtactcatgcgaccttcctcggtggagacagaaggtagcagatctgactggccacactttcattatccttttctcctccctcttccgcaacaggtcaatgcagaagaagtaccaccataaggtgagcttgagatcgacgctctggtgcccctcacacagggcgatgaaggcagccatatggtggatctcgtttgggttcagaaaatgaagttgcacctgcaggtgcttgaaaagagtgatggaaaaaggatgaagagggagagcgagaccctgctcgtggaaacgaacaaagaaaccacataaccgggaggtgggttcggggcctcctcggcccccagaatcaa

SEQ ID NO: 89321 - DNA, 1240 bp, Zea Mays
agccatgtattaaaaatgatattaatctctacatgctacagtttgcatatgtcactatatgagagatgaaaatatccatcagtttaaacttagtagaacccacccaaccaaatcatcccccacacccacaacctccactaaacaaattgcacccagacttaacaaaacatgaaaaccaacgtttcagatcgctggataaactctctcccttactcaaatctaatggacaatattatttgaatcatcccccatcgctccccccagcataattaaggtccagcaatcaccaaagctaccagaaacaagaaatcagtatgtgctcaaaacaccggcagggcaacctcttgtgccctaatggtaattctaaatggtctgaatagagtgtagagtcgctaaacccaaccatgcaaacccatagggcagtgatctgaataccatgggacaacaggcaatccgaaactaggatagttgttagagcagcggcggtaactcagcatcatgcaaccagaacgtgttcagctctccatgaggtccaattcaagtgaacggcatcaagcaaatgtatgtttagactaaacgaatcatgcataaaaataccagtcaaagctcgataggaaaggacagctgagtgcaactacgaagcttgtctacgtgatgggatgagacggtcctaagatataaaaactgacgatggcgggagcggacggcataccgtgatgtcggagtaatcgagcttggaatccgatgccttcctcgacttggccaagccagagctcgcctgaaaccacccaaaaccccaagtcgcatcagtgtaacaagtcacacctaaccaaagcgaaacacactgtacacggagatagagcaacatgaggaacgtcgacctcgacgacgccgccgcatccgtggatctcgtcagaggcgacaacggcggagaagaaggcaagcaggagggagagaaggatggggagacggcggggatccatagataatagatcggatctagcgggagcggagcatgccaccgggggagacgacgacgagatcgatatgtgcgggggcgatgtgtattagtggtagcagtggagtttgatatttgctaacagcctagcactcgcttggaccgctgtggacctgtgccctatgctgtgggtgtgggcttttttcctgggccctaggtgtagtgtagatgtaactatagaagacgatggggttgggctggaataatggccttgacaaaatt

SEQ ID NO: 89322 - DNA, 339 bp, Zea Mays
gcttcattgagaatgaagtcgccgaattacaagtggtagcctaccatctagagtttatggtgctactatggataaaacttcctgaggtgttcaatgttccatgagttccatatcggagtaccatccatctgagttaatcgatatgaaccgggtcaagttacttctacaactatgaaaggtccttcctagggtggtgatagtttgtgtcatccttcttccgattgtatgcggtgaagcaccaagtctcctagtacgaatgctcggtgacatggggccttgtcatggtaatgccttagggtctgctgatatatgaccgactgaataacaatgtttaaccgc

SEQ ID NO: 89323 - DNA, 402 bp, Zea Mays
tcaggtctgatatggaaaaggaaacagaagaaaaggttcgacgaataattcataatttgaaagaagcccaagctcgccaaaagagttatgcagacaagcgacgtcaacccttgcactttaaagttgaagaccatgtttacctgaaagtttcaccaatgaagggtgtatcacgtttcggggtaaaggggaagctcgcaccccggtacattggtcattttcctatccttgaaagatatggaccagtggcatatcgactccagttacccgaaacattgtctgctgtacataatgtgttccacgtatctcaattgaagaagtgtcttcgggttccagatcgaactattgaagtaacagatgttgccttagaactagacttgacctattcaaaacatcctgttcaag

SEQ ID NO: 89324 - DNA, 594 bp, Zea Mays
aaaattttaaatacaatctcaacctaaaaaaggtgattgagagggtgtattacataagttgtataggactcgatctctacaacaaccatctttgagatagattagattattcgtatctgagttggacttggttacgatgtaatctctcttgtccttgtctatttaaggaacatgtaggctttgatctattgacatagagaaccacccatatattattgcctttgtctgtttgatactcactctgtcacaaattaaaatttattttagataatttgatacacccagtctatttggggttggttgaggtccaacaaattagggttgcctagatcccaacagttcatttagcacacccaactaagggaaatgcctaatcgacccaaatgactagtccgatggggaagggtggctctcccttttaaggtggcgtcctgctcccaaattaagtgaggtgggataattttgagggtcacacggtcaccgtccgactacaattgggccaactggtccaattgcgactttgccaatgggtaatagtgatggatgtcctaatcattcccaccttcttaaattgggtcctagctctgataccag

SEQ ID NO: 89325 - DNA, 592 bp, Zea Mays
atgagcgatcgttttacgttgcacatccttggtgatctcgtttttcctttataacttattttgataatgaattcttacttcaaccattttattgcaacctcatctatcttgcccttgattgttttctccacttcgccacttcgcgagtcttaccttaactctatcctttgttatgcctttcattactatcaccttcacctttgacacctctatatcttacttgatgattatcttatacctaccctttaaaatctcctctcttccatctcaatctaagagttgtaacttacctactttcccttggtcgtaccctcttccgtgtcacttgcgagcttttaactctatcctttgttgtgcttttgctccttattacctttacgtttctcatctctcgatcttactttggtaattacactatgtccattatctaaaaatctccaattcctatcccgattggagagaggtgttttgcttatctcgcccttggcaatgtcctcttattcacttcgtgcaggccttgacgtaactccattccttgtggtactcataccactagctcttcagttgccttcatcttttctctcataccctt

SEQ ID NO: 89326 - DNA, 323 bp, Zea Mays
tgggggtaggcgtaggcgaggaaaggtgaggcgggtagcgggaggcgacggcggccagcgggaatttatactgtgagcagccagcgttgcgaggccgaaatggtgggagcacacgggctgtctacaccatcattttcagtagaatctttcgaaacattagcatagcagcatttgagagacgcaggtgagctaaaattggccctaatgtcttgcctccttgttgtttgtggaacacaaggtgtctttagaaattctagggcgcgaaacaaatgatgtatttaactacctcttgatcataggaagacattcgtgatataaccata

SEQ ID NO: 89327 - DNA, 561 bp, Zea Mays
tatatatatagttatagtattttgagccctgggctttgtgtaggttgagaaagccacaaccacccacacgaccagctgaccaggtgagtcaagcgtagccaaacgggaccacccaaacaatcgtcagaccatttatgatctcctgcacaaacgtttatgatggttacattcccgttttacgcaaactaacacaactcagcgcgacgtatggtccacggctccacgcccacatttccgcccccgttcgcacaccatggcccaccattcgatcaatcgtgtctgcatcctggccagaccccaccgcatgccccaaacctaaccactcgcccgaacatctagcaaccctaattgatttcctcgtcgctctcgccgtcgtgtgctcccacaatcaccatctccaagcgcccccgcccctgccacaccgtcgtctccatgcgtggcatctcggtcccccaacatcatcgcacggtattgcctcactcatccatctgccatttctcgtcttcgtgcactcttccgtcgtcgctctacatcaacagtgtcgccagatcccactcccgc

SEQ ID NO: 89328 - DNA, 546 bp, Zea Mays
ggctggctgcgtggccggtattcatataattagaattgaactgcaagcgtttggtcatgatcgtatgcttttgcgtggcatgcatgcatatatgcacgactatagcaagctcatacagtcgccagcagccagccattcaccaacacaaaaaagcttcctttgtccattccgatccataaaccctagcaagagctaagtacgcaggtgaagaaaagtttggctccgatccacagctagctaggtagcttcatttatggtttgcatgcatgcagcgcttcttccatatcccggtcgggccaccggccctctcagaacgacacatatgtctctctctcttccaaacgacaacacatatcttgatccaacatgcatcgaatcggccacattgctagaacatgctgcccgatgtatatgcggctggcctgcaccacccaccgaacgtacgtacttatatacgctgccgacctatatatatagtatcggatccgaggctgctagtctgctagttgagcttgagcaaggagtcatcgagtggagagagtgaca

SEQ ID NO: 89329 - DNA, 364 bp, Zea Mays
tgaagatcaaccccgacgccaggccggtgagttagaagcctcgcagacagtctgtcgagcggcaggactttatctgaaaggaggtccagaagctactagacgccggcttcatcgaagagtttcatcacccagtgtggctggccaacccagtcatcgtccccaaggcgaatgggaagctttggatgtgcatcgactacaccagccttaataaggcttgtcccaaggacccgtatccacttccacgaatagatcaaatcgtggattctacctccgggtgtgaccttttgtctttcttagatgcttattctggtttccatcaaatccagatgactaggaagataggaagcataccgctttgtgatag

SEQ ID NO: 89330 - DNA, 677 bp, Zea Mays
aacatttcggtgcctcgcggctcccttagtgacaaggttcagtttgtggtgtcaagaatgacatcccaagcccgcatccagttcattcccatgatcacatccaaggataatcctggcattactatcaattgagctcgaaaatctcttccttcaattctaagggtttcccttcggactatatgattagtgaaaacttcagcctcaactgagcttatctggtacttgtgccccatttctactgatgattgattaaagcggtgagctaaagcagtactcataaaagaatgagaagatctggaatcaaatagtacaactgtgggatgatcgttcacgagaaacatactagccatcacgagttctccatcagtaatctcatccgcggtggtgagatgcactcgagcgggatagacgtcgttcttcttcttagggcaaggaaaaaacttggcgaagtgctccatctgtccacaattatagcatggtgccttcacttgagtggtacatcccgttgaacttctaggtctagtctttgcatgctgtaaagccaccttgaatgctttctgacccctgaatcattgttgttgattcttcttcggaggaggaggcaaaatcttgctcctagtaacatcggcctgaaacttggttgagccactatggtggttctaggctgtgatattcta

SEQ ID NO: 89331 - DNA, 623 bp, Zea Mays
ttgccgcaagggagaaaaggatgagtgatgccgccgcaattggttcatgtgttgggcagtgtggggtcctcggaagcgggctagtatgcctcgccatgtcgtgcgcaacgcatgcgtggcttcgattgggtggactcatgctcggagtactgaggaatggctcatcagagttatcaagccgccatggatccgctgccccttgtgggcaggagtattcgacacaccaatcaccggtaagggtgccctgcgtagttcctagattctagcgcttgcctcttcgctagtcgtcggctgggggaaagcctcgggacgctgggatgggtatgcaccgacaatgccccgccgtgtggaagggcctgcgccgccgtcctctactaggtgtggaagacgatgcgtgggcgccgtccgatctgcgcgggcggtccagattagaccggactgatacctctttgtccctttagtcgtgggccgtccgatccaaatagtgcgggtgagattaaattcagtagtgggtgggcgtctagccgttagatctggatcgtggggaccggagcgcataccggttgggtgatgtggctttctaatccgagccctcaaacggcgatccaacggctgaattctac

SEQ ID NO: 89332 - DNA, 456 bp, Zea Mays
ggagacaagagtgtagagaggaactgattctttgttactatatggtgctgctctccaaaggttacatgatatggggatctcctctctatttatagacaaaactagggtttcaggcatatgggccacataggccttcctggcccaagaaaggtttcttaacactcccccttggcccaatgccgcgagatgcatatgtcccaaaactccataaaaacccagtgggaaaaaattggagaaagagtacatagctcacgcttgttgtgtcgcatgaattgcctcatcaaaaccttagtgagaaactttcatgaaaactcacataaaggaaaaagagtacaattcacccaatataacaatttaatcttctagattatttgggtacttaaaatttatgtttaagattatttgggtgtgtgtgaagtttctccccctgagatctgcagttctctaagtctcatc

SEQ ID NO: 89333 - DNA, 959 bp, Zea Mays
gaaaatgcactgtcaggcgctctgaagattccttccatggtacagtgcaccccatctgaatcagatcacgagttcaatcctatcctcgtcgtctgtgatctttcgccgggattgttgattgatcgtcgcgattcgtgcaccgtggtcagcagataagcacgggtaggtaaaaatcttggcatctggatcagtttgagtccggccgcggctaagctcgccgtacctcccttgctcatcggtcgaccagataaccttcgccgccgttgatctgtcaccagtgtgcgccacgtgcttaagcgttagcccgcatcatggtgaatcacggagtgcatgtccgatgatcgccggaggagccgccacggtgaaagccatctgtcccaagtaccagtgccctttttctctccggtcgccagcaccattctgccaaattgagcgccaccgctattgcgctctataaattgcggccaccgtgagctccgtaggttagtcaagcacccagcctccaagaatcaccctcagttgatcaccagcaagctcgaattttacagttcccccaaatcggttcaaacacgccgcaagaacacctcgccgtggccagcgcaaattaggtccgatcatgttgtctttggtcttgttctagcatccctgtgtgttctgataacttatcgacccaaccaattgtgctaaaccgatgtagatcatcggaacaccttgagttgttcctggggtgcgcggtcaccgtggccagagacatttggttagccattcatgaaattgacttaggggaaacattcactaggtcccgaatctggtttaggccaaagaagggcgccggtccttgtgtgaatcggctggtacgcgggctcgcgggagatttgccgcgccactcactgtcatggtcctggcgcggtaaaggaatagaactttaggggcttttctgcatctgtcagtgactctgc

SEQ ID NO: 89334 - DNA, 905 bp, Zea Mays
cgcttcggtctccgaaggtcgaaggttcaaattgacgaaactgtcgaagcatgtcaaaaggcatttggtactgtctgtttctttattggtacgagagatttggttcaagagcacatagcatacagagtatggccgcttatagagagctgggaaatgccgaaggagaccctcaccgaatctagtgaaggtgaactagtccggctgaagtacacattcagatacggggataaattcgatgaaccaaatgatgactggctaaaatgcatcgaagttaccagtgatgaactgcttggatcatattccaaggcggaagacaatgcattatccacagccttcggaggccggggaaaaagagattgaatagagtttttgatgccattggtttcgtctaccccgactaccgctatccactgtgaggtcagggaaagaagaggaaaactgctgcttcggccactccagacgatcctatgctgaagggcaaaaagttgaaggtccttacccaccggccacgctatattgaaccggccgtggtgcctgagtttggcggggaggcttcttcagctgctgaacgaagagaacccattcctcctacgcagaaggctggagagccggctataatgccgaaggcagcttcggttgatctagctaagtcgaagactgagaaagataaggctaaaaaaccaaatattgaagaaacaaaagcgctagaaattttaagcccttcatcagaagtaacagtgccgaaggcacaaaaaagttctgctgcaactcccaagaggagaaggatggcaaatgtattagatgtgttggaaacaataaagactttgaactctactccttcaagaaaaactgccgaggcttcaaaagcacaaaccgaagctgaaacaaagccggccgaaattgaa

SEQ ID NO: 89335 - DNA, 1107 bp, Zea Mays
ctatttcattacgaaatagaaagagacataagttcttacggtaccacatgagcacccagaattttaaagctgacaaagcacacaactatcagctataaaggaccaaaccctgaccaaaccaaactactagtagcaacacaaatagaaacacagagctgaccaacatcaaagttcacacatatcacaccagcgcagcaagcagcattccatcccatagtttttcctgaagctaggcgcaaccagggaaaggaagtagaacgaccgcacagttgttgaaccaaaataaccagataacaaaacatgtttcatttcaacggattcgtctgtcaactggcctccaaccacgagtcttgttgtagatctcacacgccatctttttgattttgagacttccgagctccaccaattttcttgccttctttttttgacgaatagcccaagtattaagccaaaaacaacaagagaaaatcacattagtcggatcatcaattcggttagtcccaaagcaacaattattgcgacatctccagatcgcccaaatgacagcaccatagccaaacagaaccagatttttttcagtcttattaaaactgttaatccaagtaccaaacaaatcatccacattatcaggaatagaatttagaccaagagcagagtagacaattctccacgtaaatctggctaccggacattgaaaaaacaaatggtctatggattctgaaaatccacaaaagatacattccagattacccttccaatttttcttgaacaaattatctttagttaaaatcttcttgtgcataacaagccacataaaaactttgatcttatgtggaagtctagtattccacaagaaactaggagccaaaggaatctgagagcacttgatttctttgtaaaaagaattaacagaataacctttgctacccaaaagccaaacagatttatcttcttcctcagaaataatagtattattacattgtgtaataagattgttatactcaacttccaaggcaccataaatcctccttctgaaattcacatctctaaaatcagaagaaaaagcttttttcactgtgatatctttatcataagcaatatcataca

SEQ ID NO: 89336 - DNA, 594 bp, Zea Mays
cccggttccagcgatctccgcacaaatctccaaagggcatcgtcaacgctgcaggatcactaaacaacttgtccctctgattgggaacattggagctggcctacgcatcactgtagtgagataggccgcccaccgatgcaccaacctccatacccctagaagcagtggaggacacatcctctaagtcagaagaaaggacactcacccccgattctatgcaagtgggttgtgaggccttcttttacttgttcacccggacatgcctcaaacgctccgccaaggtctccccccttgtgtccctcttttgcttctgctccaccttgactaaaacaaccttagggaggggcatgagacacaacgcgaggggatcgatcccttatagaatcggcatgataccaaaaagggaaggggttacacaccagggaaaaactcaccaaggtgctcatgacatcttgataaaggggagtgggtgaatcctcatctataaaggacaccgacgatagcatcgtaacaaccctgatcctggcttcaatctcggttagcacaagcggcgcggaagaatggcggttaggatcattgattctagagtatagg

SEQ ID NO: 89337 - DNA, 350 bp, Zea Mays
aaaggggaattatagggaatggtttagccagggaggcttgttatctgcaacctgtatggggattagaaaggaaacaccttctctcttgctcggccatgggcaaggccccggctctcccaaccccagccgccaccgtagcaggccttggctataaattggaggaaaaaggagagacgttcaagttactgtttgtaacctcagcctgcagttatgcttctgataggatcaccacactgccgacatgcataatcatgtccagatggaggcctccaactgcatccgcatatagacattggatggaaaaagaaacaaatttaaaatcatatgtttattttttggcatcactgtgt

SEQ ID NO: 89338 - DNA, 335 bp, Zea Mays
atttatagagacttattccactagtctaaactaaccctagatacatagagtctatccacttagccgggggagaaatgggtcaactcctacgattttgatctaaaggccacatgctccacacaaagttgcttcgccttgacgcacccttcgcaatgacgccacgtgtcgcctccaatttctgctgaaaccgcatcgccgagttttgaggcccaaactcagtaaaaccgatagatgggtggttttgaggctcaaccacaaaattgtcgcaagtagcgcaccacatgcgtgcctcccatttcctagacatgtgtccagctagtcctcgaccatgccgc

SEQ ID NO: 89339 - DNA, 708 bp, Zea Mays
gaacacaaaacaattttgcgagattcaatctttagctccctgaaccgctcgtcgaagttctagttcctgcttaactcccgtgacaactctgacgagaaattactccttgatccttcatctccagatgctcactaggacattaccgtgaccttcatcttcacgcttttgaattgtcaatcgaatcttcggttcgccgtcaatctacgaaaaaccgagaactctaacgagttcgtcatctccgtgaactccaccatagccacttttctttgttcttcattattcacagattagagtgcatctactccttctccaatgtcctaatcccacaacatcggtctctcctccctccctctctctccgtgctcctccccttcacccttctcaatgacttctacaaccgttggtctgcgacacgattaagtggattagataatacccatttgcttcaaactgcaaagtataacttccgtggcaggcccaacaaaactgaattcaagtagagcacatgtggcgtgcacttcgccaccaatcaaagtggtgcacgtggcactgtgactccaacttcggcgatgggagcaaacaatcccacctaattgtggaggctattatagctccatgttgtctgatagtgtcgaaccaccacgtcctattggttgcaatatgactagagtgcaatgcaaggtcaaaggaccaacaacaagcagagtt

SEQ ID NO: 89340 - DNA, 476 bp, Zea Mays
ggaacacttcttcaacttaccataaaactgattcttccttagggcacccagaacgagacggagatgatgctcatgcttagcctcgatctttgaataaatcagaatatcatccaggaacacgaccacaaagtcgtccaagaactcatgcaacatcctattcattgcttccataaaagtagcaggggcattagttaagccaaaagacatgactatgaactcataatacccatacctggtgcaaaaaacggtcttctcaatatcctcctcacaaatcctcaattgatgataaccagagttcaaatcaattttggagaacacctgggcacccctcaactgttcaaagagaatctcaatacgagggagtggatatttattcttgattgtcacttgattcaaagcacgataatccacacatagccgcttgcatttatccttcttctcaacaaacaatactggggaagcccattgagacctgc

SEQ ID NO: 89341 - DNA, 624 bp, Zea Mays
ttgctcactagaacaattcggacacaatgaacccacacagcgccgtggtcggcctaccctacagctgctagtttcggtaagactctttccttgtgtttgcctcgtctctattgttgtgtacaccgagttcggatcggattggggcattgagatgcctgtaatagctcactagggcgggtattgtgttcccaatctgccctatgtcgtcgtcagggcaaactaacacaaaccatgtgggagagtcccctggactacttcgctatttccgtagcatcacgtatcatcgctcgattgatagtttgggtgcctgtgtccaagtttgatgtaccatggccatgctgtcgccgcagctggcagatcaccatcgctccgggctggcacgaggagggtgataccctagccgctgatcggctagcgggcggtgattattggattgtggaatatcggttcgggtcttgtttctggatcgttgatctttgaacgtgcagtcctaagcactcctcgtatgcgtggcaagttcttagcatggatatgtgttccggttcgcgatcaaatctaggttgttggtgcttgatcgggtggcctataacgctcctagttatgcaggccgtgtctatttaatga

SEQ ID NO: 89342 - DNA, 822 bp, Zea Mays
ggaaattgtcgtggtcgttgcagccattgcgccacggggagatccagttcgacgctatagccaccgttgattggcgtgcgcgacttagcgattggtggccaccagggcggatcgaagttcgtgaagcagcgcttgggcgggattgtgccacgacgtcaccggaattcatcactggcaccgggacctccaccaccgtaccgccccacctcgcggcaagctctcatctcgtcgtgatttgtcggtaagtcgcttccagatagttccttggtctcttggcatcatgttggtcgcttcagattggggattagcgcactggggtgctcgggtccatctcaccggtgtggctccaccttgggtacaacgccgccggcctggagatgtgtcggggaaagaagaagggtgggggagcttgcgatgtgaaaccgacgatagggattagagctgggtttgggtatctggtgagccattggatcttggtgtacgggtgagatcgaatccagccaaataggatcgacggtcgggataggatctcagttttcccctttcactatcttgatctggaccgtgcaagatcgatccggcgcactgcgttgatttagaatagccaccgtcgatattagatcttgcggccatggccgtctaccgattcaacctgatggggatctaatcctaacggccgggtgatgatcggacggtcgtggtcttaggataccccttcgactcaggaatcttactaaagagtccctgaacttcctaggaaccaacccgccatcccccacgactgtactctgagtcttgggattgttatgcagaggcccctgc

SEQ ID NO: 89343 - DNA, 937 bp, Zea Mays
acacatcataccactccacctcacacacaaggtggtagaaatgacagtaggtggagtatgcattaggatacccatatcaaagtaaaatataagatctcttatgtaaacatgttatgacatagtgttgttatcctagttagcctgtataattattagtatataagttgtaattttatcttaatgttgttattatcacccgaaagtcagatatctataggttacactatcacccaaaataaaaagatcccaaatatgtcaaagtaactaagtataagattaagtataaaatggtgtttggaataagtcgtattcacgaaacaaaagaatataaaagataaagtgttcgtgttcatcatatagttatagtgttgaacattatcattaatttagttgttttccgagtggtcgaaatattgaacaagaaagatatttgtgtgacatataagataagaggtaaagcatgtgaagtgttaacgtattatatatatctttactacctattaagcaagtagtgtagaccatatgtcgtgccctcatctctcccaccgcgtacgcgtaaaccatggtttgtctcacacaacaagccccccgcacccgccgcaacaaaccccctgcatccgccgtatttgcttgcagtcagccaccaacgacctccccgacattcgtggaatcgccataacaaaccccccaccctcgccgcatctgccagccgtattctttcactgtgcacttgtctccttactgttcctaccatcatcatcattgccttcctcgctcactagccttgaaccctagtgtgacttcctccttgctttcttggctccccgcgacacccgccgcggcaccctcataccttcgtgctccctccacctctcgctccacgaggccaccgcccgagtcgtgctgggcctgccgtcctccacacactcgtgaccac

SEQ ID NO: 89344 - DNA, 695 bp, Zea Mays
cccaatcgctgccccagtttttccacctcgcaccgccaaaggtggggatgtagactacggccggatctggcctcgtctggaagtagtaggcaccgatgttgtccctggtcttcccggacttgaccagtatgaagaagtagaggaagagggaagtgcaagggccacacctacgaacatctcgcagaggtggacgaagattgctgcttggaggatggagtggggcgtgaggtgttgaaggtgaagcctgaactcctctagcagcaacaggaagaagggcgaaatcggcagcgccaacccataggagatgtaggaggtgaacagcacgaactccccgacggcaagatcgccaagggggatagcgtcggcacggattcttctggcgagccctagcgcactccatccaagtaggccacacaccagattaagcgcttcctcagacttaaagcggtcaggatgaccaagcgaagccatggcgagtgcagcggcgcgggcgtggagcagaggagcatgaaggcaaaggggcgcgaccgagtgggagcgattgcgaaaaggtaacttctgcacgcggggtgaatccgttttcaaggaaacctgagtccttgtttagggaaacccttccacgccccctgaatcgccgcaggaaatcctgctcgacgggcacctaggacccaggcagcccagtctatgacacgggg

SEQ ID NO: 89345 - DNA, 432 bp, Zea Mays
atgaaggatttaaagggaggaagctagatctttcacatcttcggacttggggctgccttgctaaggtgaatgtcccgttgccgaagaaaagaaagctaggccctaagaccgtagactgtgtcttcctgggttatgcacataacagtgtagcttatagatttctagtggtccattccgagacaagccaagtcgctgtaaatgtcataatggaatctcgggatgtggcattctttgagaacatcttccctatgcgagataaggaagtagtagccccagatggtccatctcggacatattatctgccctcgagtgtccatgaccagactccagatttggagttaaggaggagtaagagataaaggactaaaaagtctctaggtgatgattatattatttatctagtggatgaagaaccatgctccctcatagagg

SEQ ID NO: 89346 - DNA, 484 bp, Zea Mays
tgataatggtggcaagggcaggatacgccgcacgcaggtggaggatggtgacgtccatgtcgccgaccgcggacaggggcatagcaggcgacacggtggaggtggaggcaagggagagagaggctgggacactaccacagacacgagagggaagggaaggaatggaatgatgatctcacaagagaaaaggttgctggtgaagatgtcggcggccgatggtggaagggggcttgcggttccgtcgtgtcgtcgcttccacacccacgcgctgggaggacttccacacctgttagttagtggatcaattccaggccgggattcagtgttttcgtgtggattgggtctggtttctgaatacgcgtgggctaaacgaacgactatttcgttgtgggcctgtattgaatccgtgctgggatgacacccatggatcagtcgtgatctaggtcattctaggcccaaccgaacaatgcctaatggatccagc

SEQ ID NO: 89347 - DNA, 518 bp, Zea Mays
tgtcgatgttccaggagtgctccaggtcttcgccgtttggcgttgtgagcctgtaagcactgggggaagccttcgtcttgacaatgaaagggccctcccactttggctctagcttgcccctggactctgtccgggctgttcggacgagtacgaggtccccttcgctgaattccctcgggatgactgcatggttgcgccatgcttttgtctgggcttagtatttatttagagcctgtagggcgaagaatcggtcttcgtcgatgagatccttcgaagtaggctcgtccacgtcggggacggctgacggaactgttcgcggggacccatgttttatttcttgtggggatatagcctccgatccatatagaaggcggaaaggggtgaacccagtcgccctgcactcagtcgtgtttagcgcccagaccgcctcaggtagcaaatcggcccacttgccctttttcgtcgaggagcatctttttgacagctgtgaaaatttttccattggcgcgttccacaac

SEQ ID NO: 89348 - DNA, 543 bp, Zea Mays
cggggagtcaaggtcctactggcctctcttgtctacgccactcggctgtataagtatgactgacatattgacggtatatgatactagtatacggtcctactggcctcttgctatcaatccagaatacttttggtggacttgttctattcacgtatctatcgacgatcgggtcaagtaacaaagacagcattgactcgtagtatctcacgaactgggccctgtagaagaccgacttaattagcctgtttgtatcattcaatcaattgatcacaactttggagtccatgatgttcgacatatagatatcagtggtgaataataatgtctgaatgcttaaaaattgtaaaggccggtgcttaatacaagtgcttcagaatattagaacctctcgatataaaatcgtacctgtggctatagtggcggacgggtataagtattgtcacaagcggatatttagcatagccgattcggaacggatccattgccatcgctagctcttactactacggtcctcgtcaatcctcatataagcataggctgatg

SEQ ID NO: 89349 - DNA, 942 bp, Zea Mays
gtcgtcatgcacttagtgtgggtctattgagcgtcggagtcggacacaatcttgggtggtgatcctctgggttggttgtcccctgagcaattgatccttgattggcacacctccccctcaaaaggccttacaaggtccttttcgaggggaggacctccttccatcgacctagtcagcgtggggaaggtggtcattgagcttcaaacgggttatccaagtgagatctgaccgccctttggcaaggtttggtctcgacgagtggtcccactaaggggctcgacccgatgggggcatctcatttagtccttccatattcgatcctgtcttgtccctttggttggtctggccgatcaaagggggccccgtggccaccctgccagccaggtttccgcaggagaatgtgaggttcgatcatggacgtgaatacgagcaaatgacctatgggccggcttacggctcactaggagcttgctcggtccacccctcgctcaacatgagaagttgaggcgagttctagtttttacctggtcggcatgagatagttactgtgtgggtgtggaaaagtgggcagacatcatgacaccgcctggggtgggtggcttgatgggatgcaaaacggtccactcgtcgtatcgtatgctggtggtgtgatgtggtggttaaccacctcactcgttactattatgtcctctacgtcgcccctctctggcactctgccttggctggtgtaaacctgcaaagcacgctatgttccctgttcaaggcctgaggcggctctttgatcgaagtggcagattccccatgctgttcgtggtgggcccaccgtctaggtgccgttttggttccctgtgcttgtgcataaatagggaaggaaaactcttggtgctggctctgcttaccgcattctcgcgttcaagtagtcgcctcctccttcgcttagaa

SEQ ID NO: 89350 - DNA, 657 bp, Zea Mays
ccttccacgtgagcgaggaagatgcaccgacgaactgtgagttgtcctagctcattgtgccttgcaattcccccccaacgattatgtcacagctgaacttgacattaacaaacccctactgctagaataatatgctacccccttggtctgatcatcccatacttctctacctctttggcagatgcaggatgatccaaacactggagcaaattctcgctgtgtccctttctgatgagcaaccaaagctgacaccatgggtaccttgctctcatctctccactttttatttcgtaatttgctgtcactagtggacttcacacttttttccccctcgctgcagccattggcgcattcacttgaagacctcgaaatggtcagccagcaggtctccgcttccgttagtgaggtgacactagctcgagacgaaaaggccgaggtactctttaacatttggccatttggcgtttgcacaatcttgggttcagaacacttcacgcctttccttgagttggcttaaagttgctgtctatctatatttacgaatttttctgcagaagctgaaacagccttcacgcaacgcgcagcaggaaaggcaggtgttctcagatttcttctgccacccggaacgactcgagaatcgagtggaagagctgctct

SEQ ID NO: 89351 - DNA, 453 bp, Zea Mays
tcagacatgttctcgtagcttttaagctcttgagccctctacatcacaaattttccatccttaggggacatgcatggtcttggaatcctctaagtaggaccccattgcttcttcctttcctgtttcttcttgtcttgtacttcctagcaatgcaacctcctcctccatgatatacatcaaaactagctccctccaaggatatcattacctcttgttatatcacctattcttcctcatcataatcttgcaattccatcatttttagtagatgagagcattcctcaccaacactctcggacttagccaactatctgaactcttctcatttagagtggtgggactcatcatttagtaaattgttcaatttgtttcccacaatatgactgtctaaatgttgagtatggctgattttatgagtttgccaactacctaaattttcacatttaatcagca

SEQ ID NO: 89352 - DNA, 560 bp, Zea Mays
cataatctcttgctaaaattaggccaacatgatatcacaatcaagggtggaaggcaaatgagacatcacaactctttgaatatctcctacgagccccttgatggactgagtaataaagaaagtctcatcaagttctaggttatgcactgttgaagcgtatcttgcatcttgaaatttttgcacaaattcttccacccccacccttttgtcagagattcaacagtcttcacatggctctagtatactcatcaacctcaaacttcggcatcaccaacatagaaaaatcgctccctcctccttgattgtaacatctagttctcattcctatacactcttcctatgactccgattagggtctccatatctctcgccattgcctccaacctcaagcgagataactcctacccatctcttcaaccttctgcaccaaggcagttctctcctccgcaacctgttttgccccaatcatagctaagtttgcctgtttgagcaactattgctagacttcctccatctcttccatcttcctagtcaacttctcgaacactgacatcaccttc

SEQ ID NO: 89353 - DNA, 318 bp, Zea Mays
gcatcaaaacagcaccaatgccaactccacttgcatcacattcgagttcaaaagtcttaccaaagtcaggaagttggagtagtggcgcgtgagtaagcttctcttttaaaagagaaaaagaatcctcttgtgactgcccccaattaaatgaaacacccttcttggtcaactcatgtaatggggcagcgatggtgctgaaatccttcacgaaacgacgataaagtcctgcaagtccaagaaaactccgcacttgtgtcaccgtcgatggcgttggccaactctgaatagcatgcaccttagcctcatcaacctcaatac

SEQ ID NO: 89354 - DNA, 545 bp, Zea Mays
tcgcaatcgcatgtcgaccacgtcggtagaaggtacagtgagggagaactacgacatgagcgccaccgcggtggaattcactaagccacgacagccgccggtgagtaactccggctgggcctgggagatggcgccacgtacgggttatccctccccgacgttatccactccataccacccacgaatcaggacggcgactgcactaattttggcgcagagaggtcgccggcggtgagatttttctaccgtggctgatctgatccgtttgggacactgtaccatcgcgagctcccatcagagcacctgacagccaatctttggtctgatttttctctcaaatcttcatggcaactcataccaagttatgtggcaaagttgttcctgtatagtagctctacaactttgttatagcaaccctaggtagattcccactggatcttagtcgaaatggctctcaaacttggaccaaagtcactgtccatctgaagttcagactgtatcagcctgacagtccaactttgggcttcaatatctcctaaattttc

SEQ ID NO: 89355 - DNA, 890 bp, Zea Mays
actttgatgcagagagttggtcaggtcactacataaaatctgaagcaaatcgcgctgcaaaatgctctgttagaacaactaaagcaacctctgatggtacagtagcgaaaatatcccaaggttcagtccccctcgccgccggtgatccgcgcacccggattcacgccggtcgccgtgattcgtgtttggcacgcagtggatattcacggggaggtaaaaagatcgtgcaggtgcgtggatttggtcaaggcaaaggcttatcaccacgcttgtaggcattgcgacgtggccggaccgccggtactgtccggtagtgaccgtggcgcacttaagagtacaatcgtggagccattgcgccggtgaacgccacgaattctttgcgccagtgctcttccccctctccgaccgccgcgcgtctccttcaattagccgccaccgctcatgaatcctataaattgagcgtgccatcagctccgctaggtattcaagcatccagcgcacccactcgtgtctcagattgttcaccagagagctccagtttgggatttcccccatatcggccaaagaacaccgtgtgagtgagctcgccgtggccaaagctctacaggtccgttcacccccactgtttcctcatgtcagtacccttatgtgcccttgatgcttctcgacccggccgattaagctagaacccataggatcatcgggaacacttcaagttgtccattgatcgcactttcatcatgggcagagagattaggggctagaatcttgaaattgatcgaggggaaatggttattaggggtcagattaggtgtcaaccgctccagagcaccggtagttgagttatccggccagtatgagctcgctggagttcctgcttccccgcccac

SEQ ID NO: 89356 - DNA, 394 bp, Zea Mays
cgctcatggttgtcgtcggtcattgacgaacattcggcagcaagcgccttcacgaatcggccacacaagaaatacatatggcagaacccgtcacctagcggtacctccaatggtcagagttcccaatcatcttcgattgttgtgatcacctagacgagatcccgcatcctaggacctaccccctcgtgatcgattcattcgtgggctcaaagcgcgtctccaaggtactcattgatggggaagtggcctcaatgtactctatattaagaccttcgatggcttggggatcgcacgctccacgttgcgccctagcttggcgccgtttaacgtcatcatgaccggccgtcaagcctacccgctcagacggatcactctacccgtcacattcggtgac

SEQ ID NO: 89357 - DNA, 368 bp, Zea Mays
gtgcggaacagtcaatcttcagaggggaatccaaacatttttgtcggtaacatcacaatacagtaaggaaaggcaaaaacatggctactgtcgagcacataacctttgttattattgctctgaaccctttgacgctcaacatttggtcaagtgcttgaaacaaccacaagccatagtgcaggctatggttgtcaatgatctagatgttcttaatcaaaactagccaccaaagtttatcttatctcactgagcaaaatttacattctaacatgcaacaaaaagcaatgagaaggttaatgggtttgcactttaaggtcatctataagaaaggcaaagaagatgtagtcgttgatgctcttcctagagtt

SEQ ID NO: 89358 - DNA, 581 bp, Zea Mays
gtcaggtctgcctctgtggcctgcgggctgaaccgccgagtgccgacgagacgggagtaagatacagaggcagtgagcttgccgcaatctccaatatttctaagagcatcaccaacagactggctaaacagactgtgcttggtaaagaaatggatttcctgtcctataagtctgacaggtttttgtccatgcgaattcagggttgtagtagtggaaaacacataccattgctaatttttggttaaacatgtgcatttgctgtgtaaaatccactctgcactgtccaaataggtgattaatgcaacttttaggatagcacatgtgtagctattcagtagcaggtgtagttgtctacacgtaattttcgtagttgtatcctatgtgctaggataataaatccaatgttatttgttatgaagatacaatccctttcatgactaagtacttttagatttgcttcccgcttgttggatagttgggtatatgctgttcagtggcaggtgtaggtttatgtccttgattgtagatggattaagtagctatctgttcaaaaaatagtacatataatcttgttcctaact

SEQ ID NO: 89359 - DNA, 612 bp, Zea Mays
attttggaagaagtggccgagctcttggatgaagcaatggttctacgtaaagaatgatctgaatcagagagaaggatgtgaggggcatcattcaacgtcccaattggtcgcgtttcggcattagaagaccatcaatcgcaattgggaatgaagtgcaagcgtgcctaatggctttcaacactttatgtacctacatcagtaccagggatttgatacaagaacacattgctttcaaagtatggcctcctgtcaatgaatgggaaatgctgaaggagactgctgctggctctagccaaggtggcttggtttatcttaagtatacctttcggtatagaaccaatttgacaagccaaatgatgataggatagacgctatagaggtaaccagtgatgagctacttggagcctactcgagggcagaggatgaggccatgactgttgccttcagcgctcgaggaaaaaggagactgaatagggtttttgatgtaattgggtttgtttatcctgattattgttttcctgtccaaaggcaaggaggaaaaaggaaagttgctacttcaacctctactggtgcgctgaagccgaagagggccaaggtcctgacacataggcc

SEQ ID NO: 89360 - DNA, 409 bp, Zea Mays
gtcaggctatctgggactgaattctggtatgacagtgtaatgaagccatatttgagcttaaatttggtcatgatccagtcattatctggttatgattactataacaagattaaagctgaataatagagctacaacttctttaaagacagattgtcaagtcattacatgggaaagggagatttctgctctgcaaatctgggtgtcagtccaactgaatggagtttaccatggtacagtgcctgaacaagatcagaccgccagcgcatctcaccgccgacgatccccgccacgattcgtgtcgccgccgtcctgatttgtgtgcggtatggagtggataacgccgggggtggataactcgtacgtggcgtcattccccgagtccaaccggagtcctcaccggcggccaccg

SEQ ID NO: 89361 - DNA, 313 bp, Zea Mays
gcattcctgtgtgttcttaaagctcatcggcccgaccaattgctctaaaccagagtagatcgtcgggaacactttgatttgtccccggattgcgcggtcaccgtggacagagtgattaggagttagaatcttgcaattaggtgaggggaaatgattgtcaggggtagaattaggtgccagccgagcctacggtccggtccttgtgtatctcggccggcacaagctcgccggaagctctgcgcgtcgccgtccaccgtcgtggacctcgtagtgtgaagggataaaacacaggggtttatttgcaaacgtcagc

SEQ ID NO: 89362 - DNA, 426 bp, Zea Mays
tgatattgtggcaggttaacccattctttcggttgaacaatcgatgttcgagtgtgtgcttgtgcatgctatgtgggctgctttttcggatgcagtcaagcctgttttccttttcccctggatgcctgcaacctgtagctgatccagccatgtcctacctataggtccttgttgtatttcttttctttttcctctacttgaaattataacagctttcattttttctgagcccactaaatagagttagaacgtgtgctggcgcatgcttctatctgatatacatgtaggtgttgatatattcacacatgtatacatattacatggaaaatatggaaacacacatacaagagataatgtgctttgcaaacaatccaatcatgcatgtgtgtggttgtttaaccttttttcttttgctgaaccacgtcg

SEQ ID NO: 89363 - DNA, 570 bp, Zea Mays
tgcttgtatttcgtcagacacttgtaagagcttggtaagatacattagagcgtgttcctatgttccacccgagaggagcgtgtagtgagattattagggataaccttcaccatttgtttcatgtttttgtgtttcgatggcaagcgacgacgaagaagcaaggatccctacagacttcgatgaatgtgttaaccgccaagatcttgaggcaaacaacaagctcctgaaggagcaaatggaggagacggtccacaagtcagtgcatgatgccttcattaacatggaccttggcaggacttatgagaggctagatcgacgattgttccagatcgtcgacagacttgctgtgttagagacgcaacaacaagcaccgccaccaccacctcctcgtccacgtcttctcgatgatgcggtgattgatgaaggtaattatgatgaagcgtcaccagagatttgcggttccatcatcgtcttcatcaaaacacagaaggtatgccacaccgtcagcaaggtaataacaatcgtgctcctgacgacccttatgctaagattaaattttctataccatct

SEQ ID NO: 89364 - DNA, 415 bp, Zea Mays
tcggcagtcaagcgtatcctgcgctacctccgtgggacacttagtcatggtctcctgcttcacccattcacgacctctgctctgctcgtctacacagatgctgattgggccggatgctcggatactcgcaggtctacttcaggtacgctgttttccttggagacaacctcgtctcctggtcctccaagcgggcagcctatagtgtctcgctccagtgcagatgccaaatacaggacaattactaacggtgtcgtcgaagcttcctggccgcgtcagttactacaggagcttcatagtcccttgacaaagagctccttagtttaccatgacaatgtaagtgttgtctacttgtccactaacccggttcagcatcagcgcacgaagcatatcgagattgatcttcacatctccgcga

SEQ ID NO: 89365 - DNA, 531 bp, Zea Mays
aacatacaccacctttcgccatttttgaataacttgcacgacacacagctattgtaacacatcataagtacattcaaccccattagtagagcaccagcacatttccgaaaatttcccgagactacgacgacaaggcatcgatcttaccacacacataaagcaccacaagcatatttacggaacctatcggttaacttgatcgacaccatacgcatgttctttgtccttcaaaatttatcgcacaacaggaatcatctcacttgctaatgacaccaacaatacctactgatctattatttacaacacgaacacagttacacgccacatactagtttctaacataatcctcacataactcgtaattcaactactcactaacaataaatcacgcacgatagctaccacattaaccggttaatttatttggaacaccgcccgcctagcgtaccattagtatatgaactccgacactcatatcttaacaatacatcctccacgcaaactagcattttctaaactactcgacacatc

SEQ ID NO: 89366 - DNA, 826 bp, Zea Mays
atcaccgccgacaaacgggcccacaacctcatcattcaaccaagggctcaaaccctagaaggaggggaaccaaccgcatgacaagcgctgtgacaagaggccgagaggtgaagtccatgcgacagagccaccgatagctcgcgcgcgcagcgcccctcacaaccacaatcgacggatgctggacgagattctcgatgacccatgtccttaccacaaggagatgtgtcacactctgcataactggagagacttcaagaacttgcccagcgatgaccagccctttaatcactccctcctcctctgccccggtaggatcaaggcccgcaaactcagcagtaggggtgggtggaggggagtttcccagcatttacagggaattcaacatcatctatgggagccacgactcctaggagaacaagagtaaacaaaagatcaaccatcgataggtcatactggccatgaccgatccaccgacgccataccggtggttggagacaccgatcccctttagttgagctgaccattggcttaaatttgatcatccggacaagtacactctgcttgttaacctagtgattagagacaactgggtcaagaaggtccttgtggatgggggaagcagcatcaacgtcacattcccctggaccctctaggcgctcgggatctccctcaccaaactccaccaatcagacactcccttcattggtatagtcccaaccaagggggaataccctctaagtcatgcatctctacatgtgacgttcggcacaccagataactaccgcaccgagtaccctcgctttgaggtggcccaattcaactgcgc

SEQ ID NO: 89367 - DNA, 274 bp, Zea Mays
atcgaaggccatgaccccgcaagaaattaaacatgagtccccgcgaacagtttcgtcagctgtccccgacgtggatgaacccacttcgaaggatcttatcgatggagaccgtgtcttcgctctacaggctctaaacaaataccaagcccagacaaaagcatggcgcgaccacatagtcatcccaagggaattcagcgaaggggacctcgtacttgtccgaacagcccggacagagtccaggggcaagctggagcccaggtgggagggccctttc

SEQ ID NO: 89368 - DNA, 872 bp, Zea Mays
gtcaagataggctacttcctgtttctgttttaccaggttcgaagcggctcattctcttgcagccacaaccaattctagagttgtaactagagctatcgatgaccaagggaaggtgattaattatcatggaggcattgctctttccaactcactagattgtaattcctagccaagaatgtcagtgagagaggtttggaagcttgtatgtgctcaatatatggttcaaatggccaagcgagatgttcaacacccggactccatctatttatagcactccccgtaaaactagctgttatggcaaactgccccctttctgcgcactcatggacggtgtgcgccctatggcctgatggtccaccccttactttaatggctactttccatttgaaaagtttttacagctatcagaaaaattgaggtgtggatggtccatcgaccccagccgaacggtccgccgaccccaaacctgaacaccccaacctctgcttcactagactttgcactcctgtggatggactggcacctaggcacagacagtccatgacctaggaagatgcaccatccatgatctgggcacgaatagtctacaagtcaactacgaatggttcacccctttggtcggacgatccgcacagtgaactagggactttgctaaacagtgccctactagacaatactgtcggacagtctggtcacctggcccggatagtctgcagtactaatcatgcggaccaaacaaaaacacccaatttatgtccacgtctttgttatccctatggacagtccgccctaatggaccggacggtccgcagtacaaaatttagccttttttaaaatacgcttttgaaaagattttctttcgcatccggaag

SEQ ID NO: 89369 - DNA, 448 bp, Zea Mays
catttttacatttagctccctgctcactctactaactactgagtgaaccagctaaccctaaggcattcttgtataactctgatccgacgatccgcttcctacctagacttgtcgtcatcgcctctcgcaacctccaggattctaccacgtgtcgcatgcttccatcccgggttttgaggcccagacccaaaaaccgcctcaggggcatggttttgggctcaaccactaaacctccacgagtagcatcctttgacgtgttccccactttctgaaccgtgtccagctagccttcgaccacgctggcccacgatccacctccatgtacactctagtcacccggcctatggcccaggtgtcagccaccaaggctagtcactcagcgacttgggtccatgggtctaagcctcgacatccatctttcaccgctccacttgtcgtcgcctcaaca

SEQ ID NO: 89370 - DNA, 706 bp, Zea Mays
cgaaggttgagaccgaagatcaagcaccagaagaaaaggagggtctttctagcaacgggagcagcgagaacttgactactcaagagaaggatgaggaaataagttctggtagggttatagagagagaaagtgaaaaaaacatagacttgttccaaaggattttcccgagcaggcaaggcaccagatacaaagaacagtggccaagttagcattccaacctcttcatcaagcctatatcaaattatggaggtaatgacaaagcaaacccccatgatgcttttgagtcctttggtgttgatttagtaaattttgctcctccactgaagcaggccggtacgatgatcttgtctgacgacacatgcgatggcaacctggggaagtgccgaaggggtttactcgcatagtgaagcctattgatgacattttcaacaatatattcaaggaggcgagtactaaagctactgggaatttgtcaaaggacgacaaagaggtaagcatagaagaaactagaatagcagccgactggtagcccgctaaattatcgatagaaatcgtttttggggatggtgaagaggagagggacaaagataaagaagaggagttgatggacaaagatgaaaaataaaaagaaagagagaaaagaaaaaagatgctacagtactctaaattgccctatcgttcgaaagagataagaggccagagaaag

SEQ ID NO: 89371 - DNA, 1517 bp, Zea Mays
aactcccctgagcagccgcatcttgactgcttgctctggctctggaataactgcgccgtggcgaaccggaggtagagctggaggctcttgcggaggcgcgccgtggaacttcttgagaagtcccacgtggaagacgtcgtggaggcgagcttgaggaggcagggccaggcggacagccacggtgttgatgcgctcgacgacgcggtaagggccgtagaaccgcggcttcagcttgccagcggacgagtcgggcatagaggccgtcgggcgctggcgtagacgaagcagtacccactcgccgacctgcatgtcgatgtcacgatgtagacgatcataatgatgtttctggacagcctgggcctactctagccggtgtcggatatctgtcaggaactccgcgcgctcctccaaagtcctggccaaccgtaggcaccctcgttgccccctgctcgtaggagcgaagtgagggagggtcgcggccatagacgacgtggaacggcgtgtcacgcagggacgactgaaaagcggtgttgaagatatattccgcccatgggagccagcgcaaccagtcgcggggtcgatctcccgtcaagcacctgtgatacatgatgatgaccttgttcgccgattcggactggccgtctgactggggatgaaatgtcatggtcatctgtagcttggtactgctcaagcgcatcagctcgctccagaagttggaggtgaacaccgagtctcgatcagagacgatcgactggggaatgccgtggagacggacgatgtcggtgaagaatgcctgcgccacagactcggccgtgtacgggtgcaccaggggaacgaaatgtgcatacttgctgagcggtctatcaccatcaagatgacggtcttgccgcggacgcgaggcagcgcttcgacgaaatccatggcgatgtccgtccataccccttgcggcactggcaggggcaacagcaagccggccgggtgctgatggtcgggcttgttgcgttggcagactgcacagccacgaattagatcctgcaccacacgtttcatgtgagaaaaatggaagtcgcgccggagtcggtgcagggtgcgttgtacgccctcatggccttcctcgtggaccgccaccaaaatctcctggagcagcggggaggcgggcggaatgtacagcctgcccgcatagtggacgaggccgtcggttagcgcccagggccgcgacctggcgccgctgctgatgtcgtgctggagggccgcgagcgtggggtcgacagtgtgtgcctgacgtagccgatctatgaagtcgaagcgtggtccggacaaggctagcaccaagccctcctccggtgtgtcgcggcgtgagagcgcttccacgacggcattggtatgtcccggcttgtactcgacggagaagtcgaagccgagaagtttgcccacccagtggtgttgtggtatggtggacagcctctgatccagcaagtacttgaggctgtagtgatcggtcttgacttcgaaacagc

SEQ ID NO: 89372 - DNA, 522 bp, Zea Mays
gccagagcaccggcgatggcagtgccggtgcgccgccgatttacagcaacaatggcggttacaaaccgccgatctacaactacggcggcggaggttctcgttggccggcgacgacaacctcgtccgcgagcagcaaaagatgcatgcagccgtggctcttgctagtgctcgtctccttttctctgaaggcgctcggctgatcttgttcatgcaatgccttctcgagaagagtttgacgaagaaattaatggaagatcgatctgatgactggtgaacatgcatgttagcagttatggcttctggatcgacgaaaagaccgcccgatcgagaggctgaagagggccttttctggcatttagttctgtgccattcgagctgatgagagaaaccggctggctaatagctaagtattggttgggtggtagataagacattagctgatgatctaaacaatagctgattttcagcggctaactgttaggttctagtgaacaaagagaaaaatgttgtatagattcaaac

SEQ ID NO: 89373 - DNA, 346 bp, Zea Mays
gaaaagaggtcatctattttagatgtcttgatcaggaccatgattgtgattgaaacacccaacaatcaagaatatgcaaagtttctacacctgttacctaatggatcttttgtcgacaagccagatgaagaaaatatgttgtatcttacgaagaaccacctaatcaatccataacattagccaaacctatatagcttctcacccaaaccccctccactatcacatcctcgaccgtacctccaccaaaaatcgtagacgcccaaaaacctacatacgccacaagtcctgatttcctacaccaaaggatcttttctccttcatcaatcctacgtgatttctttcttct

SEQ ID NO: 89374 - DNA, 387 bp, Zea Mays
ctaccactcatattcacctctggctcctttgtgctctggtatctcactcaatattcgatgtggttgattttctgatctgtgagatagaggatacaatgttggatggtcttcgggctcggcgtcagctgccatacgctcactacctctaccatatctttgcttagttgatccagcatcctcagttctaggatactcttaaggcctccggactttagtttggtttttactgcctagctcctgaggatactgctccggctccagttgatccaatggtaccagactttagggttgaggatgagaccattcgatagtttgaggatcagggtgtagatgcagatacttctttcgatgatgaggatctagggattcctgaaagggaaatgtgcc

SEQ ID NO: 89375 - DNA, 666 bp, Zea Mays
attagcttcatctgaaaggggtacgcaatctaaagcctcggatccagatccaatgggtgatattcaacaaagatgcgcatcagccccaacccttcgatccgatcggacggtccacgtttattttgaacccgatctaatctgcgccatcaaacccggatccgacgcccgcggttcatcttcttccctctaacctttctctctcactttgcactgacgaaccacaggcggcggggtgcgccaccacggtggctgccatggccggccagcgcgccaacaaagctgtacctatgcccaaccgacgctaatcaacgcgggtattaatgcgaagacgacaggggatcacataccgtagctggtagacgatggcgtgctggccacatcggattgcagtcaggcgacgaatcacgaccccccggcaagcaatttcacggccacccgacccgtaatccccccaatgaagcagggcatgccgtccacacaccccggtgaagtccccccaggctaccaattgaatctcgagcaccagtgtgggcgagatcccccgcggcgggactttccacagcgccaccacactcagctcgccgtagatgtccctggtcggatggagagtagaggggaaccgggacacgtatatatgcacgatgttgagagcttcagcgaaatccg

SEQ ID NO: 89376 - DNA, 434 bp, Zea Mays
aattttgctcatgaggcatgagtgctcttgaggcgtaagcaatgactcgattgtcttgcattaagacacaacctagtccagtgccagaggcatcacaatacacatgaaaaggcttgctgttgtcgggttgcgctaacactggtgctgtggtcagatgcttccttaatgcatggaaggaatcttcacacttctgactccaaacaaacttggcttctttcttcagcagctcagttataggcttcacaattcgagagaaatgcagaataaatcttcggtaataaccagctaatcccagaaaactccgaatctgacgggcagtcgttggtggcttccagttcatcacctcttacaccttatcaggatcaacagctattcctgcctgagagatagtgggacccaagaatttgatttcctttagccaaaaatcacacttt

SEQ ID NO: 89377 - DNA, 420 bp, Zea Mays
cgcgagcgccgaaggcagttgtcatggcttcgtcctctgccttcgtataagctcccaatagctcgtcgctggtagcctcaatagcctcaagccaatcatcattcggctcatcaaattgacttctatagcggtaggtgtatcttagataaactagaccaccttcgttggagccagcagtagtctccttcggcatctcccagtcatttacaagcggccacaccttgtaagcaatatgctcttgaaccaagtggtgccaatgtaagtacacaccgtgttgaaggccatcaaacatgtttgcacttcgttcccactcgtgatcgatggccttctgatgctgaagcgtgaccgtatggggcgctggattgtaccccttacatcttccctctcactcagatcattcttgacataaaaccattgctt

SEQ ID NO: 89378 - DNA, 885 bp, Zea Mays
gggaggggcaaaaagtgcaagtttagtcacatgtagtcaccccctttgtgactaaaggtataaagtctagaaggcctcctatattcaccttgtttagcactttatgaactaaaaatgactaaactttagtcactaaagatgagaatcaaagaggattttaggccctgtttggtttagctgtagattcctgaaaatctgattctagctatgagccgtggggaagctgttgtgaactgtgagaaagttggaagctatttggttgaaataactgtgagctgtagattctataaaaaatatccatcattatgacagtgtgaagacggtatataagaaatatttgttatgacattgcgaagacggtatatatgctaattgattggattaaaaggtagctgatacaatagaaatatgtaacctatttttcatatgactatattatcattcagtaaccaaagcattagttatattctcacgactcgtgttcatggtaatctcattctcctaatcagcaatgtcatcctcttgcacttgtgtcgtttcttggacctcggtgtcatcctcatctacaggcatatagtcttcatcttcatcacatttctcaaactcatcatccctcaatgtgctattatgaataaaattatgcaacgccatacaaacaattatgatatgcaaacaagaataatttgcttcaaaacaaagataaagattcatggcagcttctttatctcatgttccctttgtaaccaatcaagtctcccttcagttgtccctaacaaactgaggaccttcctaagttcaggtttcataatgagcaatgttgatgaatgcataagggcagtttttttcttgcactccatgttctttcaccatcctcattgcctctgc

SEQ ID NO: 89379 - DNA, 403 bp, Zea Mays
ccaaaactagagatgaagccgccaagtggcggaaagacatggagaaggcctaaggccgatttcgccctaagcagggcccagaggaaggaagtacttcagtggatcaagatgttgatgttccctgatggttatgcatctaacctgagtaggggggtgaacttatctactatgcgagtcttagggatgaagagtcatgacttccacatatggattgaacggattcttcctgcgatggttcgaggctatgtccctgagcatgtctggctagcgctttcagagttgagctatttcttccgtcagctttatgcaaaagagttgtctcggaccgttgttgcagacttggaaagattggcccccgtgttactgtgtaagcttgagaagatatttccacccggctttttca

SEQ ID NO: 89380 - DNA, 473 bp, Zea Mays
tggagctgtgtgagccgtggtacctgctacgtactactacacagtgctgctactgctagctagcggagaaaggaccaccagatagattaccgccaacctcttgttggaagctcactttggtactgtttggagtttagtcgttaaaatacctttccgtgtgtgaaacgaagagtggtaccgttccgtgtgagaaacccggccgggatcggagcttgatggacccacgtacgaatttgttgcatgagcagggatgatctatagccatatcccgtaacacacccacggctaggttcgttcatggggagaggggggtcgtccttcgattatgagttcgccgcacgtgctttaatttatcctgcgccgccgccctcgtcaatccccacccagccggcatgtcgcgtagcgtacgtccatctcaattaatattaaacctctcatgatcttctttctgcttctcgtgatgatgtgcttgc

SEQ ID NO: 89381 - DNA, 593 bp, Zea Mays
ctacataccttgacttgtcggagtgcatgcaatgggtgtcattctcgtgatccctccataataatgcaattattttcgcacgcatcaatcttcttatagttcatgccgagacctgagataatcttttttagactgatacaagttctctggcaaagtcgtgttatgacctaaagtatagtcacgttggtacccttctgcacctttgcatccaaggcttctagcaacttataaaactgctacacttcctccaacgggggttgctcggtctccagtgttggatactcatgtcgaatgtcatctagcatgtcctccattcggtctacgtccttgtatgtgttcgactctagaggagcatccacctctccatgcttgcaccacaccagatagtctagcttaaagccgtatttgcaaatatgaatggagaggtcaaacttgtttaatcggatcagattttgagacctagtacacggacatttcgccacacgaggctccccagcaaatgcacatgccacaaatttgtcagcaaccttaacccatgcataagagtgcactagagtgtcattgttgaatccatcatacataacccttcttcg

SEQ ID NO: 89382 - DNA, 592 bp, Zea Mays
cgctggaccacccatcgctcgtgcacgaggggcaccccgtggaggcaagcggacactggatgacatcctcgatgcctagtgcccgtatcacaaggatatgcgccacaccctgcggaactgtagagatttcaagcattctgtcaagaatggccgaccattctagcctctaccacctcccccaccacgaggagggcctggcaaggccaggcaggctcgacaataggaagagggaggaggtggagcattcctgcgcattgacggagaggtcaacatcatcttcggaggacacgggtcacaggagaacagaaggcagcaaaaactcaacgaccgacatgtactggtagcaaccaccagtaccccagctccctagcggtggtcggagttcccaatcaccttcagccgagcggatcaatggctcaacttcgaccatctgggcaagtacccactcctcatcgatccaatgatccgagagagcagggtaaagaaagtactagtggacgggggaagcagcatcaacgttaccatcccctagacgctcctaggtttgggggtcgagctcaaagacctcaccgaatctgacaccccttccttc

SEQ ID NO: 89383 - DNA, 475 bp, Zea Mays
aaaaaagatgaagatgattatgggtcactggagcttcaagtgagttcacaaaaaagcactatgggttgacaaactagttttttagttggtgtataaatagagggcgtgtctaggattgtcacatctcttaagaccctatgcaccagacatgatactcaaagaggttgcaaatgcaattaagtcgggttataatgcacttaacatgtctggtgtaacactagtgctaacactgtataccccaagatcaatgatcaacaagagttagtccaacgactggtacacatgaaacactcctcaaacaagtctagtgcacacaccagagtattcggtgcccttttagaaagtctggtttattccaatggctagtttgaacattgggggctatatagccccaaccaaccatttgagatgtataggggctaagaaacaataatagagatttgaaactccatttatatagctctagacacccaag

SEQ ID NO: 89384 - DNA, 474 bp, Zea Mays
cgcccatatcatatccagaggctaggaatggatcacggccacggcaaactgacgtgcgagcgcgtccactcgatcaacgatcgacggtcgcgatttaatgaagccgtgcgtgatcggcactgacggatctaagatgtatggcacggatcaaatctcgtgcaaatgatgggtgtgcccgatcacaaccgttgattccccaatctacggacgacgcatagtcttcctactctctcagtaccgagcgacggccgacgaccagggcggcggcgccatcaccggtgaactcccaggcacgccaagaaggctctatgtctaacgcgattcgatgcgaaatgaagaggagaaggtggcgagcacagtggtggaaactttaccggggattaggtcacctggaggctcgcctacggcgcacggcagaagtctgcgggtctacgatgacggtgagcaattcgttgcccggtgatcccaatcaac

SEQ ID NO: 89385 - DNA, 378 bp, Zea Mays
cgtgagaagttcagtggtttggaattcttggaacaaggcttgatatgaaggtggttatgtgaatatggcacatggagctttatgtatggagacacctttggacaacagacacttgtggaggtttggtttgattaacacaagacaattgaggatatcacaatgtataaccataaaacaacggacttggacttagaaacacatgaggttatatggaaggcatgaatgaaactcatgtgtataagccacaatcagagatatgattaacttgtggctttgacttgggtggatatggagtggggaggctacttgatgcttgggaaaaacatgtgatgaagataggtgttgttttgaggttaaaaggttggttgaggcatagac

SEQ ID NO: 89386 - DNA, 740 bp, Zea Mays
aataattggtgggagctttcctcactaacctaaccggccaacaactcacgatcgagtgtcatctcgccagacactcgtccacaagctcgacgacgcctagatgaagctgacgctgaggttccacctcactgccacccccgcaacgccgacatcggcctcaggtccggatttggacccgcagcatccactgtcgttcccgaccacgaggcaccatcactagcgatggcgtcgccgagcggcggtgagtctccccgtgacgcccagatgaggttgacgccgaggttccaccttaccacccaagtgatgtttgttgtttcgtatatatgtttcatactaatttttcactcccgcggcaacgcacgggcatgaacctagtgaacacatagaacaataatggagtcttggaagagttccgggaactctagtatcttctgagcaacgtgtactaatgattttcagatataatgagaattaatgcacatataaaatatacgcctatatgtaatcaagtgtcttagcataaggtaacatccatatctaaattaaactttcgagagtggacatccttagcttcaaattgaacagattaaggtcattgaaatcgaatagaaggtgagggatttgaacaaattaaggtccactgtgtgaggcgacaccaaggagagcagagagttgttgggggaagtgatttagggggtgtttaggagagctctcacgactctgctcccagcgagaatcac

SEQ ID NO: 89387 - DNA, 1345 bp, Zea Mays
gtgcgcgctacggtgaacttgtaccggccacaataccgaacaactcgtgctctaatatggtctatgccaaattctaaccttggcgatccactgggaatcactaatttaacccgaacgcagctctagagctcagtccacgcacacccgtggagcttgagacaatcccgacgcattcctagtgatctagcgtggtatagcttaattggttgagccgaggagcatcacaagcatgcgagagtgctgaaacacggacaaggagggcgagggaggaactgagagcggctgatcacggtggggtcacacacggtggcgtagacggccaatttggcggaagaacgaaattctccggctatggtggctaatcgaggatgagggttggtgctctggcttcgtaacaatctagcggagctatttgtgcactcaattgatagtatccgtgagcggtggctccgaatttggaagagggaagctggcgaccgaagagaggggtgagtcaccggtgcaaactaccgtggcgttcaccgggaaaaaggttacggctgtcacttgtttatcctccacaacacacgacaacgtggtagaatagcttaaggcgtgtcgtgaccgaggtaaatggtggcacgacgacgacggtcgtgtggccacgtcgccggtgcaagtgggtacggtgaagccggctcaatccattccccctctgatctttttgcgtcctcggtaatatcctccccgagctgagcatgaatcatggtggacaacacggatcacagcgcggatatcatcggtggcgaagttcattgaatctgatcttgttcagttattataccatcgcgaacacccatcagtgtgtctgacagagcaagttagagggctttattctccaatttctatacaacaacccattaatccgtctggagcaaagttgctcttctaaaaaccagctttgattttgttatagcaaccttaatcaaacatccactggatcttactcaaaattgctctcaaagtttgtcccagttcactatcagtcgaaattcagcttcagggttgactgacagcctgactttaagcccatttatctccattttcatatagcatcaatgcttagtctctgaatcaaaattgcacccctaacattgctctataagtttgatgtattgacctagagcaaaaccttcatggattaagaaatacaaggccccaaacttggcctaattacactgatttttcagagttaaccacatagatgctcttgaggctttttgcaattaagtccaatttgttccacattactttaaaatcctccaatttaaaagttacttagttttttatattctaccacttttct

SEQ ID NO: 89388 - DNA, 446 bp, Zea Mays
cccccatcggattccaatgttctcattagatctgatactgccatctccgagctaatgttccgctgctgcatgttctcatctcttggacccaaacgctcatgaactgaaagacgtcttgaatgaccatcttccccccccccctccacgacgcgaatggggaggtcttgaaaaaggagatccctggtgcacattcccaaaaccatcatcgcccgaagtaatagcccgaaggttaggatcggatccatcctgcctcggggcagacgagaatgtgatgtggattggatccatcaacgttctcctgccagaggacaccccatcaacggcaaagggaggctcgacaatccaaagctctcttgaagcagtcaccaaggacgtgtccaaacaccaagcagaacaacggtaaacagccacatcctttagctccaaggtgtctggatgaacctgat

SEQ ID NO: 89389 - DNA, 427 bp, Zea Mays
gtccttcgctcaccgtggggatcggaacaggacctcaagcgctcgggtccgtggggctcggattgagctgttgcaactaaatcgaccgagatctctggcgatggggggaggataaaacctggggcctcaccctcctccatccagccgagcttggcggcagacctgaaagcccgccgctcacccacaattcccagctgcatccggcgctggcgataccaatccaagaatccgggcaccatggtggagagagatgaagagcacccctgtgcggaccttcaacgagcgcgtgatggttggccttggttcgttgatctacgccgggctccaaagcttgcagtgtcgtcggtgggcggagcatggccgccttcatcggacccccatgacccgcgcctggcggggccgtttctgttggacccggggcctatat

SEQ ID NO: 89390 - DNA, 462 bp, Zea Mays
tctcgggataaaagttcttaagactcagggcacagtggagagggacggcgggtttattttaactttgcccagggttcctttagcaaaattgactcggctgaagggtacgcacggatcctgatcgtccgatcaaaaatggacagccacgattagaattgagccgcggtgaaccggtacgcacaagggaccctcggatctagatctgacggtcccggtttaatgaatcccagagttatgaccatcatccgatctcgatcggacggttcccgttaccccaacccgaaacgctacacagtcaccacatccggccgtcaaaaagagatccaacggtactccgccatcgtctttgacgcgccctgtttcccctccgtccgccgcagcccgaccatgatggaaaaccccacaccggtgatgaccgccccgaccagacggcgcacccaaaactcaattaaaaggttctac

SEQ ID NO: 89391 - DNA, 633 bp, Zea Mays
aaagaattcagcgctggtgaaattcaaacctaggtctgtgatgatgctattaggtatcccgaatcagaagatgatttcctggatgaaccctattgctttggctgaagtaagggtagcgatcggattgcatcctatccattttgtgaatttgtcgatagctaccagcacatgtgtataccctccttgagctttcttgaatggtctgatcaagtccaacccctagcatgcgaagggccaggtgactgcagtagtctgtaactgctgtgctgacagatgttgttgcttggctaagaattgacatgcctcacatctctggactaggtcggctgcatctttattagctgttggctagtagaaaccagctctgaaagctttgcccatgagtgtccttgatactgcatgcactccacattgccctgcatgaatttcctccagtaaacatttcccaacacctgagtcgatgcacttcatgaagactcacgtggcccctctcttgtacaatacatatcctatgactgcatagtgaaccgactgcctcgcgatgcgctcagtagtgtccttatcatttggttcttcctcattcttgatatacctaatgattggcatcctccaatcattccgatctgattctgc

SEQ ID NO: 89392 - DNA, 542 bp, Zea Mays
cggtggtggggtatcaagaacaaccctcatcacattcatcatatgacgcttcttctgggcattccccccaccgggtgccgaaggccctttctctgcctctacttcaacagtttccctagcatctttcttctgtggctgtaataagcttgttagctctgatcctagaggacttagcatcgtgaaaggcaagggttcagtcattacctctaaaatttctatcacactaatagaagtttctgaaggggtctctgcaaaatgcttcggtggagaagatctttcttcttcttcatggctcgatgatataatctttcttttcttagatgctgaaggttctggtgtcaactttggtttctttgttaaccttttcttcttgtccttctcgatagatctttgcacttgtcttttcagaatactcacaacccttttctttttcactccctcggcctcttcatcaagtctatcatagttaggatactcgaagccaagagcatccatcacttgatttagccttcgtttctctcgtgtgccaaagacagcggtca

SEQ ID NO: 89393 - DNA, 370 bp, Zea Mays
gacagagggggaatccatctgatcttagcaccaggaagaaatggtttttgtgtactgttataatttgaaggaacgcatgcagtaataagccaggacagacttatgtgtgctattcaatacgaggggcatatttagtctcaactgtgcccttgtttggatcaaaagctgacttccttcttggtccacaaaaattaggttaaacaaagactactttttctttctagagtggccggagggatagaggaggggataggtccggagaagtggcgaagacggggagggatagaggagggcaatgtcccactaatcaccatgtgaataatgcgaaatacctcctagcagcccctcctaatcaccacgtaaataattt

SEQ ID NO: 89394 - DNA, 664 bp, Zea Mays
gcttagaaaagtttaaaggaaagaatggaaggagtacaacatatgaactattgtccctaaacatactaacttcatgctcttacatgatattagctatggatcacataaattgaataagttcaaaggctaaaacagtaatggctgagagtgggatgtggtctcatatttgaagcagctgacaagtgacaaagagtaatataatgttgctactacactgaaaaataattgagtagatgatgcatactgaatatgtgtcgacagtggaagtacagaatgcccaacgacgaagggggaagggagcttgcggacctcggcaaagtgcaggaagggagcgagaggggaactgaatcggacgcggcaccatatatctccataatccagcgcattgaagtcaaagaagtggaggtcgtggagctgaccgaggggaactgactcggacgcggcagcctgcgagagtggagttgagatcgtggagctgaccgaggggcggacgcggcagcctacgagagtggaactgaggtcgtggagctgaccgaggggcggccgaggggaactgacagttgggcgctccatcgtgcagacggaggaagaacctgctgctgtcgcgcgactatgggccgcccaaacctagctggagtatgggccgcaccaaaaaagcagccca

SEQ ID NO: 89395 - DNA, 372 bp, Zea Mays
atgtagtaatgtaatgtagtgaaaaaagggagaaaggctgactcataatgagttggtctttaggtttgtgaaaaactcccctcctctaagtatcaaagaaaacttcagcttattccgggcaacttctcgcttttccgccgttctttctttatagtcgattgatagcttgtcttcgcgcctaacgccactaactatattagaaacaattaccaagtgataactggtaacttctgagtcgtatttggtttcgccgacgttttagagataacgaccgagttatgacagacactgtcggcgtttttagagataacggtcgagtggtgcttaatgttgtcggcgttttagaggtaacagccgagttatgcttgaccc

SEQ ID NO: 89396 - DNA, 305 bp, Zea Mays
tactgcttctagctagctgtaagtaacagttgactatctagaagtctaaggctgtctctagcaactatcccatcttatcccctatttcaaacttcactttgtaaacaatgtaatctacagcaatatttttttgagattttattaccacatttactacttcaaccactttgtgtaccttttattatcttactatcttttacaattttttagataaatgatgcacaactcagtacaatggtggcagaccaggtactccttaatatcttctatgagcaggcaaacttattgactaaatgttacgagcc

SEQ ID NO: 89397 - DNA, 293 bp, Zea Mays
cgggcgtggcgtggcaggcaagcgacgagcgggcgtggtgtggttgtgttaatttttagcactcattaaccgtgggagtttcaactccgggttaaacctttcagttgcccgtctcttcgtcagccgcatgtgagacccttctccttcagctgcccgtctcttggggtgacgtggcgagactcttctccttcagcttcccttccatgatgataaaaaggggagaacgcctgtcacttggtacacgagagcagaaccttcagaatcacagtccagcgcaagtgtgggtgtttcca

SEQ ID NO: 89398 - DNA, 513 bp, Zea Mays
tatcaagtatttttatgattatcattttatattatttaatctttgtaattatcatccagagtgcattagccgcgtgtagacctataaattgatgaactcaaaaaaatatcgttgacctaaaaatatgtggagttcatataaatatatgtgtacttattagagtttcgttctccatctttattcagaccctttatcgttgaaattatgaagcatcgaagtaagcgaactagtttgaaacaacaccattatcgctaattgatggcaatattgtgcctccatgagaacaaaatggaggatgagcacatatatgggaggagaaccaaacaggggagggaacagaggggacagaggaagggcgccatatgatctatatagaagagcaccatataaatatccatataggtataaaggaggaccattggtggtaggagcttaagaggtaggagaaggagcttcagtggtaggattttcattgggaggaggacaagcatctatgggaggttggtagggata

SEQ ID NO: 89399 - DNA, 590 bp, Zea Mays
agactggcggccccgagcggcggacacgaacttggacctaccccgaccatttcccccaacacaatttcatctatggccaaatggtttgccctggccacggtgaccgagagtgttgcggacagatgaaggtgttcccagtgatctatggcgatttagttcaatctaaagggtcaatgagtttgagggaagcttagggatgctagaacaagactaaaggcaatatgatcagacctgatttgcgttgaccacagcgaagtgtctttgcggcttgtttgaaccaatttggggagaactcaaaattcgtgggcgctagtgaatgatcgaggctaattcatggtggctggatagtttactgccctacggagcttgcggtgctctcaatttataggcgtatcgagcgacggtgatgaattcggccgagcgatgctggcggccggagaggggaggcaagctcagcgcgtggaaaaagtgactttcaccgtggcagttgcttcggtgatcgccggacatgcatccagtgagtcacctcgatgaagtctagcgcttaggcacgtggcgcgcaatggcggtagctcgacggcggtgagatt

SEQ ID NO: 89400 - DNA, 1097 bp, Zea Mays
gtgataaaccatcgactgaagtcgctccaatcgtcgatgcagtgccgaggtagatgtcagagccactgcaacgcgtcttgccctaggacaatgggcaagtacgccttcatgacgtcctctattgccctagcaggtcgagtggtagtcgtgtagacggccaaccagccacctaggtcatgcttaggctcgtacttgtcgatgttggagaccttgaagttgggaggccactggatggcccggagacgcggagtgagcgctgaaactcccgcacgtgtcctcctaccggtgttcgtgacgtcggtcccggggaggggagtcggtggtaagtcgtctcgaccatcctcggaatgggccactggttgaggctgctgcctactcaactcgggtggcgcaactccgtgctggtacaccgtgatcccgtcatactcctcccagcgtcttatctcatttccgtgtcgtcgatcacgcgaagcgttaatgaagctctgcgcgtctcgccggctgttgatggcatgacacaggtcattcgcaggatgagcgaggggtagaaggtgcttagctgcctgagtaagcaaccacggtagccttccgcatctggggttcgtggagaccgtcagctatcaatgtcagtactcctccaacttcactcagcgtgttcagtgctcaagcaaaatcagggtataggttccgagcgaggagagggttctctctccgaagcctgacgtcttgttcagctagctctcgctcccgatcttgagcctgtcagcgatcacagcggtgggagttacgcctttcccggtatactcgttcgtcgggagtttctcccacctccgaagcttcgtctcgggacatgggctgcgccggatcccgttcctcggcttcatgatgtcgtcgcacgttccgacgtctgtttctccgtcgccgggcataacgctggggaggttcctccccttgcatggtaggctcatcgtcggagatgggcgttgactccaatctccctggatgaagaggatgttggggtagaaaggagtcggcatgatggtgctcttcttctcatccacctttgagggtggaggtatcagaaaggtggcttgacg

SEQ ID NO: 89401 - DNA, 741 bp, Zea Mays
tctgacgttattcgcgcatgtgagcccccgcgacaacaacggtaggatcatctgctgcaacaaccagggcgacaccatcctctacgatgccaactccaactctgcccaagtcatgcccgactttgcgagatttcacagtgagtcatgcccatcaccatctccactggcaggcccggtgccctggaagagaacctatatatacactacggcttccatgtcctcagatttggcccggaagtcgaggccatgaattttcctagggatcaccatgcctggcattgggaatctcttccactgctacccatggacgatcaagttgtctcccacaccgtggttgatggtggccgcaccatctgcatatcaggctgctttggcaccttgtgttttgacacagtggagcgtgagtggtggcacgccggctactgggagagctaccgttcttaagtggagtcggtacgtcctctaaccttaatatctggcttggtttccccacgaggaagccccaccatctgtgtgtgacatcaaacctcgctgccatggagcagctcgtccttgagcggcggccacccacagtgcagcagcatgtcttggaaacagatctcagtatgcccaacaactggcttgtgttaaggtccaatctcatcagtcttggcgggggcagattctgtgtagctagggtttttctggaaattttgatgatggatgacaacatatcgtcgtcgtcgtcgtcatcatcatcgg

SEQ ID NO: 89402 - DNA, 758 bp, Zea Mays
gacttaagtcgattgctccgttagtagggtatagtggtcaccctaagttaagtaagcgtgagcatgtcacaccgccttaagtcgttgccgacttaagtcgattgctccgttagtagggtatagtggtcaccctgagttaagtaagcgtgagcatgtcacaccgccttaagtcgttactgacttaagtcgattgctccgttagtagggtatagtggtcaccctgagttaagtaagcatgcaggttgacagtaaacaatttgagcgcctttgagaatgaagtctttttattgatgatatatttcccagtttacagagtacaaggccgtcccaatagcttttgaaatatagctaggggtaaaacttcctgagatgttctatattccatgagttcccaattttcctgtcgtccatttgagtaagacgatatgatctaggccgagtgacttctgctactatgaatggcccttcccatagtggcgacagtttgtgccgtccctcccccgttagaactcggcggaggacgaggtctcccactgtgaaggatcgatgtcgtatggccttgtcatgatagcgcctcagagtttgctgataccgagctgactgaatcaccgtattcaatcgttcttcttctagtatatcaacatcctccagtctagtaggttcagcttttgctatgttttcaaaaattaacctcggtgccccgaacttgagatcagcgggtagcactgcctccgaaccatagaccataaagaaaggag

SEQ ID NO: 89403 - DNA, 372 bp, Zea Mays
ttcccccagaagttcctgctgcgtcctgtcctcgagtcctggtcggcatctgtggcaaagaacatttgaagtaaacataatttgccagagaaaccttccattttacattactataaaaagtaatgatacagactcgatatttcataacaggatacattacccattatacaaaagttcaacctattatacaacagtacaacctacaatacactactctactttaactacaccatcagtcctgcttcccattactcttggcggcctcatcgtcaggtgtgggagtccagatgtcaaccaacctcaaggaaggagggggttcaaaaaggtctaactccccacccagcgcgcgtcccgcaacgtgagagggtccgc

SEQ ID NO: 89404 - DNA, 1004 bp, Zea Mays
acaaattctaggtattgtttttattttaaaaactcattttctaattcatttctctgatttaataaccctatggactgggcacaatgttctggaaagcgcaggggtgcctaggtaaaaaccccgagacacagagaatagtacagggtggactgcgggtttattcatcaatactacgaggactcttttgcaagatgagctatgcgaaagggtatggtgagttctgggccatcggatgtaaaatacacggcccagattagatttttttataactccaaaccggtacgcaatcgtacccgttggatcttcatccaacaattcagatttttaagtcgcgtgctctgctctacaccgctcatccgccgatcgacggttgagatggcccgagatcgaaacggtacactcttctaatcctaaccgttcactgcgatccgacggtgcacgcaccatcccctaactcctgctcgcaggcgatgccggcgtgccaccccacggcggaggccatggccggggtattaaatccagcgagccacgggcctaatcctcgaatcaaagggggtttctgcgcgaaggacgacgaaataaactactaggatgcggaactcaccgaagaaactgactcacttgggctgtccacggcgcaccaattttccacggaggagcactacgccggtgagaaattcacgatgggcccgatccaatcttggttcaagaaggccacggacaggtgatgttcactctggcgacgccacacaaccgcaatttggcgacagggcgcaagcatagcagagatttcaccgacgacagccgctcgacggtacacacctttgctctgcttcgcccccgacctcacgctacggtggtaatcgcggctgtaggagaaagagggggagatagacgagttcgggggtcgcggcactctatataggcgcgacatggtcagctcaacaacggccacccgcgtgatccgcgcaagccgccatgctcggagtttagctgaggacgaa

SEQ ID NO: 89405 - DNA, 464 bp, Zea Mays
tagatatagagagacaacattctattgttgtttggttgctaaatgtgtacatttagctacatccgatgttgtttaatactttagatcacttgtcatttgaaaagagccgttggttacaatggctaattgtgctataatttgtcacctaaatacacgaggatttagtttatatactaatgcatattaggcttgtcccatatttgtcaaatacggaataaatacgggttcaatccagaaaaaacgggatcccgcaaaaacggacggaataagccctctcccgtttccgtcccgtttccatatttttccgtaaatacgaaaacggtcgggtcaaatgaagaaaacggtacgagtcgggacgggattttttccatccgttttcaaccctagtcgcggatgtggggaagttgtcgtcccagtccaacctccggtagaggtagagccccttccattgattgtgccttttg

SEQ ID NO: 89406 - DNA, 783 bp, Zea Mays
caattcggggttgggaattcactgtccacgacaatggcggaaactaagaacataccgacgtgttctgggttccctagggcgatctagtttaattcaaagggtctatgagtattaggggacttgagagaggctagaacatcacgcagaagagcatgagctaaccagtagacgtctggccacagcgaggtgttcatgggtgcggaaaactgatttggggagacaaagaaattggagctctctagtggctaatcggaggtagtagcgggtgctctggcttcgtgatgacttaacgaagctagaggtgtgctcaatttatagtatcccagagcggtggctcctaatttgggcatggcgtgctggcggccagagagaaggaaggttactagcgcaagggattcatggctttcaccgtggcaaggtcaccggcgatgaacagacacgcttcagtggtttactacaacatggtaatgccctaaggcacgtggcgcatggtcggtaagcggccaacgccggtgagaatcaatttggctgaccgcaacccaagtgggtaggcgagctcaccgtcgaccgggtccgagcctatccgatgccaagatttttactctgccgtgattatctccatgccagagagcacgaatcgtggcgacggcgcgaatcaaggcgcgagggtcaccggtggcgaggtgtagtgtccctgggatctatgtcagtctactgtaccattagagcgccattcagagcatctgacatagcatatttgagggtgatttgctccaaaattca

SEQ ID NO: 89407 - DNA, 331 bp, Zea Mays
ctgccaacagtgcaaaggaaaggggtaataacaggaagactagaagggtattctatacgcaagttgatgtgactccagaagggcaccccgtactcatgggtacgttttttgttgcccaccatcctgctaaaatactttttgatactggtgcatctcacaaaattctcaataagacttatgccataaatcacaacattccaattcaagaagcaagtatgggtgttattataaaatctccaaggggtaagttgggcactaagaaagtggcatttcatgtgcctacgtcgagtccctcagagtcgctgcgagcaaagtctttgacctcaatgtc

SEQ ID NO: 89408 - DNA, 569 bp, Zea Mays
ccattgagatatgagatattataattccattttcagtcattcatagagcaagaatttggtcagtgagaaatttaacaacattatgcgaggaaaacaaaacgaaattctctgggacaaactccatgctactgggtctattttcttccctctagtgatttctcttctatatcagtttgccttctccgttatagtaaaacttgtctgtgaagtcacttcggaccttagaactcaacttagagtattatgtgtgtacatagaacaatccccgtcaaatttgtcggctaacatgagatgagaggctatgcatctgttttctattttcccagtgcaaacaaaaagtacaaccaaatgtcatagatcacagtacccaacaaaagttgttgttgcgcctttattgtcgcttacagttgatgcatttcttagggcctatgatcaacagaacatgagatagtgacgaggcatttaaaatgcactgcactttggctcatgatcggacaactttataaaccaattgcatatatacagatatagatctgtagacatttcaaagtcttaaaatgcttcgacta

SEQ ID NO: 89409 - DNA, 582 bp, Zea Mays
tcgggataaagaggaagagaaccattaatattatgaaaagagaagcagtcagatcggtgaaagccaaaaacaaaatatggacaaaaaatcgaaggtggccaaagagcctaaggcgataggggctgatggtgaggtgtcttcgcacttagagtcaaagaccccacctttaaagatgaaaacgacgaatgtcattaagtccgaaggaaaatccttgaaaatggcaaagaaggatattgggagcgtgtcagcctcatcacttggggcaacacaaattttgtaggtaaggacccaacctttacccttcgacacattgaatccactaggatcagaccttaccagtttcttaatgaccatgaagggtaaagaaggcgaaggcgtaccaacgatggcttcggctcctcagacttcgcctgagaagatgccaaaacaggggtcctagatgtcatctatttgcaaagctatatacaaaactccatccaagggagacaagaaaaaaaggagtattagagttgagtaccaaagctatggaaaatactagttcaatagatgaaacaatcacgatcctagagcctatagaggcaa

SEQ ID NO: 89410 - DNA, 491 bp, Zea Mays
ctaaaacgtttagtatatctcaggtaaaccaagccaccttcgctagaaccggcagaacactccttcggcatttcccagtcattaacgagtgaccaaaccttgtaagcattatgctcctgtaccaaatctctggtaccgatgtaagtacacacagtgttgaaagccatcaaacacgcttgcacttcgtttccacttgtaattgatggccttctgatgccgaagcgtgaccgtatgggacgctggataatacccttcacatcttccctctcactcagatcattcttcacatagaaccactgtttcatccaagtgtccgaccacttcttttggaatgtcggcacgggatacctcacatcaaagcggtgcacaaagctgtagcacccgaagttgttgtgatactgtttcttcccagttgcttttgtctggtaggataattcatgaatgttgcagaaacatttggcatctggctccagcccttggctcctcatggc

SEQ ID NO: 89411 - DNA, 393 bp, Zea Mays
aaactggatcctactcctatgaaccttgttctcccctaatgcacttaaacctaaactagtgccttagaccaactcgaccatgaacaacaacttgagcaacataataggttacataacctatccaaccaatctagaagcaaacaaccaaaccagaatctcactaatctcatttaactcatagccacctactaaactagctgctctatccactaaagtgttacttacaaatctatcttaacctctagtccctaacccggatgaagacaccaaagctcgagaaggaaaatatcaacctcgttaaggaagaataggagtcaagccagacccccaaagggagctagatccacaatcttggatggagtctttccttaccctattctttcttacccaaac

SEQ ID NO: 89412 - DNA, 431 bp, Zea Mays
aaaaaaggacaccttatagactggatcaacgtaactaaccaccagctgcgggccggctcggccatatgcgagttttacagcagcacgcaataagatttatctcggtgtctctttttcctggtcgatcgagacacccacgtgtcatgctgccattctccccggctaatcgatcgatgtgcatgctgaccaattctccgatcccgcgcgtcgtggtggtggtgccatgcagcatcccatatacatcgacatcgagagagagaaaaaatggggcgaacgtcggtgcaagtgcaaatgaaacagctccatcgtttgttctaacgaacaacgttccttcctccccaacaaatctatactagcaaacagcaggctgatgagcagcagtgctccgcggagcaaaactatcttccggtccgtgtggaaaccaaccaagc

SEQ ID NO: 89413 - DNA, 299 bp, Zea Mays
cttcgattagtcttataatgtcttttcttgcggtgttgatcatcttgatcactgccattttgtgtcttagactcctgacttcggaaaagtagggcaacaagggagaatgtcttgtcttagactcttttcttgcggtaatgatttagttttggtataagtagatattcgaaactaggggagcatgtgttgccactaaatcctagctgaattggtgcaatgggagttgaccgacggactcaacatttagaagccaatcgacggaggcaataaagtgtcccaattggatgtgtatctgtcga

SEQ ID NO: 89414 - DNA, 424 bp, Zea Mays
cacgctagggagggcggtgtcgccatcgcgttgtaggaaggggaaatggccttggaccgtagatctagagataaaaggtttggattaggttacgtcataccggttcagatgggagcaatcctggccgtcgtgtgccgatcggatggtgctgatgggctcaggggttatttaagtccgcgctgttggattttgatcggacgagagacgttaggtacaggttcaggcgatgacaaacctaatccgtgccatccaccgttgatcgagcagtcagatatcactcatatcccttcaccgtgtcatttttactaaaggaaccccgaagaataggataattaggccgcaatccaccgcggtgtagtctgagtcggggtgattttgcaagtttaaccctgggcttctctatattagtgcgcgcagtccggag

SEQ ID NO: 89415 - DNA, 932 bp, Zea Mays
gtttcatcgggcctaggcagtgaaacactaagacatcattagcctcccgcctccacggtccgcattttggaaagttgctggcaataagaaggctcatgccagcgttccagcaatgtttgaggaatggccaatgtcagtgatcccgtgtgtcctcatgcctcctcaggcacttcccagtgtggtggttatattcctcatcctcaggttcatgtcggtgatgctgcttgtactggtactcatacttcctgagcagatgttcggatgtcggttgttgatatcacacatgttggacctgcttaacatgttccttctcatctttttggggtcgatcgcctagactggccttacccttccgtgcgtcctgatgtctcacagatcctaccatattgatgtcgaacaagaaaacttggttggcacactccaccatgttgacgcctgggaacagctggctctcaaccttaatggtgaactggcccaggatcagccgaccttactcaatggctgactggtctgtcggtgaagctctttgcaatcgttggtggtgtgtgtgaacgagttacggagatgtcgcgtgggtggagatggggaaaggtctgacatcaggggtacatgcaacggcgcccgcgttccttagatgagtccacgcccgcgcctacgtgtgatgaacgaggagctagcacctggccccacgagacaacggctcaagcgagtgcatacgcccggcgacggactcctagcgtgtgggttcacaccaatgtctgaccctaggtcccacctgtctatgacagtgccagatgtgaggacgcgacacacagaggaggtgctaggtcatgcagcgtgaggagaagagttgggccaggacgaagtaatgtggcccaattgaaatttaccaattaaaaattcatttcgaaaattattgaaatgatggtgtg

SEQ ID NO: 89416 - DNA, 482 bp, Zea Mays
cagagtattgccgagccatatctagcaagaaatagtgaaacaaggacattcagtaagaaagcagaataatcaagcagccaaggaggaagcaaaaggcactaaccagcgttcgtcaattctaactcagatattcaccgccgaagcagtgctggattccaatgtgttagagacagagctctttccaggacaaaagcaccttgagatttcagctgaccggccatctcgtcaaccaaagcctgacaattgaaagcaaatgagtgcaaagacaatatttcgcctggaacatagccagatcaggaaaagccaactaccaaaagattggagacgaaagaaggaagccccaaatcatgggaagcctgctgatgacttgacgaaggatcatcaactgaagcaatctgcggagcatcattgggggccaacacagtgtcatcgacaggaattaaaactctggtatcaggtacgccggcctctaaggggatttc

SEQ ID NO: 89417 - DNA, 421 bp, Zea Mays
gtccaatgatgccactgaggatgatagagtctcacctgtgagtgtcaaaggagtagttgaaactagaggcacaaaagcagtcagaagtgcaactaactgaggcatagctctttaacctgactatgactctatgagtgatcactatcgtcgaagtgggtggtgcagcagtgtcacaagtgttacttatgatatcaaaagtgctaaagagagtagagcatgtgacactggttgcgacatgtcatggtgaagagaagacaaggggtatgcgtccgggtaggttacaagatcaatattgagtcagtcacctaatacgagtcgtgaccgagttggtcccaaaacatgtaagttgtattctatcattttacatgtttcttccttatctgctatgattttaccatatctacatgtatatcaatcttat

SEQ ID NO: 89418 - DNA, 474 bp, Zea Mays
tttttctgtcttcacaagctaggaatctcttgtgggctttagatttgggctaggaaagtgagtggaatgttgatttccaatttcaagtgcatccaaacaggcttgccatagaatctaattctaattcagcccaattcaaaccaaacaaacaggccctcagggctacgccgagaagcctttagacaacggcacgttcaccccgaaggggagcacacataccgcaaaggggcttacgagcgacgccatgacctttcgtctactatcctcatcaaagtgggggaacaaggggcggttcaatgtcaagaaagggagagggagagaaagggggaggagagagcgccaaacaggtgaagttccacaatcggttgaaaaagtcgccttaaatactcgccctagtccctagatatgctatatgtaaaatatgatatgattgtccgtgttagatttgtatttatataacaataccaacaagtc

SEQ ID NO: 89419 - DNA, 1033 bp, Zea Mays
cctctccttagtgtcagaacaccgtcgagccagaactggaagggcaagaggaaaagatacaggggtaaaatgagggagcaacgaacaataaataaagctatcaacccactaaccgatattcgaggcttttagatcatctatgtatttctgaagcaggagaggattcctctgcaacaaggataaaacttgatcgaggataggggcaccgcaagaccttgactgagccgacacatagctcaggatattctgcaaatacaagaattagcaaaggagaattttgttgacaaaaataaagcagggcaaggatcagctcacctgaaggttagaaaggaacaaaggaaatcacaaagccgaaggtgccgacgtgccacagaacagtggggtactagcagaagtaatattgagagcagactcgagccctagaggatgattagagctcatgcccaaggcaacaactagtgggacctcagctccgacagcgtgcagcggattcccagcgctcaggtcactgacctctaaagtgaccgggccaacaagagcagtaggaaggtttgtcaacactggctcctcagactaaactggtggtgatctgacatgaacatccatagaagcaatcgaagaggagccgagctcgggactctcgggggctggctcaccctcagaagcaccctcgggggctgggtcaccctcaacagcgccctcgggggctgaagtatcctcaatcgtacccacaggaatcaggtaacccttgcatgtaacatcaggaaccaaggtgtccacatggattaggccgccctcaaaggttgaagaagtatgggaaactgttcgggttatttcttgcccgacaaattttctagctaagggaatgtcatctggcacctctgcacggatgccaggactcccagtttcaggaagttataataaaagatcttctgggataatctcctccagtgcatgatcaatggcagacatcgctaacctctgaagattaaccagccctgacggagcctgaattttggacatcgttgttggt

SEQ ID NO: 89420 - DNA, 289 bp, Zea Mays
caacaccgcaacaactccctaacacttctaagagttttctcaggtaagcatcatgttgtcctaatgtggtctctagagaatgcatgagggcactacaatgtactacattactctcagtagatcttgtattaagcattattgttggcaagatctagtagttatcttgtgtattgtcaatctactatttcgtttaagctccatgttatagatcaattttacactattagatgtgtatcgctcgcccgattgctacattccatgacatgaggctgcaacatgtgcatacgac

SEQ ID NO: 89421 - DNA, 314 bp, Zea Mays
cgatcaggacttccttgacaccctttgtggggtcgaacgatcttactgacctcttggagttgggtgcatcctcgaccgcttactcctagatgactacaagcttcttagatgcgatgaccttcatggtacactcacaattttccacctcgcactcataggcgtctcgaaacgaggtttcgatggtaataacattgtgcaaaatagcgtggtaagatccattgaacccaaccacttcaaacattaaggtctatgttcgatagttggatggatcctcagacatggtggacatgtcgatctacttgatgggaacttcc

SEQ ID NO: 89422 - DNA, 1410 bp, Zea Mays
atgcagggtctcgagaaattctaagggagcaataattgaccaagttgcccttcgagaatgctctgacctaaggaactagacaaatgaagaaggatcaccttccggcaaggaccccaacccgttcatgaatgttaaggaatcactttctagtaaggacttgaacatgttcaaatttctttggcagggactgaagagcgaaaaaactcatggaaaaacggtcgtgaatttttggagatcaaaggtcggtccatgaagggcttgcgactgctctagcgaaaatagagtgaggggcagccggggacgggcacactagtggccaggaacctgacgtatgaactttaagggcatcaccaacacgtgtttgagtcctcagagagcctgactcatggtttatcatggagagagctagagagtcatcggtttcggccaaacagaatcgacaactatatgagttggcgtccgagagtatgaggatggtccctagcggaccccacgcttactcaaattaactgcttgaagctcatcgagcaccattgctagctcatcaaggaaagtgtggtactgctcaccttccctcattcccgctaagggaatgcacggtggagagtaaaaccaaaaagatgggacaatcccccagacagacttctgcatcgagcaggggctcgggggctcaccccgcatgagtatggcagaacgacaaaagttgcacggatcgcacccctctagatccaaggagggcttgagacatggtagggtcaagcggctcggaacccatacacgttatcaaaatgatcgagtcacttgagtagccacaaaagattatgaatcacgagactacaaacgattgtgcaattacttccttcgcaaacaccgcccctagcgtgacgatcgcagcagcgtcaaaatcacccaacaatgggtccatatccgtagctgatgaagtctcaagtagaccgatggtatttcgaaagttaccaccaatgtgtggcagcaaggtggcaaaggccactactatgccccggtgaagtcccgagccccacgatctcacgcgcagtggctggtttgtcaaggagacacgaatcgtagtccccatcgcgaacgtgggaaggctttgtgactctgattacgcataggtaagggctcaaaagattaggttctgacgagcaacgcaaacattatcacccacaagaacaaaaggcaacatgataacttctcctattattcaaagaagtcgtgccaggagcacgttacaacatcgggtcagaagcactaaggacaatgtcgtccatagatagcctatgcacgacacgacctgccacatcatcatagtactccagcatctccttcaaaccctcgttcggtaaggccgaaggagggcctacgactcctcataggtaacatccaatccag

SEQ ID NO: 89423 - DNA, 1057 bp, Zea Mays
cataagaaagataatttaccaatatgaacaataaaaggcaagtagttgactcgcctgaagattggagaggaacgatgcacacccaaggcagggggagctttttcatgtcttgacgggggaagatcagcagaaacaatttgaacggcatggtcatgggtgatctcaaccccgcaagtagataacagacttcttgcatctagctcgctgacctctaaggcgacttatttgttcaaagttgtggaagcatgcatcgccgtcgctccatcagactgaggtggagacgacccaacatggacgtccatggaggtgtgggaaggagaacccatctgaacaccctcgggggctaggttgcagcttgcgctacccaccagagccggatcactaccggcaacaccctcgggggctcggtaactgccagcaccaccctcgggggctgggtcttctgcagtagccacctctaaggctgagggctcctctgtcacctccatgggagtcaggcgactcggaccagcgtcttggcattgaagactgccttccaaagttgacgatgcatgagacactacttgggatacctccagtccaacgtctggaacctctgaacaaacagccatcacgtcatcggcagttggctttgatagcatatcctcagggacgactttctcaagcatctaatcaaaatctgatactgacagtccctgaagactaacaagagccaacagagctggagaaggaatatcactcccccctcactacctctgtaatgtcggttgttcttatggatcaacgggacttcttcttcatcaccatcttcatcaaatatacaatagcatcttgtgcacgatcacaacccttggcatcaacctcaggaagaatctctataggcacttcatcatgaactagagcggaagggccggcaccctggtccaagcatgacagtcgccgaagccgtttctttttctttttttcctcaataggtgcagtcgggcggctaactcggcgtggatgctttgggtgagcacctttaggtttccggatctccaccgctttgccaagttta

SEQ ID NO: 89424 - DNA, 895 bp, Zea Mays
ccatggtatagtagaccaaagtgaatcaggttgccagcgcagcttgctcgtcgacggcgacctccctgcgcgaagattcatgccgccaccgtgattcgtgttcgctggcggttggataactacggcaaagaaaagatctcacggcggggaagggataggatcgcgaattggagtttatcgccgtaagtatagtcgctgcgacgtggccggactaccggagtcgccgtggaagcgccggtgacctcggctgcgccacgccgaagcttgttactacgcggtagtaagcgtggcacccttaggagtattctccttgcgccgttacaccggtgactgctacggttacagccaccgtgttcttccctatctccggccgccaacacatcgcggtcaaattgagagctaccgacctcggggtctataaattgagcgcgtcctcaactccgtcaagtattcacgcagctactgcacccacctgcatcccaaaccccccaccagagaactcgaattttggatttcccccaatctgctcaagaacactgcgcagtttagcctccccgcgaccagcgcgattccggtcagtccgtgtcttctgcttacccgtttaagtattctcatgtgtctgcgatgctcgccgacccacctaattgaactagaccgccgccaatcgccaggaacgcgtggttctttggttcatccgcgcggttaccgtggccagaccaaattagctcatcattcttgaaattaacttggggaaaacctcgatttaggtctgaattaggagccagtcgttggagagtgccagtccttgcgcgctccacccagttcagctcgtcggagcatggctcccgcgcggttcaccgtcagggatcagtcggtgtaaagaaatagaacctca

SEQ ID NO: 89425 - DNA, 631 bp, Zea Mays
ttcatttgttagttcaacctaactgataatttgttagtagttaactactagctctaagatttcaaaaatgaccttaattgacatccatatggataattctacccatttcaatcaaagttattaaaacctggccccatttgaagctctctccgtgctcggtgggtttctgtccaccgcgtacgtgacacgtggctatgtacactcggacccgaaatttctattcgcctcagcggagcatacgattgtgtctgcccccaatttcctccatctaccgccgcatggcctcagccctctgctccaactctcactgtcgtgggaacctgccggactccgtcaccgctcgtcctctccatcagtctactagctagccgcggttccttcactaaatctgtctcctgctcctcgccactccacccccgcctggtcgcaccactcctctagccggccctatcgttggcgcagctcctcgcagcctggcctcttgcctcgtcgtcgtctccctatcggcccggcccgtcgcctctccgtagctgccgttgcagtcggtctaccggtgcaagagaggaggcgcctgaatctgggctaccaccaagccgtttcgatccctgttgatgatcgcttatctgctcac

SEQ ID NO: 89426 - DNA, 711 bp, Zea Mays
aaccgacaaaaaaaccctcatatgcagccttagcagaataaacaccattggcagcaatgctaaacatgtatttatcctccacttccggctgcaaatgaaagtcttccaaaagctcccgcagctgtagttaatcaaccagagcccgtatagacaaggcgacccagatatcagagatcccatccctatttgatagagcctcctggactgttctcttcttagcaaatttcttgggaacaatttcaaccagtcatggagcaatatcagctaacctctgaccattcaaccatttatcagaccagaacaaggtgttagatccatttcccacctctgaaatcagcaccacagtgaagaaatctcgggcctttttaggaacttggatgggcaaagaagaccaagggcgatcctgatcggttttttaaagccacagccagcacatacgcaacgcccaacaaagctcacttaggctagaaatacccaacccgcctaggtgaagggggcgacaaactcgtccccaggtaatgcctagaaatttaatatacattctcagtttctcacaatatagtttattgaacgattacgcgcataacaagaaatatgtatttcacattatagtttattgagcgagtacacagaacaagaaatatgtagtggtgtattggatttcatggtgtggttaggaaacttacctgaccaagacttccaacaattaag

SEQ ID NO: 89427 - DNA, 479 bp, Zea Mays
aagtcttgtctgtctgcactgttcaccagcgacaaaactgatgccaaaccatgtcaaacgaccttggtttgatttcaaatttttcaagggtgtgccttgggtaatttggccactttttgttatttggtccaagtggttttggcgccatcacaaaggtgaacacaactgatccttaggctagggttggttttgagacttagagaaattttgatggctctattgtgctctccacttggtgaactgatttggggtttttttgttgggcctttttgtaatatcttccttaatacattttgtagattttctaatatacttcatatttggtaaaggtttcctttcatgatttggccatttgcctactctttcccctttaatcccatgtttagggtttaatggcttaagaggggaattagggttttggaatctttttcatgagtgagaatgtatgaaggctagggtttctttcttgttatgatcaa

SEQ ID NO: 89428 - DNA, 536 bp, Zea Mays
cgacgactccggagacgacgatgacgaggatgacgacgacgaagaaggtggcgacgaacacgtccacgaggaagtcgactacgcccagtaggactacttcatggggtttggtactattgtcgaacattatacatcaatgttcgagacggggcacttccccaacctactgcaagaagtgctgcacgcgctaggcacctacgtacgccccctgtacgaaacaaggtgagtgagcgagcctccccgggcttgctattacatcactcacatccacgtcagggtgatggatgcaggggacaggggattcaggactctgtctgctcatgagtccttgacaccactgtccacctacgctgcctcggtcagcgatgctgcccgtcgaaccatgtggtcgctcagccacacctaccggcagcagctgcagaacacgaggttcaggcatcttcctcagcgtctatgtggaggaagtcagaccagcatcgtcccaggtgaagctggtgaggatcgcctcaacaccctagctggtgtagtggccggtc

SEQ ID NO: 89429 - DNA, 730 bp, Zea Mays
ctggcgaggatcagatggttatagtgagtcacggcgacacgacggacgtgtctcgatacgtggcataaggccgcgagacgacggtcaccggcgatctcatctaattccaccgcggcgagcctagtacggcgaccggaattgtttactggccgaggcttatccacgacggcgtgctccgagcgttatccgatcaacctgagcacaaatcaagacggcgacagcacgaatcacagcggagatcgtcggcggtgagctgagctgtaaatctgatctgtttcaggttactgtaccatcgcgagttcctttcagtgcacctgacagtcaaagtttgggctcaaatctctctcaaatttctatggcaaccagtggatcggccagtaacaaagttgttgtctgatgatccaacaacaatcttgctatagcaaccatggccaaattcacattagatcagggttgatttccagttcaaagttgactcagtatcactgttagtctgaatttcagactgcaaacagcctgacagctcgactttgagctgaattatctccaaattcttcataacaacaatgtttaaccccttaaacaaaattgttcacctttgatagatctacaaaattgatgtggtggcctagggcaaaaaccttataatttgaaagttacaaagcctcaaagatgagctcaaatactgaatttcagacttagcctttagaacaccaatagggtctttttg

SEQ ID NO: 89430 - DNA, 318 bp, Zea Mays
gttttgtcgattcacttcagtttataccatatcactaaatgtctgccatgtccacatatactagcatggacccagcaaacaatgccacatcttcgcagccgatgtcaaatacctccagtgcccagcaatttccccctccaccccctatatggcctacgggcttcatgcaccagactcctgtggattgcaacatgatgggaaaccttaattttcctactcctggtcaaggtccaacaacaatgtgggctcccatgcagacagggaatactagttcccaatctaccatgattccggcttcgcaatctgcaatatattgga

SEQ ID NO: 89431 - DNA, 1081 bp, Zea Mays
cagggcataagtgtacccgatgcctttgtaaggatgagctttcatatctataatggtgtcaggacaggtgatcacactagttgttagggaatggaaaaatccctatagccatgactagcaagtataggggtatatatggtaatgtaaggaatcatactgcattccaatatgatatatttgcactattaagatatttgtcctcagtattagtttctgcaggtcaagggaaacaaaattataaatcaacacgcgtaggattcaccaaagacaaagcaacacaagagataaaaataacataccttcaagtgtatgtaagcaaggcagtctgaaaattcttcgaagggcattaatgatagccgagcttcgagttttaggaagccgacatggtccatcatgtagtgacacatgtcggtcgctagattgtctgggcagcaatacaaatagtcgccaaaaaatgttgctcttcaaggataccctaatttttgagcaaacgcgcgggtctctacaacttcttctatggtcatcgttttgccacccgaatgatgtatcgtgtaccgctcgccttcttcctttgccctaaagggtcttctcccacaagtacattttcttttgtagccacgttcagctccttggcttccatggcatttttgcccttatcatctgtgggagcaggctttggagtaccgccttttaaatcggtcgctttgggtggcataggtgctactgcagttttgatctcctttgttggtaacactgagacaaccgtaggtagctcttctagaccttcataatggtctcagcttcagcgtcctcctcttctatatcgtcaaagaagaaggcacttatcacctaagttattggttcatcctccttcgaggactctggaagaggcattagagttaagattttcttaggctcggcctccattctagctagaggagtctcattaagaataggcaatataacaattttctcacctccaagattttcctgcaaagatgtaaatagcttattaggtaggatacacgctagagcacattttagctaaagattgattaaaacctacttcataccttcggct

SEQ ID NO: 89432 - DNA, 462 bp, Zea Mays
gccggtccgagacgggtgacaaataggttccgtttgttaatactacaatacatactatcgggtatcataattacggatacctagattatgcccctaaaaacacgcttaaccctaagacctccatcacgcccattccccttggtccaaggatcataaaccatgcttcacccgacgcacctctcaggggtcactatagctccgcctcgcccgatcctgccctcagacagggtatgttctggagagaatccttgttctgaccgaggtcccctctcccctaaattgttgtctccgccttgcccaagcctgtctcgggtagggaagacaaccccgaggcatgactcagccgaagtccacatgggataggagcatttaatgggcatacctaccccacacagagttgcaggtaaacaggagcaacaagactgcagtcctatcaagcttcacgaactacgatgacgcatg

SEQ ID NO: 89433 - DNA, 336 bp, Zea Mays
caagggtataataatcttctggagactgtttcccataagctttgtgatgattttaagtgctgaactgctaagggaaattggtctgtagtttccaatagttgttgggttgctgactttggggatcagggttatgaaagagttgttaagagcagtcaactgaacttggccactgaaaaatttatcacacaattggtatatgtcatgattaatgatttcccaacaactcttgtaaaaggcactgttaaattcgtctggaccaggtgctttatttgctggcatttccttaaccactttgtctatgcaggtaatccatgtttcattaattcatttctcatc

SEQ ID NO: 89434 - DNA, 685 bp, Zea Mays
ggaatcagatcctctacagtcgaggttcttgacctgtctctacagttggtctaatccaaccatcaagcagcaatcctacggcaccctcccgcacagcttctctcctgaccgagacgtgcggcttggctcacgcgagagccgtgcccaacactgggcctcggcccaacagcgctgggactcctcatcttttaccgcgaaaacaacgcattttggcgggcacctcgcgttttacgagctatgggcggcggcgattaggctgcttgtcattcatcaaacacatgtgagttaatctcgtttttcttcttcgcgacttgattgttttcagcaaactctactatgtgtgctctgatttgattgtattccacctcacttgtatgctctgatttaattgtattccacctcacctcattagactgtgttggaattcatcgaaggaaacctagagcaaagttaaatctgcatatttgagatggaagaaaataggtatgcgaagccatggttgttactttttcactagatcagatagattttatttgttcaatgaccagcagattttttttgttcctgtagagtgggtgtgctgccttgtttgatacctgaagttggcatggagttcaatactattgatgaggcttggatgttttggattgcctatggaggtcaaaaagggtttgaggttagaaaa

SEQ ID NO: 89435 - DNA, 441 bp, Zea Mays
gaaatatattcaaaagcccatgctaagcaatcctggatcgatctatccttgatgaaaccatattgattctgatgaactagctttgtgatcactggttgtaaatgattggctaagatttttgttagtactttgacactcgtgttaaggagggagatgggtctataatcaccaactgaatccggagagctatttttgggaatgagagtcacatatgacccattaatgctatgcatgcagagagatccttcaaaaaaattgttgaaaagatcatagaaatcaggggcaatcaccggccagcatcttttaacaaagtctgtattaaagccatctggacctggcgatttatttgatggcagacaagcaatgatttgatcaatctcaagacaagagaaagggtgttcaagctctgacaaattatcaatcggctgaatcaaagcagat

SEQ ID NO: 89436 - DNA, 687 bp, Zea Mays
cttggttgacacctaatcccacccctagcgacccaaatccctccatcaattgcacgaatctggccaggaattcttgtgttcacgacgacgacgagacccgagggaaaactgagatgttctaggtgactcaacgcggtctagttcaatcaatcgggtctacgagcaataggagacttaagtgatgctagaacacgaagcagagaggcatgaaccaacctgtagatggctggccacggtgagaagctcacggcgacgcggaaaattgatttgggggaaatcccgagttaaggcgctgcggtggacgattggaggcgaggagcgatgcactgggcacgtaacaacctagcggagctagctatgcactcaatttatagggatcaacaacggtggcgcccaatttggtgaagacgcgctggcggccggagagagaggtaagttacaagcatgagctactgtggcggtcactggctaatgagctacgacggtcactggttactctccacgactcgcgacgacgtggtaaaacagcctaaggcatggcgtgattgaatgaacgacggcagccacggcgacggccgcacagccacgttgccggcaagtgggtacggtgaacagtccggtgacaaggtccgagctcatccgagcgctaagatcttttaccccgagtcattatccccgcgccaccag

SEQ ID NO: 89437 - DNA, 476 bp, Zea Mays
gtccagacggcctcctacagcctcttctgattccctccggcgtgtggtcagacatcggcatcgacttcatcgaggcgctgcctcgggtgcacggcaaaacagtcatcctcaccgtcatcggccgcttcagcaaatactgccacttcatcccactggcgcacccctacacggcagaatcgatggcgcaagctttcttcgctgaggtggttcgccttcatggcatgtcgcagtccatcgtctcggaccgtgacccggtcttcacttcgtcattctagaaagagctgatgacactcaccggctcgaagctgtacatgtcctccgccttccacccacagacagacggctagtcagaggcggccaaccgcgtcattgccatgtaccttcgatgcttcaccagcgaccggccccggcagtggcttcggtggcttccctgggcggagtacatttacaacaccgcctaccaatcttcactccac

SEQ ID NO: 89438 - DNA, 276 bp, Zea Mays
ctggaggggagagtaatgtccctctacccgaagctgacgaggtggttgtctatagaagttttatgaaagcggggctttggtttcctttggatagtatgctggtcgaagtgctaaaaaccttcgaagtctaccttcatcagcttacccccaaagccatcatcaagataggggtttacatttgggccatgaggagccaaggacaagaaccaaatgtgaaaagcttttgtaacatgcatgaattgtcttatgaaacgaaggccactggtaaagaacaat

SEQ ID NO: 89439 - DNA, 436 bp, Zea Mays
gaaatcgcagccccgctctgaagaagctcttgaaaaccacagcttcatccttcttcggctctagggtagtctcttctctagcaaatcgaataagtttgctttcagcctctccaaaatagcccagtttcatcatcataggcatgtcatcttcagacacagtagatttttcaaaatctagctgactaggattcattgggatcagaatattgtagtcttcttcactctcaacatcttcaccctcaatcacagtctgctcagcttcgacattagaagtaccttcgtcagccacaaccagacctgatcgtttcattacttctgaaattggtgtcgtttcagtggcctcggtttcgtacccctcacgagacacccttgcagttgatcgcactctggccattttgatggatttttacagtttgacgaagctaacccgtctaac

SEQ ID NO: 89440 - DNA, 694 bp, Zea Mays
gaatacatcgaagcatgaacgaaacgtattagcacgacaaaaacatacttagaataccaatctacctcagacgcagtctctgctccattccttgccttgagctcaatgtcagactttgtagtccataacagacagatttgcagcacgactagtcattaggcatggccccccatagatgccataattggagaacctaaggggctactgtagccacttatgttgccatcgcgaccgcagcctctatcatcgtcattgtggtagcgggctgcaccaccttaactggtgcgacaaacctcaccacacctttagggtcctaggcccttcgcttcctcgaccaccccatcacattcatgacatcgtatactggtattggtgccttcccttagacaattccatagtggatgccatgacatgctcaatgttatgcgagtatggatatatgttaatgacctcgctattttggctagcgcaacgtcttcacacccacagactagaggtgtgtctctaaccacctaccactttacactctatgaaccaaccctcctacacactaaatctttcccaaacttaccctggtcaacttctccatgaaggtgtcgttgtcaacatcaagatcatgtggtgagctcgtaggtgatccgcacatgctgcccaaatcagtgggaaggaactagaaattgtctctgcatcaaca

SEQ ID NO: 89441 - DNA, 748 bp, Zea Mays
cgggcctcatagaatcacaggtctagggccatgtgggcatctacaacttctactttcctaatgagcctagagtaacaggacccgattccctgtaggtcagggaaatcctctattaggaaatatatatatagggacgaggtaatgtaagccctgggcttccattagtatcagtaagccccagccaggtatagccacgtcccgtaccagcttgcgtctcatcgggcacgagttcttactcgaacagattttagcgtaaaacgtgaaccaaaacagcgtaaatgattacgaattttagcgtaaatcgtagatttgtttcgaaacggcaaatgcggcccgaaaattacggcgtaaaaatctcgtgcgtcccatcgtgatcgggttctgacttggacagattttagcgtaaaacatgaaccaaaacagcgtaaatgattacggattttagtgtaaatcgtagatctatttcgaaacggcgaatgcggtccaaaaattacggcgtaaaaatctcgcgtgtcccatcatgatcgggttctgactcggacagattttaacgtaaaacatgaaccaaaacagcgtaaatgagtatagaatttatcataaatcctatatatgtttggtaacagcaaacggggcccaaaattacggcgtgaaaatagcatgcagccgatcgtgcgcgaattctggcttgaatgatttcagcgtaaaacgtgagctaaacagcgtaaatgattagaaatttagtgtaaaa

SEQ ID NO: 89442 - DNA, 1159 bp, Zea Mays
gttatatggagatatgttatcctgctttttgctatgaatttttcttatgcttttacaggttcttttttgctaacttaaggcaaaggtttggatttgcatgtagaatatactggctagagtttttcagcaaagggtttttatatactaacatctacaaggcatatgtgatgttgattattttgtattgtgcatggtttgctaaggaaatacatatatatttcttttatactaactattgagtggctatgatggcttaaatttccattagaaagttgcgctttaaaggaggtatcctccgtattcatttgagatcttctaagctggtattggggatattttattctgttttcttcttaattaggatggctaataccatccaaacaaagagctattgtctccgtttgttgtgtaactaggatggcttacctccaccccgaaaaagaatgcgggtctatgcgcttcgacaagcattccttttgcgacagtggtacctacaagtaaccagttatgtggggattgattacattgtgcttccactataaactgcacttgttatcttgataatggttaaatccgagccactaaagtgacctttttctcttaggaccactatctgaatactcctgcccccttccccccaattcccatggtggtttttaaaggttggttttgctgctgttgcaggtaacgagacaactaatgtactctttgaattggttaaagcttttattctgttttgtactcgtgtgctcttatctgcttgttgttactgttccgtaagaattttctttatccacaccattgtcagataagtcatgaccaagaccaaaaaacaaccagataatatatactaatagggtcatcatatattgatgaacaatggcacatgaatatatcacttctgttgctagagcaattgaattaacttacataaactatttttaattgaacatgcatggtcatgatggctggttcattgaccattatgaagtgcctgtggatgagagtttctagctgcaataaatgtatgctgaagagtgatgtgatctgcgtgcatgttttttcaagaataagaataggcatgtttctcttttattctgcagtgcatatatagtctcatgttgttttcttctaaaccttgactggtgatgtctctggc

SEQ ID NO: 89443 - DNA, 857 bp, Zea Mays
gtatggaattgccatccactacgtcatcagtggccttcgtgcaggccagttatacatccattgcacccgagatcccccaacgaccctcctagccatttgagaagtatgcatgatccgaggatctccactatcgcaagaatgaggcacaatgcaaaccaagggagccctgacacccatgaaactccaaaacatggtcaagagaacaatagcctccgtcgcccaaccagaaagtcaataaaatcaaccaccagcaacaatttgaggaccccctcgcaactatgaccacaaccagcaatcaggaataggaggtagagcaccaagcgatagggcgtggtcgtgaccccacctgtgatcgcaatccctactgtgttttccacggcgaagacgtcagtcactcaactagggactgtcgtgccaccaaagaaatcaaggagagaatggatgtcgaaaggacagtgaggggtcaccaagaatagctacataaggccataaaccataacatccaaccacaattccaccacccatacaaagaaaggtaccaaccctaccaataataccaacaacactacaacccctgcccaaccacctagaaaggctacaactcccaccaccaccacaaccaatccaacatcaaaggaagctccctctttttccactaaaagaggaggagggttaccccagcctccggttcacagcataatcaacgttgacaccagcgcagacttcaacaccaaaaggcagagaagatattactatcaaagtgtcaatcatgtcaccgtcaacgggccggttgtccagacaaaatggccacacgtccccttgaagtttgatgcaagtgatgtcaaccttcacaatgc

SEQ ID NO: 89444 - DNA, 587 bp, Zea Mays
aagccgccgccaagattcgccaccgataggggaagtagggcgccatttgtgccagcgggagggtggtcgtgatccagcggtgctgtgtgagggtttaatcggtgggcgaactgctagtgctccgggaatttctcaccagcgcgctcttcaccgcgcaacagccgtcgcccgtggacagccatcgattcgtcatccctgccggtgagagctctccccttgcattcgccgtgcctggaattgcgtgaatcgcgttgtaaattagatattagggccctcctggatgggatggtcgaactccggccatctctctgtcgtcagggctggcggcgccgccggtcatgtgtgctggtgcgacgaggaaggaagacctgatgcgcgccgttggatgtgtgtcggacggctaggattagattacatcataccccttcgctcggttgaatcgtagccgtcgatccgtgatcgggtgacctagagcggatttagtcgcttaaaatctactccgttgatgggggatccagcggttgggatcgcgcaccggttcacttgtgtcacggtttaatccggtccgtttaaatctaatcaagcgg

SEQ ID NO: 89445 - DNA, 584 bp, Zea Mays
ctgctgcggggcatagattcaaagacacctgccaattcgtcgcccgcaaggcattgaggaccctatgccagatctatgaagaagaagtagctgacaccccctcagattctttccgccctttcagatcaactgtcccgtttggatggctaggatgtgtgccttggaagggcagcagctgcttgaggacgaccccacagtcgtgtacctcagtgcctacctgctcaccctagatgcccagtatgatttcttggctcggcaccaccgtcagatgattgcccgagcagaagatgcagagaagcgcaaccgtaagctccatgtggatctcacctcagctcaagcccgtgcaagtgcctaggaaagtcgtgaagccattgctgttgaagccctgaagcaagccaatgatgagcacgtccaaaagctgatagaggcctacttggtaacccacaaccaacgtagagctttgcggatccaagagcccgcttcatccaacccagttcaacccaggagagctgaagatccccagattcttgaaggtcacccggtctctaccagaggagaaaagaaggcttgggaactcccggaag

SEQ ID NO: 89446 - DNA, 501 bp, Zea Mays
agaaaacgagagataaggcgatcgagaggtcaaacgacgtgaaaacggcgtttgaacgataaaagtgccataggaggttttggaaatcgaattgaggcacgaaatgacatggaatggagccgatacttcacgaaaaggtttatgtgggagaatatgagtgaagtgtgtgcttggtttgaatttaggcgaagaaagtgaaatatgggcactcggctcgaaaacgatcgctcgaaacggggaatttggtgaaattaaagcctggaatatcggatggacgtgaaatttcgcgaatatgttactggaggtgttgtgaaggtgcctgaaaattttgggttcaattggagcatttttggctggtttgggcatttcaccgaacacgtgacgtgcggagttctagggttttggagaaatggctattagaggctgtgaaaccctccctaaggagctgagaacctacaaggatgttcaaggcacacagaggaacacatttcaccacttggt

SEQ ID NO: 89447 - DNA, 621 bp, Zea Mays
gttcgaactcgaggaattgcgcgccgtcgcctatcctccgccacagatccatcgtgtgacgaagctggggagcattgcttcacaatccatggtatggatcccctcctccatttcgttttgccttcaattcggttttacattaagtagggatcttggtttgcgctccgaagtgggttcttgtgaggttcagcaatggcgccgccgtctgtggctcgggcgccgtcggtgtctggccggagaagttgggaaagttgcgcagaccatagatcctgtgacgtacgattgagattagatggcgaataacgcttcggtcggaatccgcgttagccgtagattcccgatcggatggatactgggtgatttgccccctttaaaactgtgaccgttggatggagatttggcggccttagtttagtactggttcggttagaggtagatgtaatctgatccgtgggttgcgaatcgtgtggttcccgtgcgatgataccccttcgcccgaaacaatttgctaaagagccctcgtattttaatggattcaacctgcagtccactgggactgttcacagagtcttaggaattttctgtactagccccctgaggtttccaggaattgacgctcga

SEQ ID NO: 89448 - DNA, 587 bp, Zea Mays
caatgttcaaattcctataccgatgtgttccttggaataggtaataattttaatcatgacattgatttgtggctctacataaaaatgtgttattggtttgtgttattggtttgtggttctacataaaaatgtgttattgatttatttttttacataaaaatgtgtgggtggctacaggttaattcacaggtgaacgcggatatgaatgagagtggtggacatgcacaaaatgtagatgctaaaaaggtaataatggtattaaagtgcatgtgggactacatattattatatgctgaaaaccaactgtaattttgaatgcataaactggattttgctgtcgatgggataagcttagcaagaccaaataacgcaaaaccaaagggaagatcaattaaggggagtgaacaaaaggttattaaattgggcatgaaaggtacaaagaagaacaggaaatgccagaagtgtggaattgctgatggtcacaacagttgaacatgtttgtcattggaggagaatagggttcgattggctagccttgctggacataagagaggacgaccgcttggatctaggaaaaagttggaagt

SEQ ID NO: 89449 - DNA, 722 bp, Zea Mays
tatttccgtgccatccatttgagtaagccgatatgatcctggccgagtgacttctgctaccatgaatggcccttcccatagtggcgataatttgtgtcgtccttcccccgttagaattcggcgaaggaccaagtctcccactgcgaaggatcgatgtcgtatggccttatcatgatagcgcctcagggtttgctggtaactagctgactgaattatggtattcaatcgttcttcctccaatatatcaatatcttccagtctagtagcttctgcctcagctatgttttcaaagatcagccttggtgccccaaacctgagatcagcaggtagtactgcctccgaaccatagaccataaagaagggagtgtttccatgcaaagctcagctaggttgagttcttaagctccaaaccacatacgacaactctctgatccacttccctgcgaacttttcattcttgtcgaagaccttcttcctgagtgcttccaatatcattccattagccctttctacctgaccgttggctcttgggtgtgctactgatgcatatttgatctggatgcttctttgttcgcagaagtcaaagaattcagagctagtgaaattggatcccaagttagttatactgctatttggtattccaaacctgaatattatatcttgtatgaactccactgccttcgctgaggtcagagaagcaataggtttgcactctatccatt

SEQ ID NO: 89450 - DNA, 2232 bp, Zea Mays
aggggacctatagcatccaaatattttccttggctgttttgctgtcgagcatgttcatctacaaccaggtacatttctaaatgaacgaattagtcacatttggaagtttgaataaggagggtattgtagactacttagggtgcttcagtttttttgtctgaaggacgctaacctacgagcgtgctgctatttcttctagatgggaggtatagatgaatctgcgttggatcgtctctcgctggtcacagagatgacaaagcacatacgtgtccgggcctcaggtggaaggtccactgcatccgaacttgggcagttctcgcctgtctttgtttggttgttgcgagtaatatatttcatcccttttctcctatactaattatgtatactgaacgttgaacgctttgactgttccctagctgcacatcatcttataaaccgtcaaacataaacctcaggccctgttatgcatcagacacctttggtgtgcgacgagccgatgacaccgtgcttcctttactacaggacttttatctggatttggcagaagacaacagaaaaattactccacgggattacctagagctagcattgaggcctgttcaaggtggaggaagggacatatctgcaaagaatgcggtatggtagattttcatgggtgaacgtagctttgtacttgtgcttggtaactagacgtatggactatacttatacttcttttgttgttctggaagatacgggactccatccgtgcactttttccggacagggaatgttttacacttgtgcgacctgtgaacaatgagaaagatctccaacgtcttgatcaacttcctgtaagtatttcttcctttgaactacagctgctatttgtggccttgtacttaaaattctcagcaaatatcatatgttgcaggttagattcaaacttttcctaagctcatttgcgcaaatagcaaagtacccacatacatattgttgtatatattttttgaccatgtattctgaacttctgattggattggactattttaaaaagtttggaaattttcttgaaggtagtgggttaaggtaccagtaagacaaatgaagcttttgtatgctgcagtgcaaactatattattttgtgcattttcccggtaactgtacatttttttatggtaataacatatacttacatggtaccagactaccagtccaataaggcagtctttgacacaacttcggtcactgatttgaattgtgatatttttgtaaaacctgtagattgctcttgaaacatatttacactttaaacagtttgatggcatttacaaattatgtctgtcccttcatgacgtgagccagaatcataatgcacgttctggcataattatattgttctagcagattgatgttggtgcaataattcctaatttcagattgatgttggtgcaataattcctaatttctgtgatgcagctgagtaatttccgtccagagttcagatccggtctggatgctttcacgaaatttgttcttgaccgaacaagaccaaaacaacttggagctactacaatgacaggtcccatccttgctggattgacacaatcgtttcttgatgctattaataatggtgctgtccctacaatctcttcatcatggcaggtatattatgattgcttatagcaatgtggcttctgttgttttttttggcttacagtttcacagatcgcgtttctctctgggtggaagctatctgattcttttaaaaatttattatgcagagtgtggaggaggcagaatgccagagggcatttgattctgctgtgggcacttacaattcttcttttgaccataaaaaacatatagaagaggtgggttgctaataagtgagctcctgaatgttctcatccaaactttttggactttcttgacttatcagcatttgcaggattctttgagagaagcacatgaagatgccatgaggaaggctatcagtgcttttaatgtttctgctgttggtgctgggtcagctcgttcaaaatttgaaaagcttcttcacagttctctcaaaaaggcctttgaggtgatcttatccttactcatcagctgcttttgagtcagcatgccttcttattattttattttcacatggaccattgattaatgcctgccaattgctgaagtaaattacaatatatgagtgggtaggctaacggtgaagcacatgaatgcaggactacaaaaggaatg

SEQ ID NO: 89451 - DNA, 288 bp, Zea Mays
gagccactgcaacgcgtcttgccctaggacaatgggcaagtacgccgtcatgacctcctctgttgccccagcagcccgagcgacagtcgtgtagatggccaaccagcctcccaggtcatgcttaggctcgtacttgtcgacgttggagaccttgaagttgggaggccattggatggctcggagatgcggagtgagcgcggaaactccgcacgtgtccttctgccaatgttcgtgtcgtcgatcccggggagggaagttggtggtaggtcgtctcgaccgtccccgaaa

SEQ ID NO: 89452 - DNA, 546 bp, Zea Mays
taattgcccacttatttggaatacaaaagacggatataattgcccacttatttggaatacaaaagacggatgaggcaccccaagagtgtagatcatctaatcatattagataagcaatagacaccacaacacacaaggcaaatggtattgtttcacattgagagcctaaaactatataaatcttgtagtctcctatgcctttaccatcagttctcgacctcatgatccaacccataagttagctaccaaatattcctcaaatagttgacgcctaaacgtgcaggtgaatgtaccgcttttgacctactaatgtgtggcccaaaacactatgttacgtcgtgtggtcgcacatgggctacaacctaggctaggccttgcatgcaacctagctggagtcatgtctgcctcgccctgaggggcatctgattctatccaatggttgcgttcactttggtaatgtataaaagctgtgattttcttcataccatgtaaaccctagttcatttctattttgcctcgaccatgcggtctccactctttccctct

SEQ ID NO: 89453 - DNA, 341 bp, Zea Mays
tcagtggacttataaccaccgtagccccactacaaaaataatgaacatctcagcccaacattttaagtaaggaaaataaatataaaatgataaagaggcattttctaaataaatcatgaataacccctaatgatgcaataatgggcaaccaaaaatttgctgagtccataataagataaaccaccagagaaaaatgcaaacccatgaaaaaggagcaaaatcatacctattgctaataatttataagaaaggccacttaatccaattaaggaataccacccctttccttaagcaaaaagatgccaaacttcagaatggttgctcttgcgcaaaagagaagc

SEQ ID NO: 89454 - DNA, 685 bp, Zea Mays
ctgcccggaggtcgtcaagtgtcttcctcaacacctccactgcctgggggcccggggccgactgcgtcgcctacgctgcctggaactggcggacctgcccctccagcgcctgcactttcccttccagacgcttcactttctcctctgcctcgagctcaagctcatccagcagcttgttccgccttgcccacatctcctctctaaaggcgaggtccttctcctgccaagtgaggtcagtcgttcgtttcgctagggaggcttccctcgccttgaggtttccctcaacccgagcaatatcactggccttgtcggagagttcctgctgcagcttctgcagcttcgcctcagccgcagcttgcttgtcccgctgtttctccagcactgcattataagctttcagcttatcatggagtgctgtgacggcctcctccttttggtctaggtgttttttattcttggccaagcttctctccttccgggtcacctcctcctctcggtcagacaccttctggatgtcctccttgaagtcctcacgctcttgctcaagctcggcccgctccgaggcgaattggcaggatgccgccttagtgcgcctctccagttgggagcaccagtcgccaaggcgctggtgctcggtctcgagcgccttccactctcgccagatagccgcctcggtttcctagag

SEQ ID NO: 89455 - DNA, 472 bp, Zea Mays
ggagaatggcctttaacgggaaggaggtcaccaccacaactctgtgtgcctgaaaatagtggcgcaatttcctggacgcgacaagtatagcatagataagcttatgcgtctcaaggtacctggcctttgcctcatggaggacctcgctgacgtagtagaccggcttctggatggttcggacccctgcggttagacccgagtcctcagactcctagccttccgtcaacatcgtggtggtcggaccaccaccttctcctaggggaacttcctgactcccctggggacgttgtgccgccctttcaccgaccagcaccatgctcaccacctctgtagccgctgcaatgtataagtacaacggctcccctgcctctggagctaccagtattggtagtgacacaaggtgctgcttcaactcttgaaaggcttgttctgcctcttcggtccaagaaaatggaccggacttccgcaatag

SEQ ID NO: 89456 - DNA, 901 bp, Zea Mays
aaggcttcaaaaggtgccatcttcaggctggattggtaactgttattgtaacagaattctgcgagagaaagacatttgtcccaatccttgccatagtgtatcacacatgctctcaacatgtccttgagaatctgatttactctttccgtttggccatcagtttgaggatgatacgctgagcttctaatcacggttgttccaactaacttttgtagttgttcccagaaacgtgctactaacggtgttcctatatctgatacgatggtcctgggattccatgcaagcagactatttggtcaatatagatatatgtgtattttttggtcctgtgggtggtatgtactggcaagaaatgagctgtcttggttagcctatccagaatgacacaaatggaatcgtggtgccgggaggtgttgggcaatcccacaataaagtccatgctaatgtcctcccacttccaagatggtatgtggagaggttgtaaggtacctgctacctttaaatgactggctttgattctttggcaagtgtcgcactcaaatatgtacttggcaatttccctcttcatcctggtccaccaatacaaggatctgaggtcatgatacattttgttgcttccggggtgtatggaaaatttggagagatgagcctcgtccaaaattttctttctgagttctggatccttgggaacaaccagccggtcctcgaaccataaaatacagttgatgtcctgatgaaagcatttatacttatcaactttttgtttgagcatttccttaatgatttgaacacccttgtcactaagctgtgccacgattatctgctcctgtaaggtcggctcaattgagatataatccagagtacatggggaaacaacttccatgtttagcttgcgcaactc

SEQ ID NO: 89457 - DNA, 1644 bp, Zea Mays
ctgtccgaagtggctttcctggggcacgtgattaatcaacagggcattgcggttgatcccaagaatgttgcggctgtggtggagtggaagagaccctctagtgtctctgaaatccgaagtttcttggggctcgctggatattatcgtagcttcgtaccaaatttttccaacattgataagcctctgactagactcttggagaaggttgttctcttcatctggtccaatgattgcgaggtcagttatcagacattgaagagcaagttggtggacgcccctatcctagctttgcctgagagcggtaagcgtttcacagtttatacgaatgctccgcgtattggtcttggttgtgtgttgatgcaggaaggcagagtgattgcttatggctcaaggcagttgagaaagcatgagggcaattacccaactcatgatcttgaattggccgcggtggtttttgctctaaagtcgtggagacattatctttatggcgaggcttgtgacatttacaccgatcatgaaagtctcaagtatatttttactcagaaggagttgaatttgaggcagcgtcgatggcttgaattgattaaagattatgatttgtccattcattatcacccggggaaggctaatgtagtggctgatgcccttagcaggtccggggttccaaaagtggccttgccgttcatcgctgatctggaccgtttggggatcgctttgtgttatgtcggcaccgctagcgaggagactcgaatgcttattcaatcctccctcatggagagagtgtgtgcgactcagcagcaggatcgtctattgcaggaagctcgaaagagggttggtgatggtaaaccacgggagttcaccattgatgagaatgatttggttcgtttcaggggccgtctttgtgtgcctcagaaatcagaggtgaagatggatatcttgagagaagctcataaaacgccttacactgttcaccctggcgaaaccaagatgtaccgagatttgaagcaaaacttctggtggaagcggatgaaggttgacgtttctaagtatgtggccgcctgtgaagtatgtcaacgcgtgaaggccgagcataagcggtcggcaggtttactgaagccattagaaattccagagtggaaatgggagcatatcaccatggattttgtggtgggtctacctcgttcccctcggggcagggatgttgtatgggtggtagtggatcgcttgactaagtctgcacattttattcccatgaagaccacaaattcaacttcagatttggttcccttgtatatgaaggaagtagtcaggcttcaccgggtacctaagtccattgtttctgatcgagactccaaatttgtatccaaattctgggcgagtcttcacagtgcattgggcaccaagctttcacttagtgtcgcttttcaccctcagactgatggtcaatcagagcgaacgatccaaaccttggaagatatgttgcgtgcttgtgttctgtcatggaagggtagctgggaggatcatcttgcattagcagagtttgcttataacaatagctaccaggcaagcatcaagatgacaccatttgaggctttatatggcaggcggtgtatctcccttctgtgctgggagactttgggagag

SEQ ID NO: 89458 - DNA, 479 bp, Zea Mays
ctgctgagggtgttgctgagggtgagccagcccccgagggtcccgagctcggttcttcttcagctgcttctatggatgttcatgtcagatcaccaccagttcagtctgaggaaccagcggtgacaagccttgagcttcctactgctcttgttggtctggtcactttataggtcaatgacccgggcgctgaggatccgttgcacgctgctggagctaaggtcccactagttgtcgccttgggcatgagctctaatcctcctctagggcttaagtttgctctcgatattggctctactagtgtctcgtcgtttgatggcacgtcggcacctctggctttgggatttgctttgttcctttctaaccttcaggcaagttgatccttaccctactttaccttcgtcaacagaggactcctttgctaattcttgtatttgtagaatgctctgagctctgtgttagctcagctgaggtcgtgcggt

SEQ ID NO: 89459 - DNA, 329 bp, Zea Mays
gggtaatcggggcttgggtgcgcgattcacttttcctctggccagagcccgccgtgagacctcacgccgccgttctcggccggccggcttgtggggagaaaccccttgcgccgtccgatttctttctgatggccgagatttgctacaagttaccgattgggattattagatcgtggccgttagtcctacaatctacgcatgcgattaaacctcaagttgttagactctcatccgtggatgggggatcggacgtctgacgtcgtgtaccggttcggtcccttagatctaaccgtagatcatagatcctatggtctaaacgcatccaagtc

SEQ ID NO: 89460 - DNA, 594 bp, Zea Mays
caacagttagactctatagtggggacctgtattctaccggagggagctctaccggtggtccttgggggtgttgttcttctgacgtcgtccatagggtcgtgtgtagccgtactcccatcatggcgtactatcccatcatctcgtcatttgggtccctgtagcgagtctcccgctgacatccacatagtagtgcgtggggcgggtcagtcatatggagttgacatgtgtcgtgcggtcttgcccatcatcacgagtttgtgtcactcatcggcatgcgtaggggtacacctggtctggtgtatctgttgcgcattatttggtatttgggtcactatataagctctagttttgaggtcttccgtgaatagggttgattgtcccctcgaggcagtgaggttgtgcccggtgtcgtacttgaggtggtgtagtcatgtcgacaaagacccctcgatgcgccctcagtctatcgttcgtatgcctggtcatggcatggggtgacacgttttgtctcagtcagcgtggacttgtagcgttagacttggatctccctctcacagacttactcggcagggacttggtcagtggccccacctc

SEQ ID NO: 89461 - DNA, 440 bp, Zea Mays
tttacttaaaagcgaaaacaaattttatttagagacagagggattatttgcaagatcaaatcttggtttgaagggggcattgtatcaagagaagagaagatcggccttctcatacatacaggtcgacattaattaaccccagcttaaaattacctactgaggccacctaagcctttcgccatattgccagtataaacaaagagcaaacctggacattgtataagcacaccgcaactgatgggggatattgagatgagctcatggtagacttggagttatgtagcgtgctgcattaaaattgtgtttggtttagcttttgtcaaaaactataccaaatggctcaatccactagcagctgttttttaaaaacccaatttctggctcgcagcttctagacatgcttttggatgcgacttccaccaaacagattttgtttttat

SEQ ID NO: 89462 - DNA, 301 bp, Zea Mays
ctggaccaagaaatcagagatctagaagctatccaccaacaagtggaaagaagaagggagacaatgcttcggctgactgaactccagaagaagattgatgaagcagccgaagagatgtgtcacatcacacaagacaacaagcaagggcgtaggccacaacagagagagcttcatcaggaaagcccaagctatgatgacatatggaatgacgattttcatcatgataacattgcttttgatgatgcttcccccctagctacagaattgcaggctacgccatggccaccttcgtacaaaccac

SEQ ID NO: 89463 - DNA, 289 bp, Zea Mays
gtgagacaagatttggaataagaaagatattataaagtcaaggagtcaggtaagaaatagcaaggagttagacaagacatatttcttggtggccaagagtgaaataagataactatgaatattgaagtggggataaatgatacaaccaaggatatgaagtgagttagggagaaagcattatcaaggagaaaagtagagaggcaaagatttaatatatatcaaggtatatattgcgcaagggtggcaatacaatggtaacaatgcaaaagtataagaattcaagggttat

SEQ ID NO: 89464 - DNA, 473 bp, Zea Mays
gttcgaccggggtgctcggggaaggagaatgcctcctgagcgtccgatcggctgtggacagcttggattacatgaacgcttaccccttcgcatcataaaatccggaccattggatatcaatccggtggcctctgttcagtggtagtaccttctaatcgggaccgtcgctttgtgatccagccgccaagatcctagcgtacccttcggcctggcatatttgctaaagagaccccgacagacacttgaatcaaaccgccatccaccagtactgttctttgagtctcgggattgtttcacagagacccctgctcttccctgttttcatgtgcccagtccagagatgtttaaaaacagagaaataattatagaaattcgtttttaatacaaaaacaaatctataaacttgtaaaatgcatagaaaattcattttagcttcaaattgaaccattctaatttctaaaattttgtaatat

SEQ ID NO: 89465 - DNA, 509 bp, Zea Mays
attttgtctacctcaaggtctccccaatgtgtggagtcaaaagattccaagcaaaagggaagctagctccacgattcgttggcccctatcctatcatcggcagaataggaccagcagcttactgccttcagttaccagagtctatgtcagatatccacaatgtatttcatgtatcttagctctggaaatgcataaaagtaccagagagtcacatcgcagaggagtcagttcagattcaaaaaagatctacagtaccgagaaaagccagtgaaaattcttgattcagccattcaaaagacccgaaactcaaaagtaaggctctgtaaagtccagtggagcagagaaggagaagaggaggctacctgggagagtgaggactcattgaggagggaatacccttaccttttctcaaacccagcctaaatctcgagggcgagattcctttaagtgggataggtctgtaacatcccagtttttagtcccaaggttagaaaccctaaactcctaac

SEQ ID NO: 89466 - DNA, 599 bp, Zea Mays
atgatgttattgggtatctcgaatctgaagataatttcctggatgaactataccgctttggctgaggtcagggttgcaatcagcttgtattctatgcattttgtaaatttgtcaatggctaccagcacatgtgtgtaccctccttgagcttttttgaacgactcgatcatgtctagtccccagcatgcgaagggccaggtgatcggaatagtttgcagctgctgcgctagcaggtgttgttgcttggacaaaaattggcatgcttcacatctttggactaggtcggttgtatctttctttgttgttggccaataaaagcatgctatgaaatccttccccacaagagtcctagatgctgggctcgtttgtcagtagtaatgtagatgtccacctccccgaatagttgttccaaagtggtgggtgccttctaaaggatagcccagatgaaggtcgagtcattggactcgcggtagaagtcctcgatcatggttgcctctgcgacgtcagggatgcggttactcatggtttggaaacgccttaggaacaagcggagggtctcgtcgctttgaagtttgatggacttgaggtcccagggttgc

SEQ ID NO: 89467 - DNA, 779 bp, Zea Mays
ctcagaccagtcaaaggtttagtgggcaaccacagaattgtcaaggaagcgtcgtgaacacaccgaccaagaacaacaacacaactaccccagtccaacctaatggttgtttcaagtgtggtgaacttggccaccatgccaacaactgcccaaggcgttatcaacagacaccccagaagaacaacaactagaggactgactagaacacacctgctcgtggatctgcacagaacaaaactccacagaaccagagtaggggaagagtcaatcatgtgacaacagaatcagttcttgagtatgccgacgtggtgtatggtatgtttcttattaactccatcatcagttttatttgattctggagcatctcactcctaagtaacaaagtcattcgtggaaaaacataatataccaaactatcccttgaagaagaaactattaattcgatcacgaggaggtgaacttagagccactcactcatgccctcagactaagatcaaaattagaggcctaagctttctagtagagctgataattttggaatcaagtggaatcgatgtgatacttggaatagactacttgaccaagtatgatggagtaatatcctgtgccaaaaggatggttacattaaccagtccgcaaggagaaagaattgaggtcaatgtcagtatgccagcaacagtagaagcaatggtaaatcagttggaagagaaatctttggagcacatcagaatagtgtatgaatacccaggcgtatttccggaagaattaccaggtatggc

SEQ ID NO: 89468 - DNA, 454 bp, Zea Mays
aacagaagcgtagttaccgtagaaagtgttgggatcaatcggagggatatctggcatggcagcaccctgtttcctcttcctcgacgccattacgataccgcatgcagaaggctcaagaacaacgcaagaaaaagtgggagtttaagaggctagagtgcggcggaggagaaacaaagttagggttcatgcaccaagaaaccgttgacaaagatataagcgaacgtgttaagttgggcgcaacgtggcaggctggtagctcggaccagtttttggcataatagagcagaatgggtcggacagtgtttttcggtcaggtacacttaagcattttcaaaagctaaaatcgtcgattgagttcaccagaatcaattcatcaagcaaaaacatgaactatacaagaacatatatgcaacgagcatatttcattcaactggtagaagaacattacaaaagg

SEQ ID NO: 89469 - DNA, 765 bp, Zea Mays
cgctaaaatacttaatgcacatagttgatttgtcactttatggttgatttggtgataaggggatcacgagaggattcaagagaattgaggtccctccaaccctcataattcctggtcaccaaatcagcccttaggagtctgcctagccccattagtcaggccaactgcctccatctcgtggggagctaaagcagtaacacattttcactcactctctcactccactcacttgctctctctagttctttctcacactttctctaagcacaagagaaaggagaagccagggtagggtaaggtaaggagaaggagagaatagtgagcaccactagcaagaaggccacagagatcaagtaaaggtgatgaccataagaagttggggattgaagaggaaggaggcctctcttcccaacggtttggagttaggaagctgtcattatagaagccattattacggttggtacatctacgagatagcatacagtacaaattaatatcttaataaaatggaactcaaaatactatagctcattaaagtcgtccatgacattggggtcactattggtctcctctttctcccgctcatcttgttgctgttacttctccttcctcagttcctctccacatcatatccttgtcatcctacaattttgcataaaggagcacacgaaaagaagagcacgaacacgaaaagaaagagcgaaagaccagtacatgcacactataattgctctaacaacaataacaaaacaacaatactaagtt

SEQ ID NO: 89470 - DNA, 703 bp, Zea Mays
gatgacttataactcaagacattgactccatataaacatacggtatgaccgctggttttaaagacccacaacatctttcattgaacctatgcccttttattttctcttagacacacgcagtaaacacacaattcatgaacagatagaaccataaagaaatctctggctattgcacaataatctgatagagaagaaaacatgcctcaacaattattagacagaggtcatgcggggattcatgatgcagcatgcatgagccatgcatgagttaagcggtgtccagtattatcttgtgtcatgcacgaggggtggttaattccgatccagctacaataaacatatgggctaatgaaccaaatacctcgaacaatagccatccactacgtatctgtcgtccattctttgcatcggaaggccaccgaccaactctatctcattcccaactatcctagctctcgcgaaacagtacacactcagcttcgaatgaagctacaataaaatgctcgctaaggactcgtcgcaagcgcacgacggccttgtagctcctcactcctgaggaagcacttctcctagccactagcaatggcttgtgatgcttcatctctcttcttcgtcacggcgctcgtgacgatggcgctcatcatgctcatcgtcgacggcatcactatgtgccacgttgtgcggcatcttgctcacgccccgg

SEQ ID NO: 89471 - DNA, 503 bp, Zea Mays
gtttttatgctatgtcattaccccagtttgttatattattagccaacttcagtaaatttagatttatttctagtctctaataactagcaagtgtatcaaacaggttctaagaatggcctatcgatcagcattcagcacgcgtttcccacaagagcaatcaggaagcgaacgcgccaacgacagctcggcaagagagagacgagagtcctcgctgtcgctggacacatggctgtccagtcaagtaaagaagcggagccctctaatgaaaggccgggtgtactgtagctaggtctgcaggttgtttcggctcgtgctggctggaatggatgcatgctgcggtaactctgcctctttcttctcctctcgctcggaagttgcgtgtgccataccgctatcatggccctaccacacctttagaaaaatagcacacatgcagcagcagagcatggctacaatgtcgtccgaagccgctgttatatatcccatcgaggatatggcctggc

SEQ ID NO: 89472 - DNA, 1580 bp, Zea Mays
ggagggttgtcagatgaaggaaaagtgggcaaagattaaggaccctgaaaataaggtggaggaggaaggtgaccatagcctgaaggcctagggtcaccagggataggtcctggagtagcgtcaggagcagactgcaaaaatgagtaatcaaactcctcagcttcatccttaggagttatgaagggcacaccatactcctgttggttccattcattgagagtctcggggtaggcaggagttggaggaggagtagggcgctgaggcatggggtggcccatggaagctatgaagcttcgcatgtcatcatgaagcgcctaggtttggtgtttgtgcacagcctcctcaacagcacgactgcggcacatggcgaagaccccagcgatccccttagctaggcgcacaaataggccctcaccatgacctctaccttgaccctgacctctgcctcgacctccacagtccatcggacacgaggcagcagcaacatgagaggaggtctcgtcgagtgaaggctgaggtggcggctcatctgaagatgcaaggcctcctgacccagctagagcccgcttggaccgtgcttctgggttactggaataaacctagtatagcacgtagtgagaatgtttcacaggcttctaaaattttatctgagtgacaactttgatcatcttcatgataaagggcacatggagacaccccttcaatggagaccaagatgctcgaagtatatcctcccagatcatatcaaacacattgacacgagcagtgttgttgggagtcagaagtaaaaggagaacatgactctgcccaaggacgttcatttggttcccgcccttaggaagaatggtcatcccagaaatagaatttaggtaccgatactacctgtgcatgttggaagtgatctataactccctttcatttgaaatatgcacaattttctgctcttccctccgaggcagacgaatgtcatgaactctgaggttgctgtccttgatatcttcatctgagaaacccaaaatatgagcaaagcggtggtagctgaccttgtgccaaatcccctggagaaagaagtacataactaggtaatcatacacatcaacttcctcatcaacctttttaatccagagagtggcatagaattgggcaatgactccagggatattgcatggtcatcatgttcttcactcctttctattcatacatcctcagagcccgagatatgtcttcatcattcatcctctcacatcttgcctagtcaatcaccctgtgacgaatagctgggtgcttcttggtaaggatgacaatgttatagaaatctgcctgaaataagttctaggatcttggatcaggaaccccaggatgtctgggaggacagtaggattggtgaatctgatctcctgaagagcatccactcccttcacggtgaagtcaggctgggcatcatgagggccctaagtcacagtggcttggtgcatgctgagacccccaacaaatggagcattagaatgaggaggatcaatgtctacatcctgagcaccgtcttcctcctaacagggaaaactccctctagaagaatctcc

SEQ ID NO: 89473 - DNA, 417 bp, Zea Mays
gcagccacctattggaccagaacgggatgccttccccattaccaactatgaattccacagcaaccttgaaaataacctgagcattttgagtgatttgaaattttgaataggtaatcctgcccaaggcgagaactgtctgtcttgtcaagacaaagccacctaacgcggagaggccatcctaaatacaccagatcatgaatatcaatccctccatattgtagtggcattttgactagattccaggaaaccagacagtttccatcattcgcttttgcttgaacaagtcgattttcttttgattactcaagtccatagatgcatctattcatatcttatggaaagatgatttccatcaaatagcacatctttggaagagggattttatttctttagaccatcagaattcagtactttttt

SEQ ID NO: 89474 - DNA, 581 bp, Zea Mays
caacaatctaggaggaactataacacactaaatgtgtctcatgtaactatggtcaaaacatcaaatacccttactcaaattgttgaaaatagctagctacaacggctagctaacatggacaggcaccggtctgtctcatgctagcaatggagtgtcagttgggtgtgcaaaatttttgcaccactttcaatgactagttttggactttgggctatatataccaccccacagagccattttatgagtgtgggtgctgagaaacatcgcaagtgagttaacactaatttctagtagctctagacaccaatatgctcaaatatcacttggtgattagcataggtactctgcaaaatacttagattagttagaccgcatccattagtgtttgctctaggtttagtatgagtgattagaaatgagatattagacacctcttatcccttgggcttgtgtgtgctattgtattggttgtactagggctggaaacactcggcttggtgtggctcgctcagtggccgagcttagcttggctcgcctactcaacgagctgtaaaaggaggctcgactcgactcaataccgg

SEQ ID NO: 89475 - DNA, 540 bp, Zea Mays
caaggccggaagacggcggttcaccgacgagcttatctgctcaagccgcaaagcaggggggtacgacggtgagtcaccggagtggcgtccagcgtacggggtgatgatcttttaccccgcgatgctatccagcaactccaggcacgaatccagtcgccggtgacacgaatcgcggcgaaggatcggtcgtcggcggtggtagactgtcgcgctggtgttcagatcttcatcaggcactgtaccatgggatgctccatttagttaacctgacaaccatagtttagggccagatttcttccaaatttctatgacaacacatctagatctctgcagcaaagttgttcctctataatggctctacaactttgttatagcaaccctaggtaaattctcactggatcatagtcggaatggctctcaaactgggatctaggtcactgtcaatctgaagttcagacggtatcagcctgacagcctgacttcaggcttaattatctccaatatcttctcaacaactatgcttacactcttaagcaaaat

SEQ ID NO: 89476 - DNA, 734 bp, Zea Mays
gtaggaagaacagatagcttacatttagatgaaaaaagacataaacataatgtcatacgtcatttaagatgttcatgacgataaaacccagaattcaccacccaaaagactagtttttgtgagaccagctaacacaacatgcctagtgttataaacacacttgtgtcaacagacatgcattgtagtgtttcatctgcctaaaagcataaatagtactacatgttattcagtctaatcagaggcttcattgtgtcaatcatagctgaacctcctaatatcagatgggagtggtttgatcttgttcagactgtggaatgtcaagtaatgtagaagagtagcacggttctcaagggataggtcctgcaatacaagtatacgtgtcagaataaaattaaaatttcaaatggatgtatattaagtgtggacatatcagttagaataccgtgtcaatctcatcaggcatatacccttctgtatattcataaaagataatatatctggtgacaaagaagccacaatcatttgagcctactggcatagttggacagtctttaacaagatcaatcttgaaattcccaaatttagaaagcattgccttcggcctagccagttgcattcccatgctaagtcgggacatcatcaatctggaccaagcatattttttcttctcaaaagttatgatttcattgtaataatgtttccagttggtaccaccaattgcaggaccatacggg

SEQ ID NO: 89477 - DNA, 655 bp, Zea Mays
gaggcacaaagtcatgccttgcagagtccgccttgcctgacctaggggttggaggctgcactcgaccctcaatggtcagaattcatgggatcgtactgatgaccatccaggaaagggtacaaaagagtcaggctttgacacacatgtatggttcgaatgacaacacgagtgttgttagcatacgagctctaacattgaggagagatcgaatgaccattctagaaaaggcacaaacaaatgtccatcacctgcacaaaagctaatcatggctaaaccactcaatggcctgaaggacaactaaggacatgttgcaagacaagacaaggcacatcagtgtggcatgtgtggctacgttgatgtgatggaaggggacaatgtcagcttgcttgggaggtcctttggtcaacaagtatccaagaggacaagaaacaacatgacaatgctaggcctccgtctgtcccgcctaacccctagatttatgtaatagcacctcccttctgcttggtctccaaaaggaaggggaggaacacaaaagggcaacaagctagcacaagtagccaacacctataaccgcaccaatcacttcactcgcactccacaccagaggcttgggcatcgagccctcccttgcccaagtttgtaatttgttcctgtt

SEQ ID NO: 89478 - DNA, 427 bp, Zea Mays
tacaaaaaacggctagatattacatcaatattttacagaaaataccacacagcataaggggaacttttgtttaggctatcttcagcggtctctcatatcacatctcttattttaaactctactttataaacagtgtaataagcggtctaacatctcttattttaaactccacttcgtaaacgttctctcatatcacatctcttattttcacggcttctggagaacaatcacttgctattactgactgacatgtccactcctcatatgtgagatattggggttgatatatatgttgttcgtttccatgtaattgttgtgcactaacatttatcgaatactttgtacaccgtcgcaacgcacgggcactcacctagtgttatatatatctaaggttaataagctatgaaacacattattaaacattact

SEQ ID NO: 89479 - DNA, 385 bp, Zea Mays
gaaaaggaaaaaacgtgtggatgatctcatagactcacagagaggagctattgacaagtttttcaagagcaatgctagtgcttcgacgaatccaaatgacacgtttgcgttggcaatagttcccgtggggacagaggaaccaaccaatgagaattctagagaagaagaacatgttgatatcaacgtcgatgataacaatgtaagtgaccatgagaatatgtctaattcatcagatgcacatgcacagtttggtagcgttgatgaacaacctgacatgcacaactttgaatcaaatacaaggtatggtgcaatactttgaggcatacagaaatgaggggtttccttctagtctgatcatatccaaaggcattgggatgaaatggtt

SEQ ID NO: 89480 - DNA, 605 bp, Zea Mays
tgttgctgctagtgaggtaagcatcattaaagtcatctgcttgataaaaccactgtacttaatagcttcatgtgttgtatacatttgcttcttggttgatgtcctttgctcttgaattagcattctttagaatctagtcatctttctttttacaagacatttcattttaatttcatcaatatccgtaccaactttttatcttatttactaggactttaaagcacgagatttgtacgtcgtgcatcacacgcgaagcgcttcctcctcttcattgttgttgtcgtatattaacatccaagtccccatctctttccccatcttcgccttcatctcccaaattcttccacaccacagagtcatgcgttgcgtgcgaagtgcctagatctattttctcctctaggtgtcgtctaataaccagataaccaacaatgtaaccaacatgagcgcttcttcctcctctttgttgttgtcgtcgtatattaacctccaactccctagctccttttgcatctctatctcccttacccatgttcatttgcaccaccatagaggacatcgaccttccctcatcgacaaccacctcaaatcgttgtcgcgcctctctt

SEQ ID NO: 89481 - DNA, 382 bp, Zea Mays
attcgttagaccaaaagacataacagtgaactcatacaacccatacttggtaatgaatgtcgtcttcagaatgtctgcgggtcggatcctgagctgatgataacctaacctcagatctatctttgagaacacgctggctcctctcaactggtcgaacagatcttctattttgggcaaagggtacttgtttttaatcgtgacctcattcagagctcgataatcgttgcacatccttcagatgtcatctttcttctccacgaacaggataggggcagcccaaggcgaagtgcttggccttatataacctttctctgacagctcatcgatctgcttcttgagttcaaccaactctggtccagataccctgtaggctcttttagag

SEQ ID NO: 89482 - DNA, 1019 bp, Zea Mays
tgaaccgttggctggaggtccctcgcaggccgctggcccgatccccaccacttttttgtggtcacacgcgccggcttctccttcagtccttctcccgcttccgcttccgcgatggtatcctaccatccctcccttctccgtccatccgtcctcatcgcccaggccagcggcatcggccggtgcccaacactcaacgccttcctttccacccccgtcgtctccgcggtgccacttcgcctgcggcctctgcgcgccgccgccggtggagcagcctcgccggtaacgtccaaaccttgaccccctcgcctcaagctacatgctactcgctactcctaggggtatgcttctgtcgagttgtaaatgcctgttttctcggttgctccgcaggtcagtggcgatggaggcaaacgcgctgttccgccgcctgccgcgctgcttgtcttcgcgcgtagcaacttcctcccgcttggtgagttaccagagtttgtcttggctgtttatgtaggtaatgcgatgcttgtctgcttttccaataaaataaaataaagtaaaaaaataaaaaaaaaatagagtgacgcttgtctcaactgtacagtatttaggcacaattgacaatggttcaatgcacttattatctccaaatccaaaatagcctttgcatctgtgtcattctgaattttgactatagaaagcagaaacacagtgtagtagcgatagatatgtttgtttctcaaatgcagaaaattctggtgtagatcaaggatgatgtgatgttaaaaaaatgaagtttctgtatagagatcatttctgtaattggttttcacgatattgctatgtagttgacaagatcatgcaaatgtctcctgttttgaacttatatgtggactgatgccaaatagtctctaggtgagttggttaggtggtctgagtagcactcaggttttgagtttgactgtatgcgagcgaatttcaggctagtgtgttggtggggcaggtgttttctcgacctatgcgaggac

SEQ ID NO: 89483 - DNA, 309 bp, Zea Mays
cgcaagctccgtcactacttcgatgaccacaaagtcgtagtagtcactggttttccaataggggatattcttcacaacaaagaagccatcgggagaatagccaaatgggcctgcgagctgggatctcacgacattgaatttcgacctcgtactgccattaaaactcaagcactggttgactttgtatcggtgtggactgaacaacaagtaccagataacccagaaactgcagaagtatggcgaatgtattttgatggctcgttaaagctgcagggagcaggcgcaggaatcctctttactgcacctggg

SEQ ID NO: 89484 - DNA, 683 bp, Zea Mays
ttgggctcgctcgtcggcggtgatgtagatgttcacctcctagaacagttattctgaggtgacgggtgccttttggaggatggctcggacgaaggctgagtcattgaatcctcgatagaaatcctcgatcacagctgcctccgcgacttcaggaatgcggttcctcatggtttggaatctcctgtgaaacgagcggagggtctcgtcgctctggcgcttgatggatttgagatcccacggttgtgtcggtttgtcagagagggattggaaattcgtgacaaaccgacggttgaagtcttcccagtcgtcgatgcagtgtcgcggtatatgccggagccactgcagcgcgtcgtgccccaggacaatgggtaggtacgctgtcatgacatcctccattaccccagcagcccgggcggcggtcatgtagactgccaactagcctctcgggtcctgcttgggctcgtacttgtcgatgttggagactttgaagtttggaggccactggatagctcagagttgggggtaagagcggagaccccgcacgtccccctatcctctcgtcggtgatcgtgtcgtcagtcccggggaagcgaacgtgcgtcatgtcgcttagatcatcccagggctaggctgctagtggaagttgtctctgactcggttctagtcacacagctacacgccgg

SEQ ID NO: 89485 - DNA, 1032 bp, Zea Mays
ggcgatgtgagatatgagagagagtagtgctcgtcgccgttgctatcaaagtcgagcaagcccgtggcctagacctcgatattggtgcaagggcgatcaacagagaatgccgcacaaggtcttaacttcatagatgaccgacgtttggcgcaaaacctgccggagcatgagcctcggggcggagccacacgacgtcttcgaccagcctcgctctcacctctgcaactatggtgagacaccccctaccattctatccatgatccccacattgcatagccctattcacataagaggttagttcactggaaagcctggaatgccattgacgaccatggcactgcagtattgcatgcgccagcgctgctacccgggttcgtggggtggaagaagagggtgtttgggccgttggaacatatgtgggtggccaggatcttatcatgcgtacccttttaccaaggatagatcggggccattggatagccatcgtacgactgtgattgggtgttgatgataccgcttcggggtcgaacttgggctattggatgacaatccaatggtcagtggtcagcggtcgcttatgtgtagccaaaccgtgggatctcggttgtgcagccaagattgagggtggggcaatgtagatcgtgaccgttagatcgcttatgtgtggtacgaattagaacctagagtaacccttcatcccttttaatctatgtcgtcaggtttagatctgatggctgagacgcaacgataccccttcggcctgtgagtttcgcatatgagccctcagggttatatgcattaaacccgccatccatgttaaagctgatggaataacaaataagtcctcggaatttgcaaactggtccctggtatttacgttcatgcccttgacaactcttttggcataaaaataaatataaaaactaacccgaaatcttcttgcatatctctcacgtcttaactccgttttgctccattcaaaaggcattagcttcgtaattaaattgtttatgccttaaaacattattttct

SEQ ID NO: 89486 - DNA, 646 bp, Zea Mays
tcccactccttcacacaaagaagtaaacaattatcatcatgaatgaatttagaaagttgcaaacaaccaaagacactaatattagtaccgtacatatatttttaacattttcctccatcaacagagacctagagctcttgacggatttttggtgataaaagttagtcttccaaaatagcagatactaattgggtctaactagaccttccgcgtttatttaccaaggtgtgttagttgccgccaacatgctcttctagaacactattttgaacatgtgaaaagcttagcctggtctgaaatcttccatgtaatttatttttatcttccctcattcacctgctcaaaattatttgaacaaatatttgatactgctgttaatctatatttgagaaaggcatgtatgaaaaatgggagactccatttgagcacaacccttaagcatttggcaacacatttttcatttctatttgcttactttatctatagttgcctctgctgtagagtttgaattgcatgatatgcttggtatgctgtggtactccaccctttttagctccatcaattagaaaactcattttggcttggttttggtgactggaaggagtctctagccagtcagagaaatattgctagttttacatataac

SEQ ID NO: 89487 - DNA, 333 bp, Zea Mays
ggctgattggaccacctcaccaatcggaagaaatgaaaggtcatactgtgcaattgagacctaacatacctgcgtggacacctccaccttattcgcccatgccatatccatacacatatttacctccaccatatgtctcaaaccaaatgtggggcatgccaccatatccatttgggatgccacagtaccctgcttggggggcaccccaaacatctgtatttgataggttggcacctccagtacaagaccgattgagcgccgctcaatccgatcatcaggcacaggcccaacaagagtgccgaagtactcggcctcaaaggccgaccaatccgg

SEQ ID NO: 89488 - DNA, 398 bp, Zea Mays
ggtcataacacttcggaatgagatccttgagaaggacaagatcccactttattttagttgagaggttaaaatctagcgaagctatactagctagtctttctgaagtggaacaaaaaatggagaagtttgagaagaaggaaaaagcagatgtgaagcatattgctgatttagaatatgctctttctattcaagtgggactgcacagatccaaagtggaaggactggagaagaagcttgatgaagtcactgaaaactttaacgtcgaacaagcaaaacacgagatatctgatacagagtcgttggcagtttagaaaaatgttgaggagcttcgtcaggtaaaagaggagtgctacaacgtcgctatggaatgttgcaacaagctgaaaaatagctttgct

SEQ ID NO: 89489 - DNA, 413 bp, Zea Mays
tctctggcaggtgtcacactcggatatatacttagcaatttccctcttcattctggtccaccagtatagggatctgagatcatgatacatcttgttactgccggggtgcatggagaatttcgaaaggtgagcttcttccaatatcttctttctgagctcagggttcttgggaacaaccaatctgcctccaaaccatagggttcctttgctgtcctgacagaagcatttgtatttgtccaccttttgtttgatcatttccttaatgactttaacacccttgtctccaatctgtgccatgactatttgctcttgtaatgtgggctccactgaaatataacttaaagcaccggaggaaatgacttctaggttcagcttgcacaactcatcacatagggtggtgacccttgcatcca

SEQ ID NO: 89490 - DNA, 411 bp, Zea Mays
aagcgacccacgattaatttcaccttttgctggacatcgcgtagggctagactcgttcgatttggactggtagggtgcgagattgtcgtggccggcctggcactgccgtgttgcctggcagcgccgccgccgtcgtgatcgtttgggaggagatgaaccagggccgtggatctttggatggatggtctggattaggcggggatgtaccggttcacgtgattgaatccgcaacatccgttcgttgatgaacgatgtagattaaatgatggggtgagtagatcggggccatcggatcgggatccaacagttgcgaatgaatgctggcgcgttttaatgagaatctaatcctggcgctttgttgccgattggacgggtcaggacgatagataccccttcgctcggacataattg

SEQ ID NO: 89491 - DNA, 473 bp, Zea Mays
gttgccctatggtgacacgattagcctagctagaggtggtgcgactcatttcagccccacgtgtctttgtggtgttaatttagcaaagtttatcatcatcgtcattattttcaattacatatggtggtgttaatattatatttaaatacactagcgatcctcaaacttgtaagaatgtgtcatttagatccacgaacattaaaatacaattgagtccctaaacttgttaagtggtgcaatcttaggtccatgatgtcagttgcatgtgtgttccatgctaacatggaattactaacttggtatgtcttttatatttaacccctcaactttatttgtgtcccatgaataggaccttgcttccatcttctctcttgctaaagctagcctgttggataccgcgattcccttcaattcgctattgcttatgtttgtcacatagttccttttctctactcctataaagcaccagtttc

SEQ ID NO: 89492 - DNA, 582 bp, Zea Mays
gcagtatcgggacgaatgaaaacaagctgcttgaagggataggaaggtgggcgaggtgaagaacgattctgattaaaaggttggatcaccaacccagttcttttctcaggcccttgatttgacctttcacctccaaacccctttgatttcccatgcccgacatttttggcttccactgccagtgttgtactgacagccctactgtaggtgagatccaagcatgttgccattttcagttgaagcctgtcattaagtaccctcatgaaacaattctttttcttcagatcagtattcacttggtcgatatcatactgggatagatggttgaatttgttgagatattgcgtgatagtatctcccccttgctttaactggatgaactcttcttgcttcatatggacactccctctagaacatagtgttcatggaatgctaacttgaattcctcccaagtgatctgatgtccagctggttgaattgctacaaaatttgcccaccatgtactggcaggtcctctcagctgttgggcagcaaacaatggcttctgcgtctctgtgcagcgaatcaatccaaacttttgtt

SEQ ID NO: 89493 - DNA, 951 bp, Zea Mays
tccaagtaccaggtcaggtccaaatatttccctctctccagcttgtgaccaatttagcggtgttctacaccttctcccatataaggcctcgaacggtgccatctttaggctagactggtagctgttgttataagagaattctgccaaggaaaggcacttgtcccaattcttcccatagtgtagcacacaggctcgcaacatgtcctcgagaatttggttcactctctccgtctgtccatctgtctgaggatggtatgctgagcttctaatcacagtggttccaagtgacttttggagctgctcccaaaaacgtgccacaaacagtgctcctctgtcagatacaatagtcttcggaattccatgcaaacacactatttgatcaatatagatctatgcatatttctctgtcttgtgggtggtatgcactggcaagaaatgagtcgtcttggttaatctatccacaatgacccaaacagaatcgtggtgtcgggatgtgttgggtaaacccacaataaaatccatgctgaggtcctcccatttccaagatggtatgggaagaggctgcaaggttcccgctacttcaaatgactgaccttgactctttggcaagtgtcgcattcagatacatacttagcaatttccctcttcatcctggtccaccagtacaaagatctgagatcatgatacatcttgttactaccggggtgcatggaaaatttggaaaggtgagcttcatccaatactttctttctgagttcgggattcttaggaacaaccaatcgatcttgaaaccatagaactcccttgctgtcctgacggaagcatttgtacttatctaccttctgctcgagcatttccttgatgacttgaacacccttgtcaccaatctgggccatgattatctgctcatgtagagtgggctctactgaaatataactcaaggtacttgag

SEQ ID NO: 89494 - DNA, 1212 bp, Zea Mays
attacttgcatctaagtgcttgtagtatgggatacaagccggtcggtagagggagaagttctcatgtccctggtgatgattagggcaagtgccaatatcggtcgtggaggtgaaaaaccatgaactgttctcctccttgaatgaagccctggtctcctctatttatagcctcaaggaggactcccaggagcgccacggtttgtcacgtatgggagaggagatgtgtctgagcccctgtagctggtatgaccctcggtgtggcctttgtacttgctattgacttgagccaggaggaggatatttgatccctgtatttgcatctttgactgtgcagagagccgaggccagggtctggggttcggacgtgtacccgagcctatctaatggaggcgctatcagagtcatggttgttgaaacagtgataggtatggtgaaaagcgtatggtaatccatcatatatggcataatgcatacttgacattggcactgtagccatcccattaccggcagcctgcacggaggaattgatgacgttctttggtcgatgttatctaggccgatgccaggctcagacgagacagaggttccttctgaagccttggccgagcctgctttagggcatgcagtcgtatagggaggggttagtatagttgtcagagtggccttctgcgagattcgctgggagttgttgccgtggtagttggctgaagccgagctcgggcgaggcggagttttctcctaggctgaggtcaacttcgggcgagacagagtttcctccccaggtgagaccatgccttgaagtacacacgtcccgtacggagttgtttgagtacagccgagacggcgtggaggagcagtggtcgttattctcgggcgtgtgtcatcgtagttcgtgaaactggatgggaccataatcacgtcactccctgttcgactgaggtgtcacctggggcaggcatttacattaaatgctcatgtctctgcggttctcgtgacctttgactgacgttgggcacgaggttgtcctcttgtccgagatgggctcgggcatggcagaaattgccattccgtgaagaggggacctcgagcgggacgaggatttccccgaatgttgccctcgcccgagggcaggcttaggcggggcagagttttgagcggccgatgagtggattctctgacgaatcgtgcttatggtaatttaactgttaagca

SEQ ID NO: 89495 - DNA, 1200 bp, Zea Mays
gtgaggtacaaatcagcatggtacagcccaccgactaacatcaatttaggtcctagtacagccgccgcctagtccagcagggtacagccgccgcctgaatccagcatggtacagccgtacatgctgactccagccttttacagccgcaacagccaaacaccggaaacacaagtaggagcttgaagccatcgacgactgttctggcgctattactgtggcaaggtgtttcctgccgtacaagagagaagaaacatcaaaaggtttgtagatcataagtaccatctgccacaatgaaaactgtcctaggtattactcctaatggatattatgatccgtgatccatccatctaggtgcaggaacagaacttgtggcctaatgttggggctgaaaccattaatcttaccattcttttgattgttcttccaagattcgccatcttccaagtctccaagatagagcactcgccatcttccaggattaaccgtcaagttttcttcccttgctgctgatagagacaacctcatattcagtttgaaatctgtccagccaaggggaaccagtgtctgcacaagttgacaggttagtgactaatatagtacatgtttcagatttcacattagtttacaggttacacataaaaacttaacatgtttcacagacagaacaatagttcaaaggtttcagatttcacataggtctcacatattcacgcccaagttcacaggtacacagattcatagaatttacacataagttcataggtttctgtgatgttcactggtacacacacaaaagttaacaggtttcacagactcaaaattggtttagttcacacacaagttcataaaagaagcttcagttcacacaagttcataggtttccgtgatgctcacatgagcagcccctcaccaatacaggtttcacagatttaacactggttcagttcacacacaagttcacaaaacaagctttagttcacacaagttcataggtttccctgatggtcacagtgagcagcccctcaccaatacaggtttcacagactgaacactggttcagatcatacacaagttcacaaaacaagctttagttcagtagttcagacaactattttgaagagcggctctagagtgacccattttgccaattgtgtcacttgcaaataaatcaaacgtgagtcacaattgagtattcattct

SEQ ID NO: 89496 - DNA, 482 bp, Zea Mays
atgtatatttaatgagtagagggatatataagggaaaatttagggggaacggttgcgggacgagtgaatataggggatgcaattttgctgacgtgactgtatagtaatatttaggggagaaaatttagggggaacggttgcggataacctgaatgatgcgcctgtgtgtccagtgtctacggtcacagtccgcgcaggggcaggtggaccagctctgaagagatctcacagtcacctgtagactgtgggcactggcacagcgcggcagtcctcacggtcacggaccccggacgctgtcccaatccatgcagcagcgtactgtactcacggaatgcattggaattggatggagcccttgacaggatggaccgacagacaacaagaatcgttgatataaatgatgcatccggaagctgttgctggcgcgggtgagtgctaaacattttgttcagagaatggcggtggcgatttgatggacatga

SEQ ID NO: 89497 - DNA, 325 bp, Zea Mays
tcgatttctggtacgcagattctctttttaaaccatactgtgccttgatcatcttccgtgaaatctggggctttacccaaactaatcaaagctttaatttctttgattttctcatcggactcttgtcctttacgaatctcttcttccaaagtagattcaacttccataactgttgcttctacattattgagcactccaagattgagtcgttccatttcccagcacaattcctgtgacatcaaatgagtggtgatgttgttcacttgacccttacggctcaaagcatcagctactacatttgcttttccggggtgatattgtatct

SEQ ID NO: 89498 - DNA, 599 bp, Zea Mays
acttgctcagcgaaggggtattctcagatgagggccgttcagatcaaatccgagggccacgattagatcccgcgctttatgaatcggtacgaaattaggcccatccaatcccgttctaacggtaagcgtttaatgaatcctagagttgatttccaccataggatcacacatccatggccaccacccgcccgatcgactcgatacgcggcctcaaatcctagtcggccagccgccatccaacggttgatggcaaacagccatcgccgagcagcagcggcggtgctgcgccattgccgaaaaccgcaatcccgcgatcccagtcgccgagcttaagtctaatgcatccaatcgcatgtatgagtgatttcgaaacaacatatgaacacgtaccggcccacggcgatccgagtaatcccaaccacagcattgcggtgaattcgccgtgacgatgacaaattggaggcgcccagatcgctcgcccttcttgattccgctgcgagcgcgttcaggatgatccggtggagctccacgactcaaccccgagcacccgctgacggtgtacggcgtgaatggcaacagcgcacgccaccaatttcacc

SEQ ID NO: 89499 - DNA, 417 bp, Zea Mays
ggtgaagtcaagctccaggcgacgggcgatttctcaccgaagctgtacccatttccgcctgccgcatgacgccgtggtcgggcctctgagcttcatcccctcggtaagaaaactatcgctggtgatcgctttgtctcccgcaccgcttagctcggtctaatttagtgcttagtactcgggggtgatcgatcgactacctcaccggcgtgtgccgccgtccgtgctcggtgttgccgcgcagcggatttgggggaggaagaagaactgtgggccgtaggatctcaggttgacggctctgattagaagcaggcgataccccttcgcgacattaaatcggggacgttgatctttgatcggacgacgcaggattgatctgcgggctcggttgacgcgggccatggatcgctgatccaaccg

SEQ ID NO: 89500 - DNA, 832 bp, Zea Mays
aagaataggacatcactgatctagaactcgcacttgctaagcttggcatacagttgacaatctcgtagcctctgaagtactttcctcaaatgctcctcatactcttgctcattctgcgaatatataagaatatcatcaatgaacaccactacgaacttgtcgaggtagtccatgaacacactgttcatcaagtacatgaagtaagctggcgcattcgtcaaactgaatgacatgaccgtgaactcatatagtctgtacttagtgatgaatgctgtcttcggtatatctgagggtcaaattctgagctgatggtagcctgacctcagatctatcttcgagaacacactggctcctctcaactgatcgattaattcttcaattctgggcagggggtacttgttcttgatagtaacctcatccaaaactcgataatcgatgcacatcctcttcgtgccatccttcttctccacaaataacactggggttgcccaaggcaaggtactcggtctgatgtagcctttctctaacaactcatcaatctgcttcttgagttccaccaactctggtccggacactcgataggctctcttggaaataggggcggtgcctagaataagctctatggcaaattcaaccttcctttcaggtggcatacctggtaactcctcaggaaacacatctgggaaatctgatactaaactgatagcctctgatggtttaatctcctcaatatgagtggtgacttggtgacaactccctttccttgatccagacaagaccaattccactaacacttcttctcctgatagggacactaccttcactgttctct

SEQ ID NO: 89501 - DNA, 733 bp, Zea Mays
catcctcactctctttgttttttaaaacccattttgtacctatgggataacagtttgaaggaggtggcaccaaaacccaaacccgatttctctcaaaattttcaaactcctcatgcatagcactgacctagttaggatcacacaagtgtgtctaacatccggggcccaaaagtagcaagaaaagctgagtgagcaaagtgggacatctgatgctacctggagcgagtgactcgctcatcaatctcaccaatcatctgatgaggagggtggtcacgctgaacatgccgtggagccgtcctcgaagaggtagcctccccctcaacaccagtctcaactcctctagtctcaataggagcttactcgagtggacccccaagtggtagaagaagtggggtcgggtccatcaggcgaagtagtggaagcgagcttgactaggacagctagtagagtcgactcgggatcaccccaattggcgtcgtcatgctcctcctccacaaatatggtctgtcccatcggatctagacctgcaggctcaaagacaggggatggacaaggtgtagtctcatcgaatgtaacctcactcgctctccctctctttacctctctatacgttatatacgactctccctctctccctctctatatctcctataagactctcctctatatacgtaactcgataatatatgtaactcgataatatctgtcacgactctgtgtacgtgagacatcg

SEQ ID NO: 89502 - DNA, 519 bp, Zea Mays
atatgatgaggtatcctaggtacatatcatcaatagtagaccttgacctttgtgtgactacaaaaattgattggagggtttatcttgatggaagttagaatgtgagaaacttttgcgtttggatgatctattgttggtgaagtcaattgggtccatgtagtgcacccaatgggtgtaacacatgagccttgaagtggttttaaggatttaacagagggtaatattaaagtcagtgcccccttctacacaagtaccatgcataccaagtgatggttaaggtgtagcatgacaatgacatgcataagcaattgtggtcaaagacgttgccaaatgcgtcatgatttgcttgagggagccaatggcgacatgtcgaaatggttgtggtagaaggcatggttggagacatttgaccatcgagggaatcctagtggagatatgcttgagtggtcatagttgatcacatcgtcaatgatgaccaactcaaggtaacccgtcgaaggcgtactcgagtggtcaacg

SEQ ID NO: 89503 - DNA, 678 bp, Zea Mays
tgtttattcaaggttagtgtggtaaatttgttcctctctatttgttcattaattgattgcctattttttattctagaatgatttgttaattctagttgttaatcttgatttgaatcatctagatcgttgctaacacatcaatttagtgacctgcaaagtttgggtgatgtagtggcgcctgtgagggtgatgcagtggggttcctctcgacacacatgttgttctagttcaagctagaacacgtctacaccattttgtatcacatatgggagatccaagaggatgcaccaaaaatggggggagggtcaacggtagcccctcaccagtggacagtggtgacccaatggtggacactggtcggagtatataactgccatggtgaggtttaggccaagatgaggtggatttggcaagacaatacctccaggtcggcacaatagagggttgtctgaggaaacaacgttgaggagtcgttatcctataatgagtcttcccagaaaagatggagtttcaccgctgtagttaatgacgtagtccaaacttccaaagctgagcttggacaggggtcaaggatctgtgggcagagatgatctcattagagaagcgcatgtcaccttcaagggtgatgcctccaactttgacagtaaggacattggcctaaaccatcgaaaggcgatg

SEQ ID NO: 89504 - DNA, 1422 bp, Zea Mays
gaccaagtgtgttagttagtcctatgtaaatgcatgcatgtggttaaagttgtgtacctatttaagtacctagaacatctatatcttcactcctttatttttcatggaagtttactatcatgtcatttatcatagtggattagtttcttaatttcataagaagctagaataacaaggttacattcacataaagttgagtacatcaagaccatccatacaacaatatgattacttaaacaagaacatgaagccgataaacattattaaagcaaaaaagttcccactatatagtttccttgcttttctagctcaattaccttgctcatgttaccattcatcttgttcaaagaaacaataatgtcctaatttttagtcacatatgactacttgtactcgctcatctttagcacaatcaatcatgcccctttcatcatgctatctaacttaaacttcacggtgtaggcatccattcacatgacaaatttgcattgtttaagaacctaaaccaacaaattaaactcaattagaacctacgcatggcatcaaccgaactaatgtagtcattaccacaatcaaatgggcaagggaacatcaccacaaagaggatggacctttcctagttgtggcttgctctcacacttcacaaactcctggctatacttgttatgctttgaccttttacatctaagcctcactaatgactccaacatggacacttatgatagcgggtgagtggcattgacacgtacctaggccatccaatgccaccgttgaaagagctgctcacacgtgacctgatcacgaagaaggagtgctagtggagggaggagcatggaggggatgttagttgtgcgaaatgccaaagcgggaaaccatgatgaccggagttgtagcctgtcatctcgaccagttccaaagtgagtatcaccatcgtggggaggagacatcagccgtggggagagggaaagccaacgagggtagtagaaccactgtaaccatcgctaggaactccaaagcgacgagcgctagtgcgggaacgtgtgtggaggggatgtagccgtggtaaaggtcatcacggggagcagggatgacataaatgaagtttggagtcgtggtcgactgtcgtgactagatccaaagcttctacctctgatacagggtggggatggccattgcagatagcgtggaagtcgatgatgtagagcgaggccacgactgatctttgagagcagcgttggagtgacatagacgaaacgagactagaggagggaagatcgatggcttggggagtggcgtcgtagagcgccaataggggtcgacatctacttcaatttgactcaaatgaggaacattttgatgttgacgatgggtttcgtctgtaaatggatcgaagccatcgtacgtgtaactgtgtaagtgaca

SEQ ID NO: 89505 - DNA, 335 bp, Zea Mays
ccgactccccagtggcacgcgagactcctctcccttgtggcggttgtggtcctaaccggagatggaccgaccgccgctcatcaaggggagtgcccgaacgtcgaggaagagaatccctccgatccctttccccatgatcatcataatccctgggctagtgatcgtccgcaggagggaagggaggcaaccccccctccccaaggccgcatctgtagtattagctagggttgcattgacactgacattgtatggtagacaaatggattctccatgatctccatatttatttaatagtttaaaaaaaacaagaatcgagtgtttacaatcaaactatg

SEQ ID NO: 89506 - DNA, 434 bp, Zea Mays
gaaagctactggtaaggaacagtaccacaacaacttcggttgttacggattcattgctcgctctaatgcaagctacccggtgccaacataccggaaaaaatggctcggggcctggatggaggagtggttttacgttaaaaatgatctgattaaaatgaaggatatcaaggaaatcatccagcgccccatctggtctcgcttcggccttcgaaggccgaaggtggctattgaaggtgacgtcgaagcgtgccagaaggcctttagcaatgtttgtgccttcattggcacaagagatatagtccaagagcacatagcctatagggtgtggccacttgtggatagctgggaaatgccgaaggagactactgttgaatccagtgaaggtggcctagttcgattgaaatataccttcagattcagagagaagtttgatg

SEQ ID NO: 89507 - DNA, 418 bp, Zea Mays
catgagtgtatcctccttgagctttcttgaaaggtccaatcatatccagtccccagcatgcgaatggccaagttactggtatggtttgcagttgctgtgctggtagatgttgttgctttgacaggtactggcaagcttcgcacctcggaactaactcggctgcatcacttttcgctgttggccaatagaatcccgacctgaagaccttcccgactagtgtcttggacactgcgtgtattccacattgtccagcatggacctcatctagaagtcgcttcctagtagatgagagaatgcatttcatgaggatgcctgatgcacttcttctgtatagtgtctcccccaatgagtgtgtagtgagctgactgtctagcgatgcgctcggctgcatttttatcgtctggttcctcttcattct

SEQ ID NO: 89508 - DNA, 352 bp, Zea Mays
ttaattacaaattagttttaatcagactaacaaataattaattaattagttaaaacatgtttacgacaaaacaatgctactgactcgtacacgacgaggttacaaagttaacgcgactgaaactagtcaaatcatgtttgcgacgtaaaatatattgaaaaaattaatattttgcgcatttaatgtgatgctgcgtattttcattggttaaaacttaccacacggatggccacgggtttgaagacacagaaaaactgaccggatctagtgtggccacacatggaatggcattgcacatggccaaccaggcattaatacgtggctgtcagttttctttcccacacacattacg

SEQ ID NO: 89509 - DNA, 1197 bp, Zea Mays
ccatgatctagtaagaattcctctaaggatgctatagcaaagatgaatagggattatagctctacaactttgctaaagagagattaacaaggcatcatatgaaaacttgaaattcgggcactgtaaaatgatctgtcaggtagactgatggtgtcgcgccatggtacagtgcaccgggggggatcaggttcagaacctcaccaccgacaatctctacattgtgattctcgccgccgccgcgatctgtgtttgctggtaaggggataaccttgataaggtaaagatcttggcactggattaactcaggctcgagcgtggatgaggttcgccgtacccccttgtcttgcggctagcgcggataagttcaccggtgatggcctcctgctggtctagtgccacgtgctctggtacctccactgcatcgctgtgaccagtcataactctcgattgatcgccggagtgattgccacggtagtaggacaccaatccactgcgctagtaaccttccgctcctccgactgccgcgcgtcatcactcgaattcccagccaccgctcttgcctagtataaattgaggccaccgtgagcttcgtaggatcatcacgcacctagccaccaagtattgtcctcagtcgatcaccagagagcttcaatttaggatttcccccaatctgctcaagaacaccgcacagtttcaacttcaccgcggccagctcaattcaggtctactcataccttctgctccctcgtttgagtgttcttatgtactagtgatgctcatcgacccacccaattaaactgagctgccttagatcatcaggaatgcgcttagtggtccgttgttgccgctgtcaccgtgggcagagcactgtagggctccaatccagaaattagttgaggggaaacattacttagagctggaattaggtttaaaccaaagattagcaccggtcttagtgtaatccggccagtattagctcaccggagctcggctccccaccggtcaccgtcgtgggtttcagaccgtgaagaaataaaagtccagggacttttctgcatatgtcagtgactcatttaaatagtagttagggttcttaaccagttattcaagtcttccgggacctctgtgcaaatctatcaagcgcacgcgggcacgtccccgtttcctgtgtggactgggctgactgggccggtttcg

SEQ ID NO: 89510 - DNA, 637 bp, Zea Mays
gtaatcatgcccataccatttaggttattcttagcatgtaaggagcttgttgttattcttagcatagctgctatgtccctttttattttcatttcatttacgcgctcttatttttcattaccgtaggttccttttacttccaatgaccctaacccgcaatttagaattttagactatgcttctaaacagttgttttggtactgattcaactatggtctgtgttgtggcctccatggccctgcagccctatcatgcgtactttggatctctacaaattttggatttagtctgctagctaactgcttgaactttatatattgggagaaataacgatagcgccataggtaaagtaatcatgcaattagctggcagtgtttgtcgacctcgctgttttagatttcattttttcgaccatgattcagctgaattttcctaataaaactaacacgatggctttaatcaaagagatcgttatttttgtttatcatgtagtgttcagtatattctgtaggttagtaccaactttttgtgtaaatgtgctccaggtctctgggtttttcttgatatgtcatttgttgttttatatatagggtgttaatgtcattcatccatttccctgttatagaaacttagtgaa

SEQ ID NO: 89511 - DNA, 1081 bp, Zea Mays
tgggttttgattttttgagaagtcaaagcagttacagtaaccccaaccaaacatgtcttagagcaactgaggcagatcgggggcaaaataggccatgacgcccctcaattttgtacacccttttatgtctaatgattattagtgctaagtgtataaaaaatcaaagttttaggtagtataaagtcttgttctaaaccttaaaacccaatatctagtggctacaattagctcagaggtttagaatggatcaactaattgttagttatacccctcaaataagtattagttgttagatgctccaaccaacccaactaaaaccagtgaacaattagctttagaggtttggaacattgcctaaaacaatcctgtcataagccttctcgtcgaatcctctcggtcccgtccttgcatctaccagtctgaccctaaactttccaacaccacctaaaccagtttgcttgttatcccgtttctgccgccgacccattcccgatgcgcactgccagactccgacccttcctggcgcctctgtcccatgccttgttttcatcgtgacgccaatccgcctgacaagctagatctcgcttgtcacaactatatgacatgtccccgacggtcgtcgaactggcgaaccagtaagcaatggctctcatgtgatctttatagcccccattaattctcgtcctgcgcccgccgctggagaaactccaatagctcctaaaaatatagcttccaaaacgtggagattagggtatccttaaaagtattaaatccaaaaaacgacaatacttcaatagcttctaatatttttcctaaatccattttgaattggtcattatgggccatacctttttatcttcgtgctcgttggaagcatgaccagcgcgctttccatgggccaaaacgtgatcaacggccagcactccaacaggtggccagctcgacgcatgcatgggcctgcccgaagatcgagcgtgggacaggaacgatgcgtagggcgcgaacgcgtgggaaggcagcgtattgttgcaaaatgttcattttcactcttaagtttcttgacctaatttttaagcctttc

SEQ ID NO: 89512 - DNA, 537 bp, Zea Mays
ccaggcccgagctattgatgaacaccagttttttctttctactacttattaaactccaaacccagataaattgcccgcccccaactatcatacttcaccaacctacccggtttgaagtggttttcaaaagaaagtttcatcgtttttggaccaaaaacaaatccaataaacacatgataagtgtttcccaacaaaggaaagtcttcgaacttctgcaaattttgagaaataccccaagaatagattgggacatagtaaacccaagtaaataagtaatcttccaaaaaccatatctaactcttgaaaaaataggaagctggctagaaacatctagagattttataaaatcattctaatcagtgtttaaacccctctccaccaagaaaaacaccagacacaatcaacctgaaagcatgcaaatgttgtacactagtgttgcttgcatcttttatttttgttgtggaaagttctaattatgtttagtcattagggtgtttcaagatttttcaatacctttcttgacattccgtatacttt

SEQ ID NO: 89513 - DNA, 724 bp, Zea Mays
agtaggagcgatgaccaactgtcttgcaacgaaaacaccttggctctaggtggcagaaagcaacgaggtgatcatccgtgaagcaattgaaacaacgacctttcaagtcttttggcaccaggcgacgtgcccgcagtgcactaaggcgatgcttcttcgccttcctagattcaactctggtccacccaccaactgttgtcttcggcgcactctccaacccacgaaaccggctatgttgatgctcgtgatgagggttaaacgtcctggtctcaagtggggagggctccctcggagacgaaatagtctgtgctggaacaagcggaacccgcgggtgaagcagaatatcacggaacagaggccggccagcccaagaacgtggttgtagaccgtcgtcaggggaacccgccgcactctcaactccatctctagaacttggaccgtccctgggtggcagaggatgacgatttcggggaaggggaggaaggggcagatggtgaggcgacctagcggagggaagtagcggtggcaccggatatggtgtggacggtggtcggagtgggatggcaggcagccgaccgtccctgggtggcggaggttgacaattccggggaaggggagaaaggggcagatggtgaggcgacctggcgaagggaagcagcggtggcgccgtttatggagtgtatggcggccggagttgggtggtaggcaaccggaccgttgggag

SEQ ID NO: 89514 - DNA, 719 bp, Zea Mays
agagaagagcaaacattttgatgcactatataccatgaagaagggggtttctctaatggcatggctcaaagttgtcctattggcccacaagacaggctccgagtggtcaatccacctcttaccatattttgcaagcagctatagcttctggattcaattccttgaggatatctatgtttgctcgcttgacctacccattgctctgagtgatgtggagaggtgaagtatagtttgaaaccatgttatcatagtaggcctcaaacagggagttggtgaattgtgtgccattgtgtgtgatgatctagtttaggtccctaaagcagtcggtgatcccctttaggatcttgactgcagaatgcctaccattcctagttacgagcatgttcttaagccaatttgtgaatttgtcaatggaaccatagatgtctttgttgtttcctacttccttgagaaagggtcctagaatgtcaaacccccaaaccatgaaggtccatgagagggaatgacttgcagtgcttgagcgagggtgtgaatctatttagcatgaaactggcagccttgcacctttttactagctctatggaatcttcgagggctataggacagtagaagtcgcgttagaaggcattcccaaccaacgtgtaggccatggagtggctactgcacttgccctctgtagcaccttagtttttggctctagaggttagaagccctaattc

SEQ ID NO: 89515 - DNA, 660 bp, Zea Mays
tccgttcatctggttacatgcagtagaaaaaaaagaaaactctcgtcaccattaacgcttgacggtataggggagagtggaggaaggaactggtgtagtgatctggtgtggacaacagcgcggtggtgcgtgcgggtagagcctcggggtggacctcggtgacctgatgtatcgcgcgggggaagatttcggccggacattaccgtgcgccgccatcagactattcactcccttgtgacgttgtcggccaagttccctccattggtggtgagttctcctgctcggtccctgttgagccttcgctgtgcgcgtagtgtcggacgagtccacagatagggtcacgtcggtccggttcgccggaatgatacgcgcgcgcgccgctgctatcctgtctgcggcatgttctgaggaggaagatgagtacctacgtcgttggatgatcagtggactgtccagatctgtcaatagcgtattcctcaaccgtaagcagtgtgggtcgtcgatctagacatgtctggctcagataaggtctagtatttgactcgtgccgcgtgttctggttcgtcaatctcggatcgaacacgcagagtgagagcgagtggcgggtagtagagattctaatctgaaccgtcgggctctgatcggacggtccgattcttc

SEQ ID NO: 89516 - DNA, 291 bp, Zea Mays
acaatacaatagatcccttggtattcttactgtcttataagcatggtctttgaggtgtcgcctaggtgtctaggtgtgcccccaacgccacagggcaccatggtaacactttgttgcctatatgtacaggcgtgcccccaatgcctcaaaggctaagcttataaaatacatagattatgctaatgttttggtggctaccccagtgtatgtcctgtgtgttatatgatgctatgtttcaggtttttgtatgtgtatatttttgtaattctgtgatttgggttttacatgtgt

SEQ ID NO: 89517 - DNA, 660 bp, Zea Mays
cccatccaacggccagccacacatcctggccgagccgtgccgcaggccaaatccccaccgctcatcagaaaccaacggacagggggggtcgtcttccacccctcggtcgcaacagggagaaagcaaccgaagcaccgccggtgagctcgccgtagctcgacgatttggcgtgcccgtgccccccccccccaaatccaacatgaatacagaaataggtggaggagatattggcgaacgcaatagaaggatgcctactggcggtggtgccgtggggggggacttgcccaccacgcagcacagatccacgacggcgaaacgggttcggccataagtccacgatgacccagtgcatgaatcccaactcaatacggccctaaacgcatctgggggacatgaggaaggcaaggagcttaccagagtttgaagttgctaaatcgctcgccatgcagtgcagcggcaatgcgtccacgctcaaattccggtaagaaattgcccagttgtgagaccatcgcgtcactcgtaatccatgcacggcggctatgaatatggaggcacacgtccgctgcttttctctagagcgaccgagacggcaacggtgctaatcctccacggtccgaggctcttctctcccatgactacgccgggcaccaccatcggtcg

SEQ ID NO: 89518 - DNA, 281 bp, Zea Mays
cagggaaccccggccacggtgggtccgctgggtccacgtgcgacgagtcgggtgatgacgtggcaatgattcagcgtgggttctccggggtcatggtgtcatcgcgcgagggtattgaccgcgtttatacttgcatattatgactgcaacggttacataaatcgacacagcgatgtggtctggtcggtgtggtgtagtgtttgcgatttatgcttgtatacttcgatgttaacaactgcgtatcaatcgggctcgcagtgtttacgatcatatacacaaca

SEQ ID NO: 89519 - DNA, 536 bp, Zea Mays
gttgatgttccctgatgggtatgcatctaacctgagtaggggggtgaacttatctactatgcgagtcttagggatgaagagtcatgacttccacatatggattgaacggattcttcctgcgatggttcgaggctatgtccctgagcatgtctggctagcgctttcagagttgagctattttttccgtcagctttgtgcaaaagagttatctcggaccatggttgcagacttggaaagattggcccccgtgttactgtgtaagcttgagaagatatttccacccggcttcttcaatccaatgcagcatttgattcttcatctcccctatgaggcacgaatgggggggcccgtgcagggacgttggtgctatccaatcgagagatgtctaaagactattcgaaagaaatgtagaaataaatgcaaaatcgaggcttccattgcagaggcatacattctagaggatgtctcaaacttcacaacaacttattatggtgacaaactgccgagcgtgcataatccaccccctcgttacaatg

SEQ ID NO: 89520 - DNA, 526 bp, Zea Mays
aaatttcatatatcttgcaggttagcgtgggctacaaagctttgaataggtgtaaacgctcagaaaaaggtgaattggtctaaacgcccccaaaaaagatatatagtggaaggatcaaaatgtataagaggtgaattgtataagagggaggtgatgagttagtctaaatttattttgcacaaatgacaccgaatattcattatacatgtgacatgatagaaatcacatgtatagcttcatcgtacattgtattgttatagaaccaatgttcatgataaatctttccttgaagccgactggttcattacatgcttaaaccttatcgtagttctaaaactcttgggtatatgacacactcttcttctaagtagtaaaagttcaaagaggtgggtgaaaaaaagacaagagcaattactttcgcactcaacaagtattccactttgggataaacaagtattccactttgagataagtggtctggctataagactgtgtccagcagttcacccatatggtcacccaaaac

SEQ ID NO: 89521 - DNA, 482 bp, Zea Mays
gtactctccgtcaacgagattgcaatctaatgaatgcaatgagtaaggtacatgcatggtatgatatgcaatttagcaattaaactttgatggtgaatgattaaattaataaggtagagctcaatcttgctactgaaggttcttgtggcatacttagcaaattagggtcaagcttggttaagttgattggtaagtttattttggtgccttactgatttccctttaatttcttagtgagagtttattaaggtttcttagctgaatcattacagtggcttcttactggtgtataagtctctgtctcaaaatttaaggtttaaaaagtgagtggttctctctgtataaaattagcaaatattaaggcagagggggtgtttgaactacaactaccttttaacagagggttattttccaagacttatttttgctggcatctagatgttatataatgaccttgtacaaatttttagccactaataccc

SEQ ID NO: 89522 - DNA, 1510 bp, Zea Mays
cgctaacttgatgttggactaactagactcctaggcatttctcgagcttggccaaaatacactatcattagaatttccccatatttttcttgaacatgcaagtgtcttaatagaagaagaaaatgtttaacaaagacagaaaaagctgatacatatgtgccacacaaacaagagatgtgatacaaacaagaaaatttgtcagcacttgcaaaaggcaatatctgtgttcagtattgtcatttaaatgcagttccttgtacctttagttaataccatgtatcatattgttgcttaccttcatttgcacaggtctgaaatacataaaaatttgaagtgtagccgctgtgacaaggatggagatccagctttggatggtactggttttgcagccactggtcataaggcttcaatacctggagtgcaagattatgctgatattggtgggtttggtgagatatctggatgtttgcagaaaatgaatagcacacatcagcaggtaattttgatggcaccctatttatatgttgcctagctctgcagtagccagtaatctttgtttaacttgacccattggggaagactggacaaggcatttcttcagctttaaacctcaagggattcgattaattttctatgcccacttttttcagattggaagacctactgaagaagacttaggaagttggggacatcactgtgacccatcaactgtacctgatactatactgcagtgttctgctggcgaagaggtgacagcctaagaccctctgtgcatctgcatctcattggtttggttcataaatctaactctctccattccaaactacaagttttggcatttatatgtagcattacatatatttcactatgtatctggacatgatgtatatccaggtgcatagacaaagttatgcacttagaaaagccaaatcgacttataatttgaaacatagggggtacttattttaggattgtaagtctcagacccagtatctttttctctggatccacttgtttgtttctacatttatattgatacgcagctctcctgctttttcgaaaaaaaagtctgcatttgagaacaaacttttgcattacaaacaacatctatggcatctgtgctgcagattttagtttaaacttagttgttaggagataaccacgagtccacgactggtaacaatgcacatgtgcattttgcaggtttcttttgttttcaccaatcaggttgatggaaaacttgttccagttgaatctatggtgcgatcagcagctcatcaacaaaacggaatagcagccaccggagaaaaaggagtgcagatacccaattctcctagcaaacctggaaagcaatccttaaatggcaagaatttgaagatgggatttcatttaaagaattcgtctttgaaatgttcaaccaaatccagaccatcaccaaattgcttgcaagggttgatgaaaaccagcccctttttggatcaacctcaaattaaaaagcttcatgttgctt

SEQ ID NO: 89523 - DNA, 608 bp, Zea Mays
ttaaatcagtttttttttgtttccatgtatgtcaatccattttctctcaacgcacattcttgttatcctaaatttatgcacatgcagcaagaaactgattcttcactcatcgtaccatattgcataaatatttaaaatgtgtagcacaattaatattagtatatatcataaaatatttttaaagaacatatctgcatggctgttatagagatcatatatttatagatagaataaagcattcaaatcagattttttttgtttccatgcacgccaatcaatttcctaaatttgtgtgcatgatttccaaagtttttgcacatacaaatcgaaacaaatatgcatacataggccaggttagaggggaggtttgatctgatacatggcaggaagacgcaccagagcgtatacacctggttattaggtacaatctaggagtgactggagcatcctgtaattggaagccttgctcccaatatcccctgcccccacaccccatctgatcgtatgattcggtccttcaccatttctcggctcgtgcagcgtctactatcgtcggctcagaatctcagatgacccctccctctagtctttctagggtgaggctaccc

SEQ ID NO: 89524 - DNA, 405 bp, Zea Mays
aaaaaagaccagatgcaaaaaaaaggtacaaataagatctccagttaaaatgagaccagatgccttctgatgtctggctgctagaacttgttatcgtggtcaacatgacatgacaagacggggaacaaaccaaaaggtaaacaacatgattcatgaaccactatggccttgtttaaacgaccaataggacataaagcgatgcagccatgcataaccaccaaatcaataaactagcttatagtggcctggtccattttcttcctcataaatcaataaactagcttacaggctttatcctacctggctctccaaccaaacagatcgtaactgaagtagtgaagttgaggtttgactactattttactgaaggagtacagggtatgcattgattactacaatgcttta

SEQ ID NO: 89525 - DNA, 322 bp, Zea Mays
caattgtattagttatattatcatgtgttcaaccaaggtcaaaacgaggaaacagtcgactcaagaaatacaccacagagtagagcaatccaccaaacataataaaattaggacagcaacacagcagttgcttgtttcagtcataactcttcaaatatttatccaaaaatagtgaacaaatactttttggaaagcttgggaaacgctctacaactttggtattatcgtctcaatatgactagactcttagcaaagtcgaactgtgcaaaaataacaggtttgtccaggttgaacagattcagacttgcgacttcaaaaattc

SEQ ID NO: 89526 - DNA, 564 bp, Zea Mays
accctgtgtgatgagttgtgcaagctgaacctggaagttgtaccttccggtgaattaagttatatctcggtggagcccacattgcaagaacaaatagtcctggcacagattgaggataagggtgttcaagttatcaaggaaatgatcaagcaaaaggcagaaaaatacaagtgtttccgtcaggacagcaagggaattttatggtttggagatcgattggttgttcccaagaaccctgagctcagaaagaagatactggatgaagctcacctttccaagttctccatgcaccctggtagcaacaagatgtaccatgatctcagatctttatattggtggaccaggatgaagagggaaattgccaagtatatatccgagtgtgacacctgccagagaatcaaagccagtcatttaaaggcagcgggccctttgcaacctcttcccataccatcttggaaatgggaggacatttgcatggactttatcataggattgcccaatacctctaggcaccatgattccatttgggttattgtggacaggctgaccaagactgcccatttc

SEQ ID NO: 89527 - DNA, 853 bp, Zea Mays
aaccaaactagctgaacaacactgaccactgaaatagccatacaatatccaacacgagaaagcgcatcagccaccttgttttccttaccctgcttatacaccacccgaaactgcatacccatcaacttagacatggctttacgctgcaactcagaatgtaactcctgattgcctagaaaactaagggatcgatgatctgttcgaatttcaaactccaccctttgtaggtaatgacaccagcgatccactgccatgatcaaagcgatgaactccttttcataaattaagagcttatgatttttgattccaagggctttactcaaataagccaaaggctgaccctactgcatgagtaccgccccaacaccgtcatcgcaagcatcggtctccaccgcaaacggtaacataaaatctggcaaggccaagactggagtggttaccatcgcctgtttaagacgctcaaaagccacaactgcctcttctgtccaccaaaacatcccttttttcagcagtcgagttaatggccgaactatacccccataaccttgcacaaaccttcggtaataaccagttaagcctaaaaaccccctcagctgaataatagttgtgggtcgaggccaatttaccatagcagttgtcttctgaggacctgttgccacctcgttagatgaaataatatgacccagatatgtcagttctgtgcgaccaaaaacacacttcttgtgcttgagaaagaaccgatgactacgtaaagcagcaaacaccagtcgtaaatgctccaaatgcgactgccaactgggactgtacaccagaatatcgtctataaacaccataacaaatttgcgaagatatg

SEQ ID NO: 89528 - DNA, 2049 bp, Zea Mays
aggtcggaccctggggttcgggtgaccaagggaatctctagaggagtagagggaatgccatacttttccacaaaactagtggctatgaaggagtgggatgctccagaatcgaaaagtacggtagcgggagtaaattcaacaaggaactcaccgagtactactcccggagcctgctgagcttcttgggcatcgacgtgatttacacgtgcccttccttggtacggagccttgttctgctggctgacggcagagggcgccttgggggtggatgccgaggtattcttggggccattcaccgagttggagtaggcgggtactggtggcttcagctgcggacagttgttcttgaagtgactgggatcaccgcagtgccaacatgcatttgccgggggttggttgcttgccactgagggggaatggaaggagctctgactctgctggctgaatcgcgatggagtgggtctagctggtctactgaagtttggccccttgtgtggaaacccaaatgattgagtcttctggtgccggtcctgctgctgtgcccggagaacctggaacttccttttaagatgccctttttcttcctcctttgccctttcaacttgcatggccttgttggaaaggtgagagaagttgaggaagtcttggctagccagaattgtcttgagttctggcctgagtcccttcaggaaacgggccatcttcttgctctcggtactgacatcatctggcgcatagcgggctaactctatgaacttgtgcacatattcgctgacagatcttccgtcttgagtcaattctcggaactcgtcctccttaagctgtaccaggccttggggcacatggtgctctcggaaagctgcttcaaattccgcccaggtagcatctctgatggtgacattgaaggtgtcccaccaggctaaggccatcccagaaagttggtgggcaaccagttgaacacgctgattttctgggcaatcaatggcttccagttttcttttgatcgtacgcatccaatcgtctgcatcgagggggttgcttgatccagcgaacgtgggaggtttgagtctcaggaaatcccccattctgtcttgtggtcttccaccattcggccgttgattctccagatttcgagtgaggacctcgatgagtcgggtttgattggctagaacttgggctaggtctaaggatagtggtggaggtgcgaggaggtgggtttcactttcttctctaacgacttccccttcagctctcaggggaaaccctgctccaatcccagaggcggtaggcgtggttttatccgaagccatctgccagggaagagagtcactattatgcacatgcaaattgtttttaaccgagttattttattcattacaccatctcattacaagcataagactactacaggtggaactacacgagagcgttccccgaggtactagcgaattccttatctaaggtgtccccaaatgccttgagaagatcatcgaggcttgctagggatacatcctcttcgtcggaccagtcatctattctggggggaggtagggctagaggggccttcttcttcttcttctccgtctggcatccttggttggtggtcttcttctggattttcttcttgggggcgagtttctttagcttcttgtcatagtccatcttcaaagttcgataggcctcacgggtgttggcttcctcgccttctgctatgtcgagactctcctggagggatgccttctcttgcttaagctctttgacttgctgctctaggctttccactcgggagtttaggtgggtgcagtgggaggagagctcgtcgtagtggttgtcgagggtgtggaggtatccggccatgtagacgatagtggggtcatcttctgtggggtttcctcctaacagagcctggagtcttttcctccaggtgggggtgtttttgttgctgggtgggaaatatcggaggggggtctcggagatctctccgttatagttttggcacagttgtttgagggcttttcgagcaacgctctagcaagtgtctgggaagcg

SEQ ID NO: 89529 - DNA, 382 bp, Zea Mays
cgagaagatgtcaggttatatatccatgtatctgtcctagtcaaaatatctagacaagtttttgaagccatagtgcaagagatacaagacatcccggttgtgtgtgaatttctggatgtattccctgaagatttacccggattacctcctgagagggacgcaaattttgtgattgagttgaaaccgggtacgactcctatttctagaagatcataccgtatgcctcccaatgagtttgtggaactaaagacgcaattacatgacttgttggagaagggatttatccgaccaagttcatcgccatggggatatccggccatcttcgtcaataagaaggatcaaaccttacgaatgtgtgtggactaccaaccccttaatgaag

SEQ ID NO: 89530 - DNA, 445 bp, Zea Mays
gcccctttcaagatttgtaattgtgctaagtgatatatgaataaatttggagaatctctcgcacctattgtgttttgctctttataaggagaataaagtgtgatgccatctactatatgcaaacaatgtgatgctctactctagttgccctaaaatcccgctcaagtctttctctcaatttgtgctcaaagaaatactcttggatcagaaagattatttggatatcatgctctgaaatctataaggttcaaaagatctttgttaagaaatataacacctgtaaactctcaaagtacgatgaagctagtaggaatatgaaaccacccttgttccttgactaatcttggaaatcaaaaagttgtgttcgccctttatcttcatatcgtacaagcctcttatgcagtctgtctcactaacccttttaccctctgactagatgatgaac

SEQ ID NO: 89531 - DNA, 364 bp, Zea Mays
cccttactgaagtatgaagacacggagcccgtacgatgttctctagtcgcacgatgaacaatacccgaccccaccacgtgggcggctcgggggcaccacgtggtgagaaaagatgatacatcccaggatgtataagttggaccggaccaccgcaagaaagcaccgaacccctgtacgcacaacccggaccctcgattacgtcccgggactcccaagcaagcatgtcggatcccttggatggggtccagatccctctgagtaaggttcgggccacaacgaggtcccagaacaggggagaccctggcataagcaagggtctggtactgacacgtgtccaggccttatcctgtgcgcttgcgctccc

SEQ ID NO: 89532 - DNA, 399 bp, Zea Mays
atcgacggactgtgtccagtgaattaaattcgttaccacatctggatctgccactatatttcagagttcacaatggtcgctttcagtttcagtccactggatgcataaactgtttccacagttctgttaagatcagatgttggagtgcatctctttgcacaatgaagagttaagtttatgttaagaaaagatagccagaaccaactaataccaggcagttccattttgttgtgtgctgggtagatagcaacttttgtttactgtttacatgctgttcaaatggcagtttaagtaatttaggatttatgtgttatatcatgtgattgtttcaaatccaagcaactttttggttgtgtgcagagcttatagatgaccaaatgggtggctcggcccggtctg

SEQ ID NO: 89533 - DNA, 291 bp, Zea Mays
ccccacaccaactggggtgatctcattccatttcgcaagtgtctcgggggtatctcggtcggaaagctggggcctattctttaggattaggaggagccgtatgaagcaagcttggttcctctagattcagtttggtggcaatccgtgccggcggcagagcgcggcagctggttttttcgttagattcctcccaccttgtttgcattgcccctgacgcgtgcagtaatgcttacctagccttccgatcgttcagctcaagagaagaatgagagatccgttcttcagtgggga

SEQ ID NO: 89534 - DNA, 388 bp, Zea Mays
gcgagaggttgaagatggactaggtagagggaagaagaaaggttgttcgccgttcgatcgtgatgaacggtagtgattggatcgtcactggagttcggccgaatccgatctgtgccattgatcgagtgatgagcggtcctgattataaatccgcgtaccccttcgtctattatatctggacggtcagatcctgatcggatgactggagttcagatcagttgtgatccgttggttttagatctagcggtagatatcgcataccgattcagcgtaagtcggatctaatccgggtcctcggttttgatcgaacgacccaaatggcgcgataccccttcaccatgatagattttctaaagagcccctggatttctaataaaccaactcactg

SEQ ID NO: 89535 - DNA, 681 bp, Zea Mays
gaccgaggagcaccgccagcgaagagtggtgtcgaagcataatgttggcgagatgtcgcgaagtggtagacgtcgtcggatggggatggaacgaatccgtcttcgggtagatcggggtggccaacgagatttgctgtcctcgtcgtccgggacgtgtatttgggaggggggtctgcgaaatctttttgagggtgaggagttaaagatgatgttgtttaattttcgtgaggtgggccttatcccaaaggttgagccaatgtagcgtgtatgctgccctcgctcttgtgttgcggtagtgagcgacaatgctgccctcccggctcgcgataaagagggagggcagcaaaatgcgattagtatttatttgtgcaatgaggtcggtggcccttcgctgtgtgtatgtaaagtatgacaacattgtttgttgtgaaatgagatggggactttgcttgccacggcaatgtatgggtgcttatgacacgtacttggttgtgtccgtgggtggtttttgttcgaccatgtgagatagcagtgatcgtaatagactttgcgccattagggtagtgtttacgtgttcggctgcacccttggggggcctttgctcggatgtcttgccgtaaatacttcgtatggcgcacttgtagtgtatatccggctgcacccttaggcggcttttgcgtg

SEQ ID NO: 89536 - DNA, 1068 bp, Zea Mays
ttctcctattgctagttgttggggtgaagttgggctcttgcttaggttttaattattgttgatttttagaaaagcccaattcaccccctcttgggcatcgtgatcctttcacatgtcacctacataaatcttagtcgtcggatattctatgtgcggcttcatcgcttagcaacgctcagctatagtttggaactctcccacgtaccacaccagatgacaagtcgtgatgcttcgagagcttcttccccctccactccttaaaccatgtcatcgtgcaggtgctacctatcgcttggagcatcttcttcttcctactccactcagacaccgacgccttctgtccattcaaagcggcttcgactagaccaccagtccctcccaccagacgccgctgacacgacccacttctaggaactccatactctccctcatcctctcaaacggtaacaccgctgtcgcgtcggcacaggccaaagcactgccccctcctctatgtgttgattccatcggatctccatccctcccctcccccggccaccctcaaacgcacccacgttttgtcggagtggagtggatccgggtggagcaccagctaaaggcccatcaatttcagtggatggatagtggacaattgagggctcggctatcagcaagagaaaggagttagcagacctgcacacgagttgccattaataactaactagtaagttccaagttcactagaattctatatattaagcgccaacgcatatccggtgtctccttgagccacgtcacctccaagaatcttagtcatcgaatcttatacgtgcggcttcatcgcttagcaacgctcaactacggtttggaactctcccacgtaccacgccacacgacaagtcgcgatgcttcgaccttccccctcccctcctaaaaccatgtcatcgtgttggtgctgcctgtcgctcggagcgtcttcctctccccactccactcaaaggtcgacatcttctatccattcgaagtggctccgggtggagcaccaatccctcccactagacgccaacggcatggcccacttccaggaac

SEQ ID NO: 89537 - DNA, 458 bp, Zea Mays
gccccctttggatattttaatttctaagcataatattgagcttctcgcttttctttctcagataacctttttcccgaagcatgtcgtacaatataatcaggtacttcgaaagatgcttcggaagaaggattgacagtatttccagacataatttgttctgcaacttctttttccgtttcctcttcgatttccaaggatttctccttggcgggctctgaaggcccagctttggtctcgaccttgctctttgcagcttcggcttcgatcagtcttgtctcagactgcgcctttggagcttcggcagttttctttggagtagagcttgtctttattgtctctagcacatctagcacattgatcattctttttctcttaggggtcgctataagtcctttttgtgccttcgacactgtcacttctgccaaagggcttgtaacccctagtatctttgttttttc

SEQ ID NO: 89538 - DNA, 444 bp, Zea Mays
tcaatacacattctcatgcttccatccttcttggagacaaacaggactggtgctccccaaggtgatgagctgggacgaatgtaccctttttgctgaagatctgagatttgaagttttagttctgctaactcagttggagccatgcggtatggtctctttgcgatgggtgctgttccaggaattagatctatgtagaactccacttctctttctgggggcattccgggcaattcttctggaaatacgtccatgaattcttccactactgacatactttccgttgttatattgaacatcattgggtcactggcgggtggctgtgcctggcaagagactgactttccctgctggtcggtgaggaggactgtcttgtctgcgcaactgatgatgcccttgtgtttagttagccaatccatccctaggattacatcaattcccttggat

SEQ ID NO: 89539 - DNA, 558 bp, Zea Mays
ggcaggctctgaaggcccagcttcggcgctagcgtggctcattgtagcttcggcttcggtcagttttgtttcgatttcaatttgcactttcgaagccttggcaattttccctggagtagagcttgaagcttttatcgtctccagcacatctagtacactggccatcctttttctcttgggggtcactgctagacctttttgtgccttcggcaccgccactcctgccgaagggcttagaacttctaatgttttcgtctcttcgattcttggttcctcaattttgtcagtcttcggcattgcagccgactcttcaatcctctgcataggggcaggtctttttgcttcaatagctgaagaagtttcaccgccaaattcaggcactatggccggttcaacgtagcgcggtcggtgggtaaggaccttcaactttttcctcttcggcgcaggctcgtttggagcagtcgaagcggcagcctttccagaagttgcaccctttcttttctgcccccacggcgggtagcgatagtcagggtacacaaatccaatagcatcaaaaac

SEQ ID NO: 89540 - DNA, 384 bp, Zea Mays
tttttgtgcccttggaccatgcatctcacgttttagaggatgggaattactttattctcctcccacttccggtccttaaacgccatttcccacagctccggatcttcttagctgtatccttccagtagttcatcaacatcattagggtgatcatcaacatctgaagggggggtaaaaaaggtcccaactaggtcacttattatccaaagcttgttggcaaacaatagaagtcttctcgagcatcttgcagacatggtccaggtggccaacaacctttcctatcttgccccctcaacttctgggatactagaacagatagaattaatggtatgtaacagtgttgattgtctcctcatctcttgaatagtgtatcacagagaattc

SEQ ID NO: 89541 - DNA, 565 bp, Zea Mays
ttagttatcactaacaacttgtataaaccaagtttgtgttgtttagagtcaattttcgcaggatcatgtattcatcccaactccacctctaggtgctctcagccgacccctggcttccgtagcctggggctcggcgcggctcgtcgtgttatcccccgcgggaggtctacacacacaggcctagtccgataggacataagtgcgccgctggtcgaggggcgtgcaggctattaatgtaccacagactagacacgtaggccatgcgtgctatgtcgcccgaggggtccataggtcatgagtgggaagcataccatcacccatgctgtggcacagtgtcaggcatggttaatatgaccagtcatttatggcgggtcagaccggggctaggcgcgagatccactcgagtggttcccttctgacacgcccgcctcccttgtcaggctctgccacgcccaaccctaggctcggtgccacggggttcgaccgggggtgggtcctcccagggttggtgtgacaggaccacccaacctacaacagcacaagtaccaaaaacatctgcttcgac

SEQ ID NO: 89542 - DNA, 426 bp, Zea Mays
ctaccaccttccatccacgtcgaactcgtgtgccacaggtgtcccttcccatgcactccactccaccacagaccaccgctctcctcgtcgtcgtctgtggtcgcccacagtgtgtccactgtagtttgtacatctgtagccgatcgatgcttccggcttcgtcctgtgtgcctgtgcctgttcctgttcgagatcttttgtattccgtccaatccggcgcctagcttctgatactgggacgtcgtcgcgtctggtgttttcctgtgccggccggtaggtaggtgcccaaggaccaaaagtttgcgaaagcttgttggccaatgatcttgagtcgtagatcacgtgtgtagcagggggagcgtgtaggaccctgcaacgagcggaaggagagcctgcagcgtggcctgccctctgccgctggactcg

SEQ ID NO: 89543 - DNA, 570 bp, Zea Mays
gtgaactgaagcaggtacaccaccattggggtcaacttcagtaaagacctctgttgatatttcttcgcaaacaggagcagaaggtccagcatcctgatccaagaatgacagtcgccgaagccgtttctttttcttcttcttctcctcagcaggggcagttgggcggctgacctggcaaagacgctttgggcaagtaccctcaggctttcgggtgtccactgttttctcagtctctggtataaccgcaacaaccattgtttcagcaggggccgaatcagaagattctccaactaacatatcgagtacaacatttatttctgcatcatctggactcgctggcatctcaaaatgaacttgcctctcatcattaggaagatcacaaagagaagcaaccaagacctcaatatctttaggatagagtcgcactctaagacccagaccactatcaccagtaggaggattggacatgaaattgaaaaaggacttaggaggtggcggattccaagcagagtaggcaacatgagcaccaacatttgatactttgcctctcatgatcatgtctaatcggct

SEQ ID NO: 89544 - DNA, 582 bp, Zea Mays
gtgtttttggccttagcattccatttttcataattatactcatcacctacaagatttgtgggatctcttggttcggggaacccttgagtggcggctttatagacaccaatgtctatagcctctaagtaagcttccatacaaattttccaataaggaaaatcgtcaccataaaaaacgggaggaggtccatccccgccgaacatcgctactctagcggttaagctaaactaggagcaacaaggctctgatagcaattgaaaggatcacgatgcccaagaggggatgaattgggtttttctaaaaattcaacaagtattaaaccctaagcaagagcccaactttatccaactactagcaataagtaaatactactagaaaaccaacaaccctaagtcattacttcaaatacttgctaagcaattgaacaaagtgaaatgctcaaattaaatgcggaatgtaaagcaaggttaagaagacccctccaattttttgccgaggtatcgaagagtcaacacttttccctagtcctcgttggagcacctgcgcaagggtatcgctcccccttggtccttgcaataacca

SEQ ID NO: 89545 - DNA, 801 bp, Zea Mays
gtcaacacatcaaatttgtagagctatataaggagaacaaattttattaagtaagtaagccttagtgctacatggaaataggagaaacatagacctgaagatagtctatcaatcaagcacaactctaaaactggactgacagtgagctaggaccaagtgtgagggctattttgagcatgatctagtaagaatttgggagtgattgctatagcaagattgaagctagatagtagaacaacaactttgttaaatatagattagcaagttatcacatgaaaatttgatatccaagccctacaaaatggtctgtcagacgctctgatggtaaccaccatggtacagagactgaacaagattacaagttcagcccccctcgccgctggtgacctttgcgccgtgatttgcgccgtcgccgcgattcgtgttctctggtgaggggataatcacggcggagtaaagatcttggcaccagataggctcgggcttagtcgcggatgagtttcaccgtacccacttgctcgtcgatcggccaagatagacctcaccgtcgttggccacttaccgctatgcgccacgtgctcaagcgttgtaccacgtcgcagtgaatcgtgtcttgcatgcccggtgatcgccgaagagccgccacggtgaaagccactaagcttgcgcgccagtaaccttctttctctccggccgccagcgcgtcttcacgaaattggacaccaccgctgagggagcctataaattgccgcccccgcctgctccgctaagtaattgtgcacccagtaaaccaaccctcac

SEQ ID NO: 89546 - DNA, 717 bp, Zea Mays
gtttattgtttggttggagagccatatgactgttgagtggaggagagggaggagagcgctcacatccagtcgttttggtggagcgagagtattccaaatatttgtcatttatagactacagaagttgttccgctctcctccgtggaaactaaacataaaaaaaataagaataaagtcatatcattcttctccgctcctcaaccaaacacacccctatgatgttttaggtcaccatacgtgagtggactacgttaacgttctgggcacacgtgccactgacggggatgcgcggcatgatatggttgcgagaggcagactgcggtcagcacagtgccccagctgcatgcctgcatatatgcccagccgagtccagtagcagtaggagaagacaggcccggggaggaggcggcggccaacacgctggaggcgctgtcggttttttttttatctgtgccgtattggagccgtcacatgttgatctgattggctgcattgactagcagcaacggctcccctccgaccgtaaacacatgtgctcttgtcctctttggccgttgctctgctcgggatatcgaccggactacgcaaacgtacatgcgtgaacacaggcttagcagtagcaccagtactactactgttgtttccatgttagtacatactacatacccgtgtctacctagctccgatccttacgctagcgtgcactacagtaacaaa

SEQ ID NO: 89547 - DNA, 517 bp, Zea Mays
tccggcaatccccctcgatgccccccagaacccagcgacggcagcattcccaccgaacacaccacagcaaggcgaggcgaacaacgatggcagcggcttcaaggtcaaccccccagcccacacttcgatttattcacggtgtttggccgacctcccagaccgcaccgcagagaaccacacgaccgaggcacaaccagtgatggttttctttccctctttctctctttcttcttgcgtggctaacttggggctgctaatggctggattcaataggaggcgctagggccggctatttatggttccgggagagggagtcagggaagcgcggcgttggtgatggagagatcgagtctttaggagagggtctcaccggtgctggcaccctgtacgaaccggtcgcgacgccaatagcttgaagatcccttgatgaagaagcccgatcggtgccgaccgaggtgtagagcgatggctcaggtggcgcggtcgtcaacgttctcaattgcgatggctctctgtg

SEQ ID NO: 89548 - DNA, 422 bp, Zea Mays
ctctgatctctcttaattcatgaagaaaagaagacttaagattgtcctggtgaggaccataaacccagtgagccaccagcaatcaccattcctttcctgcaattgaaccgagaccgaaaactgcttgataactgaagccactgatgaaaaaactccaacacgccaagatatcaacactcctcctctggtaccaaccgctgggctataaacaaaattactaaatcaagaccccagaatagaaagaatatcaaagtctgaaatagaacacaatttggtttcccgtagacaaacaattgaaggcctaatatcgatcaccagagatttaacaaagtctcttttcacacggtcattcagccctctcacattccagattagaaaacaattggactccataaaaaacaaatagaacactaccagcaaat

SEQ ID NO: 89549 - DNA, 460 bp, Zea Mays
caaaacttgtttttaaagaaaaaactgcgagaagaatgacacaaaggggctcccccttccagccctcgagggaagctcggtcttgaagacagggttgagcctcacttgaaggccaggttttattattcatgaaagttttgagtacaaatagttctggaactctaggggtagacctctccttgctcgttgcatggtttgtacgttctaggcttcagcactttggtgaggatgaagggtccttcccaaggggagtaagcttgtggcgccctgggttgtcttgttgtaaccgaagcaccatgtcaccctcctagaacccccaatgacggacgagccttgcatggtaacgtcggagcgacagctggtacctggccgagtgaagaagtgctacatcccgagcctcctccagctggtcgagcgagtcttcacagttgacttggttgtaactctcactaaacacccg

SEQ ID NO: 89550 - DNA, 835 bp, Zea Mays
acgtccatggaagtgtgggaaggagagctcgctcggacaccctcgggagctaggttgcagctcgcactacccatcgaagccagatcactatcggcaacaccctcgggggctgggttgcagcttgcgctacccaccagagccagatcattaccagcgacaccctcaggggctgggtaaccgccagcatcaccctcgggggctaggtttcctgcaacagccacctctgaggccgaaggatcctcagtcacctccatgggagtcgggcaatcctaaccaacttcttgacaccgaagactgccttccaaagtcgacgatgcgcgagataccgcccgggatacctctaatcccacgcctggattgtcaaagcaaacatccatcatatcaccagcagtcggttccaacagcatatcttcaggaatgacatcctcaagggcttgatcaaaatctgttatggataattcttgaaggctaacaagagcagacagagctggagaaggaatatcactatcccccctactacctctataacgccggctattcttacgaattagcgggacttcttcttcctattcttcgtcatcgtcaaaaattcgaacgatagatggtgcacgatcacacccattagggtcaacttcaacaaggttacacccattggggtcagtttcaacaggatcacacccattggggtcagctggtgcacggatacactcgttggggttagttggtgcatggtcacacccattggggccagcttcagcaggtacaccaccattggggtcaacttcagtaaagacctctgttgatacttcttcgcaaacaggagcagaaggtccag

SEQ ID NO: 89551 - DNA, 474 bp, Zea Mays
gccgtatgctcgtttggtttatatataaaaaagtcaaggccacgagctaaccaaaagtctcttgttttctcctagctttcgtcctcacaatcgtcatccctgctagagtatttttttacttcctcttgctaattttattttgatacttttatgccccatcgccaagattctacccctaatctttatatcccacggtggttttcactaaattgtttttctatacctcactataaccataaaatattattttcatacctatttattatccgttactatttttcctcaactacaatgaaacgtagggggctgctggccacgcctccagatctgtcggactattgtacgcttcctcttgaactgtagtgcggacgtgtacaggcataggagagggaggccgtcagctgcacatagcaatatatcaacttgagcaagttaagtttccaagttccaacacatgttgatagccatgcattg

SEQ ID NO: 89552 - DNA, 503 bp, Zea Mays
gggatttctgtgctttcaccggtgcacggggggtcgcagcaattgtagagaaggccggttgtgaacatattaaggccgcagcccagccagaatctattttttcagctgatgagaccaaggacccctcgaccgaagcttctttgctaggtgggaggttttattctgatgtctggataaagggcggtcgtgaaatggctgatgaagccattaaaaagaatgaacaagaatctcacgatgcatgagaaaaggcaaaacaatctgaagaagctgctgaacgcgccatgattataggtacttttatttaaagttttgcttcatcgttcgtttctagcttcgaagttcaccaacatattcttttattccagctgggctttcaccaccaccggagtcgtacaaccccgaagccgacccgattatgaaagaagctttggatataatgaagattgctaacgaagtcgttgacgaagttgtcgacagactattacatgaagctgctgaaaaaa

SEQ ID NO: 89553 - DNA, 369 bp, Zea Mays
cccaatgggtgtgcccaaactgtcgttgatcccaatgtgtgtgcccaaactgtcgttgatctcaatgggagtgctgcttgtgttgccgctgtagaggatgaagaggaagaagatgaaattcctttaactcggaaaaacagtcagcaattcattgctagcggtggaagtagtggagtcccttctcctgctttgtctgcccttattggcttgcaagagctgtccatggccgactttgataaaactctagaggatatggtcccagaagacttgctatcggggcctgcagatgctgatgcgacagaaacttgtgcagccgtgccagatgctgggttgaggtcatcccgtgcctcgtcgaccttagagcatgat

SEQ ID NO: 89554 - DNA, 461 bp, Zea Mays
aagaaatggtgttcttcttcccctcctactcctaccaccaacctgatccataaccatcttgtgcctcgtcctcttcctagatccacgcttggtccaacgactgcttggatcggcgacatactttgggccatcgtacggaggccactcacccaggtcacggtaaggaataaatcttggattccaagtcaacacaagcttgtcaaatagtaaactcttagggtatcctcctctctaagtcaaagttgcgagctcgagcagctgcgataagatgagaacatggaaaatggtactgcctcggtgcgccacaagtacatgacaagtcattaaggacaaccacatgcttcctggactcttgtgattcaccatcgaaagtagtaccagcttgaaggaatacctcatatgtccctgactgtaagtcaaaacaatcaacagtgtgtgtgttcgccctttcctttgccttc

SEQ ID NO: 89555 - DNA, 407 bp, Zea Mays
gtcagctagacctcgatacagataggccgggtatgccctgtccttcagtggctgaatattcttgaagacaaagtcagcaaccacagcctcggcagtcatacccctctccttcagcaatccaacttcagctagcagagcccctgcttcagccacctcctggtctgtgggggactcggtccaactcggagtacgaacatccggctgtctccctgaccgtggtgggagggaattcccatgattttccacgataaaccactccaagcgccatcctttgatgctgtctttgagtgggatgtcaagataatcggttttcctcccgcggcgcatctccaagctcgcgccccctaccagttggtgctgacctccggccatcccagggcgacagtgatacaaatatttccacaggc

SEQ ID NO: 89556 - DNA, 388 bp, Zea Mays
cgcggcatgtgagatggcagcgtgaccgcccgcggcgccctccgctccctccgcctgattacggtacggacgtccctcgctcctcgatttgggtgatgctagcccacaatctctttgggtaggattggatccccgaattcgtctcgtctcgttatttactcagtagttctaattgaacagagatttggtgactcggtcattgattcgagcttagtgtcagagttactgatgcaaatggcctgctgtctgaactctgaagatttctcgtgtgtgtacattgttcctactttgcgaaatgttatactgagatgtcagaatacaaaacgctagtagctttgtaaaatgcacctgttggagatagccattcctgtttgtctatttggggaat

SEQ ID NO: 89557 - DNA, 728 bp, Zea Mays
gaacaccccatacatggactcacactcaagagggatgacaacatcagcaatacacctcttggctcttcatgtgtttgctgccggacaacccctaataggtttctcgcgctgacacatttctagcacgcccgataagagctatgacactagcttccacattagaaattttttgatcgtctcatccacatcgactcgactccaaccttgcatcaagcttccatcgccaccattactagcgagaaaagaaatccccatcaacagtggcaacgaacattacccgatgagcaagaatgacctgctataactcaacaacttcaaccttgagatgcaggactgttatgaccgagccaaaaaaacctgttcgaaaagctcctcgcttgcttcatcgggacgcgctctagcagtgtccagctcaccaagaagccagaggagcacattaccaccctccaccaagagatgaattacatcgtccatgacgccatggtgtggcagccagagatcccagtcaactccctagaggggattgttgcagagtggccagatcaattctagcctagaactacaccacccaagggcccactctctagtcccatcgaggcgagaagcagttctacactcaaccaatggtgctgatgcatatcagtgcccctaagggcaccaaggtggaattccttgtctatcgctctgagatgccacacaaggtccccttcgtctacgaccatcctctg

SEQ ID NO: 89558 - DNA, 480 bp, Zea Mays
cttatacaaaggtggccatgagacagcctgcaactctgtggctaggggagaagcatcatcaaaagcaatgttatcatggtgaaaatcatcataccacatatcctcgtggctggggccctcctggcgatggtctctttgttgtggcttgtgcccttgttcagtatcctgtgcaatatatcgcacctccttcggctacttcatcaatcttattttggagctcagccaaccgaagcatcttctcccttctcttttccacctgttgatgaatagcttctaggttgctgatttcttggtctagctcttcatcttgttgagttgggctagtggccttcctcttttggctttgggcctcccttagaaggatcccatcttgattagtgtccaggggagcaaggacaacctctggctccgttgtcttcttcggcgacatgacgaaggtgattgtagactccacctgacgaaggtggtcgttgagttcat

SEQ ID NO: 89559 - DNA, 631 bp, Zea Mays
attgggcaatatgtaatttagaggctggttctcgacaactggaaaccccaatttcattatgccaatacccttggtttcattgctcttaccttagttctgacgttccccaactactcacaacttgctacactgtcagctcccagacttcacattgcagcttgcttggttataatttatggttgggaaatgaataccacaaggtttttaatggtgtcttggcttttattgctgtctagcaaatgacacaattgctaacttgcatttttgtaagtgtctattgtggatgatggtgggaattcatataccaaggaaatccctgtattcaacttcatttttcatgctctgattttaccttttccattatctcatttaccattttaagcttcaaataaagatgtgtaaatcaaggatgatataatttgtgactctatcagtttcctattttgaaactgcattgtgctttattagaattgaagttttctatgttgttagtgccctggcaaaagactttttgcatttgcagagctgcattttctctatgttcagtactattctgcagttcaatgaatcataaagtgcggttctttctacaagtgtttattatactatattgtattgatttagatctgaa

SEQ ID NO: 89560 - DNA, 851 bp, Zea Mays
tacagctatttgcagaagttgatgtgaagctagtcttcaaggaaatttcatctaaatatttacgaaagcgcattgtagaggtattgcttgcacttgtcacctaaaatcccccctttcttatgtgatcaatagcaggatgcttacttctttctattatatcaacttgctagggttttttctgctaaaaaaacttgttacttgttagagatctagctttatgtccatacttctgaactgcactgttgtggtcattgcaatcatgataatatctatcttgaatcatcatggattttcagtgactgcatttattcggcatacatatatatggttacgtctgtgtaaaaacaatgaaagatcatatgtactttctagttcttactacaaaggatctgactttcttcctatatgcgcattgtgttttcaaatgtccctttgaactctttctgtagaatgtaacattgttgtccagcaactggaagccaatgcgacaggtattaactgccactggccatccaaaagtaaagtgaaaacaaaattgtagttgccatatttaggagaaaattctgctatgccgaaacatgatattaaagaaactaataaggtcagttcagaataggggtcctctcacagtctagcattgtgtatgtgcgccaatgcctgctatacatggctttgttcttctattgtgactgattattgatttttctagtgagctacatcattctgtctggtaatcacagttccttgggactttcatgtgatttaatatggaattttttgtatggaatatcaatgcctcaaatttcagggaggaaagcgaagtgatggacggagtccttgggaactttggc

SEQ ID NO: 89561 - DNA, 336 bp, Zea Mays
gtccgtccgcggtgctcggcacctcctggccggaatccttcgcctcccaagaataaatgtgtggccaccacgaaccctggacccaaccaatcgggtgttacccccagcagttgactattctggccaccatcgatgttggcggagggtggatgggttgccgtcgcgccgtcgtcggctaattggagacatagcgttgctgggggctcgattggtgcacagtggggttcggcgatatgcagggaagcttatgggggcgttaggggagacggaaggaccctgtagtcgccggaattgctcttcgatgcctctgctccgccgcgggccgtgctgcaccgt

SEQ ID NO: 89562 - DNA, 675 bp, Zea Mays
aggactcctatatattggatcagactaggggaaggcagttctttggacctgaacttattcaagaggcagaagaacaagtccgtataattaggcaaaacctgaaggtagctaagacctggcaaaagagctatgctgataatagaaaacgaccactggaatttgaggaaggtgatcatgtgtacctcaagatgtcaccacttcgttgaatgaggagattcaaagtcaagggaaaattgtcccctcgctatattggaccattctgagtttttagttaagttggagagatggcctatcaactcgagctacctgataatctatctgatgtgcataatgtattttatgagtctcaacttaagaagtgtcttcgtgtctctaagaaacagttaccaatggaagagctcagtgttcggggtggtttgacttacacggagaatcctgtcaagattctggatacattgacccgagttacaagaaatagggtgataaagatgtgcaaagtgcaatggagtcaccatggagaagatgaagcaacatgaaaaagagaagaagagcttgacatagatttttccccatcttctccctcgttcctcccaaatctcgaggacgagatttctgttaagaggggtaggatttgtaatgcccaaaattggtataagagaagataataggataaat

SEQ ID NO: 89563 - DNA, 467 bp, Zea Mays
gttagcacaggcgacctaggtacttcattggtggttgctccatccaccgcagaaagatcatgggtcaaaggaaggaaactggagatgacaaaacaggaaacaaggacgaaagctaagagacaaagggaatagggggacgcagaggacccaacgtacaaggaggatcgcctccgggtggtcacgttcttcgaagtcatcggcgtaggagctagcgaggctagcgctgattggtttgcacctcatggcactaccaccgcggtgggggtagaaactctggcgggttcctcccctgtgtgatgcgagggcaacgtagcaagcaccagcaggaatgcccgcattcgtgtcgctcccccatcaccggtcccagtctcagtgagctccgcgggaacctctagggggtgtctcaagtgcaacaccatcgttgaccaatttgcccctctaggtgggagtgttggagctggcctgcg

SEQ ID NO: 89564 - DNA, 345 bp, Zea Mays
atcaccacgatcaccgaaaaaggtgtagaggctcactgggtgcatggcagcactaagtcatttcatttcaacactcaatgaaaggaggatgccattctataagctactcaagaaggtagacagattccagtggactgcagaagccttggaagcactcaagatattcctgaccacaccactggtactcaagccaccgcaccgggctacagctaaccagtcagctgaagacctgttactgtatatctcctgcacgtctcacgtagtaagcactgcgctagtagtcgagcgggcagaagaagggcgcgcatacccgatatagcatcatgtttacttctttagtgaagt

SEQ ID NO: 89565 - DNA, 334 bp, Zea Mays
aaatctcttatcgtggtcgaggtggagttaagggttataaagtggagtactagttaagtcttggcttggcggcggggctccggtctctaggtccttgtcggcgcgtcctcctcttattcctcgattcttctggacgtcttctcgtctggggtccgtccttgcgtccgtctgtgtatccggggatctggggtcctttctcgggatgccttcctccttttataggccgaggagggggtcggccatctggcttccttaagaaggagacactggacgacgataaaaccgagggttctaccatagggtaaagccacatgctcgtgggcccccggggttg

SEQ ID NO: 89566 - DNA, 766 bp, Zea Mays
gttttctgaggtaagtttcatgtttccatgaggtgatctctagtagataacaccagggtatcatggtgtcactaccttaccctagtacatgttgtactaatcattgttgttagcaagatctactagttatcatgtgtaatttcaacctttttctacttttaagcttcatgttattagattgattttacactgatagatgtgtattccttaatcagttgctacactctactacatccaagctacagcatgtgcatgtggcaacacgagaggtcaatacacatctggcaccctaccttacatgcttagtataattgtttactacagatggacttatttggaggttctaatcaatgttcacgtgcatgatgattggctcccaatgaaggatgttgctaggattgccaacatgatacatattgtagatatatgtaggatgttcctatagttggtttactgtttatctgaccctagatttgactaatagtatgataatcttttggcctattgttgtgcctttagccatgcacgtaacttgcctcgcttaagagtaaacaatcaactcaaatatgctttagataggcttactcccttcattagtcactttcaatgcatgtttacttccatttattatgatcattactaactcgaaaaaattacaaatagctcaagggagacaattagtgcaagcagctcaggctgatccgcgtaatctagctagaatttaacatttaatttattgttgtacatttgcagagcaattcaccaa

SEQ ID NO: 89567 - DNA, 837 bp, Zea Mays
cccgacatagacttagacatagaagtagatcctatgcttgtgtcggatggtggtgagttcccaggtggtagtgatgtttctgggatagctacatatatggagggttagtgttggcatgtgttctgctatcgtaacctctgttgtaggcatagggttgtaagctatgccaattttagtattgtaatgaataatacccaatgtaccagttttatgtaatatatttcgtggttatggatgtatattcatgagctttgttttgcctcagatgcctatgcgtactcgaggttcggatggggccggaatatcgcatggtggtgtagaaactaatcctaatcctcccccgccactggttccgcctacgctggcagacgtcgttgctgccctggtaaatgtcactgtggataatgccagggtactgcggcaacttgccaacaatcaaaacaatcaggttggagttcgtgcccaccagcatcatatcagcaaaggaatgctatatatatggagatcatggagatctatcccctagtgtttgcaaaagcggaagagcctcttgaagcaaatgaatggttacatttgatcgagcagaaatttggccttatttagtgcactaaggtgcagaagtccttgtttgcagcgcaacaacttcgcggggctgccagtacctattggtcaaattttgttgccatacagcccccagatcaccaaatcacatggaatgaattcaaagaagctttccgagctcaccatatccctgatggaattctgcaaatgaaacttgaagagtttatgaggcttagacaaggggtagatactgttatgtagtatattgggaagttt

SEQ ID NO: 89568 - DNA, 386 bp, Zea Mays
gattgctctactctgtggtgtatttcttgagtcgactgtttcctcgttttgactttggttgaacacgcagtaaagataatataactaatataattgtgcctaagtatataggtaactagtacatgtctcgctaaattagtgaactaaattggttaaggtctaataagtgtttgcctagtaaataattataaagcctaatcaagtgtctagttccctttcaactaagtctgtctacatatcagtagtagcgaacttaggtacttaactaacttcatgattaagtaactagtggatgattaaggtgagcgtagtaaatgtgtgtacttgtgatgtcgtagttgtgttgcgtaaataagtaaaaggatgtcgtctttttaatggtgtta

SEQ ID NO: 89569 - DNA, 516 bp, Zea Mays
ctcgtcttcttgtgatgcgtggggttttggcgaaagttttcttgcgagtgtataatatttaatatggcccaccacactgggattatatatggtgtgatctccacctttcttgtgccgacggatcacaaagccggttcttgtattattaactgccgaccacactgcatgctcctctcgtcttcttgtgacagcatttctcgtcgacggtgggggctgctgctcggcaagagaagatgggaagaggaggaggaagaacggctggagtttgaaggagaagatggagtgtagggcacacacgcacatcagcgagtggactactagtggagagagagaagtagcagaggtacgagaacacaatggcggtcttccttcagtcacttgtgcgtcagtccagtattgtcgaactagtagaaaatggcacgattggaactgaagtgccaagtttccaaacaggcttgtatagcaatgttgcactgtactccctccctcctattagttttcgtttcagacaacgat

SEQ ID NO: 89570 - DNA, 624 bp, Zea Mays
ctttttttattttacacatagcttatgtacaagtctgagtcgatcatgaactaagaagtcggatgggggtccgcatctatggcccgcaacacttccaggtaaacaacattccgagtctgcgacccgcaggaacaatcaggattttcaatcaaaattctaagaccacttctagatgtaacccttgaaacaacgacgtaaagttggccatgcgtaaacacaggtttgttaaggtacaggccaatcgttgagagggtctgaccctggctcttattaatcgtcatggcatagcatattcgtattggaaactgtcttctttgcagcgtgaagggccatttgacgtcagtagtgttaagcgcaatccttggtatgaaaacctcttcaccgactccggagggtgttaacaccacgcatttaagaacacgatggccgatctcagttacaaacatccttgttccattacaaagtcctgcggtctggttcaagttacgtagcagcatgactgttacgcctctttttagcatgagtttgtggcaggggaaatttgtcgcattaatagagtttaggaattcagtaggatataacatgtcaaaatcaggtatgcgttcagacgactttgagattgtg

SEQ ID NO: 89571 - DNA, 846 bp, Zea Mays
agtggtcagtagtgttttcaactgttcaaaggcctcattacacttgggagaccaattaaacttaacatcattcttcaacaaccctcgggaggtaattcgggcaagtcttcacggaatagattcggaaattcacacacaactggaatgtcttgtatctcttgcactatggcttcaaaagctcgttcggttgccttgactgggacagatacagggacagataacatgacttcttcttgtccatgacttagttggacagtcctttgattggcattgataacagccttattttgggctaaccaattcatgctcgaaataacatctacgtcttgcccttttataactatcatattggtggggaagtcatatcctgctagtttcacgggtacatggaagactacttccttagtaaaaatttgacccttctttgattcaacactaggtatgcaatcttctcaacaaaagatttgctcatgaaagtatgtgatgcaccaaaatcaaaaagaatgacggtgggatgattggcaatggaaaacgtacccatcatcacaggctctccttccggtgtagtagccgcttgagtatagtagacccgtccagttctcctttcacctttgcctacctgagtgcttgccatatttcccttgccttgagatgtacttctagaagccttttggaggtttgatttattttgcttcggataaggacaatccttgatgaaatgtccagacttcccacagttgaagcagttgttagatgaactgggtagggctggaaaacgagtaccaggggcacccggctaaatgatttgagtaggggtagcagttgtgagagcacctagaggggggg

SEQ ID NO: 89572 - DNA, 739 bp, Zea Mays
ccgagatcgaatctgggtcatgggatccagatcggacggctacggttgcatcatcctgaaccggtacacagatcagatctcgaccgtttatcccaatatcaacagtcacaccctttcttctttcctttaaccatcccgacggcgacaccgccagccctaacggcggcaccatgactggtgaatccgccaccgtgcctgggtgcactaattgataaattaaaatgcgctaaacgactctaatgccagcacgaatcgaatggggggaaactcaccggaattggtgcgataaagactaccggccacaggatagccttgatccacggcggagttaatctccgaggagaaattcgttgaacaccgatcgtccgtagccttccaactccacacaacgtctgcaggcattcaacgaagcatccctagcacccatgcaccaaggcaacaacacaacgagctgcaccgcagcggagcttccttctcggctttcgcgctgcggcatttggctcccggccatggcgtgtcccttccacttgagaatgccgcagaccccgctgggcaatgacacgggtcagccacgacgatgtgcggcctcgagtaattaggatagaaagtcttggtttaatgagctctagggagttgatatttatatagccgaagtcccaacagacgcggaatttatggagatatcaaacggacattcggatatcaactgatcggataagctctcatctcccatgcaaac

SEQ ID NO: 89573 - DNA, 586 bp, Zea Mays
ttgatcaaagttaagaacggttgactcatataaaagataagaacgaccaatatttttggaccgggggagtaacaattaccaacttaaattagctaggggagtatagaatggataagctaataggccaactaattattagctacaccccaactaaccgttcgttcactatctcaagccagctaatttcatctaatagatggttaaagtataaaataccccccactacccaccatatataccccattctttctggaactcatcctcgcaagcaaaggagctgtcgccaccaccgctgcacgcctgcacaggtaagccaggtaatttgaaattttgaattcatttcaattttctagaatattcgtacaagtaaccatgttatgttgctaaatatgacttaaagcatagaagggagccaggggtagtaagaacaattagttcgtaagaataatctattagctagctagctattctagctaataacttattaactaactaattaactattagttatagagatttggaacatgatctaaggccctatatagaatctcttggctaattatttgccagtagataataattagcc

SEQ ID NO: 89574 - DNA, 397 bp, Zea Mays
agccaccatcagatctgcagagcagccatggccgccgagtagtccacgaacaacaacgatttttggattttttttttccattgccgagcagccaccattagatccattgtccttttgtgatttgcttttttgtccttttgtgatttgagaacaccacaagtccattctacgattagcattatttctgcgattgagaacaccgtcagatctctgcggagcacgccatctaatgctttcatttttttacaggtgcaaggattgcaagtattcagagaacaaaaaagacttcagagcttaaggtattataatattttttattttctcatttaagcagtgaaattaagcatgcatgtgtggtttcaattggttatgttatcctttttatatagatggagaa

SEQ ID NO: 89575 - DNA, 1132 bp, Zea Mays
tttgtgggctcaacttttgagccttgtagctctcaaaatatagggttttagccctaggtcaccacatcaattttgttaacctattataggagaacaactttgatatagatattctcttgagttgtgacacaaaaattagagaaaaacctgttacaagttgctctgtcagaacagtttcagaaaactgaaactgaacctaaggttaaaacaaggttccagtgaggtgaggtcaagtttgatgcgccatatcttcgaatcccctcggttttgacccaaatgtcctgtataaggattgaagactgttaaatcaagaacaaaccttattaaggaattttgcccggttattcacaagaatcatgagagctagtcggtggaagggggacggttcaggcgactgacgaagatgtgccatggtacagtgccccgatggatcagaccgccagctaagctcgtcgtcgatgatcgccgtccggattcatgcacggtatagaaggataacgccgggaaaagggtgaaccgtacgtggcgccatctcctgtgctcagccggagtgattcaccggcggccatcgcgtcaatcctttccgccgcggtgtcctcggcaccgtgattcttcctcactgtaccaaatctctacgtgcttggcatgcgcttgtgatggtattcgagccgtgaggtgatcgccggacctccgcggctataaatagcccatggttcgcggcgaggctcggtcatcacacacataccagtgaaccaaatcaagtcaaattcgcactgccctctccacctttgcccaaattgattgtgcacagtgaaagcacagcctcttacggtcctttagccctgatcccatctcccaatttcgctcagagccgccgcgaccccattttcccccccttttccgtctccggcaagcacgaaataccgcgctccgtggccatatcaccctggtaaggctctgcccagatcaaatgttgtttctgcaactccgtttgcttgtgaagctcatcgtggcgtccgattactcaatccggccccggttgtgcgggaactcgtgcccgtggtcacggtttccgccgtgcacgtggacatgtcgttctcagtgcattcatgtcaaattgatgcgtgttccg

SEQ ID NO: 89576 - DNA, 927 bp, Zea Mays
tgggtgtggccctgctgatgctaatcccaatgggtgtggccctgctgatgctgatcccaatgggtatgaacctgccagagctgatcccaatgggtatgaccatgtgccgtttattgtccgtattgttgacgaggacgaggaagaagaagaggaagtccccttaattcggaagaacagtcggcgttatagagtcagtgggggagtagcgatattccttctccagctttgtctactcttgttggtctacaagaattatccatagcaaattttgatcaggctctcgaggatgtcgttcctgaggatatgttgtccgagccaactgatggtgatatgatggacgtttgttctgacattccatatgtgggattagagttatcccgagcagcgtctcgtgcctcatcaaccttggaaggcagtcttcggagccaagaggttggtcaaggttattcaattcccatggaggtgactgagagtccttcagccttagaggtggctgttgcggagaacccagtcctcaaggatggtgccagcggttgctcagcccccgagggtgttgccggtaatgatctggctcgggtgggtagcgcgagctgcaacccagcctccgagggtgttgccagtggtgatccggctccgatgggcagtgcgggctgcaacccagcccccgagggcgtccaagtgggctccccttctcatacctccatggatgtccacgttgggtcttctcctccacattctgatggcatggtaacaacgcatgcttcaaatgaggaagtcgccttagaggtcggcgcaatagatgctagagttctgatgcctgatggtggtgctgagttgatccctagtgatgttcttcagattgccccggttgatattccttcgtcgagccaccacctggcttcttgtgatttgggatttcctttattc

SEQ ID NO: 89577 - DNA, 388 bp, Zea Mays
gttgggataagagttttccctatgcggagttctcatacaataacagttaccaggccaatttgaggatgtccccgtttgaggctttatatggtagaaaatgcaagactcctttgtattgggatcaaactggtgaaaggcagttctttaggccagaaatgattcaagaggcagatgaacaagtacgtttgatacgggagaacttgagaactacgtagtcaagacagaaaagctatgcagatacccgaagaaggcagttagaatttaagtagggtgattacgtgtatctaaaagtgtcaccgatccggggtatgaggagatttgaagttatagggaagttgtcccctcgctttattggaccctcttgatcctaaagcgagtgggggaagtt

SEQ ID NO: 89578 - DNA, 439 bp, Zea Mays
cacctggagtatagtcaaaccagaagaaaccaaattacctgaaggttggagaaaaacgaaggaacccccaaatcatgggaattcaattggtgacttgatgaaggattaccaaccgaagcaattcgcaaggcatcagtggggaccaactcagtgtcatcagtggaaatcaaaattctgtcatcaggagcgccgacctctaaggcaacttcctgatccgaagcccgtgccgctaccatgcaactagaatgcggaggagaagaccctacatgaacatccatggaagtatgagagggagaacccactcggacaccctcgggggctgggtcatagctcgcgctacccatccgagccggatcatctccggcaacgccctcgggggctgggcaaacgctagcaccatccttgaggaccgagctctctgtagctgccacctctaagg

SEQ ID NO: 89579 - DNA, 496 bp, Zea Mays
cggagggtgaccatgtgctccttactgggttgcttgaagcatttgaggctgaagccaaatgtatcattggctcttgtgactgggtgtgactggggttaaacatactaagggacatacggtgaatagtacgaagatgtactgaacacctccttcgactaagatggttgagtagctgatgaagcaagttctttttgcttgttaattatatggtggcgggttctcgttgtgtggcctttgtcctcaccacaaaacaggcaaaatggctttcttggaggcgcattaaacctgccaccaaagcttcggcctccccttccccctctcgaaggaggtgggcaaaatgtgttgtgagacggctgttgttgggagcttgcctattgttggccagactgaccatgagattgagctgttttttcttctccctgcactgggttgttaatacttcgaacatgccttgtgttgaatcttcctccgaagccctaggcggcttcagtgtatc

SEQ ID NO: 89580 - DNA, 652 bp, Zea Mays
agtccctatcgctcccctacatcgcttcaaaccctgcagaccgacagcgaccggacagattcaatgccgctccaccagatccgctcctccatgatctgctccgccgctcccatccctcgggcagccccttcatccttcggacagatcccatcctcgagtcccaccggagctctgaaggtaatctgtgcagggcaagattcagctacgaagagaaggccaaatggcaggcagtcgaagcccattcaaactctcctttcccaaatcagaaggtcggtcgtttcgccagctttaatgcaacgtttgaaccggagcatgcgtgctacagtaagggagtgacagcccatcctccttcagagcattcaacgcctacaagcctgagccctccgaggaaggaaagcagcaacattgaagtcgccgatgcaggttgggagatggttaagcctcccttctggtggaggaaagacaggcgcaacgctcgctctgcccaggcctcgcaaagatccatctccaaagaggagcaagaagagagggaaaaaagatttttgaagcacgttcaaggtaagtgctgtaattgtttcgccaccaaccacagagctgcagcctgtactaagcccactaaatgctggagatgtcacaaggatgggcaccaagc

SEQ ID NO: 89581 - DNA, 575 bp, Zea Mays
cgaatcaacaacgtatatctgcgacacacacaaaaaaaaaaaaatcattcagcataacgcatcaacgagaatggagtacaggagagggaaactggaatggaaataccagggcgtccgagttgctcaagtactgcctccacagcggccgcagcttgtcctgccctccgacgtcccacaccgtgaaggccacgttcttgtactcaactttctccacgttgaaacctgcacacacacacacacacacacacacacaatgctacctcgaaccgtggtctactacgaggatcaacgtagctctatgagagacgcataccgattgtcggcaccgtcgacagagcttcgccgacgtgcagccggtacagtgccgtcgttttgccggcggcgtccagcccaagcatcacaacctgcaccatacagcagagcaagcgagcagctgaaacaccggaaaaggaatccattcagacagatcgagctcagccgtagcactgtctgtctgtctgtctgtaccaacggcacgcaccaccgtccgtcgtcaccttcacttctttctggcaggagtcgtcgaagaagagctt

SEQ ID NO: 89582 - DNA, 559 bp, Zea Mays
tagtgaaataattaagcagcagcaatccagcttgtcaaaatatcgttaacttgactcagaacagttctctgaatatcgttaacttgactcagaacagtcctctgaagcgaagaaatgggtcaaactttctgaatggttctgcaatgaaacggacacgcgaattagaatttttagaatttctttatgaccatttgcaaatatgtgattcacaaactgcacgctgtagcttatgttcatatcgacagtttccgataagaaccagaacataaattatgtcaatctatgtttcaaatgacgaatgcgtcaagatgtatcgatgtctaactttaataggatatgatcatcttaaaagttgggatcagtcgcaccaaaagtgcttcccaaaatcttattcgtcatctctttctctgtataagttcacgaagacgatggttgcagagaatgctcttcaaatcatcagtgcacgtatatgcttgcgatagagagactatgacgaaagtgtagcagcaagaagagagaaaaattaattgtaggatttttcaaattatgaactttcaaa

SEQ ID NO: 89583 - DNA, 496 bp, Zea Mays
cagagtctcttttttatagtcgatagtgggtgattggcagagcataggtatccagttacttattatgtaggatataagccgaacaggttgaggtaagaaagattatggcaaggaaaagacttcatccgaaatatttaagtctggattcatctcgagattcgctttgactgttatatccttccttgttgatgttgatcttttcttctctggtcttggtcttattgattcggagttagtgtatatcattggggttgaggaatatggttaatggttaaaatagatatggatgagatagactacatgatgtaggtcaaaagtttgtttgatgttaggtggggatagatagattataccattcatcatgactctatgggttgggttagctcttatgctcatggttgagttggtctaatgtgttaagttaacaccttgctagtagggtagaggagattagacctactagtgccactaatctatttaagtagaccacattaga

SEQ ID NO: 89584 - DNA, 615 bp, Zea Mays
cccatccactgttacaaaagcagtatgcttcctatcctccctagccatccggatctgatggaaacccaagtaggcatctaagaaggacaagaggtcgcacccggaggtagagtccacgatttggtctatgcgtggaagtggatacgggtccttgggacaagccttattcaggctggtgtagtcgatgcacatccgaagcttcctattcgcctttgggacgatgactgggttggccagccacacagggtgatggacctcttcgatgaagccagcatcaagcagcttccagacctcctcacggatgaagtcctaccgctcaacggactgcctccgaggcttctgactgaccggtttggcgtcagggttgatctttagatggtgctcgatcacctccctggggatcccaggcatctgcgatggttcccatgcgcaaactcgacatttgccgagaggaaggcgacgagcgcgagttcctatttctcccccagattgcccgcgatgcgggtggtctgggaggagtccgcaccgacctggatggtcttcacgggttcgccgtctgcttcggacggctgcacctttggcaccttggtaggtgccttggtaccggaggtcgag

SEQ ID NO: 89585 - DNA, 656 bp, Zea Mays
atattgtgcattgaacaacacgaggcacatgtggcgacaaggccttcagcagggttggccaatcctccactctagttcaccgtcctgatccatagccatgtggacagcaagaacacgtccggttgggtggtccactggaactcgcgacagcttaggtggtagaattggtgagttgccacgtcttggcctttgcagtctggacaaggttgttcccatgggatccagggggaccaaccttagcatatgttaggttctttaatttatttgcaaataaattaaagtcgagatgtaaaaagcttctagttaggattgcactttcacgtgcatatcaagttagacagcaaggttgttgccatgcaccccattacagctcgacgagctgtctttgaagggtggaggaatgtcatggggcgacagcccagggcaatggaggcccatagggataggctcagggttaggattagtggataaagattagattagataaaattgagttagttgcttaggatttgattagataagattgagttagttacttgggattagattagataacattgagttaagttacttgggggccaagtcttcctatctatataaggatgggttgtacctccttaagggggaatgaaggaatggagaagaattagggctta

SEQ ID NO: 89586 - DNA, 353 bp, Zea Mays
cacaaacctccatcacaccatcatctgctggctctgataacaaatcctctggaaccatatcctcaagagtctgatcaaaattcgctagggacaattcttgcagactaatgagagcagacaaagcaggggaaggaactccactactttcaccactagcgatgaactgccgactgtttttccgagtcaaaggaacttcatcctcttcctccccgttgtcttcattagcaacacaggcagcacccccattgggatcagcaacagatggagcacccacattgggatcagcagcagattgggcacacccattggggtcagcgtcaataaattcagtcacaggcacttcttcagcagca

SEQ ID NO: 89587 - DNA, 496 bp, Zea Mays
gatgagagagagaaagaggaagttgcgtcgccgcattgctagctgggtcgttgcgatcccatctttggtgattgagttcggccgttgaggcgttgagcatcccggaagattcggctccaggaatcgcaggtggaagagggctgcgccgcacgggtgcttttacgaaggcggcattatcggatcttgtgctgatggcaagggagacttccttgggcgcgtggatctgctcgatgcttggttggcgcggcgaatcccatggcacaacgtggacagtttctccaatgcctcccccgctggtgagaattcttccaagtagttcgattttgcctccacatccgtataagccgtggtctctcatctgccagccgcttcccgccgctcctttccgaagccgtcaccaggaaaatccaatacgctatggagggctcgccgtagtacagaggtggaggccgccaccatgaagcagtgaagggaagagagacaaactcgtcgcccg

SEQ ID NO: 89588 - DNA, 273 bp, Zea Mays
caatcatgtttactctatagtgtatacaaatcgttgaacatcaagtagactaagacaataaaccgtgtagtctagaggtcactaaacaccaacacaaaccaagtaaattattgatcattaagccacgatgagatgggtacgatattatgatataattaagtgttgtcttttttagtggtgatgaaagatggtccatatgaaaatggtagttgtgatagtttgcatacgttaatatgatattgttgagcacactttttggcagcatggacggtc

SEQ ID NO: 89589 - DNA, 535 bp, Zea Mays
cttcgggtgatgttcctcacaatcttcgactcatcagcatcgggcacgcacattagcattttatcccccaccaaaaagcatagctccaagaccatagctcatagcttcggccttgtcctctagctccaaagctttctcttcgctcaattcttccctactaagatgtcttaagaagaagtcaagttcatccatctcttcactagtggattgagtgggtttggttgtatttgttcgaagggaaaaatttggctctcccccttctttttcgttacctgaagatccatcgccttcaatggctttcttttcatcttcttcccctaaggatgatgaatctccaaaagaagcgcctccaagactctaaatacgtgggatgtccacttcctcttcagacaagatatctttgcccttcaaagatgtcgaagtctggcaaccttcgtcggtaccctttgtactagtcaataactaagtcagtgttggttccaagagacttagagtggaaactggcaatggttggttcattacctcaaggatccac

SEQ ID NO: 89590 - DNA, 844 bp, Zea Mays
tgttcctccagttggaggtgttacaaactgcacattcggtgtattcagagttataataggtgttgatggctctggtgactgtgtgatttgctcattaactgtccatgagccgcctgattcactgttctgattgggagaccctggatccatcactaaaaaatcaggtgctacagctgattgtccagctgaattttctgaaacataatggtcattatctgatactgttattcttctgggaatagaatagaattccacttctactcctgtttcagtgttcctgtcttggttttcctcaccccagctccattcacgatgttcttcaaacacgacatcacgtgacacttgcagtttcttagtcaccggatcataaacccgataaccctttgtgcctgcttcataaccaacaaacaccatttttgtggatctgtcagacagcttagttactcctggtcctgttttcttaacatgggccacgcaaccaaatgtcctcaaatgacctactcttggtttcttcttgtgccaagcttcataaggtgtcataccttccagacttctggttggagctctattcagaatgtatactgctgtgtgaacagcctctccccagaattcactcggcattttcttgctctttagcatgcatctggccatctcaacaatcgtttggttacgtcgttccacaacaccattctgctgtggtgagtaggggggcggtagtaaaatgtttcagccctctctcattgcagaattcagtaaaccaaattgagttgaactcaccacctctgtcagagcgaaatgctcaaagtctgcacccactttctacttctaccaatttcttcactcg

SEQ ID NO: 89591 - DNA, 740 bp, Zea Mays
cttctagaataggacttggatgtgttctgatgcaagataaccgagtcatcgcatatgcgtcaagagcactcagggctcatgagcagaattaccccactcatgacttggaactaggagcggtagttcacgctctaaagatctagaggcactacttgatgggatcctgatgtaacttctacacggaccataaaagtctcaagtatatattcacccaagcagacctcaacatgagacaaaggggatggttagaactgatcaaacattataacctggaagtgcactatcacccgggaaaagtaaacatagtagccgatgctctaagccgcacatctcaatgcaactgcttaaccatggcttctcgaatcaccgccttgtgcgatgaaatgcgcaaatttagcatggaaatgatttctccagggactttgaatcatatctccatcaaaccaaccttgcaagatcagatcatcctggcacaacttgaggacaagggagtttagatcatcaaagagatgctcactcaaaaagtggagaagtataattgtttccgtcaagatagcaagggagtattgtggttcgagtattggcttatcgttcccaatgatcaagccctaagggagaagattttggataggcctcatctctccaaattccccatgcaccctagaagcaacaagatgtatcacgacctccgatccctatattggtggactaggatgaagagggagattactaagtacgtg

SEQ ID NO: 89592 - DNA, 402 bp, Zea Mays
gttcatttaagcaagaaggagtttctcaatcagcaatgccttggatcttggtagggtcagtttccaccacattggcacttaccacatgacctaggtaggacacttggttttggggaaaggagcacttggatagttttactttccattgttccttgtccaacaatgtaaagacctattgcaggtgatagagatgatcttcccatgtgtgactataagccaatatgtcatcaaagaaaacaagaatgcacttccttaatagagaatgtagtgtgtgattcattgcacgctagaatgttccaggtgcaccaatcaatccgaaagccataactcggaattcatcatgacctaagtgggtttgaaatgtcgtattacgctcttctccctcattaagcagaatctgat

SEQ ID NO: 89593 - DNA, 381 bp, Zea Mays
cgacgagtaagagcagtctagctcatttagttgagctgacaagcatcacaagcatgtgagggtgctaaaacacgaataaggagggtgagtgcggacctgagagcggctagccccgacagggtgattcacggcggcgcagatgatcaatttgggggaaacccaaattcttcggctatggtggctaatcggatatgagagttagtgtcctgggttcgtaataacttggcgaagtagagtggggcatcaatttatagaagctttaggcggtggctccgaatttgggaggagagtggagcttatctccctggtgaggcaatcacgaggctcactatggagcgcatgcgttcaccttgcgaccgtcactatctcgaggatgccacg

SEQ ID NO: 89594 - DNA, 517 bp, Zea Mays
gggggactggtctcaacatcatgtatgttgatacgttcgatgccctggggattgcgcacactaagctatgcaccagtccggcgccgttccacgatatcattccagggcaccaagcttacccccttgggcagatcaccctacctgtcacatttggtgacccctcgaacttccacatggagctactacagttcatgttatgccaagttatgccatcctcaagaggccatgttatgccaagttcatggccatcacaaactacaccaacctcacgatgaagatgcctggcccacgtagggttatcaccacaagcacttccttcaaggtggcctaaagctgagagcgtgacaactgcgagctcacagcatcactggcaacgaccagggagtttgccgaactctagaagaacatgccataggacgctccagatgctcgaaaagtcagcatcggtaccttcaagtccgctgaggacacgaaggaggtcctagtcgacgcccaccaacccagccaagcaagtcca

SEQ ID NO: 89595 - DNA, 554 bp, Zea Mays
tcgctctaacaaacacactgatgaaggtggccattgtacagtaaccgaagaagatcttaggtgcgttgcacctcgccgccggtgacctcgcgcaaggatttcgcgccggccgccgcgattcgtgcccagcgcaaagtggataactgaggggagtaaaagattttagcgcccggattggctcggactcggtcattgttgagttcaccgtacccacttggtctgcggccgtccggaatgatcttcgccggcgttggccgcttaccgatcatgcaccacgtgcttgggaggtttaacacgtcgcagtgaacccttgtagcaagcccgtccatcggcggaggccttgccacgatcacccgcgtcattacatttcccctctcctgccgccagcacaattccttcaaattggatgccaccgctaatggacactataaatcaataccccagtgagctccgttaggttgtcacgaagccagagcacccacccttgcctccgattagccaccacatcgcccgaatttccttctcccccccaattcagttctccacacttccgt

SEQ ID NO: 89596 - DNA, 347 bp, Zea Mays
aacacttgggttctgtaagtgtttatcttctctcttgtacactactgaataatataaattcaatgctacctaaagttctcttacacctgctttgtttcgtgaaggatagagatccaatgatgccataaataaggggttttaaatattagcttcatagacccaatgtatattaacaaaaaaacaattcaggactcttgccccaacatctaaaaaaattctcgagtttcttcagtagcaacattatatgcaatacgtacttattattccttacaattttcagtcagtgtctattatattttagtagccattccttttctgactaaatgtgtattctaatttgttctccc

SEQ ID NO: 89597 - DNA, 777 bp, Zea Mays
tcaggattaaaagatcatcaatgcaacaatctccctcaaaaataagttttctgttttgagacagaaaggtgtactataatcattgagttcagtcgcacatgattggttgttgtaacgttatgatcttggtgtactaatacatagaaggttagggattgtaagtcaagggattgagtagttaaaaaataagttgcaagcataagatagtaagcatgatatcaaaaggaacaatgttgagttcatttcacagaaccgagtcagtactctctcccgtccgcgcaacaaactttttggttgtgatccccctttatatagagaacatgttggcatgagaatcaacgtccgctgtatctccttgcccgtacagaaattaacgagatccgatctatctcctctaccagagaccaccgtaccctcgtagatattgaagcccagacttgaacctgcaactccctaattccaaaagtacactgatgggttcttagtcttctagtagatagggtaacacctaacacaaaagttggattcatcgaccccgtcgaccactcctcatccaatccagtgcaagttgtagaacacgaggcaattagcccgtggcgttcgacgcagtggcagccagccaatcatcttgtcccggcaaaagtaaccttaacacacttctcctcctcacccttcttgatggagagcgccctgccgcgagttgctttcagtacaagcatcgtagctccaatcaggcaggcctgctgtctgctgctgctacgccgtcatcttggaagg

SEQ ID NO: 89598 - DNA, 801 bp, Zea Mays
atttatcgtaaaatttctctccacgtatttttatcatctacctcccccgactatctggctcattgaattgaagcccaactgccgggtgccggcccactcgctcatgtccgctctcgtcccgttgctgcaggcccaatcgctggttcgatgggaaacaataatgatctttgtgcatcactatccactgatctctcactcgtctatttaaattcttccagttatgctcagtgggaaacaggtcagtgccacttgcagcaagtcttaaatacctgaaaatttaatagatcatattacatgactgcgaaggaatctatttgccaaacacattgtaaatccaatattataccggagttatctacctataattacaatgaagcctaccttgcactggtactttcctcaggctggaggctggatgacaaacaagagattgctgcataaagccaaatcaacatgcttttccccagaaaatcagcgcatgaagaatcttcattcaatttctctgccaggggttttataagggcacccatgacaaaggggagctcaagcattttctgtttacagttgggcccataaaaagattgagaataagtagtaatgtttatgtcattgtattggttaatcttcagattggtcgccattatcattgtgttggtcctcctaaatcctaatcttgtgtccaagctaaataaagtagtaatgggcatgcatcataactggtacattgactgacaaactataagggaactgccatttcacaatttcgagggacaattcagatagctgatacaacaatacgaa

SEQ ID NO: 89599 - DNA, 428 bp, Zea Mays
ttgccctttaacacagcagtggtggccgaagcggcagtttttctcttctttccttgccttcgcaatgggtagtgataatcagggtatacgaagccaattgcatcgaacaccctgttcaatcttttcttaccccgacccccgaaggctgcaaacaaggcatcatcttcggccttcgaatatgtcctaagcagctcatcgctggtagcttcaatgcatttcaaccagtcatcgtttggttcgtcaaacttctctctgaatccgaaggtatatttcaatcaaaccaggccaccttcactggattcagcagtagtctccttcggcacttcccagctatctagaagtggccacaccctataggctatgtgctcttggattatatctcttgtgccaatgaaggcacaaacattgctaaaggccttctagcatgc

SEQ ID NO: 89600 - DNA, 697 bp, Zea Mays
tttataaccaggtcgggctagtctgatccaataagacaaagatcgacatccgagttaggcgctaccgaagcactaatatctcgggaggtgcagttgtaaacaccttaggagcttagcattcggcgagaactcgaaatagaatgtgatcaagaccttggatatgtagggctgcaagctacgacaaagaaggagataagtaaagtagatagtgatcacaacttgtaaagggataactctccggtcgtgtatataaggccaagggggacccctacaaaatgatctcatctcactccaccctcatcaacaagacttgagcaatcgcaaagctcacttgtaaccttcataccccaggaatcaaaatacggccacaaacaggaagtagggtgttacgcattccgaagcagcctgaacctgtataaacccttgtgcgtcatcgacgtgctcctacacgtaccatcgagttgtaatcaacgacgtcgtcctacccaaaagcatcacgtggattaccccgtggtgcgcgatcaggtcacaaacattggcagaccctagttaggcactagctatgatagatgctaaaggaccaccccaccaagtcaaaccaagtatccacccaagaagaaacctgctaaaaagatcaatttgacaaagggggagataatataaagttttattgatgttctttatccatccatgaaac

SEQ ID NO: 89601 - DNA, 880 bp, Zea Mays
caagattgctatcatgctggttttgttacaatggattcaatatttggatgcgagctatagagtgtggacagcacaccaagatgctcttctttcattgttctctcactgcaggtctcatcaagtccaactaccggcactccgatggtagcttttaatcttttcaattcaatcaaagtatagagctgcagtattatgaatgatgagcttgtgtctggtggtgatgacagccatggccagaataatgaaagtgagcctaaacaggatttaacaaaggttccttaaacttccaagaaactcataagaaaaactccatccgtgctggtcattaattttaaaagcctctttaaaggagttgtaagagacccttttatccgattatctggacccatcctcctgcgcattataccaatggccaggagacattgtaagatggaactgaaacacaatttatctccacggcttgacagctctttaacaacactaactatggaatcctcatcacaaagagatccagattggaagatactaattacaaaactccggtcaaaagaaatacaatagcctacagaagaatcatcaaatgaaacaaccaaccaatggttatgcttcatggcatgcacttttgcatggccacctagttacttaccaacaccacaaaatcaactactgcaatgcaaaaatactcaaattttggaatgcttggtagctacatcctttttctcccatcaactttttttttttgatttggaatgctttccatagagcgcacacaaatgaacttccttagtagttaaagttgttgtaaggatcagttaaacttgacagcatcacttttatagtgagggcactgcactttggcatcagtggaggcggccggcag

SEQ ID NO: 89602 - DNA, 337 bp, Zea Mays
taatatattgaaagacaatgtttgaaacataaataagagtagagggctttattacaactcgatggaccttgatgagtagttgttggttgtagtttatgaagctgatttaggtcaatagttcacttgggagattgagctgatgacattattcttagagatttagttacgttgctgacagtgcatatgaacaaacgttaattacttgtcagtcgcatgctctaggctcctgttgttgtagttcttttgaaacgagatggagcagtgagcatctatgtagatggtaatgttctgaaacaagtgttcttgttcattgtatactctggttgtctcttatgtg

SEQ ID NO: 89603 - DNA, 363 bp, Zea Mays
gccgccggcgacccctgcgccgtcgaggtgattcgtgctcactggtgcccggataacgcttcagggtgaaaagatcttcgccgcggatgagactcggggctggccgtcgtacccccttgccttacggccggtccagataagttcgccggagttggccgcctgccgatcgagtgccacgtgccttgaagcttcaccacatcgccgtaagccgctctagatagctagttcgtcgccggtaagcctgccacggtgaaagccacgcatctcttgcgccagtgctcttccccctctctggctgccagcgcgccattccaaattcaagggccaccgcccttaggtcctataaattgagcataccgctag

SEQ ID NO: 89604 - DNA, 472 bp, Zea Mays
atgagtttgtttcctaggtcaaggtcttgtttctggtttagatttgttttgggtcagtttggtcattaacatccgctgccatccaacaaacttaatctcgataaactgatctcatacacaaaactaaccctattcatgaaccgaactcattcacccttcatttgcctcgccaacaaccctaattagattgttggtttagatttgttttgggttagtttggtcattgctattcgttgccatccaacaaactcaatctcgataaattgatctcatcaacaaaaccaaccctatccataaatcgaactcattcacccatcattttcatctcaacatctcgtccttatcagattagtttctgcctagttcagtattttgagcatgaatctcacatacaaactcggaatttagtgttcttgtacttgctagaaagcttagaacattctctacaacttttatatttacgagttttcca

SEQ ID NO: 89605 - DNA, 588 bp, Zea Mays
gagtactctccctcggtcccactatggcaatggcaggaaggccggcgatgaagtcggcgatgaagatggtggccgttgagaagaagcagcacactagtcgccgcccgtgataggagctcgcttcgccgcctcaaggattgtgaggagactgcctgaaatgctcaatcctcttccttatctgatttgtggtagtagctcttaggattttagggcgggatcgagaccgtgatttcttttggcaccgcagttttgctagggttttatctccatggacgagcattgatgggcctgatccctagcccacatcccaacctaatgattggcgttgcctcccgcgaaagaaagatgtgggagcggggttgggtgtagggaagacaagcgatgtggattggtccatcaatgagtgagtgtaggttgttaaaaattgaagctccctaggcttcgtggggttcactgcctgggatttttactgagatctacaaactagtctccttttcttctgaaagggagtaggttgggctgcaaaatgccaaaactcagatcgatacaacatggcaaaaatttcataccatctgcaaaaaatacaaa

SEQ ID NO: 89606 - DNA, 495 bp, Zea Mays
aggttgtgtccgagttctcagatgtgtttccaaaggacttaccaggtatgccaccagagcggaaagttgagtttgctatagagcttcttcctagcaccgcccccatctttaagagagcttacagagtatctagaccagagttggttgagcttaagaagcagattgatgagctgtcagagaaaggtcacatccggccaagcacctcgccttgggccgcccctgtcttattcgtggaaaagaaagatggcaccaaaaggatgtgtatcgattatcgagctctgaatgaggtcacaatcaagaacaagtaccccttgcccagaatagaggatctgttcgatcagttaagaggagccagcgtgttctccaagatagatctgaggtcaggttatcatcatctcaggatccaaccttcagacattctgaagacgacattcattaccaagtatgggttgtatgagttcactgtgatgtctttcggtctaaccaatacaccgg

SEQ ID NO: 89607 - DNA, 486 bp, Zea Mays
cacaaactaaccgtgactgattgcaggaccagactaaattgaaggcatcgtcgggctccgcaacacgaccttcgctctagtctctaccaaccatcgtacaaagatgatagcttgactcccactatggcggacaagcgaaggcccagacgtgaagaacgaagtcacgaacttcgccgcccacgatgtcacggagggcccgggtggattgccccaagcctagtgcgaggggtcccaaaaggcgaagctccacgatagcgaaggctcagaagaaaagcctgcgtcgagcctgtcgggtgtcataattaggggtacccatattatccctctaaaacgcactcaggaaaggttaagacttaacccctgaaggaaagaggccgagtcacctccttgcccgaggcccctcccagagggtctcccgcctcatgcaaatctccgcctcgcctgaagtcaccaccgctccatccgtctcgcccgagccgatctcag

SEQ ID NO: 89608 - DNA, 611 bp, Zea Mays
gccgaaactggaccaagtcagtccgtgaacaggcaaacgtgcccgcggtggacattttgcaccgaggtcctcaggggtttgaataactagcgaagaacctcgtgcactatttgtttgggtcactaaaatgcagattgaccctcgcacttctatttcttcatagctcgtggtcccttacggtgaacggcaatgaaccgagctccggcgagcttgaaatggccagaataagcaacagctagccctcctctttgttggacaccgaattcaaccctatacgatcatttcccctcacttaattgctagatttgagctctaaatcaccctgcccacggtgacagcgggatcaatggacaacatgaagtgttcccggtgatctaaggggttctagcctaatcggtcgagtcgagaagcatcaggggcacataagggtgctaaaacaagagagcagaagacatgatcggacctgaagcgcactggccatggtgagacccttctttcggcggcagaaaactgatttgggggaagtgagcaattcgggggctctggtgagtaattggaggcacgagtgggtgtgttgggtgcataattacagagcggagctgagggtgtga

SEQ ID NO: 89609 - DNA, 938 bp, Zea Mays
ttgagttctcatattcacttggaatatttctcctagtttaatagttatcttaagtgagcaatcaagtgaagagttctcatctcccttctctctactccctaactcggttttgatttactctaactcctagccgctacacaagcgatcaacgaccacgcgattccccctctcgaactacccatgcacgacgacgctcgagcctggacagtggtgccatggccggcaacccatacttctccgctctagagtccaaccttcgatgcgaaaggtgctacatgattcggggaagatgttgaatcaactagaagggttccacactaaggatgggttcccatgccctgactatggcaagaatcgacctgcaaccatgctaattcttgtgagaaggttcagtagctgccctgaagcgcggatccgaacacagattgaacctatgcatagagtagaccaaagggaattgtagagagggtcctcatcgagattcgctagcataggagtcctgcccatggtggacaacggcttgtggttgcgcccttacaacggcgagcaatcacaggccctcggtagtggttctcgatagacgaggcaaactacgcgtgcgacgggatccttcgacgcccatgggctactcgccgaggtcggggagtcaaccacaaagcagactgacggcgacggcacgaggtccctcaccggtctcacttctctctctcgggactctcggatttttttgttggacaattgtgctacttgggtgatgaggcaaggacaggtggcggctgatatctaggcacaagggatagcaatccacagctagcatcgtttgcaaccgaatgccaagctcgccggcgcgcggaccccgcatggttcgatgcttgagaggaagggctgacatgtggggcttgtggcgtcagcgacctaggcgacgacacacgttgtgg

SEQ ID NO: 89610 - DNA, 1063 bp, Zea Mays
aaacggtggcctaaaccagatgagaatgggagtacgtatacacttgtgctagtgtcgtggcaacgtctttcagctaactgtcattaattccttggcaactattcttacagataagtgatatggttgcagtggcgaagatcatgaacgcatcgctggtgatccctactctggatcatcagtcattctggactgacccaaggtcagtgactctatatctagctgtgctgaaccagcctgaagaagaaactgcgagcagactgacgactagtgtttttttttggtatgtagcgatttcaaagatatattcgacgtcgatcacttcaaggagtcgttgaaggaagacattgtgatcgtggattccctcccaccacattacagaagggtgaaaccgtacgtgagagcgcccacctcctggtccagggtacgagtcaacaacttgtttgctctactggattgcattgcagttgcagcagcttagaggataaccgaatacgtactgaataggctgatgcatcgccagctccgttttccaggcttccttctacagagactttgcgaaaatcctgaggaagttcaaagtggtgaggtttacacacacggattcacggatcgtgaacaacggcctcgctccttcgctgcaaaagcttcggtgccgcgcgaactacgaggcgctccagtacaggaaggagatcgaagagctcggcaacacgctggttgatcggctgagaaacgagtcccagcattacatcgcgcttcacctgaggtagctgagagttcacagcgttcggtggccggctattatctgcagatcaatcaatggatgaacttgcattggtttgccttgatcgtcgtcagatacgagaaggacatgctggccttcaccgggtgcaaccacaacctgacgctggatgaggcggcggagctgacggacatgcggttcaaggtgcggcactggaaggagaaggacatcaacagcgaggagaggcggctacagggcgggtgccccatgacgccccgcgaggcggccgtgttcctcaaggccatggggtacccctcggccacc

SEQ ID NO: 89611 - DNA, 1045 bp, Zea Mays
cgaccgcctcgatggatggctacaccatgatgaccgacgatatgccacacatggctaccaccctcggtggggtggtcactacgacactggggaagattgaagcccctcgcccaagccaccaggtccataggtcttcagccgagccatctgcagggcaccattcccagcctgattctgagcctcgactactatcaccaagtactcaggggacaccaagcaagagctatggctcgctgactaccgtctggcctgtcggctcggagggatgagtgatgacaacctcatcattcacaacatgttgctctttctgttcgactcttctcgagcatggcttgagcacctcccaccaacccaaatccatgacaaggaagacatggtcaggattttttggcggaatttctagggcacattttcctccctctgaaggcctctgacgaagtgggggtggctaacctagtggttgtataaattctggccatctcagcacgaagttctacctgaagagttttatctgaagctcattctaaaagtggtattcagcggaaagatttagactcaaagaaaaaatatgtagcaggtaggtggagcacagtaaatgtagccctacctcaacacgctctcccgtttttatactaagaaaccagcgcgaggcgcaaaaagattgcgcgcgcgtgagaagctgtgtcttcaccttctcgttgtccagtggacgtggacatacttctatttatgctgaattacttgtttttgtcactttcattaacgagcccgagaaggtgttttttggaccttcggcgcaaggcctccctgatatgtttcacgatttgagctcgttatgaaaacagtgttatttcgcgaggggatatagttgggggagagccttcatcgttcaaggtctacaagttattgacttcatcataaaaagcaagttttatagtcttcaccttcgtcaccaaatcaaagctaacacctgggacgaagctaagaagtttaagttcgcaaaccgcttgccacaccaaggttttagggacacgggcgcgaaaat

SEQ ID NO: 89612 - DNA, 527 bp, Zea Mays
tttatagagtgtatgcagtataaagcaaacaactatatttctttcaaattaacgaagatgatacacccgaatatgatataccgaagtctatacagaacatagaaggaagctaacaaaggagcaaataaaattcgtttctcgctcacgtacaggcgtaagcatagacctcggcgtactcagacagtcgtacgcaaataactatactcttttttcctgcacccacgtcccattcatcccatacccccacagctgaacgtaccattcggtcgcgagcatggtgcgtagctcggcgccatgattcatagcgccaagcttggttatgtagacaccaacgcagcaggagagatcaagcgtagtaggtactcggcgtcgtaagctatggcaccgagtcatgttatctcagtgttattgtctatgacgccgagcaaaggatttaaaaacgacattaaattattcgagggtctaaatgtgattttttcgaacaaaggtctaaattgcaaaaaaaggtcaaatttaacacctcccgc

SEQ ID NO: 89613 - DNA, 615 bp, Zea Mays
cgccaggcttcagcgccatggcggtccagcatcgtgaaatcatgaccaggtcagtctcgcggagacttccgccaatgcatgaggattgggtgattattaatatccatcctttacctgagcatgaggtcttatttcctgcggtcagagatgtgattagggaatatttagtggagcatcgaaggataggggtgagagatattcagcgttctcacttgggtcaggtgctggtgcagtttcatagtgttttggagcgtgataaccttgttttgcttggtccttaatagtacctggatgctactttcactgctcttcatcataatgacgcttggaatcatcgggctctttttttcaatcgtgaatgttggctcatgttattgggttttcctctggactaccgttcttcagagtacctgcaagaagctattggttcgtttggcaggttgattctttgggaggaggatcaccataatgtcaccaggacattgcttcatgtccgtgtcacttcccttgaagaagtccctccgttcattgtttttcggaagcagatggtttcattggggattcctggacagtctagtgtgaaatcatccaacaaaacatgcttggtgggcaagc

SEQ ID NO: 89614 - DNA, 585 bp, Zea Mays
ctcgtagtgccgccgcgcgcaccagcaccaccatgcgagcacccgttctgcatttttatcaggggagagccggtgtgcaggtgcctcgacggaacccggccggcccccagcagcagcgtcgaaatgaggatgatgatgcacgcagacatggagagagccagcagctagcgtgccactgagccactgatgtacgtggttttggtttgtttgttcttggtccagcagtaacagtgatagtgtcgtgaatgagctagcacactgtcgagtctgtcaggatgatgctcattctcagtgtcaggtcgtctgtccgtgtcgagaccgatcgtacttacgtctttgttttggtataataaagcgtcgtgcaaacgagttctgttactatgccagctcgtgatcaatcactagagaagccaacaccagatgattcactggagaaggtgcagccagaagctgatacacgaaccatcgcctgacttgccacagcgtcgggaggcgggtgcaagggttcgacgcaccaactgccgtgagtggtccggactccggagtcggcgtagctgtcgcgtgtgtgtctcggtctctgctgtg

SEQ ID NO: 89615 - DNA, 493 bp, Zea Mays
ctttcaacgacgtagtgtctggcttcactgatgggtgggccgcgtcggtgaggtcatcatcctcaacaaccgagaccgggtctccgtgagattgctagggaaagcaggcaggaggttgcgaactagctcggtgcacaggaaggcggtccgggtgaataagtattggtgccctatgacccgtggggttattggagagaaaaagggaggtctatccgcctgacagtgagagacacctcggtgggcagaagaaggtgcgccgctgccgcaccattgcttctctcgacatcgctccgcccccgatactggatctaggagtgcggcagggattccgagtgcgtgtgcgtcgagaatcatgatggttgggcgctctgggactcggtgattgctcgttggagttcgtttcccctcgtcaagctgttggccaccacggacgactcggaccggcaccctaagtcatggtaatgatagcctctcttgatttcccatacttccc

SEQ ID NO: 89616 - DNA, 898 bp, Zea Mays
gagacggcacacgggcaaccaaggtcactgaaatgacagaagaggtgagcacgtattaggcacatagtcataagtatatgaaatgtgagtaaatacatacacaagagaaatatggcacaggaaacacaagatgagacgatcgagaagtcaaacggcgtgaaaacgacgtttgaaggataaatagtgtcataggaggtttggaattcgaattgaggcatgaaatgatatggaattgagccgatacttcacgaataggtttatataggtgaatatgagtgaagtgtgtgcttggtttgaatttaggcgaagaaaaagggatttgggcacatggctcggaaacgatcgctcaaatcgggaaatttggtgaaaattaagcctggaatctcagattggcgtgaaatttggcaagtaggttactggaagtgttgtgaaggtgcctgaaaaatttgggtttaattggagcatttttggctggtttgggcatttcaccgagcacgtggcgtgcggggaattagggtttcggtgaaacggctatttgaggtgggaaaaccctcccgaaggagctaaaagcctgcagggatacacaatagggacaattgaatacattccaccaactggattcacaagatttcacaggatttgaagtgatgcacaaggggtggaaaagggaagctcaggtgcctcaaacagagaactgtgagggagtggagacaggggaggaagaggggagcctgctcaccgagagggagaggacgagcccaggtctccacggtcgccggagcacggtggtcgccggagggtcgccggtgggggagagggagacaccagagacagagacagagagcggtgagggaagaactgagagcccctggctcggtcgggctggaggccttttttt

SEQ ID NO: 89617 - DNA, 511 bp, Zea Mays
ggccgatgagccttgcactttatgtatgtaagctatgatggcatattgcgtgctgcatttattgcgagattgcttcgatttgtaatcttgtttgcgcgacacttaggtgggatgaggaatttgcttcctgcgggtgatgtcgcgcacttgttgcgcttggccggctacacccttaggcggcttttgctcggacgtgtcttttagtaaagacttcgcaccctttgggtgacgttgtgcagttattgtgcattcccgactgcacccttaggcagcttttgctcggacgtgtcttttggtaaagactttgcaccctgtgggtgacgtcgcgcacttattgtgcatgcccggatgcacccttaggcggcttttgctcggacgtgtcttttggtaaagacttcgcaccctgtgagtgacgtcgctcacttattgtgcatgcccggctgcacctttaggcagcctttgctcgaacttgtcttttggtaaagacttcgcaccctgtgggtgacgtcgc

SEQ ID NO: 89618 - DNA, 387 bp, Zea Mays
atttgggttattgtggacaggttgaccaagactgctcatttcttacccgtgcacaccacccacaagactgagaagtacgcagaaatttatgttgatcagatagtaagattgcatggtattccaaagaccatcatatctgacagaggagcactgtttgtggcatgcttttgggagcaactgcaagaatcacttgggacccacgtaatccgaagctcggcatatcaccctcaaacggatgaccagacagaaagggtgaatcagattttggaagacatgttgcgagcatgtgcactacactatggaaaggactgggacaagtgtctgtccttggcagagttttcttacaataacagctatcagtccagtctaaagatggcaccttttgag

SEQ ID NO: 89619 - DNA, 310 bp, Zea Mays
gatgatccctttgaattgtttgatggactctaggatgaggcactgatggttgtctttgtatttgcctctcctcatcatccacttgatcaagaggcacttcaccatcaatactttcttgttcatcttctaccactgttggcatcctttgattattttcttcatggcttggatgacttgaggttgatgggtgtgcttgggtggagactttgtcactcaccacccttgcacccacatcaacaacctcattggtcatccataaggttccttcttcatcatccttttcttgaggtctcacctcacctattgcaag

SEQ ID NO: 89620 - DNA, 303 bp, Zea Mays
gtaagcgcgagcatgttgcaccatcttaagtcgtcgtcgacttaagccgattgctccgttagtagggtatagtggtcaccctaagttgagtaagcgcaagcatgttgcatcgtcttaagtcgtcgccgacttaagccgattgctccgttagtagggtatagtggtcaccctaagtcgagtaagcgcaagcatgttgcaccgtcttaagtcatcgtcgacttaagtcgattgctccgttagtagggtatagtggtcaccctaagtggagtaagcgcgagcatgttgcaccgtcttaagtcgtcg

SEQ ID NO: 89621 - DNA, 358 bp, Zea Mays
catacacagagaaatatggcacagaaaacacaagacgagacgatcgagaggtcaaacggcgtgaaaacgacgtttgaacgataaatagtgacataggaggtttggaatttgaattgaggcacgaaacgacatggaattgagccgatacttcacgaataggtttatataggtgaatatgtgtgaagagtgtgctaggtttgaatttaggcgaagaaaaagagatttgggcacgcggctcggaaatgatcgctcgaaatggggaattgagtgaaattgaagcctggaaactcggattggcgtgaaatttggcaaacatgttactggaagtgttgtgaaggtgcctgaaaaatttgggttc

SEQ ID NO: 89622 - DNA, 979 bp, Zea Mays
gtgcttggttaaccaatccattcataaaattacatcaatcccttgggatgacaagacggttaagtctgctaagaacactaccccacttaaaagaattctgacttgggagcatttgagctggcatagaaggtctgaccctggggttcgggtgaccatgggaatttctagatgggtagaggggatgccatgcttttccacaaaaccaatggctataaaagaatgggatgctcctgaatcaaaaggtacagtagcgggagtaaattcaacaaggaactcaccgagcactactcccggagcttgctgagcctcctgagcatcgacgtggttcactcgtgcccttccctgataatgggtcttgttctgctggctgatggaggagggtgccttgggggtgggtgctaaggtattcttggggccattcaccgagttggagtaagcaggtcctgatgccttcaactaggggtagttgttcttgaagtgactggggtctccgcagtgccaacaagaatttgttggcggttggttgcttgcaaccgagggggcctgaaaggagctctgactctgctagctgaaacgtgatagagtgggtacagctggtctattgaagcttggtcccttgggtggaaacccaaaggatccagttctctggtgtcggtcttgctgctgagctcggaggacttggaatttcctcttgaggtgacatttttcttcttcccttgccctttccacttgtatagctttgtttgagaggtgcgagaagctgaggaaatcttggctagctaggatggtcttgagttctggtctgagccccttcaaaaagtgggccatcttcttggcttctgtgctgacgtcatcaggcgcgtagcgagccaattctgtgaatttgtgcacgtattcactgacagatcttccaccttgagttagttccagaaattcatcttccttgagctgaacgttcccttggggcacatggtgctct

SEQ ID NO: 89623 - DNA, 735 bp, Zea Mays
agggcccctttatagtcaagacgaaagcttcccccagcgcttacaggcttacaacgccaaacggcgaagacctggagcactcctggaacatcgacaacctccgcaaattttttgtttgactcaccagggccgattcgcccttgtaatccgcaaaaacaatcttataccggcccgcactcttttcctcctggggggtgaggtttttaacgaggcggagccatgtaatatatgtgtgaaaaatcccccgcaaaaacatgcgtcgaaaaaagaccgcaacgacggtcttcgacattcaaccactacgaggtcaccacgaggctcagctctagccaccctcgcgtgcgacaaatccgcgcagaagtcgcctaagggtgcagccggactagcacaacaagggcgaaaaatcgaagtcttccgcgaagactatccgcgcagaagtcgcctacgggtgcagccggactagcacaacaagtgcgaaaaatcaaagtcttccgcgaagactatccgcgcagaagtcgcctacgggtgcagccggactagcacaacaagtgcgaaaagaaaccgaagtctatcgcgaagactatccgcgcagaagtcgcctaagggtgcagccggactagcactacaaaagcaaaaacgacaacaccaaactgtccacaccaagacccactatatgcgcaccagcacagcataacaaaacacaccagaggaataaagccttcgcaagcatagcca

SEQ ID NO: 89624 - DNA, 400 bp, Zea Mays
cccaagggcacatttccctttcagagtccacgtaggacggatctctttcaaccctttccttctttcaaatggtcacacacaccgaatgagtgcttcttaatctcaaggtcacttaaaccctgtaaggatcaccacttacgtgtcccttgctaactctacaagtgagaattaagagggtgaggaagaaagcacgatcaagaaaaccaagcaacaagagcaacaagaaaacacaaggttgctctctttagtgtctctcgaaggtgctaatcactaaagattacaaatcacaattacgacacttggaggagttttgaggcttttgagtgtggcttgaagtgaagacttgttgtttgcaatgaatgagatgtgtgctccggtggagggcgggaatggggcggcg

SEQ ID NO: 89625 - DNA, 305 bp, Zea Mays
gacgtgtctggtgtaacatcggccaaaacactagatgctcttactgaaacagttaacaatggctagttccaacaactagctgacgttgacacgtatcagcatgttcattgcctttaccggggtgtccgatgagtacacaaaaaattgtattgctttgaatggctagttttggtcttgattggctatatataccaccccaaccagccatttgagaagtgtagaagctgagaaacattgctagagagtgaagactccattctatagctctagacacccgagtgcttaaagatcatatgatgattagc

SEQ ID NO: 89626 - DNA, 410 bp, Zea Mays
cgcgatgcgtataaattgaccccgtcgcgggctccataaggcagtgaagtatccagccacagctaattagccacgatcgttcgccagagctcgagaatttcttgtttcccccaaattggtctccgccaccgcgaagaacagctcaaccgcggccagcccaactcaggttagttccagtgtctctgttgcttgttctagtgtccctagaccctcctcaagctctatgaccccttcgattgaattggaccaccacccatcgccgggaacacgagcatgtgtccatgacctttgctgtcctcgtgggcagagcggaatgggtcaccaatcgtgcaattaacttaggggaaatgctcgaagggggtctgatttggtgtatgccgctcgagagcgccagtccttgcgtaatccgg

SEQ ID NO: 89627 - DNA, 555 bp, Zea Mays
caaagcttcatatcatctccaagtacctgcaaagcttatcaagtacattttggtacccatctcttgatggatccttcaaggttagccaataaggacttaggcactcaaatagcctttgttctagaatgtggtgaactcatcacctttctagcacaagagtcaaattttggtctcctaagcatattcgaatgaatcgacaagttaggcttaggagttttaccctttgaacaaaccttgactagatgacctttttcacgacaattgtagcacatgtggtgcttgtccttgcaatgcatttgtcttttgctttcatctttcctaatggtcatctttcttgatgatgcaaagtccattatcttcatgtgagggcatgatccaatctcgtgacccttatctttgcatccataacaccttctatcacttccctttgatctttcattgttgaagcacataggaacattgttagagcatttaacatgagctttaatttccttaccttgagtcttgctcatgtccttcttagaaagcttggtactcttttgaaggagttttgtg

SEQ ID NO: 89628 - DNA, 362 bp, Zea Mays
cgagggacaaaagaatttgtgtttggaggagatgctagtgtggactcaatacgaatggtgaatcgctgggattcaagcagagggtttgacacagggagttatactggttcaagcttgtgccctagtctggtgtagtgctgatcgtagtattgcttgaggatagtgttacaacttggtgcctgtgtgagaataaggaggagggcatgcccttttatagctcaagggtaggaccttacagaggaaacttgttttctactagtaatagggcggtctattgcccctggttgacgtagtgcccctgacgtcgtttgtagggtcatgcgtagccgtaaccccggtacggcgtactgcaacgttcttcc

SEQ ID NO: 89629 - DNA, 388 bp, Zea Mays
ccttgagcaagtaatagtaaatcttatttgttccaattgaacgcatgccacataccagtgattggttcatagtgaccttgtcactgatgtctttctttttatctaatccttaattcttttaatttcttcacttattttccattataacaaactgaattgacatttctatttgagaaaataatgatccagtttggggattcccctaataaattcagttatagctagtcgatcagatctaaaataggtataagcttaaattccatatcgcccacccgtccgtacataaaaatatagttttcagtaaaagcggaagttccaaataacaatagaaagtagtagaagaatcttcttcgcgcaccttggagaaatctgccatagtgtatcatca

SEQ ID NO: 89630 - DNA, 468 bp, Zea Mays
gtcggattggattgatcaaatcggacgaccatatgctcgggatcctgctaggtcttccaccttatatcttcataaaccttatcaacaaagcaatgcaaccataagttaaaagtgaactcagctgattagatttttttggaatctatccatctaactttaaattctcaatgttggtcacctatctggttctctgtaggagaccaaaacaacacaacacaattaagccaacaacatcttctccccgtggctattcgttaagagagacgaaggcaaggggagaacatcaagtaaatgaaagtaatgcatgagacaatatcaaaactggtgagccagagtggactcacgattgtttactatcatttgcatggttacatgttattacaagattaccttcaggatgcacgtgagatgctcgaaagtgattatgctcaggagcttcaaaggttgagcgtcccaaaagcaccaaga

SEQ ID NO: 89631 - DNA, 569 bp, Zea Mays
atttggtacagtaacacattgcttacaaggtatggcctcttgtgaatgactgagagatgccgacagaaactgctgctggctccagccaaggtggtttggtttatctaagatacaccttctagtatagaagccaatttgacgagccgaatgacgattggctagaggctgttgaggcaaccagtgatgagctgctgggagcctacacgaaggcagaggacgaagtcacgatcattgccttcggcgctcgaggaaaaaaagagactgaacagagtttttgatgtgatcgggtttgtttatccagactattgcttccctgcctgaaaactagggttaaagagaaaaatggcagcttcaacctcttctggttcacagaaaccgaagaaagctaaggtcctgactcgtaagacgaagctacattctttagaaaatacatctatagcgcctatgacagagaaggtgaagcttgttgaaagtgctgaagttatccccttagttatggaaacagttcctgctttgccagccgaagttagtgccaatctagtaaaagagtcgggaccaaagaaaacagc

SEQ ID NO: 89632 - DNA, 526 bp, Zea Mays
ttcttcaccgagcacgagggttttcgtggcatcgcctcctggggcaacattgcagcctgttgtcgactctgccgctacagcgcatccttagcagcagtgcagcttgttgtcatccatgtcgttgtgtcgcctctttgggtaggagtgtcgttgttcgtcgacgacccccaccgttgcatctacatcgttgttgactctgtcggtacgcgtctcatgcgcatagtctgtgagttgttcgacacctatgagctgcattggcaaacctgtcgctggtctgcaccacgttcgtcttcgagtccttcgccgacttcaagcaccaccgtcgcactacagttgcgttgtcgaggaccttcgtggctctcccgccgcggcaacctcaggatcctcgatgcatcgccgcacctacctcttcgccttcttccagcacaaccttgttgccagcatcgccatctcatccctcgactacttcgtctactccactctgacaactgtgagctgcaacgacactcccgccataccgtaccac

SEQ ID NO: 89633 - DNA, 946 bp, Zea Mays
gaagaaggaagaagagaaaaagtatgagcttgtgcgactcccttaccgcttcaaatttcagaagacatttaaagagccatgcactgaatggctagaattgatagaaataatgtgcaacgagattcttgggaactatacgaagaaggaagaccagttgatgactgccgccttcggctcccggccgaaatgaaggttgaatcgtgtcatggatgctcttaactttgagtatcctgactatgaaaggcttgatgaagggggccggatgggccaaaagaaaaagggttgtcagtatcctgggtagacaagctacccaatctgtcaaaaaggaccagaaagcttcgaagaaaaagaagacacttttggatccaaaggattcggctcccaagaagcgtaaactcgtcaggatatcttctgcggatacgaagatacaagatgtgccagagaagactataggtcctccttcaccctctgttgctgaatttttggaaattctgaaggtaatgactgaatccataccatttgcactactaagccctctaaggttagatctgactagccttttacaatcgaaggaaactgctccatctgcggagaagaaggtcgggggacagaagaaacgacggatgatgaatgtgatgcaagctattgagcagacattgcccccagcttcggcagataaaacaactgtgcctattgatgccgaagatatcgctggagccgatggtgatgaactcgcaacgacaatgtcggaaatcgatagactcatatcggatgtggttgccgaggaaaacgtagccgcaacgcctgacaagggaacaagaattgaagatgcctcttcgaaagataaagattttgaccttcggcatttgggtggccaagaactttccgaagaggacaaattagaattgaaagagtttgctatatcctgcggttaccagcccggatc

SEQ ID NO: 89634 - DNA, 454 bp, Zea Mays
gggaaacaaccacccaattcccctcgcaaatgaacagaagttttttgatcaaggggtttggtcaaaatgtctgcaagctggtgagtggtatcaatatagcgcaattcgatgtcgcctttcttataatgatcacgaagaaagtgaaagctaacatcaatgtgcttggtcctcgaatgtagcacatgattcttggcaacacttatggcactcgtgttatcacaaagcagaagcacatgatgaaaatccaagtcaaagtcccgtaaggtagccatcatccaaagtaactgcgaacaacagctagcggcaacaatatactcggcctctgtggtagacagggcaacactagactattttcaagaagaccataaaaccaatgaagtacccaaaaactgacaagtcccagaagtagacttgcgctccaaaaggcaacccgcaaaatcagcatcagaataac

SEQ ID NO: 89635 - DNA, 724 bp, Zea Mays
tatgctgctgtactacgcgcacaaaaacagaagagtgcaggggcatatctacaaaaatgcccagactcagtgagcaactacggtggacggcgggttcattataaaatatcttagggtttctttagcaaaatgtacccgcgaaggggtatcggtgaatcgaggccgctggattagaaaacaagggctgggattagatcttgcccacccaaaccggtacgcgaactcagccattggattgaggatctacgaccctgcaacactcacgatccgatcccgtctgatctgatcgaacggctcaaattagtcctaaccccacattcaatcccgaccgcaaaccctaagatcgacgacccacgctagttcaaatctaaaccgttcgctggtcgatcaatggtccaagggcatctctctcttctccccaacccgttcctgcatccatggacagcggtgaacaggcacagcggcggcgccatggtcgggtgatagcccgcacacccgaatgctccatttcctaatcaaacgatgctacacgaaattaggaacatgggttagcagtggagatggttcttaccgggattcgcagagtaattcctcctggccacgacacgaggcggagctgcgaccatccataacttcggcgagaaattggtcctactccggccacccacgctgcacatcaacgcgttgcggacgagcggcaagctccagctcccacgacacccga

SEQ ID NO: 89636 - DNA, 388 bp, Zea Mays
atcatccagggggtccggacgcacaacttgccctcctagactaaaccctgcaggtcccgagcatgtatcaaaggatggctggtgtcagatgacgggtcctgtgggtgtactactaatgctccctagccgaagctgtgtgcaggcccgggtcccagtcgaggttacctcctgggggccatcgccaactctttcttaggtatgctggtctgcagcctcgacaaatcgagcctacatcctagggggccaggtaccaaggaagaatcagttacaccacacgcaatagagacaagtggtacacaaataagtgctaatattgcttgataaatagtactcaaaagtaccttacaaaaagcaaaagtattatatccgctttcaagcggagtcctag

SEQ ID NO: 89637 - DNA, 335 bp, Zea Mays
cccaagactcaggttaactcagaactggatgtcgggttggttttcctttttcccgagggcttaagtgtaaaacaggctagcgaacgggtatctcgaattcctggccgcgcgattctaaatcgacggtcccgattaaaaaggccattcaccgaaccggtatggcacatgggccgatggatccgagatccacgcctgatatctatccacgccatttaacagatcagggccctcgaatccgcgatcgacggacgtggttggttgcgcgaaagggtacgccagatcaattctccaccacacatccccgcatcaacggttcagaacgaattggtcacgat

SEQ ID NO: 89638 - DNA, 1029 bp, Zea Mays
gaaaaaggaaaagaatgaatagtgctaggctgaaaccagcccaatacggcccaccagcaggggaaactcgcgcctgcgctggccatcttgcgcagaggccctcagccttttgaataaccagcaaagaagccacgacactattcacgtgtctctgacatttgcgcaaaacccctcacacttctttctcttcacaactccaggtccccaacggtgaacgacggcgtgcgcgctctccggtgaactcgtaccggctgaaatacacgacgaccagtgtcctaactcggtctacacctaattccacccctggcgatcctaatccatccctcaattgcacgagttcggcccggagttcctctacccacgacgacggtgagacccgagggaaaactgaggtgttcctgacgactaggcgcggtatagctttattggtggggtcgacgggcatcacaagcacatgagagtgtcgaaacatgaaccaggagggctagagcgaacctggaggtggctggccacgacgaggtgactcacggtggcgcggagagtggatttggggggaaacgaaattagggggctacgatggacgatcggaggcgagggctggtgctctggcttcgtaacaacctagcgaagcagactggggcatcaatttatagaagatggtcgtgaggaggttgaatttggatggggaagcgcacgcggtgagaagggggaagagtcaccggaggtcgctaacgtggcgctcactggctaactctctacggcggtcactgctgagcccttgcagcttgcgacaacgtggtgaattgattacgacgtggcacaatcgcggtgaacggcgatctccacggcaaggaccatccggccacgttgtagcacaagtgggtacggcgactgggcataatagtgctccgacttcagccctgcgcaagatcttttcaccagcgaccgttatccgcacgccggatctcacgaatcgcagcgccatcaaggatcgcggcgccaattcaccagcgatgagatacactgaac

SEQ ID NO: 89639 - DNA, 468 bp, Zea Mays
atcaggtgccgactactgattcctttccagactgtctactgggttgcaggtaccagaagaagtgttggagtcccggctgctgatcaggtcgtccaattggccagtcgacttgggaggacgaagaagctatcaagcaatgctttcctaaggctctagcttgggggcaagctgattgtaaaggagaggggggatgtcagcagtgctgaaggcatggtctaagctgaagacaccaatcgtgatggacatctgaagatgcaggtcgaagtgttcaaggacgacattccgactcggctccagcgtcttccaaagccgaataccaattacaagagagaggagtggcatacctaatacatgtatgctttaccgtattgtaaagggagaggaaacgaataaataaccctgtaataggctctggaggaatcttttgacattacggtgaccgaaccggcgagaaaggaatagactaag

SEQ ID NO: 89640 - DNA, 375 bp, Zea Mays
gcaaagttcatgaacctgaaatatgcatgcatacacctgctggcgatctcggccgttgacggagcatgcatgtggtgtgtccccgttccggatggctcgcacagatctactgtctactactagctcccagagcagagcaggcagagatggttggcggttggcacaggtagagaggcagccacgcagtgcagagccgtggtagcgatgcgcgaggcggatggacaggatagggaggggatagcgtaggggccaagtgaccactcgtcggctctggcctttcggcgcccatctcctcctcatctcatctccctccacggtccacttgtttcgttcgctgtgtgacagtagtgtgagagattccagatccaacacctg

SEQ ID NO: 89641 - DNA, 524 bp, Zea Mays
ggatgtataattattttctgacccttaaacatgaaagaataatgattcgaatgaccatgatgcaagctatcagtatcatattgccaaggtcgaccaagtaataaagagcatgcttccatgggaataacatcacaatcaacaaaatcagaataagcacccatggagaaaggaacacgcatggaacgtgtgatttttattttaccaccatcattaagccattgaatgtgatatgggtttggatgcttacgagtgggtaacgacaacttttcgaccagcatggtactcgccaaattgttgcaactgccgctgtcgataatgatgcgaattgatcgctcctgcacaacaccctttgtatggaacagagtgtgtcactgattcttctcgggcaaagcgacctgtgtactaagaacacgctacacaacaagactttcatacctatcagcgtcacccgggttgacatgtacctccacctgagctgcatggtcagtggcaagtagtgcatgttcaatttcttcagaatcact

SEQ ID NO: 89642 - DNA, 522 bp, Zea Mays
ggagtatctcccttcggggctgatgacaggtgggacggtgtcccgtctgttcgtttcccaagcagttgtgacgttccctcgaaaattggcaccactcttgtggcgaccatccgcctcctggagtggagtcgggcgcttttctaccctctttataaaccttgggtggtcgctcccctgctggatgtccttgatgtgtcatttaaacttgtcttcaaccgggtcagcggtcgaaccttgagcttatcaaaatgtcacgctcagtgggtctcaagtcgaggtaggcttctcccctcaggcttgtcaacctccactttttgtctgattttgctccgccctttttcccacagtagtgcggtcgccgtcgacccggaggttgcatctcggacgagctccgcgtatcttccttctcctcctcgagcgctcacaggagttgggatgcctttcacgcagcgttggaggccaccaaggtcgaagtcgagcttgttgcaggtgcagctcgcctaggccgacggtcgcgtcgtc

SEQ ID NO: 89643 - DNA, 397 bp, Zea Mays
cggactggagcatgtctgctctcgatgacgacggaaaccgaggataatccaaggtgtctaggcaattcacggtggtctagttcaatcgaatgggtcggtgagcttcaggggacatgaggaaagctagaacaccaattaagaaagcttgaactgacctgcagaagggtggccacggcgaggtgttcacgcggcggtggtttggctgatttgggggaaatgggaaattgggcggctttggtgaacaattggaggcaggtgttagtgcattggatgcatatttacctagcggagccacgggtgcgctcaatttataggctccaggggcggtggcacgtgaatttgggttggcgcggtggcggtcgaagaagaaaggggtcactggcacacaagattagtg

SEQ ID NO: 89644 - DNA, 838 bp, Zea Mays
agatggagtacacccattgggatcagcaacagacataccacacccattggggtcagcgtcagtaaattcaggcacgggaaccccctcagcagcaggaaccgaaggaccagcgccccgatccaaactagatacttgccgaagacgtctctttttctttttctgctcatcagcagaaagatcaagttgattgactcggcaaggacgtctcgggcgaacactgataggtctctgaacatccaaggttgtaccagcttctaggagaggcgccaccgccaatgtcccagcaggagcagcatcagaagaatcttcggctagcatatcaagcataacacttatttctgcatcattaggatccaaaggcacctcaaagtggacttgtcgttcatcatcgggaatttctccaatcgaagcaaccaaagcactaacttcttcagcagagggtcgcactctaaggcccaaactgccatcagcgacaggtggattcgacacaaaatgagtaaaagccttggaaggaggcaagttccaggccgagtatgtgataggggcaccaacattggacaccttgcctctaagtatcatttcaagccggctcaccaagtctacaacaagaattcttctattggtgacccgggttgggtcagctaaacctcgatacaagtaggctgggtatgccctatccttcaacggttgaatgttcttaaagacaaaatcggcaaccacagcctctacagtcagacccctctctttcagcagtccaacttcagctagcaaagcccctgcctcagccacctcctgatccgtgggggactcggtccaactcggagtgcgaacatccggc

SEQ ID NO: 89645 - DNA, 395 bp, Zea Mays
ggaagtggataagggaattgccctatgtcgtttggagcctaagaacccaacctagccgagccttgcatggaaacactcctttcttcatggtctatgggtcggaggcagtgctgcccgctgatctcaagtttggggcgccgaggttgaccttcgaaagcatagcagaagctgaagccaccaggctggaggacatagatgtacttgaagaagaacggcttaatgcagtaatccaatcagcacggtaccagcagactctaaggcgctatcatgacaaggctgtgcgacagcgattcttctcggtaggagatctcgtcctccgccgaattctaacgggggagggacgacacaagttatcacccttatgggaaggacccttcatggtagcagaagtcact

SEQ ID NO: 89646 - DNA, 937 bp, Zea Mays
agacacaaacagtaagattgtggaaatgctctagaagttcagccatctactttacattctcctaatcatagtcattgggatgaccgcgtccttgcctctcttcagatagctcaattacatagttaagttcctatttagccattctcatgaacacctcatacacaattgtggccttcaacatttgatatgtgtaattccatcttgttgggacatcaagcttcaataatgctttgcaatccactttgtcttcctctacaatttccttgaacttgatcaatcttgaagtcccactttttatataccgaactgcatccctaacacgttgcatagaaagatccaattctttcaatccatctagcacaattaagttcacaatatgtgttgcacacctgatgtgtaagtatttgccatctgcaatattggtattctgcaattgccttcccaagtaagcaacaccactatcattggcacttgcattatcaaccattatagtcattatttttgtctaaacgtcattcaatcaagcttttcccaatgttgtcccccttatgtccctttgccttgaaaaaactaatgactttcttgtgtagagtccaattctgatcaataaaacttgttgtgtaagaaaccttatgatgtgtaagaaactaaaaatgcatgcatgcatggtgtcatatatgtcgttactcctcatttctttaacacatgtgcactcattgatcggacacgtatgaagaatgagttctaactaaaccttctactctcctctcaataggaacgataatgatgtgcaagagcaagacaaaccaaaccaagcgacggtcaattattactatcatatcacactaccgagaaccagctctatgataaagtgccaaattatttaccgagtgttttttaggcataccggtacaaaaaatactgtagcaaattgatt

SEQ ID NO: 89647 - DNA, 315 bp, Zea Mays
ggaaccatggactgctcgttgtctaaataaagcgatcatacattcaatacatttggaaagtacaaatgaacatcacatcaaacatgtacaaacattggaacacaactcaaaagaggtagtattaaataaaggagcgtgagatcaagttataaaatgaactaatcctaattaagggttgattactctctaagtgtttggaacatacctcaaaaaagtaaagtagtaatttaaacaagaaagagattaaatcataagatggactaatctcatttaggaatttgattattctttaagtgttatccaaaattacataac

SEQ ID NO: 89648 - DNA, 310 bp, Zea Mays
gacatgcgccacacccttcggaactgcagagacttcaagcactccatggggaacggccgacccttccagcctctgccacctcccccaccacgaggaggacctggagaacctcgacaaccccaacagcaggaggggggaggaggcggagcattcccgcgcgtcgacggagaagtcaacgtcatctttggcggacatgggtcgcaagaaagcaagaggcaacaaaagctcaacgaccgtcagatactggtagcgaccactggttctcccgccccgtatcgatggtccgaacactcgatcaccttcactcggg

SEQ ID NO: 89649 - DNA, 633 bp, Zea Mays
ggtaccactaattatggtccccgacaggtgggtcgtttgacacggcacgtgcctaacccgtgcctaatgtcaagtcgggttggtccgtgactccctgttggacgtatcaggtcggttttttttgtgtttggttgggttttttggctttgagtcagattttttttgtgtttggttgggttttttttggttgggccagattttgggtaaaaaatcatggcacttaccacatcccgtgaattatatgggtcaaaaactatggctcatacctgattttacattggtcgggtcgggtagcccttgcctaacgaaagattaagtgtggttagcaaagattaagtgtggttagcaagaatgttttggttagactagtgttttaattattgttaggatctattttattcaaagcgtcatctgaaatttaacatagaaacctattttaaggtttagtttgtaataataatactatggtcgtactcagcgtgacgcgatcattgtaacaagatttccacactgttttctatgcaccatgccaccatgcaatctcactagaattgtgaatttttgactgctcatcattttttttaaagcagcccaatcctcaaggcctcaagccctcaacccaatgggcacctg

SEQ ID NO: 89650 - DNA, 434 bp, Zea Mays
gccacgtggcatactgcgcgcggcataagccaacgggcggaacctggcatgacgcctctgggctacgcgcgccttcgcattcattacggataagacgtgcgcctgtccattccactgacaggcggcgtggtcagtccacgatacgtgggccgtgcagttactcaccattactcccgcgttaccaagggttactacccatcaatgctgcatggactgcagtcatcatgactctcgcttattactcatgtgttactctgtcagcattagttattcacataatgtatttcttcccttatgcacctgggcccgcatgtcggggctcaacatccttgtatgtgcctcccttaaactataaaagggaaggcacacaacgttacaagggacagacatgctcacacatactcaatacaacttacacacagtagaggtagggt

SEQ ID NO: 89651 - DNA, 551 bp, Zea Mays
tgaatctgggtgaagtccctgaaccatgcacagaccatccaataggagctcagcggttccaacccccagaggtgagcagggaccccttccacctcgatatccttgagcaatggcaggctgcccccgccagaggccaaggctcgacgagaccaacgcctaaggtgcagccggacggggggaacgaaaagcgactgcccaccaatgaaggcacgtgaagccatatcctccgaggggaagaagacgaggaaagagttcgatgcaacatgccggaggtggagcgcgtcagcttcaagcgaaacccttgaggcgagctgctccaacaccaccgcgacacaatcagagctccccgggccaagaacagagacaatcagcacccgacaaaggtcagcctcggcctgatcaaccttcctggagcgtcgaaggaacctcacaagacgagcaggccccccaggcgaagaatcagacgccacctgaccagaaacaacacgatcaacttgcatgtccccagcaaccttcctcctcctctgaccctgacgagtgcgcttcttcag

SEQ ID NO: 89652 - DNA, 506 bp, Zea Mays
tccatacaatctattctcgtgtcgtgacggaggtagacctattgcaacctggtcttttagtatactattgcaaaatggtcctcccgactcaatggcctcttcggtacagtacccctctatcatggatgcctcgggacgagcacgggttgatacataaccattcagtattgacataaaacgctcgtatgtccacattttgtgcaagtacataggacccaatgcctctatttgtggtaccaagtgcaccacaaggtgcaccataatatcaaagaacgatggagggaaacacatcttaaactatgatattgtctccactgcaaattcctgaagagatgccaactcatcacggtcaattaccttctgtaaaattgtatagaaaaagtagcacaaccgtgtgattgtcatctttaaaaatagaggatttatagccctgatggcaataggtaggaatgtagttaacatgacatgacaatcatgtgagttgtagttggtgaccgtcatgtctt

SEQ ID NO: 89653 - DNA, 316 bp, Zea Mays
cttttaggaatgatggcgaataacttaggcgccagactacacacattctggcccaagaaccatttatctgtccaaaacaaagtgtgtgctccatttcccacttttgagaccaaaccagtggagaagaaagatcctgcctttttggaacttgaatagcgaggtttgcccaaggttttcttggatcagttttatgaagccacaaccatctcatacgaagggcccagcataattccttcaaactagaaatacccaaacctcccaaatggaggggtctgcacacccttccccaagcaaccagacaatgtcctcccctgac

SEQ ID NO: 89654 - DNA, 385 bp, Zea Mays
tccattcaaaggaaatcttagttctgccttaaagaaacttttgaagaccactacttcatcctttcctggcttctgggtaatctcctccctgcctaaacgaaccagctccttctttgcttcactaaaatatcccaaattcatcagtttagacatatcaccttcggtaacggtggatttcccaaactccaagtggctgggtttagttggcacggcgttgtaatcatcttcagattcaaatttctcagtatcgacctgctcagcttcagcggcaggggcatcctccgatactaccagccttgaccgttgcatcacttcagagattggagcagtttcggcaccttcggcttcctctccgtcgcgagtaaccctagctgttgagcgtacc

SEQ ID NO: 89655 - DNA, 414 bp, Zea Mays
aacacgcttgtgatgcttttatgtgcatgataagatcgatgccttgtcgtcgtagtctcaggaaattttctgaaatgtgctagtgctctactgatggggttaaatgaacttgagatgtattacaatagctgtgtgtcgcgcaggttatccaaaaatggcgaaaggtggtgtatgttggtaattgggaaatagtcacgtcataagccaactcgtgttaagcagaagtcgattgcgttaagtgattgttatatacatgttgtgtctcggatttcgataataataggctagtcgacaagtatgttgtatagcggcctagggtgttgccttggttaaccaacttgttagatggctttagttaagctcgtagtcacgatgaattgcttgttgtcgtctaaatgcgtatggttatggtcg

SEQ ID NO: 89656 - DNA, 495 bp, Zea Mays
gctaccagatagctcttgggaatcatcggtcagaggtcatcacactaaggaatgaagctctggaccaagataaaatactattttccttagtggacaggctgaaagctagcgaagtcaagcttagtgcacaaaccgaagcccacaaagctgaagtcgaaggtttgaagaaaaagcttgtagaaatgaaagaaaatttttaagttgcaaaggcgaagcaggaaataagtgaaatagaaagatcaagggtgcaaaagaatgttgaagagcttcgggattccaaggagagatgttgcgaaacatccttggaacgcgccaaaaagctaaaaatagttttgcaagggtgggagcatactcttcggaacagaagtttgttcgcggtgatcctgaaggggttatccagtggattggcgaagaggctgaagcttttgatgaaatactcagggatcgtagggatttttgcgctttcgccggtgcacgaggagtcgcggcaatttt

SEQ ID NO: 89657 - DNA, 652 bp, Zea Mays
gattcccgtgacagtctggacaaactgtatcatgatgctagcatctcccttactactttggagaggagtcatcgctttactatgtcggagcttgaccgtcatagggatgagttgagggtttctcagactaaagtgtcatgacttaataagttactgtcttcaagagattctgtcatcaaagagctacgtgcttcgaagaaacttgttttgtaggagttggaaattgctcgtcgtgacatcaaggtcttagaggatgaccgtggtattatgaaagcaatgtgtgacaaagcgatggacaaagttgttcatgtcggtcgaatcctgatgaaaagacttggcgtcgtggtgcctaaggacattgttgctgacgtgcttgctgtgtccgttggtacgagtaaaccttctccttctggtgatcctgctgacaagtttccttgcgagaacgctcctgcacagtagttgcgtagtgaaaacaaattttgattcactcgaacagaaaacacttttcattgagttggtattttttgtcaagatggcgctcaatcgagtcatgtatgtgtgagaatgctatatcggcttaaggtttttccaacttaagtcgattactctattagtagtgtattgtaatcaccctaaagtatgtaagcgtgag

SEQ ID NO: 89658 - DNA, 322 bp, Zea Mays
aacacataagaaggtatcaagccaaaacactaaggtggagagataggaaagtaaaactcaagaacatatcacctagccaccttatgctccaaagtatagcaaatcccgatacagtaggaaagttacaagtgaagtgggaaggccctttcctggtctcgactacaaacagactagattcatacagattaaaggatatggaagaaacgacattccaagatcatggaatgttgatgagcttcgaagatattacgtatgaactcaaactttggtaccttttttccttatatggggggtaaggtttttaatggggtcaaagatgtaa

SEQ ID NO: 89659 - DNA, 559 bp, Zea Mays
gttttatttgactctagagcatcacattcatttataaccgagtcatttgtggaaaaacataacataccaaagtacccccttaagaagatgttacacattagttcaccaggaggtgacatgaaggccacacactcatgcccccatgttaatctcaagattcaaggaatagatttttcagtcaacctagtggtcctaggatccaacggtattgatgtgattcttggatgcaactggttgaaaagttgtgatggagtgatacagtgtgccaacggaacaattacgttgacaagtcctcaaggtgaaagagttcaagttagcacagacatgtcaacaaatgaaaaagggaagacagtgataaatcacttggaagaaaagcccttggaaaatatcaaagtagtgtgtgagtacccatacgtatttccggaggaattaccaggtatgccacctgaccgcgatatagagttttctattgaattattacctggaaccgcacctatatcgaaaagaccttatagaatggatgtcaatgatttagtagaactgaagaaacaaatagaag

SEQ ID NO: 89660 - DNA, 667 bp, Zea Mays
agggaacccccatcgatacaccagctacattactcttcccttccaaaactaatcattttgggttttcttattttactttggaagggtgctcagtgaaatgcatcatctaatcgtgcctcccacggtgccctcgacaggaagaggtcccaggacaatgtaacctgaggcccccgcaatcgaaccctaaggaagagagacgggcgaggcgaccttgcccttatcttcataggatcaaatgatgcgaatagagggtcccatcgaggaaggtggtcgtgactgcgaacgcttatgcctcaaaggctacgacgatggtcactagtggaatcaagagtgctgagaaatcgcggatacccgtcccggcagaacgaccactaacaagaatgaagtaagaaaaggagcgtgaaaccctaacaacatttattaatttattcatgcttttacaaatctattgggaaaaaactaatcctcatcatttcttctaggaaacaagaaatcaacatgactatctgccagacaccggacaaagggttcgaccgatgctcctaggtcttcgagctcgctgtctcgccatccatcggcatacctgagacatactcgatctagattgatcgagtcctcataatgagaccgagtattcgagtaacgaccaatgcgtggttgataccga

SEQ ID NO: 89661 - DNA, 1016 bp, Zea Mays
caataggttaaagcgtgctacctcgttggagggccgccctacatgtttatataggcataaacaacatgcgcagaatttacaggatcgtaacaaactagagaagcttcaggaattctagttacaacagaatatccctatctttatcttcccagagatgcttactcttgtttgttacagatatttgtttacaatctaatcttatcttctaacaccctccctcaatcataaccgagtgaggttgagattgactttgaaattctccagaagccgaactgaaagaggtttagtaaacccatctgcaacttgatctccagtaggcacatattctatatcaagtagtttctttacgacctgatctctcacaaaatgataatccacttcaatatgttttgttcttgcatgaaagataggattggctgacaaatatttagctcccaaattgtcacaccacaacttagctgctctaggacttttaatactaatttcagtgagtaaaatttgtacccatatcaactctgcagtagcattggccaaagctttatattcagattcagtgctagaccttgacaccgtaggttgctttcttgcactccatgagacaagatttgatcctaagaaaacagcaaacccacctgtagactttctatcatctacactgccagcccaatctgcatcggaaaaggcactaacaagagtagaatctgatctatggatatgcagccccaagtttgtacattgcttgatgtatctaagtatccttttgactgctgcccagtgcaacgtagtaggagcatgaagaaattgacaaactttattaactgaaaatgcaatatcaggtctagttaaagtaagatattgtaaagcccccactatactcctgtactgggttatatctttttctcctaaaggtgacccttcatgtatagatagcttctcactagtggaaagaggtgtactgatcggtttgcagtcagacataccaacctttttaagtaaatctgaagcatacttgtctt

SEQ ID NO: 89662 - DNA, 308 bp, Zea Mays
attttctccctcaatccccttcaatatcacttaattccccggtcatcaaaccggtcagaattacagcgtaagggtgggtttggtgaccagtgaattgagaattccccctccaattactctcaattcccttatcaccaaaccaactctaaagcttagacacggcacctactgatttatgtaggactaattcctatggtcctatcaattgcaagggacatgcatctgtgcctatgatcctatttgttacagaggaatatatagattttcatgcatttgttcctatcaatttactcatgtttgtatttttt

SEQ ID NO: 89663 - DNA, 613 bp, Zea Mays
gtggagctttggattagttcggcgaacttgggggcgtcggtgattggctggcggtgagctgaccgaacgggtccacgggcgtaggtaggtgtaggtcatcggcgagcttcaatctaggggcctcgcgcagtagaccttcgcggaaaagctcagggagcttggcagggccttcgcgaaactgtcctcgagctcggattgggtggtggagatacggagtgaccggtcctcgtactccggcagcggaccgtgaatggctggcggtggcggggcttctccggcatggtagagttaactcgagcgagtctacaagctgtggaagggtgcggggaagcttctgtgtgcttggttaggtgatgggatggtcgggtgacctggccacgacggtgagtttcgggcggcaatggtgggcagtgcggagctcgtcggagttgtggttttgctcagggaagtgaggcagggtgaggagtgaactgccatgcacctggggagggttttataggtgctcctgggcatggctgggcgcatgcccggggtggagtcgactgcatgtggggcacgcgtagagagcggccagtgcgcggctgagcactggagcacaggatcgaacacgttg

SEQ ID NO: 89664 - DNA, 651 bp, Zea Mays
cttctgtgtttcagtacatcggatcagtccgaatttttgctccataacccgtacccattcatctgcttccagaggttctccagctttaacaaaaagcggtggccgggtttcagaaaaatccaagtatgtggtgtctcgtggcccttgaggttgacctctgcctccatgttgctgaaattgatttcccgccaattcacgcatgaaacgtgtgttgtcagcggtagcattgactaaggcagcgatagcctcggccaatgtaggaggtacaggtggcgggtttggagtttcctcccgccgcgggaagttcccgctccgtcatgagcacgagttcttgatggcatctgaggaagaaaaacatcctgaattattacatgccgaaagtacaccacctttattacattatgctgaactggtaataattatacatactcactgttacaactcaacttccttatttaatttacataaggacactacttaaattacactgctctaattatcttcgtccttggccgttcctactccactgccagcctcgggagaatgttcatctgcgaggttcatggaaggaggggctccaaaaaggtccaactccccatcaggtccggctcccattgctgcaacctctggtggtacattcgatgcagccgg

SEQ ID NO: 89665 - DNA, 549 bp, Zea Mays
cgttttttttgcatcacccagtagcaaatggcaagccacgtgttagctgggtcttaggcgcaagcatgcgcttcggcaccctcgacttcatcatcaccaacgaaggggtgctggtgcgggtggagaccctcgtgtagcctcctctcatcgccaatgtcgacactgtcaccagggcgcttggggagctgtagctccagccttggagacttaagcctccataagcattggctttccaaactttaataatgagtgcatgtggcactaacatctcaccttcctggggcctcgactgtcccatgaagacatatgtctcgtccacgtctcgcacatcaatgtttgggcccaattctctagcagagcacctctctctcggaggtcctcgcaggaatggtggactacgtatcaaagttgatctatgacctccttgcataggagtctttgagatcctctagcatgggctcaagtgagggggagccactacccctcgtatgagtgcttcatggctggatcaccaaacgaccaagtcgaggtcgtccacgacgatgacac

SEQ ID NO: 89666 - DNA, 440 bp, Zea Mays
agtcagatggtcaataccaggaggggtggtggaattgatttgcctcctaatcgacacactcggaggatatatagacaacctcagccacagccagcagagatgaatcctcctaatcctccaccaggcggagttgacccactgattgcagctcagatgaggatgatgcagcaaatggcagacactatggctgatatgcgtgcccagatgcagcaagaacgccaggagatgcgtcaggaaagagaagagatacgccaagagttgcgccaggagcgagaagagatacgccaggagagaagggcacaacagcagctgcaacaacaacttcaacaacaacagcaacagcaacaagtaccattgccaccaccaccaccaccagttccacctcgtgataagcaccgagaatttatgagtcataagccactgaccttcgccagttcgcc

SEQ ID NO: 89667 - DNA, 459 bp, Zea Mays
atcgtagacggttaggctgaagacgaggagccaaaggctaacattcccctgcacttatagcgacattgcaaatgctgcgactggagtaaaaaccaacaaggagctcatgcagatgatatccctttgtgccgatgttgaggtagccaagtacgaggacagacattcgttattgatatgtcgtgcgaaggatagccatggtcgatggaagttgtcgaggtcactagaaagtaggcgccacacaagttgcgggcgagctagggcgccgtggtgatggtggtgcacaagaggaagcgccatagacgaagatggcgacgcaattgatgcaatcaatgaagaagatgctcgatgccaaagtcgacattgtcgaaccatcatggcctaggcgtgcgccaggtttgctaaacccgagaatgtgttggggacgaaggcacgcaccggtgttgccagcatcggacatac

SEQ ID NO: 89668 - DNA, 752 bp, Zea Mays
atgaaatttgcgagatcgaaaggtctagagctcaaaagaactgcgatgagctccatgcttcaaaagtgaaatgttatgaaatatccttggaatgcgccaagaaattgaaggacaactttgctagagttggggtatattcctcttagcaaaaattcatctgtggcaaccctgatggagtcgtccagtggatcagcgaagaagtcaaagcctttgacgaaattttaagtgaccgaggagacttctgcgccttcgctggtgcacgggggagacatcgatcttagagaaaactggagttcagccaggatttgttttcttggtgggtgacatcaaagacccttcggccgaagcttctgcgctaggcgggagattttactccaaggtgtggatgaagggcgaccatgagatacctgatgaagcgattagaaaaaatgaaaaagaatctcacaacgctcaagaagaagctaaacgagctgaagaagctgccaagcgtgcaaggcttataggtacctttactgaggtttagcatcggaattaacaaacattttttatgatgtagctgaactttcacctccaccagagtcatataaccccgaagctgacctggctatgaaagaagcgctacatattataaaaattgccaatgaagtgttgctgtaaacagactattaaatgaagccgtgagaaagtgttgaaagaagactaaaactttgtatatttgagagcttaagtttgtatatagctttcgtcttttg

SEQ ID NO: 89669 - DNA, 323 bp, Zea Mays
tgtagccagaacaccgctaacagcaaaagataagaggctacaggtgactgtaatgtgatgaatgatgaatcagggtgcgttacgagaatcctgctgtgagttacgtcgctgccgattaattcatcatgtcggtctgtttatggacttgttgttcctatttatacacctttggctccagcaaccttgtccctcacgcccaatcgctcacctctccctgtctctctcgttgcaaagatctattgcaacccatgggcaggtgcatgtagatagcatacttattgacatactaccccaccatcctgtctgcgatctccccccccccc

SEQ ID NO: 89670 - DNA, 297 bp, Zea Mays
cgtggtaagttcctatgtatcgagttctaggcatagcccgggttcgattgacggtgtttagtcacgggattgctacgtcaaggcgcagattcggtttactccgtcgaggttgtggtcgtcgatttgggcggcgcttcctcaggtggataatgagagaaaggaagagtggctagagcgcgtgagaagtggaagatgatgcgatcaccgtccaatttagattgagtggatgggattagatctgggggagcaatcaccgtggaccgttgatcgggtatctaacgcctggggttcagatcg

SEQ ID NO: 89671 - DNA, 462 bp, Zea Mays
ctaacgcagaagattcctaaggctctgcgaacagtgtaagaggacgtcgggttgtttttgactaaaccgaggggcccttatgcaagttttgcaccgccaaggggggtatggctagatctggaccgcccgatccaaattctacgctccagattagatccagattaaaacgaaccggtacacaacgacaaccgctggatcctatatctacggcgtggatttaatatgatgctaatgccctagagaacgtccgatcttggatcaacgggccttattctatcgagcaaaaggggtgcgcgcggttagatcggggccgttcgtggccagatcaacgaccagggctcatatattcacacgcggccacccaaacggtggcgcccgagcgcagacggcggcgctctcgccggagataccgaattcaacgccccgagaactaattcccctattcaagccgatccgcgcgta

SEQ ID NO: 89672 - DNA, 373 bp, Zea Mays
taagaaaaggttcaacgaataattcataatttgaaagaagcccaagctcaacagaagagttatgcagacaagcgacgtcaacccttgcactttcaagttgaagattatgtctacctgaaagtttcaccaatgaagggtgtatctcgtttcgggataaaagggaagcttgcaccccgttacattggtccttttcctatccttgaaagatatggaccagtggcataccgactctagttacccgaaacattgtctgctgtgcataatgtgttccacgtgtctcaattgaagaagtgtcttcgggttcccgatcgaaccattgaagtaacggatgttgccttagaaccagacttgacatattcagagcaccctattc

SEQ ID NO: 89673 - DNA, 669 bp, Zea Mays
caaacgacaagcaaattaccctattgcaagaaggcactcaagcaaacctagaacatgttctaattatcaatgtcaactgaggcctacaaacagttttaacatcttaacttggccctacgctcttagcaagtaactaactatcccaataaatggacatacacctgggaaggcagacactactcctcataaaaggcctacacacgcatgatgaagactgtgtcagtctagcccacatttatgttgatgggaactttaaatgccaacttgaacaaaagtttttcttctggctactactacaagatagactgaatacaatggcaatgctcaagagaagtaacataaaactggaatcatacacatgtgagaattgcatactgcaaaaataagaaacagtcccccatctttttttgcaatacaacttcgcacgaagatgctgacatataattggactccccccaattatacctctgatctacacacaacgattgcccgcatgagatgatagctaacaaagccttgtaacatggaaatcattattacaatattgtgttgcatcaaggaatgcaggaattggtagatctttgaagacacccccacaacaaatgttgtaaagacctgttcaaaaaagaaatgcttctcatctgctatagatcgaagcacgcagtagct

SEQ ID NO: 89674 - DNA, 350 bp, Zea Mays
agaagaccgcaaagcgagctatgagtgaggcaaagggtcgagcctatgatgatctttaccaaagactaagtacaaaggaagaggagaaggatgtctataagatggctaggattcgggaaaggaagatgagggacctcaaccaagttaaatgcattaaagatgagatggatcaactcttggtgaaaggacaaggcatcaaacagaggtgatagaggtattttgacaatcttttcaatgatgagaatgagactatggacacccaattggatggctcctttgatgatttaaatagatgctttgtatgcagtatccaagaatcagaggtcaaagaagctttaaagaggatgaca

SEQ ID NO: 89675 - DNA, 437 bp, Zea Mays
ttattcgtagttgacaatgttaaattaatctggtgtgaaaagataaaaatgcccatgcaatttattgtgattttatcacaataaattgcatgaacatttttgtgttttcgtattagatttaacaccatcaactacacataaggacataagagtatgatagggctttgttttcaaaacagctgagtaaataaaaaagttaagaagcaagagttaaaatcattgcaaggcctaagagagatataataataattgccccttaattctattgctagatatcctctctgccctaaattttataggggcatgtttggaaggtggcttcaaaaggttgcctagcccaggcaccaatgccaagcgttagatttcctacccctcgggcaggatgagttgcctgactgacagttgcctatgaggctaccatccaaataagctctaga

SEQ ID NO: 89676 - DNA, 577 bp, Zea Mays
caggaacaaccccttcacttagcttcagcacatcagtcgtctcaatgcgtctatgtcaacgcgtcaaaactttaaccttctttgacctcgacacactagaagatgccgaggttgcagctttccttcccttggtttcgtgtgcggtagcagtagtctgggtacacaaacccgataacatcaaacaccctattcaatctcttcttgccccaagcaccgaaggcagttgtcatagcttcgtcttcggccttcgagtacgctccaagcagctcatcgctagttgcctctataacatctagccagtcgtcattcggttcatcaaactggcttctgtatcgaaaggtatacttcagatagactaagccattttgactggagccagcgacagcctccttgggcatttcccatccgtttgcaagtggccacactctgtaagcaatatgctcttggaccaagtctcttgtgccgatataagtgcacactatgttgaaagctgcctggcacgcttgcacgtcattcctaagtgcaatgagtggcctcctaatgccgaagcgagaccatatgggacactgaataatcc

SEQ ID NO: 89677 - DNA, 557 bp, Zea Mays
caactgtggagagcttggtcatcttgctcatcaatgcaacaagcctaagaagaacaagttcaagggaaagaaagatgatgacagcgatgacgagaaaaaggaaaagacattcttcaagaggaaggatgggaagcacaagaggttccacaaaaagaaaaatggaaaggcataaattgttggtgactggctcattgacattgagtcatcaagtgggtcttcttcaagtgaagaagaaaatgatgaaaaagttgccgccatcgatggggacttctcttcaccacctatgcctcatggctagaggtgaacagaaggtacaaaatgataatgatattatttaccatagtgatagtgatagtgatgatgaatttgcttcaccttcctatgatgaactagctgatctgcttaaggaatacactcaaatcattaggaagtcaaaagccaaatgtgataagttgaaagatgaaaatgaatttttaaatgccaaatatgacatagttgtaaaagctagtgatgagatgaaagaagaaaacaaaactatgtcatccactgtaaatgag

SEQ ID NO: 89678 - DNA, 396 bp, Zea Mays
gtatcacaccaacgacatggtgaaggttgtagacagtgttctccccctccacgttagtggtcactggagttgccgaaagagtctcagatgcagagggggttgtgctcaatatgatgtaggggttgacgaatcgagccccacaagtactgatgcatcgtgatatgagaccttagatcttcaagagatggggcactaggtcaggtgagacatatgctcaatatttgtcggagaaatagtgtagcttgctcacatgtgaaagagaaatgggctatattctatttctatattgtttttggtgattaatgaccaacaaggatattgtgatctaactagtctgctaagtctatgattgcaagttcataagagtgaaacttaagtattcaatgcaacaatggc

SEQ ID NO: 89679 - DNA, 516 bp, Zea Mays
tgggtgggtttaggacatattctatcctatagatttaggaccatgctaaaaactaaaatttaacctaatgtccatcttagtttaatatatatcctcaaatatgggtgaagactatagttagatgtataatggttggaataaggttggggctcacacagatgagtgggtggataagactatgaattttgtgaaccatgctttatatttgtcaatcatcaacaaggcatggtgcccatgcaacaaatgatagaatttgaggttgtttgataaggacaaggttaccatggacctgtgtcgatatggtttcgtgccacattatgaggtgtgggtgcataatagcaagtcaattattgaagccatagaagaagaggacgaggattacaacatgggggttgataggatggatgagatgcatgaagctattcgattagagtttaactaggacatcaagaatccgcctacattgaaggttgaagtgttcttcgagcttctcaaagctttagaagagccactgca

SEQ ID NO: 89680 - DNA, 987 bp, Zea Mays
cgcctgcaccatgcgccgcacccaggcgagcttgttgtggttctcgtagccgatcacggtcgtggcgggatgccggagaatgcggtagaggagtaggaggtggtagctcagcatcaccaccagcccgcatggcaccagcaccaggtccagggaccccttctccagctgcatcgtctcgtctcgtctctcttcaggctttctgctccctagctactaggcttcatttgctattgctttagcatttcgatgctatttcttggttggagttggagttgatctgtgcagactgaactgccctcatggcttgtggcttgcgctttcatttggattgctagttacagtggggccagctagcaatgatcatgatcttgcttatgagtcttgctcaggagttgtacgcgtagccgtgcggtaccgatcgatggtgtggctagcttgtgtcttgggggcaaagactgcgagcacgcacggcaagcaaaacttgtgagcttgcttccaagaaaggcctggagatcttaaaaaccaataagatttcattttttgtcttgaaggctcctgtatataataccaaagcgtggatctgtttcatacgttgcggccgcaatctgcagttctgagtggccaccgttctaatgacattacaatacaacaacgtgaaaaataaacgatgttgtctcctagtgtttccgggttcagcaggccaccaacccggcaacccgttacgtcgcccctgtgctgtgtgtcagtgtgtgtaccaccatgtgtttgcttgcactcaacaggcttcaacctatcttactagtacactgtacatcatataattgactccaccagaattactcgaatttattatctttctgactacagttccactgtttacttgcccgtgtacctgctaattacaattattttcatgatttcataaaagttgaagacacggatcgggtgattaaaaaaacgcgaatccagaatataacgaagaattca

SEQ ID NO: 89681 - DNA, 640 bp, Zea Mays
ctgacgtcaacttggctcatgattgactgagcgtgggggtggacctggtcttcgataacgtccaattacttgtcgctccggacactggcttagccctcggcgataatggtgacgtcgatctcgtcaaagtgagagaccatctggccaaggccgattccacccctcgacaaatgccctcggcgacggtgcgctctccacacaatcgggcagctcccagaggcgatcaaccagaggcgcctcagtcgacaacagaggagagagatgggcgcacaccatgctaacaaccagacgaatcacttggagtttggtgctcctttccgagagaagggcatccgcccggtgccccgcagcaacggcattttcgcgagcaagcaagagcttgcatgtattctccgtggctgtagccttcgcttcatcctccgcgaccttcgtatcccgcgcttgagtgagaattttgcggacctctgcgagaataagagcgtgaggcagtcagaggtggcaaatggtgaagaggtatgggtaagaaagggggctaacctctggtcgcgtcgcgctccatcacaagttttgagactgcttgcaccagacgaacctttgcctcccatgaagatgactcggctagcccagcatgacactttac

SEQ ID NO: 89682 - DNA, 458 bp, Zea Mays
tgaggacttgcattctgttgggaggagctccactggcgacccttaggcaacgtggttcctctggtgctgcccgtagggtcgtgcgtagccgtactcccattatagcgtactgtctcgttcgctcgtcatacgggttctttttgtcggtctttcgctaacatccttgtgatagtgcgcgaagggtcccgcgggtaagtcgtatggagcaatcacgcgtcgtgcggtcttgcctgtcgtcacaagcctacgtcactcgttggtgtgcgtaggcatacacccagtatgaagctccgatgctgaggtattttatgatcagggtcgttcggtccttcgaagatgtggaagcacattttgggaccgtgctccggaggtgtgttcatgtctttagcggtttctcgacgtgcctacgacctaccattcggatgactggccatggcccgagatgtcatgtattgtct

SEQ ID NO: 89683 - DNA, 277 bp, Zea Mays
gaaagatattggtatggacttcattgtcgggttgcctcgcaccccgaaaggatatgattccatatgggtgcttgtggatagactgaccaaagtggcacatttcatttcggtcaagaccacttacaagggatctcagatggcgcagttatacatggctcggattgtgtgtttacatggagtaccgaagaagatcgtttcggatagaggctcatagtttacctccagattttggaaaagctttcatgagaatatgaatacaaagttgagtttcagcttg

SEQ ID NO: 89684 - DNA, 278 bp, Zea Mays
attgagaattcccaaattccaatccatctcccgaacaatggtatgcattctccctacattccccaaactcaggatactaggccaaaccggacgagttgggataaccatccatctacatctgatgctatggggggtagtgttcaggaccctaattttgctaggaatttagggagcctaccgaaactccattttccatcatttgacggtgggaatcccaagctgtggcaaactagatgtgaggactacttccttatgtattcagtggacccccgtatgtg

SEQ ID NO: 89685 - DNA, 728 bp, Zea Mays
gttgacttaagccgattgctccgttagtagggtatagtggtcaccctaagccgagttagcgtgagcatgtcgcaccatcttaagtcatcgccgacttaagtcgattactccgttagtagggtatagtggtcaccctaagacgagttagcgtgaacatgtcgcaccgtcttaagtcgttgccaacttaaggcgattgcttcgttagtagggtatagtggtcaccctaagccgagttagcgtgagcatgtcgcactgtcttaagtcgtcgccgacttaaggcgattgctccgttagtagggtatagtgatcaccctaagtcgagtaagcgtgttgatttcaaatccaatcaaattgaagttagctaatagtcaagagtctgaatgcctttgaaaatgaaaactttattgatgatggagtcccccgattacagagtacaatgttgcttcgagagcttttgaggccttgttagggataaaactttctaagatgctctatgttccatgagttccccacttccatgccatccatttgagtaagccggtatgatcctggtcgagtaatttctgatacaatgaatggcccttcccatagtggtgacaatttgtgtcatccttcccccgttagaattcggtgaaggaccaagtctcccactgcaaaggaccggtgccgaacaactttatcatgataacgcctcaaggtctgctggtacctggccgactgaattactg

SEQ ID NO: 89686 - DNA, 917 bp, Zea Mays
cgcgaccgcatgagccttttcatgttggtcagaatgccggccacctccagctccaccgcatccacctccaccaccgacgccggcgtcgcatcctccttgggcgcgtgatcatccaccttcgatgccgcctcctccatgtgcgtgtgctgcatggtatggacgaagcctctgctggtgatggtgctgctgcggcggtgcgatatgactacgagcgagcgagcagattgctttatggcttcctgcgtagtagactgggctctaaggaggaccaatgcaatgacgtggccgtgcgtgcggtttaatataggctggcaggcgagcgccacgtgtcaccgccccaccccacttgaacgaactcacgctgacgctcggtagattcatccgggagtggcatcgttcgttggtgtagtggaagtatctctagtctgaacgctggtttatcattatttccgggtattcatccggcgattatcatttctcggccccgctccatgcgtctttactcgtgataatttgatctttttttcatctggtccttatctctttatttgtttatgcgacacaacatgaagatgtggaagacgtgagaaggttaatttagacacatcttagaaacatagtatattcattaaaatatgagacacgacatgaagagagatgtgagaatgtaaatttaggcacgtgttagaaaaattgtaatattcattaaaatgctttcggctacaaatctttctctctcaatagatttcccttgtcgtgccgtctccagtgttgacagatttttgtacattgagagatttacaagagaaaatatgaacttgtacattgagaacaaaaaaaaacaaatgactccctaataagacttgtctttttctttttctccatgtacaagttcaaaacttgtagttcacattttc

SEQ ID NO: 89687 - DNA, 805 bp, Zea Mays
gaagtcatcttcgttatctcctccatataccaaggacccctaggggtatttcagctccttagcataatgttgtgtttcggcaagttgctctgctgataactgttttcccaaatcatgtcgaacaatataattcaaatcaccctgggagttgcttcgggagcaggtgttgtatgcttttctggaagactttcttccatcagctttactggcgcagcttccgaagatcccgcttcagcatgaacagaagaagcgcttgcagtgaccacttttcttgcatcttcaattttcccgccagaagcttcagtagaagcaggagttggtgttttcacggattccaaaacaacatccaaaacactagccatcctcctcttcctcggagttgttgttgcagtagctgatagcttcggcaatgctgtcaccagcacctttgactgctctgttgccttctctgattccggctctttgaccaagtatgcactagcttcaatcaacatcacaggatctatctctgtggctaagggggtagtttctgccctttcaattagcttcggcacatcggccgtcctaatgggcttcggtctacgcgtcaagaccttgactctcttcaccttcggcgcactagaagatgttgaagcaacaactttcctttttcccccttgccttcggacgggaaaacgttaatccgggtaaacaaacccaataacattgaacaccctattcagcctctttttcccgcgagcgccgaaggcaactgtcatggcctcgtcttctaccctcaagtacgctctaagtagctcatcactcg

SEQ ID NO: 89688 - DNA, 583 bp, Zea Mays
cgtagatcgatgcttttgtcttccaaagagacttcttcagttctttttcccttcgacgccgaagtctccgcagcaattgtcccctcggtatttttcttaggtgcaacattagcaataagtctatcgatttctaataaggttgtctcgaggagaccaccattgttttcagcctgttgaggcccttcgtcagccacagtggggcagcttctctcgaatcgctgaaggcggcgtatcaagaacatctctcatcacattcatcatttgacgcttcttctaagcatttcctcctatgggtgccgaagactccttgtttacctttgctttggcagctctcttaacatttttcttctatggctataataagctagttagctctgatattagaggacttagcatcgtgaaaggcaagggttcagtcattacctctggaatttctatcacgctaatagaggttatcgaaggggtctctgctgaatgcttcggcagagaaggtccttcttctccatggctagatggcacagtcctccttttctttgatggcgaaggttttggtgtcaactttggattctttgttatccttttc

SEQ ID NO: 89689 - DNA, 1086 bp, Zea Mays
tcgattgctccgatagtagggtatagtggtcaccccgagttaagtaagcatgcaggttgacagtgaacaattcgagtgcctttgaagtctttttactgatgatatattttacagtttacagagtacattgtcgtcccaatagcttttgagatatagctaggggtaaaactttctgagatgttctatgttccatgagttcccaatttccgtgccgtccatctgagtgagacgatatgatccaggccgagtgacttctgctactatgaatggtccttcccatagtggcgacagtttatgtcgtccctcccccgttagaattcggcagaggacgaggtctcccactgcaaaggatcgatgtcgtatggccctgtcatgatagcgcctcagagtttgctgataccgggtcgactgaatcaccgtattcaattgttcttcttctagtacatcgacatcttccagcctagtagcctcagcttctgctatgttttcaaagattaaccttggtgccccaaacttgagatcagcaggtagcactgcttccgaaccatagaccataaagaaaggtgtgtttacatgcaaagctcgactaggttgagttctcaggctccaaacaacatatggcagctctctgatccactttcatgcaaacttttcattcttgtcgaagactttctttctgagtgcttccaatatcatcccgttggctctttctacatgcccattggctcttgggtgtgccaccgaggcatatttgatctgaatgctcttttgctcgcagaaatcgaagaactctgagcttgtgaaattggatcccaggtcggttatgatgttattcggtattccaaacctgaatattatgtcttgtatgaattccactaccttagctaaagttagagaagcaatgggtttgaactctatccatttagtgaatttatcgatagcaaccagtacatgagtgtatcctccttgagccttcttgaaaggtccaatcatatccaatccccagcatgcaaacggccaagttacgggtatggtttgcagttgttgcgctggtagatgttgctgttttgataagtactggcaggc

SEQ ID NO: 89690 - DNA, 624 bp, Zea Mays
aaagtgttgtgtcatctgctatatgcaaacaatatgatgctctactctagttgccctaaagtcccgctcaagtctttctctcaaattgtgttcaaagaaatattgttggatcagaaagatgatttggatatcatgctctaaaatcaataaggttcaaaggatctttgttaaggattataacacttgtacactcttgtagtatgatgaagctaggagaaatatgaaaccatccttgttccttgagtaatcttatcttggaaatcaaaaagttgtgttcgctctttatcttaatgtcatacaagcctcttatgcagtctgtctcactaacccttttaccctctgactagatgatgaaccccaatggaaatgaagtaaatgatgccaacgacaaaattcctaccttaacaactatgaacgagaaaaatgagtcatagaaatattcgatgaatggaatgaagaataacaaaaggaatagaaaaatgtttggatacatgattagtccacctcaaccacaagcaaaagccacgaaacacatggatacccaaacagaagaatcaagtcaggctcagctatatgagatacagacacccaatcaaccctcaccccctgttggtcaagcaaagt

SEQ ID NO: 89691 - DNA, 279 bp, Zea Mays
accatctgctagaaatgaaaacagaaaactgaaaatgcagaacttgaagtttagatgtctgaaaactgaaaatgcagaacctgggtttcatgtgatctaagcatgtttagatgtctgaaaatctgaaaaatgaactgcatgtttagatgtctgaaaatctgaaaaatgaactgcatgtgatctcagatttcaacatgaactgggcagaacataaaaatgcagaaatctgaactgggcagtttagcatctgaaaatgcagaatatgaactgggcattcag

SEQ ID NO: 89692 - DNA, 875 bp, Zea Mays
agcagctccacgaagttgtgaaccatggtgatcggccggaactctcctgctgctcgctggtgcatcaggtttcttgggtaagaaatcaaaatttccaaattctaggacccaagtttctatgaagctgcttgtgccgcattttaaactgttgggcaggtaaactttttttgtcatctcttaagccacctggacacaaataaaatagcatgcagtagcagttagctagggtcaatgtggacgagcgtagcacacgtttgcatgcatgaggcacaggcgtggccttatatcttttgtattatcgtcatcatctatcgccttgcttattcaaaccgatacaatccatcgagccatgcatcgacgggaggagggtacgcgtgacattaagcacgcgcacgcagctttgtgctgattcgccacgtgacgtgaaaagggagattctacgtcggggccacggtgtgtcaccgatcaccgtgcccgtgcgcgcgcgcgtgcgtgcatggcaatgcatgcatgcatgcagaaagattggttagctgggaaagctagctagcgtaccatcgaatgggccgggaaaaaaaaaacccagacacgccacatgcaaacgacgcttcctgccatcacacgtagtggtcctgcgttagggtttttctcgcccctcattatcgcttgggttcttcttcccgacaccgctctgtgctcatatgccacgatgccggccggcggccgggtcctaccagctgcttcgatccaccataaaaatctgtgagttcaactacccatatgtcccagtctagctgcatggttcttgcaatagtgacaagtcagtacctcgtgctctatgcgggagtctgggacgatcatggcgaccgattaat

SEQ ID NO: 89693 - DNA, 335 bp, Zea Mays
gcgggagaccgcaccaagccaccccgagctctgcaccaaggtgaaacacctttgcccgtgcttaatttccccaatttcgctctgtgctcggccaattttggcatcgccggttctcggtcgtggtggtccgccgtgcccacacggtggccggccagtttagcccggtccagtgccccggtgtaggtccctgtgtcacccctgcctctgatgaagccttcccaagccttagcacgcctcaagctccctccccatggctggaatccctcactggagctcctccggtccgcctaaggccttctccccgccgttctcccctctctgtcctcagattcgtg

SEQ ID NO: 89694 - DNA, 856 bp, Zea Mays
gtgatggatcttggttctccatagtggatcctcttgcggggagaggataacgccatggcagggacttgaacttcagggggattccttccatcaagctgagattccagggctacgatcattgcatgtgcatcctccagctccaagtgtactctagagaggtcttgggtagcactatccaggtcggtgttaagacctaccaccacaccagctagggtgttgaggcgatcttctctagctccacctggaacaatgctggtctggctttctccacaaatacgtagaggaagatgcatgtacttcatgttgtgcagctgctgccgataggtgtggctaagggaccacagagttctcctagcagcatcgctgaccaaagcaacgtaggtggatagcggcgtcagagactcatgagctgacagagtcctaaaccctctatcgagtgatgtagtagcaagcccgaggaggctcctacaatcaacttgtctcatacaagggtcagatgtaggttcccaatgcatgcagaacatcctacagcaggttagggaagtgccctgtctcgaatatcgaggtgtaatgttcagtgacaagccataaccccacatagtggtcctgctgttcttcattggctttctcgttgatgttttcctcatcatcttcttcttcttcgtcgtcttcatcattgtcaccagagtcatttgggtcgtcgcttccaggagccagggcttggactactgatgctggcagtgctgaagctgacgatctagctgcgaaggctagtgattctgccaacggggttgccgttggcagaaactcctctgacttgtcctccagaatgactctgttctccacacgaatgcga

SEQ ID NO: 89695 - DNA, 592 bp, Zea Mays
gcatttttatcaatcatgctagatgatattgttctagagctccaaagcccaacacttaagtgacacctaacgtcatatacctacaatcgatatagttcccaacaaaactctgatgggtccattagacttaaccgattaccctatgatgcctttgtaaccctcactagactaactctttgatacaacattgtggtgcgacagcaaagagatcttgtgagtgctaaaacttagaactaagacaattgtaccaatgttagacactaaagaatcatgcactgcaccaacttgggtaaccaccaatgaatttcagtgagtggggaaacaccttaccaaatgaagccttgattcctttctcagttgtgtgaatacaaatatgatccacaacacaacaatatcttttagtaccggtttagcattctcaaaatattttaaaatcatttcacctactttctcaccacatgactaggtctactacatatgcattttagtccccacataatggcactagattatcttaagacttcccctactgatagtacacatgttgagcacttgcatcttgtggtgatcaccttctccaccatgctccatg

SEQ ID NO: 89696 - DNA, 978 bp, Zea Mays
cttgatataccccacattatggatgtccttaaagggttccctactactgctactggtacatatgatattctcatgattttttgtgcttatcttagaggtccagctttaaaggaaggtataataatgtggcctaacagttgtatgttgttttttcagttagcatgcagagatttccctcatccacgacatctatgcgctgccttgccattcagcagcagttctcatgcaagtcattgtagcatggtcagtatgagctccatttcctctgtttgcaagtgaatcttagtctactcctgcaggctgtatcatggacacattttcattggtgtgcttatctcttatgcagtgccattgttatgtctgtgattgtcctgctccctgtgccctatgggacaagcattgtcatgctacggacaaggatagaaagtggaagagacttagggaaatatccaaaaataaaagccagccaaatcctaaacgaagaataccccagcatttcaaacgctcagtcacgacaggaccatcatcctcacagtattccgcaaatatgactggttttactggaagatttcctgcttcgggtactgcgaaccaaattcaacaggtggatatctctgttatggttgcacaggatatggtgaggggtatcagtctgccgagtgcaccatctcctacgccaagaactaaaaatcggagctatggatccaaaggtgcccagattgctcctccaatttatacattctcaaatgataatcatttccagccttctgttcctagctatggtctggtgcggcctcatgcatctaaaactgcacatgtttcatcaggaggtcatgttagcgctaagacttttcagagtaacccatctcagttttgtgttcgtgcaccaatgggatctcatggacacaggtaccgaccaccatcatatcctcagcctcctcctaacacagttgttggcactggtgtgcccctctcacg

SEQ ID NO: 89697 - DNA, 969 bp, Zea Mays
ggggggcgagatccaggttcaactgagggtctctggcctgtcgcggacggtctggtgacctatcgcggactgtccgacacctcgtagagcctaacccaaggtcctgctcatcacgagaaggccctagggttcattactatttggcccaaagaaggcgccaacatagaggtggagttcgatactaatcaagtgttatttgtccagtcttgtgaccaaccgtggaccttctggtgacctaccacggatggtttgccccctcgcagagaggttccccaaggtctcattccccacgagcaggatctagggatcattagtgtttggcccaaaaaggcgccaacacactttttggtgaccccgctggggatgagaggtgtgacctaacaagattggccatagatggccggttcaaaggatcacttcaatatctccctaagtaacatcgtaaagctgactatagagaacctgccggctaaagataagaagaaattcgaggactacaaaagataaccgaatgaggccaaggcgaagtacctagcgcacttcaaggtggaccgacatcaaaagatcatccggcaaggggaatgcgacctggcatctctttgacctaccgcacctgcccctaatgtaagtaaaacagatgacatacaatctcttaggcattatatagatggcagcgagatcaattgatataatacatagagggcatgagcggaaaatttagggaaatggcacgcatatttgaaaaatctgtcgtttccaatttcccatcacatgagattgatgttagaaccaccacacgccaatcatcgactgtaaacatgcagtcacaaacctagccatcttctggcatgccgatgaattcatacgccaggcaatcgcagcctcctccatcgatttgggataaacccacaattctgcgcatggccggactgtctgggcctggcctcggcccacccgacccactggaag

SEQ ID NO: 89698 - DNA, 440 bp, Zea Mays
cgagacgttaaagttttcgagaaaaaaaaaggttaacggtggtatatatttgtgaacggatgtagtacaagcatgctacgtacacatactagcccctagcccggccgacgacgtgcttgagaggattattggttagtatataggcatatagccatatgtataggagtacgtactagcaaagagccattaacatgtggtgctgtgtgttcaattaaactgatgaccccggccgaagggtcaccattaaactgatgacgatgctgtgcgtttccgacccttgtgcgccacggcagaacggcctggacacagttgagcgctcgatcatcacgcacgccctcctttctttctccggcgaggagacagttacccgcgagctaattaatatttggttccggcgaggcgattgctctcacttgaagataaaacgaaaacgatctctc

SEQ ID NO: 89699 - DNA, 583 bp, Zea Mays
gaaaaggatgcttcgacgctcgtcggacatgcagacggggtctacccaagctgagctagacgccagcgatgatgtggtggatgttggtttggtggatgatgtggaaggtggaggcatgctgaagacaaccgggtatattgtggaggaaatggatgaagatgaggaggaggaggtggtggtgctcccactagtccacacgcgagcggcgttctaaggcttgaagtgatgtttcaagtcttgcggccccagtgaaactggtggacatccaaggtttgtccatgttagctatggattgtattcttgaagaggccattccagaggcgctactacgtgaattacctgagataaatgctattgatgttgttgtagtttgctcggatgaagtatctcctgctggtttgttggctaggtcagaattaagcctactagtccaagggagtccatgcattagtcggccatgctaccgatctagtccagactctagagggcactctagccctcgagggtgtcgcggttgattctccttctgctccttcaatggaagttcaggttgggtcaccaatgcctcgcgatgaactcctcc

SEQ ID NO: 89700 - DNA, 455 bp, Zea Mays
aaacacattagatttatcccgaagaaaataaacccaagtgaatctagaataatcatccataatcacaaggcaataggaattaccgccaatactcacaaaatatgttggtccaaataagtccatgtgaagtaattccaaaggccgatgagtagatattgactcttatttggatgagtatttgccacttgcttcccggcttgacaagagctacacaatttgttcttctcaaatttcacatctttcaagccacggactaagtcatgtttggttaaacgattgagttgcttcattccaacatgaccaagtcttctatgccataaccaacctagtgaagcctttgagaataagcaagttgtgaggtttgcctcactagatgagaaatcaacaagataaagattttcatatctaaagcctttaaacttaagattgctaccatcaacactagagataataac

SEQ ID NO: 89701 - DNA, 615 bp, Zea Mays
tgctgggagaggtggtctagcaaacttgaaatacacttatcgatacagaaatcagtttggcaagcctgatgacgaatggttggaggctatcgaagaaacatgtgatgagttgttggggaatttctcgaaaaaggaggatgaagctctaaccaccgcctttggtgcacatggaaagaggaggttgaattgagttttcgatgccatcagctttatttacccggactacaactttctgttctgggtaaaggttagaagagaaaaagtgctctgaagtctccctcggctatgccaaagcaaaaaagggtaaagattctggaaaatcggccatcatcgtactatgttaaaagggcagaagaaatacctgctatcttgacttgtgacaaagaagttgctactcagatgatggcaattgacgagccaaaggttccgcatccgaaggatgattctcccacatcttcaaaggtactgacgcttgatttttatttttagatagatttaaacttttgctagaatgttgttttatggttagctttggatgtcttaatgtagggagtggaaaaggttgaaggggttgttattgaggtgcctaatctggatgaagtacccttagccgat

SEQ ID NO: 89702 - DNA, 317 bp, Zea Mays
attacttttcattcggttttaactggcatcaaggtttatcttcagtgttcttttgcttcgattgttgatcacttgagcacttctggaactgagttacagaaggcaggatggtatggatctggttaacaagtctacaatgtgtatgtttggtttatatgaagaggatttgtgctaaagtttcttatccgatgcttaaccactcgatgcaaagatgtgtcggtctgagccatataatggaaagatgttcattttggccacacgaagacatttggggcttagactatctaagccagcgaagagcatctccacaagatatc

SEQ ID NO: 89703 - DNA, 1187 bp, Zea Mays
gaattttctaattctggtagaaaaggaaaaggaaaaagatgaatagtaatgggctcaaaccggcctcagtcggcccatgcccagggaaacgcgcgtccacgcgtgcccgcggggttggctttgcatagaggaccctaggtttttaaataactaataaagagccctgcgcactattcctatgtgtcactgacatttacaccaaggtccctcccctttctgtttcttcacaacttgagatccccgaccacggcggtggagcagtggctccggcgagccaagaccggccggaaaacgcaacaactatgcctctctgttgctcaacacctaattctaccctcggcgacactaatccctcactcaattccggatttctagcccacaatctctctgtccacagtgatggcgcaaaccgaggacaattcagagtgttcccggtgatctacctaggtctagttcaattggttgggccgatgagtatctacagcacacaggggtattgaaacaagagcgaggagggcgtgaacggacctgtagagagctggccacggcgagctcacacagggcggggttcttgactgatttgggggaaatcccaaattggggagttgtgggggacgattagaggtgagggctggttcactgggtgcataactacttagcggagctcactggggcggcaatttataggttcaatcggcagtggcggctaatttttgagaagacatgtagcggccggagagatggactgagtcactggcgcgggtgaccgtggctgttaccgtggcaagaccttaggcgatagatgggctatgtattgtgatcaattgcgacatggtaaaatggctgacggcgtggcataaccgcgaggaatggcgtcacgacgacgatggtcacgcgaccacgtctccgggcaaaggggcacgacaacagggcggaacagtggcctaagttcatcctcaacgtgatatttcttaccccgagtagttatctgcactccgctaggcacgaatcgcggtgccggagagaatccgaacgcggggtcgccggtggcgaggggggctgaacctgagatcttattcagttactatactataagatcttcatcagagcgcctgacagaccaatttgctgggcttggatctcagatttttatataacaacctattattccacctgtaacaaagttg

SEQ ID NO: 89704 - DNA, 280 bp, Zea Mays
gtcaggttcagcaatcagcgtagagcatgcgggcatgattgatcgccaacgacctggatggagaaagaaaaacgtacactgtacgggataaatatacctgagtcggggataaggaactcacggtcacgacgcggattcatgactcggacggcagtcagcagctagcacctagctagcaggtactaccgtacctaccagagtttccattccttggcaaccactgtcgccgccgcgatacagactcgtcggtactgcggcgccgtggggtctggaaacttga

SEQ ID NO: 89705 - DNA, 450 bp, Zea Mays
caacattttagtcagattaactttcgcctcacaagaagaggttttgagacggttcatggaatttttgggtatggtagtggtagtagcaattgggagggagaggtcttgaactttgcagtagcttttgacagtagtcaacactttagaaagagagaatcccatttagtgacctatacctatagtagcagccaacattctagttagattaactttgtcctcacaagaagaggacaaacaagcatgtttggattgcaaggtgatatttggggagtgagttgcctctcaacataagattgtggtgacggtgtttcgttcagctgcattcccgtaaggataaacaaaccaaaattgagagaataaagtggtggaagctgaaagggggaggcactagaagtcatcaatggccatcaaagatggcattttaaagatgacgcaaacaacatatgagag

SEQ ID NO: 89706 - DNA, 1507 bp, Zea Mays
ttgctcctcctcaacgacggtgacctcaggaaggggcaaaaggcatgccaccaagggaccaatcccctacaaatcacacataataggaaatgagagaaggaaagaaatgaagcaacacactaggaagaaggggctcaccagagtgcttgcaacgtctctggacaagggagagggcaagtcttcgtccatgaatgatcctgacgataatgtcataatgaccctgaccctggccttgatctccgatagagcatgcaacataggggaatgatggtcagggtcgttgaccccagaatattgatgcatcggcctctactaagccgtcagaggctagatccagcgatgcatgaaagctcgcactagccacactctggagaggcctcgctacttcaacgtcttgaccattgttagtaggttccctatctcgattttgaggctcacctcccctccacgctgccattcatctgaggacaccggttcatagccaatgaacgacggagcacccgtagccatgttcctcacatagaaccactcgcccctcatacccacgcaagagggaagagagatcttgaaatactccgccttctaactggagcaaacttgaatgacggttgatctgatgaacagttgatcgccacggctcagggacacctgcgcactaaagaagtactaccacaacctcaagtggggataaatgcccatgaacgcttcacacaacaaaatgaatcacgctatgtggaggacgacattgggatggaggttctagatctctacctggtagtagtggaggagcccgcacatgaacagatgaaagggcaacccgaacccacgctcatataaagacgcaagcatgatcacttcatcatccctcgggtgaggcacctcacccttggcttctagcctccacctcgagacatcttctgaggggaagaaccccttcttctccaagccatggagatgactctcatggatcgcgtagggggagacaatgccatgggagcaaacaaagaggcacaaagaagagatgggggcaaaagtagtccaagaaggcagactaacaaacgcgagaatacagtaagcaaaaaaacttgagcaccctcccacttacttatacgtgaatgcaggggaagaggcaggcgcctagatggtgcccccacaaaaacagcgcaagggatcccctttagaccaagggtcaccttagccgaagagaaattctatgatttttgcaggacaccaccacctaagacagagtaccgaaaagatgcgtggcagaggtcgcacaaataacccgcaagattgttatctaggccagcacgctacctgggcgcaacacgacaagcaggctgttccgcgtcccatcatgctgttcacgtgagtgaaataatgatgatcaccccgcttcaccttgccactgcggtaattactggacgccaaccaggtaaaaattaagaaccattcgaaatccccacgcagagcaaggggttggttgagcaagctcttagtaagccgc

SEQ ID NO: 89707 - DNA, 1485 bp, Zea Mays
gacgatcgaggtcctatcgtctccccacccatgattgtcatcagcatgctcgccagtcctggcttcagcctccttccggtggctctataggggtgcctcccttgactctcttctcatactccatgtcttcgccacccctcctactcccgtcgattgggttgtcgactctggtgccttgttccacaccactcctggcccctcgagttgtctctttacaccatccccatagccccacctttccttcctccatcattgtcggtaatgggtcgactcatgtctgtcacctcagcaggtgacatagtcctttctggtcctttatacctcaacaacatccttgttgcccccaacatcatctagaaccttttctcggcccgtcacttcaccattaacaattgttgttttatggagtttgatccctaggggctcactatatgggatcttattgctgtggttgctcgatacgacaactctagcccctatatcctattcgcttccccaccgatgttgtccaactttgaagctgcaaggagcaggggcaggggtcctcttcatcgcccctggaggagatcaactcaagtatgcactatagcttttattcccagcctccaacaatgcagcagagtatgaagccttgatacatgggctcaacattgttgtgtcactcgacatcaagagaccgatggtatacggagactccctagttgtcatcagccaagtctacaaggactgagactgctcaaccgattcaatgggcaattactgcgcgacggtcaggaagatcgaagataaattcgaaggcttggaattccaccacatagaaagagatcacaacgcaatagcatatactctatcgaaggtgggatcaagccggcatatttgtccaggaaatacaacagccaagcatcatgacgagccagcagaggaatgcaaggcagtggagcaggcagagccagacccgagtgactagagggagccaatcatcagacacataaaaaacgaggaggagccggatgacaaggccgccgccgagcgcattgtgaggcagtcggctcactatgttgtcatagaggaaggggccattggagtttccgtgaaatgcatggactcaggtgtcaggaagagtctactggaagaaattcatgtagggcagtgtggagtacatgcagcgttaaggaatttggtagggaaaggcttttcagagcaggcttctattggccaacaacgaagaaagatgtagctgacctagtccaaagatgtgaagcatgccagttcttggctaagcagtagcatttactagctcaacaactacagactattctggtcacttggcccttcgcatgctgggggttagatatgatcggaccgttcaaaaaagcttagggagggtacacttatgtgctggtggccattgacaaatttacaaagtggatagagtacaagccaattgtaaccctgacctcagccaaaacagtggaattcaactag

SEQ ID NO: 89708 - DNA, 507 bp, Zea Mays
gcgacgatgagaaaaaatgctgccctcgccaaaggatggcgatgggcacatctatgaagggtggatatcttgtgtatagtgtacatcgtgtagttgtaacataatgtgtttcatttgtgttttgtgcttaatttcacttggtggcgtcttgatgcgctttatattgatctgttggtaatcttttgtgacgacttcgcttgttgcgcctagtgtaaatccagctgcacccttaggcgacttttgcatggatggaaatatgcgtgttgtagacgacttcgcacccttttggtgttgttgcgcacttgttgtgcttatccggctgcacccttaggtggcttttgctcggataaaaatgtgagtattatagacgacttctcaccatgtgggtgttgttacgcacttgttgtgcttatccggctgcacccttgggcggcttttgctcggataaaaatgtgcatcttatagacgacgttgcaccctgtgggtgttgttacacacttgttgcgc

SEQ ID NO: 89709 - DNA, 709 bp, Zea Mays
gccttagttcccatacctatttggctatcagtggcatgtcacaaggacctatatatacctcattttcatgttatttatatatgttttcccatagtgacacatgcattgagtatgctgttaaggataggaacgaggggtaatatatacttggtcccttggttatggatagtagcattactttggtgtcatcttggattgttcgatgataactatttggtggaaaatatatacatattggcaccaacttgcattcctttgcagaaactttaattaatgttttggattcactttcatagacacaataccacatcaattaattgttttgcgagaaaatgacaaatatgtttaattcgtactccatacttatggatacaccatcacacatttgaagacactcttgtgaacatgtcacatgcaatacgcattcaaggattatttactttccctggaattaagcaattaacaacacttttattctcggatgacgagcgtatgctatacagattaaagtgggttaacgatggctgcagtctttggcttctcgtaattcgtgtcctcccgcttgagcttcttcacgagaagccccgagaagcacttgagccaggccaaaaggctgttgcttcccaagatgagcttcagaagcgccaccacagccaaggcttcctccccgctatttatccctaatcccttgaatggctggaaaggcttg

SEQ ID NO: 89710 - DNA, 539 bp, Zea Mays
tagggttactagttacagttaccaggtgagagaaggagagatgcagagagttcatggagaggatggagcgagagagagggagaggagcaggagacgaagattagcaatggtggctcactggcatacagctccgccgccactagaggcgagggcacgagaattgccctatcgggagccaggactcgggagatggagaggccgagagagaggagagaagagtagagtagaaaaatctagacactagggttcaacacgatgttgaggcgggggtagtgggggagccctccccatattaacagaccaccgctttgtcgacgtcttacacgggcctggttggcagcccaagcacggcaagtgccttcgtgttgtgtcgggcatcggactgcaccacgggccagcccgttttggacatgtatacctagaatacaatgcatgctatgccatgccagccttcttgttggtgttgtggagcagtggggctctcgcattgcacgggcgcatggccattcctttgctgcctacccttgccatctcgcgcg

SEQ ID NO: 89711 - DNA, 622 bp, Zea Mays
tagccagctcatgaacatcagaagagatattcctgcacatggagaagaaagctgctatcccatgagccaatcttgctcccatgtcacgaccacgacctcgaccatgaccacgaccacgaccacgtggtgtgggagagccacgaccaggagaaggacgagagggaccagcagcagtatgctcacgagagcttgtaggagccttcctcaaccgccctgctggattatttgggtcaatccagaaaggggtatatgagagatgtcttgtgcccttttcatatcgaaattgggtcaccacttcaatcattttcatgatgaagggggcatgcagacatcccttgagaggaaagcaagatgcatgaataatctcttgccaaatcatatcaaagacattcaagctctcagtgctatttggcttcatgaaggagagcagaactttactttctcccaggatattcatctgatttccccctttggggatgagagtcatcctgaagagagagttgaggtacctgtagtacttgtgcagatttgttgatttccagtattcattagtctcagaaatgtgaagatctttggcttcagccctggtgggagggcgaaagtcatggatcttgatcttgtc

SEQ ID NO: 89712 - DNA, 503 bp, Zea Mays
agtgatattcaaatgtcattggtttgaccctcaagtgacaagacggacacattctaatcttgggatagtcgaaattctacaagattccaccttaccaggaggcgatgtctatattgtggcccaacaggccacacaagtgtattatctcccatatgcgtgccaaacaaaagaacatcttaagggttgggatgttgtgtataaggtatcgccgcacgggaggttacctgttcctaacgatgaagattacaacttagacccggacacatatgatggagagttcttccaagaagatgggctagaagggcgatttgagatagacttaaccaaagctatcggaatagacgtagatattgaaatggttgttgatgaggaggatgatgaggtacaaaataataatgacttagtaatccttgaaggcaatgacattaatgacgaacttgcgtcttccgatggtgttgagattgaaatggttgatagtgatgatgagagttatgatccggcta

SEQ ID NO: 89713 - DNA, 1430 bp, Zea Mays
ctttccctgagttgggtgtgcttaatgaactgttgggctccgggtaaccctaatttgttgggcctcggccaaccccacctgggctgggtgtatcacaaacatatcaagcagatcatagacaaggggctgaaaataaacgtccatatcactacccgcagaacatcgaccaggaattaagacaaacaagataaaatttgaatccttcatgcacatcgatggtggacagttgagtggaatcaatatgccaggccaaatactataactaacattcattgtcctatatggattgaaaccatctgcagcaaatgctaggcggatattacgactatccatagcaaattctggatacttttgatcaatatctttccacaagggtgaatcggcaagatgcctaagcaaaccatcgtttactctgtgttcatcatgccaccttatgagacttgcaaatttagaagaaacaaataatctttggagtctttttttaatagggaaataactaagcaccttcctaggaactttgtactcatgtttcccatctatactcttcttttctgatttccaacgtgagacactacatactgagcatgaatcaagtttttgatgctccttccaaaatagaatgcaatcattttcacatgcatgaattgtagtgtacccgactcctacagatttgaccactttctttgcttcatgaaagtttctaggaagtgtcgaacccttaggtagtgcatcaacaagtaaatctaccaacaaatcaaaacttctatctgtccatcctccaagaagtttgatgtgaagcaaacaaactaggaaacgtagctttgagtagttttggcaacccggatataattcttgactattgtcttctgctagcttacgaatggctaccgtgtcttcattaggttcctcaaaagacccatcatcctccatatcccctccatcatctaaaccacaagctaaatcctttaacaacttagattcgagtaggatgcttgctaaactcataatcattgttaccatgattcacaaaagaggacgaagcttctccatgtaaggtccatgttgtgtacccttttagaaaaccatcacatatcaagtgttctcgcacttcaccggcctctctccaaaatgagttaacacacttcttgtaagggcatagaatcttgtttcctattgctgaatgtctaaatgcaaaagctagaaaaccattcaccccttgtttataaaactttgtctctctacatacagttcctatgttacatatcaatataactacagaaaaacataagagttgctatgaaaagttgctttgtacctagcctcatttgtgatccatgatttatccatactctttatgtaggatttgaaacgactttcaactcgaatctaatatcatataagcacaaagaacacagttgcatactatagtc

SEQ ID NO: 89714 - DNA, 893 bp, Zea Mays
ccggcccaaggggccgctaactgcctcgctctacggcaccaacaggaggggcccggccgctagtcccactgcacaatagtgtctccaacgcctggagccgcttcaacaggagaacttcctatctttggatgacgactatccctgtgaccgaatcaccacaaaagccggtggaatcacaacaaacttcttcatggaccttagggcttggagctataaccctcgggcgagccgtaatccctccttaatcacaaacaaacgagtcaattgcctctcgaaacaacctcgtcgtgagacaccaaaagtaacctgtcgtcaccagggtgagaaatgctggtggaaaagtagccacactctctgggaccaccaaggaccttaccatggttcgcgaaggggatccgttgcattgcagtccagggccgggaggagggtgactccacgccatgaccgcttcaccactgagtactcatagggtcgacgtcgttggagatctccacatcatcacatcaattaatacttccctcctgacaatccctactcactccgtgtcgcgcaactcggcaagctggggggttagcatggcgggtggcaggaattgctcgtcttcgaaggtttgggatatggtgctcgccgtgggtcgcgacttgcatttgcagacaccttaaatcatcagcaaagcatccaaggggttcactaggtactacaaggcgtgtaagactagtcgtgttaggggatttcgcctcggtcggtagatcggcttagctccggcgggttatcgccatggctaggggtgccgccaccgttctgtttggctatagcaagaaaagacgcgccaaccgtagatctctaattgaatggcctggattagattgtatataccgtttgccaaactcgaa

SEQ ID NO: 89715 - DNA, 410 bp, Zea Mays
aaaccacattaccatacaaattacagttacatacacacggcgagggcgtcacatattacatcggctcaaccttcgggatgatacccatctccctgtaattgaacaacattatcctcaattcctcaccctcaaaaagattctgaagatccccctcgcctatactcgccccaatcggcgaggacaacaattctctcttaccaacccggtctactcgaagacggccatgctccatcccctaacgacggtgcctaccacttcgcgaaaattcacccacactatgttttcccaccacccttcgccgcctacacccagtactcgcacttggaagatccccggaaccctccacacgcggcgaagtctccaccgcagccacatccaacacaacaaaataatccaagccttcatccgag

SEQ ID NO: 89716 - DNA, 413 bp, Zea Mays
ccttcgctccagttcggtctcggaggcatcctaagctttcgtcgtcaataccgcagaagtgcaatgctcctggttgatagccacatgatatagcataatctctcagctcctctttttcagcattagataacttttgacctattatgttttgaaaattgaagtccttctcctccaaagtgtcttcggtgattttcttcccttttccaggcaatgtggctagggtctcttcggcaggtgcagcagtttcttccgcagccatattcagaagcatcttatcaacatcagaaaaatgtgctctctaaattcgtggcttcggccgtatcagcctcgatagttgcagcttcggtgggggcagcttcggtagctgtagcgtcttcggcagttggtgtttttgatgccaaggccggcggcgg

SEQ ID NO: 89717 - DNA, 797 bp, Zea Mays
gatttgtcactgacacctaggcccctgttgtcattcccgacctcccgctcgtttcatcgctattcaccgatcaacgcaccaccattgaaactatccctacaatactgtattggaccaaacgacggcggcgatccctctagacatatttgtcctttaccctagccatgtcttcatcgaatcgacataaaattaaaccgagaggaccatcacgtcctccatcactcccctggcgaagctgctcacacagtggcctcctccctcaaatcaatggcatgactctaaaaaaagacaaccccctgcactctgcttacctcacttcgagctctattgttccccaagcccttgaactcgcacaccatcaccaccgtcgagctacgtgactttgttccacctccagcagagccccaccttcttttgcaccggtgtcacgagctccaccaacatttgaaactcctgtgacacacctcagagtgaactccactaacgtcttacataccagaccatggtgacccgaccttgtcgtgcttcgctgccatataccaaggtctctggacaccgaccaggcttctgcttgtcgctaggaggcgcgctagataggtactaacgttcttcactgttcccttgtcaaaacacacatacacattcgatccgaattgctcgccgaagttgtctcagccatcgcagactcccctcaccaccctcttagcactcccagttcacaactcgtcccaatttggtgctcagttagttcaccgtgaccaacaactacctagcggtgaaccatgaccccctaccga

SEQ ID NO: 89718 - DNA, 973 bp, Zea Mays
tgagattcgaggcgtgtgttgatggtggtgatttgggctagcatttgggtttggtgatcaaggatttggcgtagggagtcagcgagtccacgcccatcaggattctgtccagtgccggacttttgggtttggtgatcaaggatttggcgtagggagtcaagcgagtccacgcccatcaggattctgtccagtgccggactcggaagtcatggcgctggctgtctctgataccaaatgatgcggactccctgctttcgatggaggctcagtaggaggttgtggacaagaacgcaggaaataggagtgggaagggggaggaggattcctggtggcgttctggacgctggagagttcctccagtgcgccccaggtaacctcctaagactaggagatttatttcttcttttgataatccctagtacaagctacccctggtctcttatagactgagcccaggttaatatagaaacaaatcatatcactctcaacttgctagaaaacaaactgactaaatatagaaacttatgtgctgtctcttttattccttatatgctgactgactaaatatagaaacttatctgctgtctcttttattccttgtctgctgtttcctttgttcctggcgattccttctctggtatacctttcctacaaatgcatcggtatcataggtacccaacgcagggcagctacatgtgctggccgcaaggcctagacccagatcgaccacatatatctgcctaatacttatgagttctctagttgcctttttctgtgtttttgccttctctatttttgacgttttgtattgtattgtttctaagatcttaagaacataagttacttctcatgtcttgaaactaatcataatcaaaaaagaaatgtagatcaccacctaaagtagatgtctcttataattttaaatcttgtttgttaaatttgtattaatttgttataatcaatttaaatctat

SEQ ID NO: 89719 - DNA, 362 bp, Zea Mays
gcagctgaaagtattactgaccactgctccggtattagctcaaccagacattgaaaagccctttgatgtgtattgtgatgcattaggtagtggtctaggttgtgttctaatgcaagagggccgagtgatagcttatgcttcaaggcatttgcgccggcatgaggaacattatccaactcatgacctggaattagctgttgtggttcatgccctaaaaatatggcatcattatctgatggggaatatctatcatatttatacagatcataaaagcttgaagtacatctttacccagtcagaactgaatatgaggcagaggagatggcttgagctgattaaagattatgaattcgagattcgct

SEQ ID NO: 89720 - DNA, 612 bp, Zea Mays
ggggcgttgcctcggtgcctggggtgcggtgccggtgcatgacttcttcgtggcgagacagagagacaatcagacaaattaaagcgcggggacctgggttgggctgtttcggggcagtacaggcaaagctcgcttctcgtcaaaaggcagcatccattcaggttttccatggcatggcaaggcatgcaacgaaagctgcctagtactagttagctaggctagacttgcgtcattgtcgttcttggaatctggagggttggggcctcccccaccctgtctggctgcctggctggactctcttcctctccctctcactttctccctcaccattcaccaagcattcgagcagtagtactgtttgcctcctgtgtactggtgccctgtatctggctggcgtacttgccggcgtgagggaatgtaataagccgaggaaaaaacgtggcatgcatgcaatgcaatgcagtgcagtgcagtgcagtgcagatgttctggtttctctaccggaaacctgcagcgctgacgttggacgtgtcctgttttgccacatggttgttgtgaggactagcaataatcacagcagcaggcaatcacgtcgactaacacagctagtac

SEQ ID NO: 89721 - DNA, 524 bp, Zea Mays
cgtgaacttttttatcttctataccaattcagcgcctcgtcaattatcaagttttgcttcaccttttgattttttgttccctaggttcattaagcatgtttacataagtaacttgcttcaaacatggtaccgctatttcgcaaaaatatgatgattaacttttaggagcgttgatcatgtgactctgacctttgatatactatttgcacctgtaacttgcaatttttgatagtaatcccacatgctttctttatttcagtattcataattatatgtggatatgacgctagaaatctattgtatcataaccataatgttttagactatttgttgtatagctatttggtgacgcaacgaatgtgaacatcacagcgatgaatcctttggtgttgccggtgtcggagtagccgccgttcgctagactgtatatagctcaggtactgcgttattttgtcaatgtacttctgtgggcactgggtacacccttttattgttatagagaaattatttacacttcaaatcag

SEQ ID NO: 89722 - DNA, 420 bp, Zea Mays
tgggccgaatcctttagaattgccaggcttgatttgggctgaaccggtcatctgagcaagcgtatgtggaccaggcatccatcctcgattttgaacgcccgagaccaagatacagttacatcagacagggcggctgtatccaaataggtctgctcactagtgccgtgagtccgtgacagacccacaccattgctctcgcaagccgcttgacgcttgtagttcacgtttactactactactactttcttgcaggaattcggttcctctgtcccggacaggagcgtcccctgacactgacagcgacgacctttgatctcgtggggattccctctgcattccaacgtcgtaagctgcaccaaccaatcatttgcgagcgcaaaatccttgttgccaagtccaacaacactaggatagtaaaac

SEQ ID NO: 89723 - DNA, 351 bp, Zea Mays
cgcacttctgatcccaaacaaacttggcttctttctttaacaattcagttatgggcttcgcaattcaagagaaatccggaatgagtctttggtaataaccagccaatcccagaaaacttcgaatctgacggacggtcgttggcggcttccagttcattacctcttgcaccttattaggatcaacaactatgcctgcctgagagatactgtgacccaagaatttgatttcctttagccaaaaagcacattttgacaatttggcataaagacgatgctctcgcagacgttgaagcactacatgcaaatgaccggcatgttcttcttcgttcttcgagtacaccaagatatcat

SEQ ID NO: 89724 - DNA, 393 bp, Zea Mays
cgccgccgtgtgtggccagcggtggaggtgatgaacccatggccgttgatttacggccgaacggctctgattagaagcaggcgataccccttcgcgacattaaatcggggccgttggtcttcgatcggacgacgtaggagtgacctgcgggctcggttgacatgggtcgtggattgatgatccaaccgccctggttgcgtatcgcatccctgctagggggttttaatctgggccactaggcagagatcggacggctaggatctgagcttaccccttcgcgatggccatctcactaaagagccctcggggaaaacgggaatcaacccgcagtccttccctggctagactgtgtcttggattaatttcgcagagacccctgcgctttgcagattt

SEQ ID NO: 89725 - DNA, 1667 bp, Zea Mays
aaaattagatagaaaatttcaagattttcaaaaaacccctctgtctgggctcaccgaacagtccggtgtgcaccggacactgcattgtgcactgtccggtgcaccggctgagcgtgcgtagatcccctttctattgtgtgttgtccggtggttcaccggatacttactgtgtgttgttcggtgtgcatcggataggcactatagactgtccggtgcgcccataactggtttttaaaaaagattttcctacccgagcccgagctagaagctttcctccctttccttttctgctctccgctcctgctctctggcgaccctttccacctctgctcaccaccggcaacgtctgcagcgctctggtgatctcctccatgtccaagtgtttctccctctcaattctcctgtaagcctcctcgctgctcctttcctcctctccctctctactctctggtcagtgtggtggcatttcaccctctcttgcaacatttctcaaattcctgtgaaattctatgaagtttgtgcatgattgtgtgccatagtgcctctttgaaccatactgcagttatccctctcctatttggaggtttcaaaccttaaaataaccatttcacctaaaccctaaaaccccgcatgccatgtgctcggtgaaatgcccaaaccagccaaatttgctccaatcgatcccaaatttttcaggcaccttcatgatacctccagtaacatattcgccaattttcacgccgatatgatatcccaggcactagtttctcacaaattcccatttatagtcattgatttctagtcgagtgccacaattccctcttcttcgcctaaattcaaaccaagtgcacacgtcactcatatttacccatataaacctactcatgaagcctcggctcaattcttagtcatttcatgcctcaattccatttccaaactatgtgatctattcctcgttcaaacgtcgttttcgcgacgtttgacctctctatcgccaaatcactcgtttactgtgtcaaaattctctgtgtatgtatttattcactattcatatacttatgactatgtgactaatacgtgctcacctcttctgtcatttcagtgacctcgcctacccgtgagctcttctcctgtcttgcctagattctccctctctcgtgaggtttctaggtacttatcactttggtcataatcatttcctctgctatctctcgtgcttagtctttcactcttctttgcagcactctggtcaggatggtgcgcacgaagaatgtgttagcaccagggggaggagacgacgaggaccctcctcgcccccattatgcaggtcaaggggaagaccgtgtacctagagcagcaggaaggtcgcaagaagcggcgtttggataaagcagcccgagcaactcttgtcgtggcaacagcagcagcagagtaggcagagagaggtggtcagctatagatatcatcagatcagattgcctaccgggtctgtcatctcgcgtctcgacctcgctcctccgctccctctacacctgccgtagctaccactccacctcccacttcgccagctccagtcacccctgagccatccaccacttcagccatacctaccacctccaccactcccgcttccattgttcctcctcccactcccatctctgcaccac

SEQ ID NO: 89726 - DNA, 736 bp, Zea Mays
aaactagctcaataagagtgttggcatgaagacatgagctaggccctagcataatctgcatttcatccttctcgtcgtagtaatccaacatagttctatgttcctttgtagcaagtctaggcaccaggaagagaagtgcgctagtaacattatggtggagagtccttccctagtgatctcatctatcctctaaagaataggttttcatgctttgtctaactctataagatcttctcattaggcctggtccacactagctctacgttcaacatctctaggtgtgtgtttgagcagactaagatgcagatccatgaagtctatcaatgctcccatttgttgaagaggtcggtggtcacatatggagttatgtaccgaggcctagagtagagctgccaaagagattttggctacttgacgtctaaagaatgaaaaaatgatgaaaaaattctatgcatggccccacccccatgaacactttgtacacgcatgcaaaggttgagatggcaagaacatcattggatgtgagatgcccaacctggaggtcatagtagtcaagtatttgaagaattaagtgtaaaagagggaagtttagacccactatttcttgataataaaatatgttatactcttctaactcctcatgaggggtacatgatagagctatcaccgagcaaacattattggaaggtgtgtgacctagcctatgaggtttcacaccttgtctaagccctcctgg

SEQ ID NO: 89727 - DNA, 674 bp, Zea Mays
tgcggatctggagcggagggatgggatcggggaggaggagcacgggatgggacaatttgagatccggacgtggaatgcgacgaggaggaaggaagaattgctggagatggaagatgtgcttcggtgacaccggatttgcgccgctcgggttaatcgaaatcgacgtcactacggctggacctcggcttcctattggtcggggctcggggctcgcgggttttctgtctacgagaagagcagattagtagaaatgcttgcggcccgacggcgcgggtaggccggctgggttcctaccgtttgcaaatgcagccaggcagggaagctggttcaactctggactctcgaggcgggagggtggaggcaccagggatggcagcaggtcggataaagtgcgagtaagttatttattcgtccgccaatatattcgcgtccctagtgtttacccgtgctcgtgagagcttgcgggtaaaattttcgccccgtacctgtactcgccagaaaataccatacgagtatgtggtcatattcatttcaccaaaaacatcaacaacttgacagacataatatattggcaagaaatatagttcaaacttcaaagtccacaaacacgatcgatcatccacaaatataagtctcaaacataagtcgacaaacataatcgactaggatgtagc

SEQ ID NO: 89728 - DNA, 372 bp, Zea Mays
aaaaatgcaaaatatttttcatatatacatacatatatacattgcatatggtaacacacgtactgtccacttcccgtctctttcagcatgctacaacacacgtactgtcaggatcttgtctacattctccacctcgtacggtaggtagtactgtgtactagcatgatataaataaactaatccagagtccaccagcctccctttccagttctagagatcaataatatatgcaagcaaactactatttagttgtgaatgacattagatatctacctgggcgcatttgtagaaacattatcccgattaagagtaaagatgttactaactgccctgatcacagatacaatatcaaatatctattcgacttgttct

SEQ ID NO: 89729 - DNA, 320 bp, Zea Mays
attcattgacgacatactggtatactcttcgaatgaagaaacatatgaatatcatctaagatgagtcctacaaaagcttcgtgacaaccaattatatgcaaagttctcgaagtgtgatttttggctaaaggaagttgctttcctaggacatattgttactgacggcgaaattaaagtagatccaggaaagataagtgaaatattaaattggaagcaaccaaaggatgcgtccaagatcagaagttttcttggattggcaggatactacataagatttattgaaggtttttctaagttagtgaaacctcttacctcactac

SEQ ID NO: 89730 - DNA, 548 bp, Zea Mays
tgctcccatgccttatcgtcggtaaaatcgccattgtacgatgcggctgcgactcatcgacaagcgaaggtgatttgatgtgcgtgtgcctgagtctgaaactgatgtgcgtgtgcatgagtctgaaactgtttgcgtgtcctgtgcgtgtcctgtgcgtgtcttgtggacaacatcagttttgcgtgtgcatgaggatatgctcctgtataaattgttgcagggtgttagcaggttagtcactccatccacaatgtcaaacgaaccagagggagagtttgatcctttcgagttggatcccagtgaagtttacacgttagaagatttccttgccgaggatgaaatattagatgaatttggaaggaagatcgaagagaatttgaaggttgcaatcgatggagaagcatcgaatccacctcgccgcagacgcctctccggaatcaggagagttattccaaggaatcgacaaggtgcgcatgatgatcttgtagcaaattatttctctgcaaatcctatctacaccgacgagatgttccgtaggaggttcc

SEQ ID NO: 89731 - DNA, 288 bp, Zea Mays
atccggggacacggttgaaaaagctggcaaactacagctagttggccgtttggcatggccgcaggaattcgaagaacaaggagtttgaagccgtcttcgcagatccacgtcggaagcaacgggacgcacacgcatggcagaatttgctgaaactttcacacgccggcgttgacttcgtgatattcgatatggtacctacggtgcccagaaaactccgtttggatgtagatattagagcataaaattgaaaattgtaaatagtttttataaattctattgtttggttac

SEQ ID NO: 89732 - DNA, 449 bp, Zea Mays
ctaaaattccatttctaataaaatttccttattcaaatactctctggaccgcgcctcatttaccaggaaggacaggggccaaaacagaagaattcctaagactccgaatacttctgccaggactgcgggtttgtttcctagaaagctagggtcttttatgtaaaactgtcagcgcgaaggggtatcgccaagttctggtcgcccgatctgaaatggacggaccagattaagtacgtgcacttaagtgatcaatctgcaacgcgagcccttggatcgggatccaacggcccagcactgaccaatccccaccgcccattagagatccaatggcccaggtaccatctcctacccccagcaccggaccacggcggcgccacccatctgctacgatggtttatcgccggcgcatggcgattgcatccattacaccctaattcgacatctaaaag

SEQ ID NO: 89733 - DNA, 588 bp, Zea Mays
tagaaatctgtcctggtctgggcctgtgtagggtacgtacagctgaaatcagatccgccgcgtgtcaatttctgcttcgtttgacagtgtgtgcccacgccgcggagcgtgttcggtggcctttttcggcgttctagcggaatgggcgaccgcatttatcggctatgcttcattacataaaaccaaggctctgttttttagtacattagtagtaatgttcattgactgcgccgaactgtccgtatcatggcacagatgctcgttgatgacaacctcaacaggtggcagcgttacaacacgccatgcgacggtgtgttcccctcatgatgcgcaagttgcaggcagcaggtagcaaagcacatggttcactgggcacgaataggatgtttccatgccgacgtcctaatctcgtacagtacgtaatctctactacttaagtaagagtagtctaccattccatgttctatcaccattccctgttcttctgccattccttattctgcctctctcattcctattctctattctgcctttctcattcctcctccccgcacagcctatttccatattctgtcatttcctattctg

SEQ ID NO: 89734 - DNA, 348 bp, Zea Mays
gtgaaatgtaatgtagtagtgtagggtattgaacagtggggagaaaaccgactcataatgagttggttttttaagtttggtaatgctgatttactgtcagtattttcagaggtggtgaccgagtggttttccttttttatgacgttgacgttttagaggtaacaaccgagtcattttgagtcgcatcgttgctttaggaataacagacgagtgattaatggtgatgtcggcgttttagaaataacagtcgagtggtaatgggccacgccggtgtttttagaaataacgaccgaacggttactggtgacgtcggcgttttagaggtaacaaccgagtgataataggcca

SEQ ID NO: 89735 - DNA, 690 bp, Zea Mays
aggttttccatagttgaagcggttattagatgagttgggtaaagctggaagacaagtgccaggggcactcggctgagtggtttgagtaggggcaacagttggacgaatgaagattgactgcttaaaaggataggaggatggacgagaaaaaggacgatttggattgaaggaatgaatcactagccttagccgctttttggatccctgagaggatccctcacctccttcacgtccatacctttttgtcttcccttgccccgagttcttcgcctccaccgagattgttgtactcacgaccctattgaaagtgaaatctaaacaggtggccattttccgctgcagcatatcattgagacctctcatgaaacatctcttcttctttaagtctgtattgacttgttctatggcatattgagagagatggttgaacttagcaaggtactgcatcacagagtcaccaccttgcttcaggcggacaaactcttccaacttcatttgtagaacaccatctggaatataatgctccctgaatgcttgcttgaactctgcccatgtaataagatgaccttcaagctgaatggctatgaagtttgaccactaggtactagcgggacctcgtagttgttgagcagcaaataggggcttttgagtttccatgcatcggatcagtccgaacttctattccatcac

SEQ ID NO: 89736 - DNA, 814 bp, Zea Mays
cgagataggtaaaacaacactctcgaactgaaatggaagaggtgaggctttaaaatgtgggtaaacgtcatggtaaataccgagagatatcaagggttaaaggtgataataggcaaggatgtaaggaagaggtaaatgtgcataaggaccaagtatataagtacaaccaagaatggagttaagacaagacttgcaagtggtaaagaataggatataactaagggtgggataagtaagacaccactcttgaactgagatgggagattggagattttagatagcagacatagtgtaataaccatggtcagatcgagagatgagaaaggtaaaggcaacaacaaacaaaagcacaacaaaggatggagttaaaaacttgcaagtggtaaagaaggggatacgacaaagggaaaaataggtaaaatacaactctcatattgagatgaaagagaggagtttaaagggcaggtataagataagcatcaaggtaagatatagaggtgacaaggataaagatgataataatgaaagcataaccatggacagagttaaggcaagactcgtgaagtggcgaagtggagaaaaacaatcaagggtaagataggtaatgttccaataggatggttgaagtaaaaaaattcattgccgagggatgttataagggaagaacaagatcaccaaggatgtgcgaaataagatgattgctcatggatcgtcaagaaataagggtggtcaagggcatgtaaactgaaatgtcttaaacaaatattggggtataaaggtaagcatatatatattagggtatgcaagattctaa

SEQ ID NO: 89737 - DNA, 726 bp, Zea Mays
cagctattctagggtggtggaatatgtacgcttagggtataggactagactaagcggctacacgaccccggaccaccctagagaatgtggtcctttccctagagtaagcatttattgatcggatcctcattcattatcaagtgatgttccaaaccaaatgcaataatatgcactattattcggttttcaagagtacaacagaagtttagatccccgaaaggggtaaagagaaacaacatgcataaacaggaaaagaaaccgatggatgagaactgagttttccttcgcaatgagatacatgtgtcacacgagaccatgttcataagggcgtctctcaccaggtagggcctcggatggcgctagagaccgggtttatgaaggctgaccttaccagacttggacatagataaatgaaaccctagtgcaaaggaagagttcgttctcatgctaccttccagatgtaaggtttggggccagcctaaaccacctgagctctgtcacacgtcttgctcgaaaggtaagaagcgcccgacgcaggttgttggctgctaccacgaacaccatggagcttgtggccaacgggttgggtcttagaatcaccggtgtgcgtggggagcttccatgagccctcctcgcccggttagcgacctcatgcatgatgaggtcgtcgaaggtgcaacccattaatggcttgcttgttggtctctaccagcacgccgagggagt

SEQ ID NO: 89738 - DNA, 334 bp, Zea Mays
tgggatcatggtatacttttggcaggctttccctcttggtgttgtgctcgctctttgatcatgtgcttctgtcgtgtcgatgccatggtgttgtgtttcttttgtatttgtgtagtctcagctccgaggcagagttacctcagtttccacgcagttttcatgtgttgttgacccctacaggttactctattcaaagttatgaaagtttagcttatttggatatacatctacctgtgcgttgaccgcaaacatctacccgctgcgtgtaaggggtttctgcaaagagtaaaagggttcgcatataaatttggtggccaatttattatttcttagg

SEQ ID NO: 89739 - DNA, 351 bp, Zea Mays
gttttgaaccagattcacaaggtacaaagattcagcgaggagcgacgaaaatttcagagccaccatgccgttcacaaccttagttttcatgggcaacgcaggttttacccatcactgcaaaattcagctgtaacaaagatgaattgcggctacataaacaaagatcaatttcactcatacgcttcgaattccatttcgtaacagaaaactttgcacagcgacaagagaccaccaacaccggatggaacgaaacccaaacacagctgctaaccctagcaccaccgacccccgcacgaggaccaggaaccaaaaaatcttgcatgtactcatacagcttgcacaatggtacta

SEQ ID NO: 89740 - DNA, 451 bp, Zea Mays
attgatctcttcgatgggcaggtgtgccgagaaaggggtgggtcaagggacgtctctagttgagagatagggctcgttggttcgacaagctcgttgacctccaaggacgggtcacatcatcacgacgaacgagatcggacatgccgagctagctagcgtcatgaggatgacgagcgaggcgggggcaccgggaaggggtggggttgtgcagtgtcgcgacataaggaatgagacatcgaagcggactggatcaggcggtgtcgataagaatgggactgggccatagtcaaaatgtttctgggtcgattggattgaggagcggggtcatgggtcgttggtcgacattttaaaaagggaagtatacatctatgggacgggaatattatgaatttgatatgttgagtctaatgggccgatgatctcaggttgattctatgggtcaagggtcgtg

SEQ ID NO: 89741 - DNA, 551 bp, Zea Mays
tgtgcttcgactttactactacgtactgtatcagtaccggccgtagcaaaagccggtaaaacccttggatcctggcttcttcacccgtgtcgatctcaagcggccgacttcattgtgcatttctgcccacgtgcgacgtagagctgagaacgggccgggtaccagtaccagcagcggcgaagcacggagagcaatgccaataactgagtgatggtggtgctgttaatttggcacatttcggtgcatgcatacacatgcgccttatctgtttttgtagcattgttcaccaaactagtaagtatactactactagtctctagctgctgctgcgtgattgtgattttggaaacatatatatggacgtccgtccttgcttgtttggccgcaggaaattcgtataattaattaactttagcggttaaaaatcaacaataacatctagtatatcatctatttccaacttcactctacaaacattgtcgtttatagttctgcgtcttcctatttcacactatgtatccactcattgtccagcgtgagggatctcacca

SEQ ID NO: 89742 - DNA, 402 bp, Zea Mays
ccattctgaagagggggtctgtcgggcctaggtctaggccttcgacctcgtgccgtcttgggtcgcctggcattggcccatcagcttttctttgccatttttgtaatgtaaaggggcatatggaattattttgtcatttaaataaaccaagtttcagatttcccttaaatttgttcccttcctttgagagtcgatccaattttgctgggaaattaaaattcttagactacagttcttggttccgctctcccgttgtacctctgatcggtggacctccaaagtttggttgcttcgaagagttcgcctgggcagttttattaaaaaatctgaacagacacctctcgcatccttggagctttcgttgggtgtcacttcaccaaaaccccaaatagttgttagttc

SEQ ID NO: 89743 - DNA, 955 bp, Zea Mays
cgcttgggcggtccctttgtgacgattgtgcccttcctaaactcctttctctaccttctgaaggggtgattcaagggtagaaaacatctatggcaatcaaagtaacatatcttgccaccagcactaagacaaaaacaatctatatctttaccacaataaggacatgtcaatctaccatgcacgttccatccagagaaaataccataagccataaaatcatgaaccgagaaaagatacgcgacccagagattgaatttatgcttcttgaagcagtcataggcttccactccttgccataacttctttaactcttcaatcagtggttgaagcatcacattgaggcgtatgccaggatgctcaggccctggtataacaagacataagaacataaactcatatttcgtgcaaagatcaggtggaaggttgcacggtatggcaatgataggccaacatgaatacaacgcaacaatcatattgaaaggcatgaaaccatcagttgccatgccgatacgaatgtttcttgcattgctggcaaactctggatcaaagttgtcaagagccttccatgcatcaccatctgatgggtgcaccattaacccatcttgtttgtccgtataatctttgtgccacctcatgtgcatagcggtcttccttgagagaaacaaacctttcactctagtagtgagaggcatgtaccgaagctgtttatgtgcaacctttgtcaccaccttctccccatctttgtttataatctccatgaacctcaacttgccatattttaagcacttctcctctctgccatgttccttccaaaagagcatgcaattgtcctggcaaacatcaatcttctcatactccatgccgagaccgtcaaacaatttttttggactgatacatgtcttggggcatcttgtgacctataagaagaacctcactaatcaatccatgagctcct

SEQ ID NO: 89744 - DNA, 474 bp, Zea Mays
ggataatgaacatgctgacgtgcatcactctattctgtgtatgcatatccggacggtctggtgtaaggtgtcgaacgatctgcgacttggctagacagtgcatgactagatgaggattgtctggtcatgtggggtactgtttgggtgtggtgtatcaggctcattgtatctccagacaattcgatgaaaggtgttgaatggtccatgagatgcgtgaacagtccgagattgtactcgagttgtccggtcatatctagaaccagttgtgtgttgcatatcgatggtggtggtagtatactatggctttgatgtgttgcaggtgggggaaagtagtgctgagatgggtgaaaaaaaactgtgcgttgtaagaagcagcttgttttgtgttgacgtaccaggacggttaggcctgggtgatcgaatggtccgcaaagggaccggtggatccaggattatccagattgtccggtcttg

SEQ ID NO: 89745 - DNA, 823 bp, Zea Mays
atagaatatgacttggcctatgaaccattgaaatctctgaaaggccaggtcatagcggattttattgtagaacatcggattgatgatactcataaactggacatatcatacctcactgttactccccgaactttatattttgatggatcggttcgcaatgaaggacaaggaattgacatcatgcttgtttcaccaagtaatgtctccttcgacttctctagccgattagaaacttattgcactaacaatcaagctgaatatgaggcccttttgttcggcttggaactttgaaattgtatgggagtaaaacatgtgaaggcattttgtaattctcagctcgttgtccaacaggtaatagaagagtatcaatgatttgatggtactctaaatagttaccttgaaaaatgttggggcataattcattcttttgacgaattcagcattcggcacatctctagagttgagaatcacagagctaacaatttagcacaagatgcatcaggttatctaataaagcgagggaaatttcacaacaccgaaaatctgataaccggtacatggccgattccccaggtcgcagaccgtccgggtgaaagctccggaccgctcggggttgccaggaaagttctcctgattgattcggctggtaatgaagctgatgcaagcgattggaggacacccataattaattatctatgaaatccaagtgttaggtcagataggaacattcggcctacaactttcaagtatgttttaatgggtgatgaactctaccgccgaacagtcaacgacgtcctgcttaattgcttaggcccaggtgatg

SEQ ID NO: 89746 - DNA, 882 bp, Zea Mays
gctagagcaacgacacaatctgctagacaacatacacgttggcttgcctattattatcacaattcgagacacaacatatatataacaatcacttaacacaatcaactccttcctaacatgagttggctattgacgtgaactatttcccaattaccatcacacaccgcctttcgccatttttggataaccggcaccacacacagctattataatacatctcaagttcattcaacccatcagtggagcactagcatatttcagaaaatttcctgagactacgacgacaaggcatcgatcttatcatgcacataaaagcatcacaagcatatttacgaaacatatcagttaacttgatcgacacactatacatgttctttcgcctttcaaatttttttgcacaacaggaatcatcccacttgctaatgacaccaacaagacctacttatctattattcacaacacgaacacagttacacgccgcattctagtttctaacataatccttacataactcgtaatccaactacccactaacaataaatcacgcacgacaactacacagcaaccggttaatttatttggacaccgcctgcccagcgtaccactagtaccccgtattttgactcgacatataaacatagaggaagcgatgactacttcggcatgtcaccacctctctatttaagaaaagacaattttcacctacaacgactgaacatccccatcgagcacaccttattttactatgtctcgcatgcaaccatattgtggcgtgcactagagacagtaccgattaacttaacgcaattaccactacaatgctcttcgatatacacattcgacatcacagtgcttcgacaaaccccacacttccaatctact

SEQ ID NO: 89747 - DNA, 325 bp, Zea Mays
accgtgagaaagcgaagaggctcgtaatgtacgtgttgcgttggccagagatgggttcaatccctatggaatgagcgctgccccgtacacatgttggcccgtgtttgttatcccaatcaatctccccctggtgtgtgctttcaaaggcagaatatattcgtgtcgttgataattctcggacacccggggaataaaatgggtgtgtacatggagcctttgatcgatgaattggtacgtgcctgggaggaaggggtatggacgtatgaccaagctacgaagacaaacttcagaatgcatgtttggtaccagtactccatgcatgact

SEQ ID NO: 89748 - DNA, 484 bp, Zea Mays
tcctgagcggttccaaaaaaaatattatagtttggaagtacgagtatttttataatatatcgatatgatattataaatttctctatttttctataattaaatttggaatgaaggaaagagattgtaaatcacgagtataattaaatgtggcatgcgagggttggcgcataaggttgtccgcgatagatcatataaaatataggatgtatactgtagattacactatttacagagtgaaacttgaaatataggatcagataggggatgtgataggatagctgttggagacaacctaatgctagatccagcatgcacaattggtattgaccgacgtgaccctatcgccttatcgacagtcgatttaggtttagccgatatggaccgagttggtcagtatcgatcatcgtgctggagtctatgtcggaatccaattaggtccatcgatactggtcgcctcatactaacatggcaactcctgattggt

SEQ ID NO: 89749 - DNA, 621 bp, Zea Mays
cttcggcacagttgcctctgttggagggctcaaaatctctgtcattttcattatttcttcaaattttggcccttcagccttatcatccttcgtttcaactagcccgactgtaagcaccttcggcattacagtcggctcttcagtgctctgcacagtcggaacagtttcttttgttttggtagctgaagaggtccctttgccaaattcaggtatcatggccggttcaatgtaacgcggccggtgagtcagaaccttcatctttttgcccttcggctcagctgtgatggccgaagcagcaacctttcccgaagcagcaatctttctttttaccccttgccctcgcagcgtgtaacaatagtcagggtatatgaagccaatagcatcaaataccctgttcaatcttttcttattccgactcccgaaagctgcggacaaggcattatcctcggtcttggaatacgccccaagtagctcatcgctagtagcttcaatgcacttcagccagtcatcatttggttcatcaaacttatccccaaacctgaaggtatacttcagtcggactaaattaccctcaccggagtcagtgatggtctccttcggcatttcccagctttccacaag

SEQ ID NO: 89750 - DNA, 631 bp, Zea Mays
aaccgctgctacgtgaatacgggaaccaggggagctagagttggggggctcactgcagttgcagaggtgagagggaggccggtcgaagacaccgtgtggcaccgaccagcaatgaagttaagaccgttcgcggcattctctgctgattgcccttgcaccaatacctaggtctaggccacgggcctgctcgactctgatagcaacgacgacgagcactaccctctcacgtcgtcggcgctcagtgatgctgggttcaatacgcaaccgcgacgaccaggaggagggcgatgtgttcgtggttcgacacttttatttaaccagggaaatcagaacaacttcccccgtgaccgacgagtctgttacaggtctgcgcatggctggctgtgaattgcacacggcggaaaattggctcgcaagggacccacatggcggttgcgtgggatgaggaagtggggaggtgggccagccgcaaggtgatgatgtgggccgaggtgagtagatttgagcctagatgtaggtagtctttccccctttttctttattttcttttatatcttcctattttgtttcctaattttcaaatttggatttcaagttcaaatttggtctccaatttgcactcaaattttag

SEQ ID NO: 89751 - DNA, 627 bp, Zea Mays
ccgctctgtcgttttttccttaggatcagcaggccccacggtgggcgatgaaggcctagcttcggcttcagtttgagcttgcgcatcttgagtttctgcttgcctagttttggcttcggcctgcgtttttgtagtttcagcaaccttctttgtagcagcagggcttaaaaccttcatagtttccagcacagcatccagcatgttggccattctcctcctctttggagttgcagcagaagccttttgcaccttaggagggctcagaatttttggtacttgcattattttttcaacctttgacttttcagccttatcaaccttatctttgactggctcagctatgggtaccttcgacactacggtcgcctcttcagtactctatgcaattagagcagtttctgttgctccggctgctgaggaggaccctgcgccgaattcaggcacttcgaccggttcaatttaacgtgcccggtgggttaggaccttcacctttttgctcttcggcgcaggctcagctgggatgaccgaagcagcaatcttcctcttttctgttgccctcacagtgggtagcgataatcgaggtatatgaagtcaatcgcatcaaaaaccatgttcagtcttttcttc

SEQ ID NO: 89752 - DNA, 486 bp, Zea Mays
tggtgaaataacatatgatagggcgttgtggtcttgacttgcgaattcaggattcacaaaaggcacgagcagtcaagttaatgttgcatagtctaaaagagttattgttggaaaaagaattaccttaatgttctagggtttgtattctttatctttaacatgaataaataatttaagtcactggaccatagaagattaaagaaatgaagaatgaagcaccagcacagacctgtagtcctactcatgtcccactgccttgcctagcacaatacttctccgactgtggtttggaggctcgcagtattggcaccatgaccatcttcaaggagctaatcaatccaacagcaagctcaataaaaatctgttaggatgtaacagtgacatcaagaatcgggaacgtagaggggagtgaggacgcacctgcagacccgcttcggagttccctgatctgggtggcttaaatccatcgatgatgtatttctagga

SEQ ID NO: 89753 - DNA, 320 bp, Zea Mays
cccttgccaacccgaggcagcgccgccgcaagccttggcggagccatgccggcgatgcgcccatcgtgaccacccgaggatcctaccctgcccatgactcgcctacgcgtagagatgacttaggtgaattcaatggcggcctccttaccttcaatcggtgattgcgtgatgcgggccacacggcgatgcggacgcctgcgccgagctacttaccggcgagcaatccaccacccagccgatccaatctccacccgccgaggtcctgagaaggtgcatcgtgatccgaagctccaagcccagctacgcctccccaatttgag

SEQ ID NO: 89754 - DNA, 572 bp, Zea Mays
cttgttttccacagcaatagctttgtcaagtaatcgttgaaaggacggaaatgtgtgtgatactagttgatattgtaggggtccaatcaaaccatccagaaagagctcctacttcttctcatcatcctcaacatccctaggagcatatcgagatagctgaataaatttgttcctatattcgctcacggacatacttccttgcttgagggatagaaactcctttcttttaatcttcatgagtccagcaggaatatggtaattcctgaattgagtagagaattatgcccaggtgattttattgacggcagcatgagcagcgcagtacgcatcccaccaatccgcagcggggccagtaagacgacctgatgcgtagagcactttctttctgtccgagcactaagctatgttgagcatcttctctacagattttagctagtcatctgcttgtagtgggtccgcggagttggagaaggttggtggtttgtgactcataaactcccagtgcttatccctagggggagctgctggtggtggtggtggaggcagtggtgcttgttgctgttgcgcccttc

SEQ ID NO: 89755 - DNA, 740 bp, Zea Mays
gtagcctcagccgaaagatccttcgtgttgtctacagtgaagacggtctctgtctgggttgcagctttaacatgttcacagccagtcttttctaaaattgttgtatcccctctggcaccggcgaaggcgcagaaatcaccacgatcgctaaggatctcgtcaaaggcttttcgccgatccattcgatgattcctttgggatcacctctaataaatttttgttcagatgagtatgcacccacctttgcaaaactatcttttaactttttagcacaatccaaggatttttcataatatctctctttcgattctcaaagctcatctacattcttttgcagtcttgcgctagtccattcacttatttcttgttttgctttagccacttcaaaatcctcattcttttccgcaagctttttctttaagctttcaattttggcgctatgaacttcggactacgcagcaagattggcttcactagccttaactctgtctaccaaggaaagcaaaattttatccttctttgcggcttcatttctcagtttaataacctctgaccgaaggttaccaagggctatttggcagctttcgtcctcagcattcttctgtgcccttaaagcgttgctcaggattaagccctacaaaaatgggtaggaagaggatcagcatgatagtaaaagatacaaaaataatctgctcataagtcaacaacatctgtacctttagactattgtaagcgaggtt

SEQ ID NO: 89756 - DNA, 356 bp, Zea Mays
tgcccgaggggaaggccatgcacaggcagggaatccatcccatcccatctccttgcgagagagagctcaccgatcgtcagtcactcacgtgggcgagtttaaagcgcgatcttggtaaccaaggtccggggtccgtatagatgctgtgacccaataatgaagtagtacgatgtattgtacgcagcacgctagtggtggcagtggcgtccaacccttgaaagtgaggcttacccaccaccggcttgtacgatgattagacctgcttgttgttgctgctgctaattagagacgtctgagtgaccattgacacggtgtcactatgcgcaaagccaatggcttttacgacccccattccg

SEQ ID NO: 89757 - DNA, 384 bp, Zea Mays
gtgacgatgatgaagacgacaaagaggaagaagaagaagatgaagaaaacatcaacaatgaagccaacgaagaatagcaggaccactacgtggggttatggcctgtcactgaacattatacctcagtgttcgagacgtggcacttccctaacctgctgcaggatgttctgcatgcgttgggaacctacgtcctacccctgtatgagacaaggcgagtgtacgagcctcctcaggcttgctactacatcactcgcattcatgtcagggtgatggatgcaagtgatagagggttcaggactctgtcagctcatgagtctctaacgccgctatccgcctacactgcttcggtcagcgacgctgctaggcgaaccctatggtcccaca

SEQ ID NO: 89758 - DNA, 436 bp, Zea Mays
taagtgactaaaggatagcggccagagcagggtcaatagctggtggggcagcaagagcagcactggaactacctgcctcatgatcatgtgagcgaggtggcacaggaggcactggtgggatccctagaccctcatcatcatgggaagaagaatcaacaaggacaccttgggcctcgaactgtctgaaagcctcatccttagccctgatatttgatactggatctggcacgggaactgggtcctcaggggctagacgatagaagtcgaactggaggcaagaggcctcgagggtgccctggaactgaggaggcctgatcagctgcgcaaagatgtggcataggtaatgagcatatggcagctaacggcgagcaagaagaccatctaacactgtgtccttgatctcacaaataagaaaatcaatcacatcgaactctaa

SEQ ID NO: 89759 - DNA, 306 bp, Zea Mays
aagccctttgatgtgtattgtgacgcatcaggtagtggtctcggttgtgttctgatgcaagaaggccgagtcatagcttatgcttaaaggcagttgcgccggcatgaggaacattatccaactcattacctggagttagctgcggtggttcatgccctaaaaatatggcgtcattatctgctggggaatgtctgtcacatttatacagatcataaaagtttgaagtacatctttacccaatcggagcttaatatgagacaaaggagatggcttgagctgatcaaggattatgaattagagattcac

SEQ ID NO: 89760 - DNA, 697 bp, Zea Mays
ggcgattttttcaggcaaaatttgttctgtagcttctttttctgtttctttttctccaatttccaaggatttctccttggcgggctctgaaggcccggcttcggtctcgaccttgctctttgcagcttcggctttggtcagtcttgtctcagactgcgtctttggagcttcggcagttttccctggagtagagcttgaactctttatcgtctccagtacatctagtacattgaccatccttttcctcttgggggtcgctgtaagatctttttgtgccttcggcactgtcacttctgccgaagggcttgtaacctctaatatctttgttccttcgaccactatctcttcaattttatcggccttcggctcagctaatttgaccaaggatgccttcggctttacagctggctcttcaatcctctgtgtaagcgcatgttctttggcttcaatagccgaagaggtctcaccgccaaattcgggcactatggccggttcaatatatcgcggccggtgagtaagaaccttcacctttttcctcttcagcgcgggctcgcttggagcaactgaagcagcatccttcccggaagttgcactctttctcttttgcccccgtggcgggtagcggtaatcagggtacatgaacccaatagcatcaaaaactctatttagccttttcttcttccggcttccgaaggcc

SEQ ID NO: 89761 - DNA, 543 bp, Zea Mays
gcataaagatgcaaatgctaaagaaccaaagaaatcccatgcatggtgtctcgcttggaggccatatttattgaaccatattaggagcagagcaacgaatctattcatgaattgccgaaggaggctgatttggagatggttgtgacggaaacagagaaactaaagaagcttgagatgggcacttcagaacaatggatcaagaaataaaagtagttggaagtgacactaaggaagatagagaacaataagaaagagagagaaagaatcagaaaatatattttgtggaggcgtccctactgcttgaagggagcaagggccccgaagtaggcacatacacactttgacacatattcgcgtgggcaattaggcaaagaagaggccaaagagctgcagagttatgccgatgaaatggtatatccctctagatccatgttttttggtggcaatgaagatgcatctttggaatgcatcctaaacacaatggaaattgaagttatatgaacttccatgaataacattggggttcgaaagcttgaatattaa

SEQ ID NO: 89762 - DNA, 567 bp, Zea Mays
gcggcaacgacaatccttggtgaggaattccaagtaacccacccaccatgcgcgcccacagctgaaacaaacgacaacgatgcggactcatgaagcccccgcgccaaaaacttgagaccgcaggtcgatgtgtatggcttctgggttcggcgtcttcaatgcgatccctccccaaggcatcggtggccgctagagcattagccagagactgcgaccaacgcggcccccaacatccctgccgattcgctcagtcgccaagatgccccacgcttatgagcatcacacggtctacgagctttcgataggatggccgaagggtcgcgagcgcacgggtcttatagatagggcggcggcgctcggttcctctcccttctcttggttcactctactcgtacgggaccatggccgcggcatgggattcaaggggcgaggcccagacttttatatccccgatggaggccgaaacatccccgcagattcccgtgctgagtcgctgagattgcgcccagttctgttgcgttcacgtggaggagatggtcctgacagatgtggcccacgcggcagacg

SEQ ID NO: 89763 - DNA, 618 bp, Zea Mays
tacatgctctataataacatcaagaaatataatattttaatttcaatacatatttatagaattgaaactgataacatagtaaataaatggtcatgctgcagatcttccacaagagaatgtctccagaagcaatggataggcttctagaaaaagataaagtgccaaacccatgctatagagtatagactgaggtactgattttccttatctgatgaaccatctgcttggtgctgtgacgatctctaggatatgcgacttgttaaaatgattttgattgcttcgttggttacattagttctactattaccatgcattaatggccttcctgactatcatttggttatctcatgtttctgagaataaaagataaccattgctgtaaagtactaacgttgttgtgcgcttaatctgcatttgtatttgtttgccttattacacttgcttgcctttatcttgtgttttctatgtataagtgtgcaattttggcatttttgtttatctgttactgttgttctctacctacccacgttagataaatgattcacacggcactgtacaggattcaacactggcatgattctaattgaactttacctattactagcatcctaagtgatc

SEQ ID NO: 89764 - DNA, 400 bp, Zea Mays
agaagccgactctgcctccatttcgtgcaagcccgtcctgccgtgttttgtagtcccaaaatctctctccgcggagaaatttggaatcatgccattatgaaacttgggtttcgcccaaatgccattatgtacaaggtcttcgctagttcgccattctcacacgctgtttacagacaaaatgccattgaagagctatttgatacatcaacagagaaaagatcacctgcttggacttttttgcccctcttcgaaatcagaacgtggccaaacagacgagacagcattgcacttggctgttgcgcccaggatgcaaacttctgagtccaaatttcaccatactgtattgagtgtaatgggcacttgtagctagtttggagcttcatcacccaccttttctttg

SEQ ID NO: 89765 - DNA, 432 bp, Zea Mays
gtttcacactttggtcaagttgcatatacctctaagaacctatttaatatatcaagagaggttggatagctcaagatcaaagaatcattcgtttggagccagtttgagcatataagaattataagttagagaaaagaaaagtccaagaaatgagatatagactagttggattgttagcacaaatgtttgtctaagtcttaggaacatcctcaaatatagccaaaatgatttgaaagaagtttgaataaaagaggaaaatttagcttgctgacagagaggcaccggattgtccggtgtgcaccggactgtctggtgggtgccctaaacttagacagagaagcaaagcactggactgtccgatgtgcaacggactgtccggtgatatttatagcaggcaaccagcaaactcaacaacttcgggattttcgggag

SEQ ID NO: 89766 - DNA, 791 bp, Zea Mays
atcggtctttagagcgtcttgggctccgatggccccccgagtctaatagtggttcttttacaagacttattgatatagcaatcccttcagagtgccttaatgttaaggtaccctatatcgatcccctccttgagccagggccaaaggagatccccaagacatatgctccaagatgatggtcctatcatggtgggccccgcagtagcctcctgcaccatgacctttgagtgcatcttgacaagagtcggaggtataatcttactcaaacgttgatgatagatgttgtcggagggaaaatcctccgatcgggtggtgtagtgcaccgaccctgatcctaagatggtcaggggacctagggattgcctgattagctggaagaacacaagaacacaaggtttagagtggttcgggtcaccggagcgtaataccctacatccattgtgagttgtattgcttaggagtctctgtgtgttgtcccattccagactcgctgagacctggtcaggttgttcgctaccgtgtgtgtgccttcccttttataccccaagggaagcacgtacatggtggacaagccccgacaagtgggcccgataaatctaacgctagacatggagtaagtgaagcgtcggtccgtggataatgaatatcttcacttggtcgttgtgtagacctcctagcttgccatgcccttgcctcatctagtaggagcagagcgcaggaataggctgcggcgtaggctgatacgctatgcgtgtaggggtgctcagacggcagcgtcctgtcttctccgc

SEQ ID NO: 89767 - DNA, 913 bp, Zea Mays
tctgtatcttcattttccatggtcagaaaaaagtaatactgcattgaggtgtagactggataaagctcgagggatgatgatatcatttctactgctcccacagtacaacaaatttatattctttttttttcacagaagcagctctgaatcactgcagatggacagaccatcagaaacctttagaaggtaaacacccagagcacaggggagggcacgtgaattgagtagtaaacaaacaccagcagcagccggtgttattagcttgtgagttctggccaccctgcatcagtgcagtacaaaagaacaagctttcacaggcgctagaaacactgtacttattaacaagggataaagttcagaacttggggttaccgaggaggaagaaatgttctcactcacctgcaccacacctcctcaacagagcactgagcacagcagcaagcaattaacaattcaggatcagccagtggcaataatgagtacatcaactagggataaacatacccaaatgatgccatcagctgggctccatccatgccatcttccttccatcttctttcttcccccacacctggattgacaattgctaatattcctttctgatctgaaactctaagaaccacatttttgcagaccacactcgctgattttgcttgttaccaatcgagcacgaatctcaaagacgaatagacggtatggcacagtaggatctacggctagagaacagaagatggtacaaggcactgtacctaatcaaatctgttgtttatcgaaaagaatatcctgcaaaagctaagctattgcttcgtttatttcatttggatccagatctctaaagcctctgtctctgtgtgctataaacaaatcctggggtctcccgctctacaatcccaaggcgacgaggaggtgccgc

SEQ ID NO: 89768 - DNA, 497 bp, Zea Mays
gctggataggaactgctttgctctggacacgctagctgtttggactttgaaattttgaaactttttattcggagatgatgtaacatgacatttgtattatcagagtaatgcttcagtccattaggtgtttagattgtgacatttagctacacttttctgaggcttaatgatggaccattttctataacagatttatgtcttactttcacaaaattattttaaattaagtgaactcagttatccagtcgttgatcacatttctttggcttcctacttggacgtttcagcatttccaattttttgatgcttatgtgcagttagatgctgggtggtaccctctgatctaggtttcctgcctgctgcccagcctgtttagagcttagcaatttttactaggatctagattctttggaattgatattcgacataccagcctctagaagaggcactagcctctacctatgtgcagagatatatccttactggttggctaattc

SEQ ID NO: 89769 - DNA, 541 bp, Zea Mays
aaaaccaaagccgcgcacggagccatggtcgccctaccattatcgcaaacacagagaaagaaaagagcaccgtcgccgttgtagccaatcccgctcatccaccgtcgcttcaacctcggcatggtgcatcgcccgtgggtacagcacccatccatggtctcgccgtgcttggatggcatgaagcgtgaccggaatttctcgtcagggcaaggaaatcaccgccgatgccgtggacagaggctttgtgccatggatagtcattgagaggacctcccagatgttcgtcgggccgagtagaagctttgggtaacaccaatttggcgggtattgcttcggggctaagctgattgctcatcgaaagcacaccgctgcctccgatcgacaccctagcgtggccagtaccttccctatcgtcaccattggtgagtttcccctccacatggtcaccaactcaccatcatccccactctgtgtagcttctattggataggcaaatgactctcatgtgcgcaaacgggtgtggctccggcgagcccgccac

SEQ ID NO: 89770 - DNA, 697 bp, Zea Mays
ctcgagcaggggcggatgttgcccaaatggaatctgcatgggcctcacattagggtagccttcctgttgcgcaactctacaatctttcttctccacgacatcatgtccgttctacggcttccaatcgactcttccccaccatatccagtttctggccatggcgtcacggggtgtgcagtgtacacaccacgtgcccagaagcgaggtgacgcgcgactacacgagtgggggtgacgctacgtacgagggtgaaccagcgaagcaggcgaggctgcgtcttcgacctgtgcacgagcggtcggtcagcacgcgcagccgcctctctcgttgtcgcctcgtgggtcgttgtgctcgtgatcctcttccactccctcgtcagacacagtgacggccaaagaggtatagcctcttcctgtatcttgcccctacgatttctctatcggtcttgaagagttagtcgtgtggctgcttttgtgtttgtgatcgtgacacacaaaccgatgccctggctgtcctatgcagccgatcagactccagtggtgccaacaaagtcagtcataacttgatagatctgagtgcctcgctgcattccttcgtaatacatatcgatgttgttagactcgctgatgaactccctacatccttgtgtccttgagctgctaatttctcttgtattttaagataatggaaattacac

SEQ ID NO: 89771 - DNA, 844 bp, Zea Mays
cataacaaatttcctttgaaaagggtcttggaatgagttaattgcacattggaaagttgttagagcattggtcaacccaaaaggcataactcgaaattggtacaacccatggtgagttttgaaggcagtcttgatctcatctgcctcacccattctgatctagtgatagccagctatgaggtccagactagaaaaatactgagttcctaccaattcttccaggatttcctcaactaaaggcattgggaatctgttctttatggtcaagtcatttgattttcggtaattcaaacaaaatctccaggttccatccttcttcttaaccaatagtactggtgaaccaaagggacttacactcggcactataagtcatgtttctaggagagccttcacttgcttctctatctcattcttatgaaaaggtgagtatatgtagggcctagagttcataggtactgcaccagaaacaaagggaatgtagttatcatattgtctggagggaggtaactgctgtggtacttcaaacagatcagcaaactccaacagtaagctttgaatctcctccttctgatcacaatcctctctgtcttccacaacttccaacaatacaaatgcccagacctcatgtcccttcagccatttatgcacttgcaatattgacacattttgtatagaagtttgaggctaagaactatccccctaattatcatgactcacttgtgcatgaatttcaatatcttgtggtccaagtcacattgcattggactaaactgcctaagccactcatagcccaaaatgacatcaaatgcacttaagggtaggactctcatatcagtgcaaaatg

SEQ ID NO: 89772 - DNA, 320 bp, Zea Mays
cgatgaagttttccgaattctctgttttgatcaccacatcatctacgtaagcttccacacgcttgccccagtgatcggctaagcatgtttgaatggctctctgataagtcgctccagcgtttttgaggccaaatggcatggaggtataacagaaagcaccaaacggagtgatgaacgccgtttttttcctcgtcttcctttgccaaactaatctgatgatacccggaatagcaatctaagaaagacagcacagaacatccggcggtagagtccaccacctgatctatccttgggagcccgaagggatccttcggacagtg

SEQ ID NO: 89773 - DNA, 764 bp, Zea Mays
ggttcgcctgccccaggcgccgcgactctcctcccttgactgaccgaacgctgcgggcctagtcgaaggtgaaccgggtgcctcgaaagttgcgatggggattctagaggctggccatcgtcgccgccgggagggttgccgtccatcgatgggggagggagagggtcccccctgtcgccgaaaagtccaccgggaaggcttctatgctgattttgtatgacagacagcgtatctctgttgctgccggcccaggttccacgatgaggagatccatgtcacggtggagaagaactgggttgaaacaccatgcccttaacatgaaggacgagaggtcagacttctcaaccgtcgccgggtgcagttcagaaatgaggcatgagccatgcagcagatgttccgccgtagagcgtgcccaagcatgaggcggtataccccggattttcacgtccaccagggccgggagggttgctgtcgacgcatgagcacatctcgtccatctcttgaaatgcagattgaaacgcggacctctgaaaagcctgcctcccccgtagaccctcgatactgtgtcctcatcggggagaaacaggaggaagtcttctggcatggcctgatgaatcgccattgcagccacatcgatgccgaaactgagagcaacttcctccagcacctcaacgccctgaacttcaggcctggtgcccaccaccgagacgaacagggcttttcgcaatgctgcttcttcacgcgtcatttccgtcgtaaaagcc

SEQ ID NO: 89774 - DNA, 802 bp, Zea Mays
cggcaatcaccgtccacggtaggagccacagtaaagcgctgttttttttttcaagggaaaagcactactacttcggttccccccactcaaccaaccaacctctctcgctaacaagaagccaagaaaagtaatgctcccctctcctcttctcccccctgcaaaccaggtagcgagacccaaaccaaccggccccttcccaataattgcacgcaacaagcacaagggttctccatgctggtgttaaaggatgaacatggccccctcacctttagaatccctgacagggattgatggcctgatgaatagcaacaaacaaaaatccatatggaaaaaacagaaaatagtttttttattgtcataatacaataagtggatgcatatcatccacaccctcaaattagtataatatggccatgcatatcatccacaccctcaggtgaggcttaggctaattccaactatttcccccctcttttatatccctattcatactttatatttattttttaaataccccctctttcatttctccactatttcttctcctctccaacaattctttctattaagcttcgctttacactttaattaagctatttaactttttgtacgtatgtgtttttgggtttttaaaaatatgcaatatttatagtaccgtgatacacatttttatctaataattaaacttaatatcattgattggtgaagaggtgagattagagaggggtctgcttctctcaccggattaagagagacgacaaagggcaccgttggagcaatatggagggcgtccatacactaa

SEQ ID NO: 89775 - DNA, 408 bp, Zea Mays
gggggtggaggtgtccatgcaggtatgttaggtcttaattggacagcatgaccttccatctcttctgattggtgaggtggtccaaccggtctttcctgatgttgctcacgaatgggcgagcgaggtcgctttgctggccggtcactggggccggccttcttttttacacatttagataataattgatcgaaagtcgggccggttttgaccaactgaccagttgccttaaatgtatttgttttccatgtacctatctctagccgccgtggtttgaatgtacgtggtcgttgcgggtactgagtgtagccggaccgtccactggaatccttcggaccgttcggagaagcttcgaactgtccgcgtctggatgtcggactgtccgtgatgcgcagcacaggttcttgcgcc

SEQ ID NO: 89776 - DNA, 361 bp, Zea Mays
attggtatggctttgaatgcgtgtgagatgttgctttgaatgtaaggagttttggtgttcctcttgtgtcttcaatgcgttggttcacgagtatctatagccccaaccacccatatagccgttggagtcgaatgggctaaaatcagattttctgcatgtgcaccagaccgttcatagtaccggtccggtgcacaccagaccgtttgtctctgattggagcaggttaccgttccaattggtcagaggcaccagaccatgaacagtgaaggtccagtgaccatcagaccctgccacgttgatatagtcgtttgaagattagtcaggcgttgaaccttgtcagacggtccagtgcgcttactcc

SEQ ID NO: 89777 - DNA, 894 bp, Zea Mays
cgccgccgtgaccatcaccgggtttggcgctgattgttgttcccgtggttggactcgggccctgggtataaaaggaagcttcgctccccgtccttatgtccccacagctaggataaccttgggctcgtgtgtgcgcctcaacgggggcagagggtacgaccggagggatggtgggagatcgccaccttcgttaatccatgtgtgcatcaacgatgtggcatctgcgtccagcctaggatactccgcaggtcatgtggaggacgcccgtggaatcaccaagcgaggttgatgtcagggacgcttggattgctcgacggagcaagggcgccaccgcggatccatccttcaccatgggcgaggaactctgctaatcgaccaatggtaaatcgctacctattatgttagctttcctcctatcttcatgtagcaccaaatagatcagggtttggggcctcgggaatggcctcacgggtccccgcgggggcacctccgtatgggctatgcgccaccgtgggtggccaccggaaggatgggcaaggatatgtgagccttccatcgggtgaataagggccaagatcagatccaactcataccacttcgtaggatgaatactagccgccaatcctgatatggacggatacagttgcagcacgcttacctagagccacaaccctaagatcttgatccctcggtctcgagagcacactggttcaaacagatattgatctaatctacacccttggatggtaatccaacggcttggaatgcataccgattcgatgcagttccgatgtaatacaggccctccatctcagatcgcacgacctagattgaggaataccccttcggctggagatcttgcataagaggccctgtgttcctcctcaattaacc

SEQ ID NO: 89778 - DNA, 512 bp, Zea Mays
gtctaacatagaggcatgtacacatggcgtaaaactccataagactacattggctactgagggtcctaaagcacttatgtgcatatcttatcggattgttcttcaatttttaacaaggaccgacttatgaaccctactcgcttccaataattattgggctataataatgctcatataagacctctaatcgatcaacaagacatttatttatctaatgggaatggaatgcaatatttgacaaagcaagcatcacattgccatacaacaaaaatcatgacaacaccgacagacactatccactaaccgtttgaaaaactcaacttacttctcgcttgccattacatcactcctcaatcacacgaccatcatgagcatccttcacacgattatataatagtgacttaagcgtcgtattacacaatacatacatctttcctcgccgcgaatataaccatattacggcatatacccgtacacctcaatcaaatatcttacgctaccactaccataat

SEQ ID NO: 89779 - DNA, 955 bp, Zea Mays
caaaaacatgctaggggcagtgccgggccagggaagtgccgcgcaggtgggcggcagtgtcgtgcctcaaaacttgcacaaaatttcctcaaacttgacagatagtaagcgtagaggaagaaaagtggttttgggaagtatgatcgtgaacaaatcaaaactccatgcacagatctagaatcccgaaaagaagggagttttgttggggtcttctcaaatgaattaaaaacaagatcaactcgaatgaagaccaaaaactgctcaaactgggactatgcagtgatccaaagagtatatctcacctcataacaatccccaatatcaacgacatctcaagaactcgatggttcttccaaaatccaaagagagaagggaggaatcaagcgtgaagacaaaattgaataaaaaactgcagcacacaaaaactaagcatgattcgaccaaaatgttgtggatggataggccacccttcctcaaaatgatgaacacaagtacacatatgaggagttcaaaacatctgtggatcccaggctaaactacagcaaaactaggaaatggaacaagggttttctaaacaagagccaaagagatagccaaaagagatggttgcccacaacgacccacccatctatttatagatgatcatttcactagtctaaatcaccctagatacaaagagcacattcctttagccggggatgaaatggacgaactcccaggattctcatctgacggtcacacgctccacatgaagttgcttcgcctcagcacacccttcgtgatggtgtcacgtgccgcctctgattcctttcgaaaccgcatcgccgagttttgaggcccaaacttagcaaaaccagcagctcggggtttttgaggctcaaccatcgaaaccgccgtgagtagcgcaccacatgtgcgtcctccatgtcctgaaagcgtgtcccgccaatcctcg

SEQ ID NO: 89780 - DNA, 434 bp, Zea Mays
tgactgcagggtgattggccacgagaaacgtacccatcataaccagctctccctccggtgttgtggccacttgtgtataatagattcacccagtcttcttcatattcttgcccgctgcattatttgtcgtgttccccttgccttggcttgaactttctgggttctgctgataattggacttgttctgcttcagatatgggtagtctttgatgaaatgtccaggcttcccacaattgaagcagtcggttgaagaactcgggagggcggggaaacgagcaccaggggcactcggctgagttgttgaagtgggggcagtggcagggcggatgaatacaggctatttgaaggggtaggagggtggacgaggcgaagaacggttttgattgaaaggtaagattaccaacctttgtcgcttttcaggcccctggttggac

SEQ ID NO: 89781 - DNA, 668 bp, Zea Mays
gggggagatgatcttcggcgacagatctgagcggaggcagagagctagagaccggagagaggagagggagaccggagcggagagaggacaaatctgagcgaaggcggagggaccaagggaggagttcacggcttcgtgatgcgagagggagagttctccacggcgttacagacggacgaggcatttagggtttagtttagcgcgcaggcgcaactttgggatatggggggcatatggagcattgacgcttggctggctgggcctagctcctgggtcatgccaccgccgtgccagcctagttaactgtgtcgaacttggaccgacactatgggccgatctggtggcccaggcacgacactatgtatgggtcgggcccgacactagcactatatggaccggggcgtgccgtgcctgggccgtgctttttagtgtcgtgcccgggtcggcccaccgttttagtgccatatggccatctatacatgcatatgaaggaacaaaacttgttacactaatagcaagaactaaagatgtcacaaacaaagatagttgttgtactgttgtgcacatagaaatccagggcgaagtacgtttatcctaaaatatgaatgcataagttgttttaagagtaacaccacactatctcataatcccatctagctccaatactt

SEQ ID NO: 89782 - DNA, 680 bp, Zea Mays
ggaggatcgcggacggtctgcccgcaaggcctggacggtccgcacatcccaagacatggcacttttcaaacaagcttttgaaaggatttttaactcatgaaatttgaagcgttgttagtcctcatgcaaatacaaccactagatgctctatgaggcactaagctttacacagatcaaagtcattgacccctcttaatagtacggctatctagcctactaatccggtcaagtatcttctctaaactcctggagaccggcaaaaacaaaacctatgttatacctttgccttcacttgatccacaaccaatgcttatgaatctccaagatttcctgttctatgtggtccaaccctgcattcttatttctccaagaaccgttagtccacaaacaattgtcattaattaccaaaacatcgctaaggggcctagatgattcacaatctcccctttttggtaattgatgacaacactacacattatgttcaagagaagttttgtttttcaaatctccctcataccttaggtataagaaggatttgagatgagtttgataagacttatctttatttgaagtaccgtccgagataaaactcataatgtaggaaaagctccccctatgtgtgtgcatgatatttcaagctgaagatacaacacacataatcgatcggagttttgatggag

SEQ ID NO: 89783 - DNA, 414 bp, Zea Mays
tggactcagaatttctggaaccatcactattttttccaattctggctctctggccgcatcatctttggcttcgtctggcccgactgtaggcaccttcggcaccacaatcgatccttcagcactctgggcggcgggagcagcttgttctgctttggcagtagaggaggtccctttaccaaattcagacactacaaccggttcaatatatcgaggccggtgggtcaaaacctttattttcttgcccttcggcacagctggggtggccaaagcggcattttttctcttttttccttgctttttcaaggggtagcagtagtcaggatacatgaagccaattgcatcaaaaaccctgttcaatcttttcttgccccgaaccccgaaggctgaggacaaggcatcatcttcggcccttgt

SEQ ID NO: 89784 - DNA, 507 bp, Zea Mays
agattttgtgccatcatccaggggatcgtggtgttgaatttggaggttgtggggggttgatatcccaagggttctcacaaacactaaaacatatcatgggttgtctgatgggcctcccatttgttcgtcctgcgggatgggccagcaggttataatcaggctagacgaatctgaaccaagaagacaaagaccgacgtccgagttatgcgctaccgaaacattgatatctcatgtgatgcagttgcgagcacctgaagagctaagcattcaatgatgactcagacgagaaagcgacaaagaaggagataactagagtagatggtgatcacaacttataaagggataactctctggtcatgtataaaaggtcgagggggacccctacaaaatcatctcatctcaccccgtctcacttgacaaccatcctcatcgacaacacctgggcattcacaaagctcacttgtaatctacatactccacaaaaaacccaatatacagccacaacag

SEQ ID NO: 89785 - DNA, 454 bp, Zea Mays
catctatccaccgctctacttttttctaaggtgccacatgtgaaggagcctcttccttcacatcttgaagaggctgggtgagcaccccccctacttcactcttcaaattgatgcattcaattgtggcggtttctcccctcactacaagcgtatagctaccctacgcgtgcttgtgtatggtagctttcgtgattctattgatgaggacatcaaaactgccttagagtgtctcaaactattttgtatgtgttatttcatgttttggtgaggattacaggcgttgtactactattgacgaccttaggcggctgttagctagggggaggggtaaggagatctccttgtataatagggagtatagattgcatgcattagaagtggaggaactatccattggactgagaggacaatttacaaggagggacattggatcctcggccatcatactcgaggc

SEQ ID NO: 89786 - DNA, 1183 bp, Zea Mays
cacaaatatgtgagtttgcaagttaaaccctgagatttggacttatgtgcaaaagagccacactctttctcaaatgcctaagtctgatttcagtgttgagggctcaactttggagcattgtatcttgcaaattctagggtttttgccctaggtcaccacatcaaaattatagcctaatcataggagaacaactttgcttaaaggtgtgagcatagttgctaaggaaaaactggagataattgagcctgaagttggactgtcagactgcttgaggtctgaaattcagagtaacagtgtgatgggatgaactttgagctcgattttgaatgggatccagtgactttttgtgggagcacattgtatcaaagttatagatggattatagctctacaactttgctgcagaaagttggcataggtttcacataaaaattggagaaaatgaagctccaaaatgctctgtcaggatgtctgatggagttggccatggtacagtgctcgtgcagatcagaccgccagcgcaaaatgtccaccgccggtgacccctccgccatgattcacgtcgctggccttaagattcgtgtgcggggtggattgataacgttgcggggtaagaatccttgccgacggtgagctggaggtcactccggtgacatcaccgtggctttcttatccactttgcggctgagcagattacctcgccggtgaccgccgcctcccggccatgcgccgcgtggctctcgctttccaccgcaccgccgcgacttaccctcgctctccgtggctcaccggagtaactgccacggcagtagacaccaagccgctgcgccagtgttcttcttcctctccggccgccgcgcgtcttgctcaaaattcgcggccaccgcccgctcgcactataaattgacctcgcccgtagctgcgccatgtcgtcgtgaagctgtagcacccactcccaccctcgatcgtccaccagcacgcacgaatttccaattccccccaaatccactctccaccaccgtgaaacgagcttcaccgtcgccagccctttttttccggtcagtccaaccctccctctccctcgtttaagctctctcacatgtctgcgatgcttactggaccgtccaattggactaggggtcctctggtcgccgggaacacggcagtatagccgcgatgctcac

SEQ ID NO: 89787 - DNA, 529 bp, Zea Mays
gtgttagtcactactccccaacaaagcgaggcccgatgctgccacatgttctaccacacgtgacataatccatcgtggaaagcccgatgtcagcctctacacacggtaccacacgtgttacagcgggagtcatgatggcagcctaagcacctctacacacggtctacgccgcaacctactcttgtgctctactccgactagacagagcaaaggcacgacaaaccaggagatctacacagagaccaggaggagatatcagttcaccatggaccgacgttccactcaccccatacctagcattagatttactgggcccacttgtcggggctcgaccaccatgtacgtgcttcacttggactataaaagggagggtacacacacgatagaacccagtctcggagggagccaactcaggcttcaaacaacacacagagactcccaagcaatacaactaccattggatgtgggtattatgccatcttcagcaggctgtgcataggatcgtgtaaagtactattttgcactgtag

SEQ ID NO: 89788 - DNA, 500 bp, Zea Mays
cacccatcttcggatcaaaacagctccaattttcatatggtaccaagacttaatatctgcagcaacattgtagagctacaaaccagctacacttcgtctatagggattgaactcagttgagcactaaatcagggttgaatcctaggccaaagatggctctgttacactgtaagcctgaagttcagagtttaatcagtctgacagccagactttaggcttaattatctccaaaatcttctcaataactatgcttacactcttaagcaaagttgttctcctttgtttggtctacaagtttgatgtggtgacctagggtaaaaaccctagaatttgaaagatacaagggctcaaagttgaagcaatcacactgaatttcagacttcatcaaatgagtcaagtgtggctcttttgcacttaagtccaaatctcaagttttggattgcaaaccctcatgattgggaaccatatgacttaatatgctttaacgtagtagttttcac

SEQ ID NO: 89789 - DNA, 273 bp, Zea Mays
aggtacaaccaaggatgaggttacaaactcgcgagccaaagaagatgatacgaccaagagaaataaggtatgagacggaagaggggcaattttaaagggcaggtatgagacaaacatcaatgtaggatatagaggtgtcaagggtgcatatgataataattaaaagcataacaaaaggatatagttaaggcaagactcgcaaaacgacaaagtggggaaaacagtcaagggtaagataggtaaggttccaacagaagggttgaagtaaagatt

SEQ ID NO: 89790 - DNA, 512 bp, Zea Mays
gtcctgacaaaatcgatggcaccactggagcgtgaagcggaggaggtggagcagactgaaccggaggtgctgagataccagaatgctgaagcataagggccatgaatgccctactcttagcccgatcctgaagtaactgctgctgaagagcatcctgcctgtcctgcatgctctgaaacatcgagagcatcgtctcggataaccgtgcctactcggctgccaggttggccagaatagtcgcaagagcagggtccatagccggaggaggagcaggggcagcacgagaactcccagcctcatgatcatgtgagcgtggaggcataggaggcggaggcggaggaggaaccccaaaatcatcatcatcatcatcatcatcagctgctgtaccctgagtgtcaaactgtcgaagagctgcatcctcggcctgagagtcaaacacagaagtagtagctggcacaggaatctcaggagcagggcggtaagatccaaaaacaaggcgtgaggcctcaagg

SEQ ID NO: 89791 - DNA, 568 bp, Zea Mays
cggacagttcagcttctgaggccgaatggtccggtctttcacaaaacagttcggtctttaaggccgaacatctaccacagcatagaaacagtatcacggaggatccagcccccgagaccagagagtccgccataacacaaagatcgtctgattcctctgtgggggacatgatagaggaattcagagatctcgataaactaggacaggggtttacatcggtcgatcctttagaggagatcaatataggagatggtaaaactccaaggccgacttttataaacaagactctggagaccgattctagaagtgaaatgatcggtctattgaaggaatattcggattgctttgcttggaattacactgagatgccgggattaagccgagagatcgtagagcatcggctgcccattaagtccggtttcagacctttcaagcagagagctagaacatttcatccagatcttctcccacgaatcaaagacgaaatccaccggctgctagaagctaattttattagaccttgtagatacgcagagtgggtctccaatattgtgccggtggagaagaa

SEQ ID NO: 89792 - DNA, 371 bp, Zea Mays
aagtctactattaagcctactaatcttgttgtcatgtagaggctcaagtacattgatgaaggtgatgatgatatgatttgctttaccgacgacaacaccacccttgagcctaaggattatgaaatcgtggtttttagtagtttctaggctaggcttcgggtgctgatgcacaaaatgattactgaagtgctgaagaagtatgaaatttacatgcaccagctgacactaaatacagtaggctagctcatcgtctttatttgggtagtgcgtagttaaggtgtcagtgctaatgccaaagctttttgccggattcatgagctacactaccagacaaaggctaggcctttagacaagttacacaataactttgg

SEQ ID NO: 89793 - DNA, 379 bp, Zea Mays
ggcttgaagttattcgtcctattggacggtcgaaaatttcgaatgcctgttttgagtggtgcattatagatttgtggtgtgattgtttctcatccgctaggaaatcatgagagagttattttagtggtggatcattagagaatctgtttggtctattggaagcatagcacatctcactatcggttttagatgtatatagcagcttagaattctgatctatgcgttttaccaaacaagaaatgtgcatcagaagaattgatctgctgcagagtttatttgttggccgatgccaaagatttttccctatcaaattcattgggaggatttttgcgacttcatcctatttttgcaaccatgtacacgatatgctggagacagc

SEQ ID NO: 89794 - DNA, 318 bp, Zea Mays
gttgtgcgatgcgcctataaggtatggtggctaagcgcagggaacaagggaagggcgaggacgatatggggcgagtgggtgctggggaagggttactggtttagggttttttcattattgggcaagcacaagccgacaagggcactaggttgttgggccttgcctcggccttgggctgatgggccttaccttggccttgcaatgagactgagccgctgaggcatgtccacctgtggtctggagggaggttgggttcaagccgtgaccgtgtggcactggtgagcatgtgactacgtgagtcttcagtttaggtctttt

SEQ ID NO: 89795 - DNA, 1004 bp, Zea Mays
gtactattcgcctatctcactgatagttgcacaaagaccccctgtacttttgtttcttcacggctctaggtcctcgatggtaccgcgtcgagcatgtggccggagtagcggtttcccgacgacgacgacccttacttgaggcaacaagcactcggacatcgtgtgcaagtctatccgagcatatgccctcacccaattggagtggtccgatcctaattgatgcttgttcatggccacggtggcgctagagctccggtgagcgtgttccgtgcaacaaaatgcgatagcgtttaaattgaagcttgggcaagtttcaccagaggtcgtgtacacgcgtgaatttggacagagcgggtgtgggagagtgggtcgacgtgagtgcgctctcggaagtgtttcgcggcggcgaggtgatgttcttgatgccctatcgaggtagtgttcaatcggttgaaccgatgagctacgttaacattcaaggatgctaaaacatggcatagaggggtatgaacagacctgggaatggctgatgacggcagggtgtctcacgacggcgggagtgacctgatttgggggaaatcaagtgactgggggctatggtgcacgagagaggctaacttagggtggtatgagcgtgtaacaaagaggcagagtgagggtagtgctcaatttaaaggagctggctacgtgcttcgccaatttgagaagaagacgatcacggcggcggtgggatattccactggacgagttcgtcgtggcgcctgccggtacaacgactcaagggcagtaactcccggctttccactgttatagctacatggtaaaatggtcacggtgtggcgcaaccgcgaaggacggcggccaccacggcgatgatcacccggccacatcaccgtgcaagtgggtacggcgaactgagcagtaacaggacccgagcgcatttcttcgccaagatcttttacctctggcagttatccgcacgccactgagcacgaatcacaacg

SEQ ID NO: 89796 - DNA, 483 bp, Zea Mays
caatgatcaagtgatgataaatggaacgaaactaccatggtccagattaatcatgaaaagacttagcatggcgttacaagaagctcgaccagattcttgtataccaaagtttggcaagttcaagattgcgcttcttcccaactgtccaaccatgcaaccaggctccaatgattgtggttttttgtcactagcttcatacgatgctatgactttgatgatggcgacgtctcagaatttgttgtaccggtacgttactaaattccttatttgttactgaataaattcctttttcatacaatttcttaacattaaatcaactattatgacaattgcaggatgaaacaatggaccaacgtgcgtttgttctatattacctgacctttcatcgcaacaacagggtttaccccttccctgcagaactggtgcctttcaagtatgttctaaggaaacgacgttgtttaaaagccaatacctagatatcat

SEQ ID NO: 89797 - DNA, 740 bp, Zea Mays
gatgtagactcatgtggatggtccctaaaccaaaaaagcgcatcattgttctcttgcagtgccgatgccagatcactgctggactgaatatataacacatctattttgctcaactactccggctcatgcttctatatatgcaggtactatatagagcttgtttgctggtcaagtatacaccacaaactgttgcggactatcaaacgcctaacttttcagcccgtctctataaaaatcgctttgatgaaaaccgttcaaaatcaacgtgaacagacaatcgagagtacctggcctctggccttgtaaacttgaaaaggttaggttttgtttctgaaaagaggtggagctttcaactttctttgcttgaacaaaaagaaaagatctatatagatatatccgtgccctaccttaccccaaaaagtatggccacaattgccttaatttatcatctagctatatgtatgtggtctcgttgaattgacacacatttataacgatcgttaacaatcaacactagctaccttgtagatttctttgacgactcaactaatgatgtaccgttagttatagttgggttctagtgtaaattaaagttggccatcagggcatatagaagtcgtggcactgttagcaaacttttacggttagtagattaaggagggggaaaaaaggcaccacacacgcaaattgatagtgaagtacatctgtcgctttcactgcatcattgtaaatatcttttc

SEQ ID NO: 89798 - DNA, 441 bp, Zea Mays
tgcaccgatgttggttcaaccagacattgagaagtcgtttgacgtatactgtgatgcatcggacattggccttggatgtgttttgatgcaagaaggtcgagttatagcttatgcctccgacagctacgccgacatgatgagcattacccgacgcatgatttggaattaacaaccgtagttcatgccttaaaatctagcgtcattatcttctagggaatgtatgtcatttatagactgatcataagagtctgaaatatatttttaccgagttagaattgaatatgtgacaaagaaggtgactcgagctaataaagcattatgatttagagattcactaccaccctggaaaggctaatgaagtgccgatgctttaagtcgcaaggcatcttgtcactgccttactgcacggttgtgtgacactaccttatgctaggaaatgaa

SEQ ID NO: 89799 - DNA, 652 bp, Zea Mays
gcttcatcccttcacagcacttaaagtggcacaactattcatagctcacgtgtacaaattgcacgggttgcccaaggcgctagtgtcagacagagacaagatttttacaagtactctctggcaggaactgtttcgcctttctgacacaaaactccaaatgagcacagcatatcatcctcaaagtgatggacaaactgagcgggtcaaccaatgtcttgaaacctttctccgcagttttgtccattcgtgtccgaacaagtggagcgcttggttacctcaggctgagttctggtacaatacttgccctcattcttccttgggcatgtctccattcgaggtactgtatgggcgtgcgccgcgtcacctgggaatacttcctgcagatgcaatcaccagctctgacctgtccgaatggatgtcccaacgcgagataatcctacgcgtcatcaagcacaacctattgagagccaagcaacgcatgaaacaccaagctgacaagggccgttcagagcgagaatttgcagtgggcgacctcgttttcgtcaagctgcagccttatgttcaaggatcagttgcgcctcgtgcttgccataaactcagcttcaagttctttggcccttttgaggtcctacagcgggtgggtacagttgct

SEQ ID NO: 89800 - DNA, 309 bp, Zea Mays
gcaccctcacggtgaatggcgaacacgccggtgatagccgctcagccacgtcgccggtgtgccctgatgaaccatcatgcacacagtacatcccagctcatccgcggcaagatctttcaccccgtgatcgttatcctcgtttaattcggcgtgaatcacggcgatagcacgaatccacgcgcgtggtcaccggtggtgaggtctgtgagctggcgatttgatcagtatattgtaccatcgcgaagcttcatcagttggcctgacagagcatgcttgggatcaattttgctccatattttaggtggtgac

SEQ ID NO: 89801 - DNA, 771 bp, Zea Mays
acatcctaagcgtcatataacacagtttttccatttttttaggaagcgccaaatcagcaagcaagctttgtttttgggcacgaaaggcagcaagctaacattatagagtgattatattacattcattacatatttattcgggaacaaatagcatggttagaacatacgagttttttcatttcactttcaacaacacaaaacaatacaaacattggtcgaagagggctaggtcagttgtaagtgcttcttttttctctccaaaacacagctgaatatggatgcgtggaaaacattatattctaaggtggaccaaggacaaatttgagatcgttagtttttctcaaaaaaaagaaagagagagaacaactctttagaaccccgcatcgaaaggggcatctttgtcgtgctcctacatccataccaaatgcagcaccttttcccacccgtggaatcgattcacttggattcacattcactcccactctcacaataattgaaacctctgacgaggaaatgtaaaacgcatggccgggcgatggaggagacaaacaacagtacctcaatggtggcgagcgggtccttgttgagccgtttgaggtggttgcgtacctgctgccgtcgcactgtagctgccgacggcactgcctcaacgtcagtggctcgcctctggcattccctgccgcctccgcttcgtcgaagaagagcgccgctaccaggccagtggaagaaagcacgtccccgttgctgccattgattcagtttcagtgtccg

SEQ ID NO: 89802 - DNA, 613 bp, Zea Mays
atagaatttgtgtttgagcacggactcactctaaatggtgaattgatgatacttaagcaggggtttgagacagagagttatactagtttagtcttgcgccctagtccagtgtagtattaatcgtagtattgcttgagaactatgttacaactggtgtgtgtgtgtgtgaagatggacgggatcccacccttttatagctcaagggtaggaacttatagtggggacttgtattctactaagtggaatgttgcccttgggtggcgtagtccttctaacgtcattcgtagagtcgtgcgcagatgtactctcggtatggtgctccgcttcatccgcctagtatacgagttcatgtagcaagtctaatgctgtcatagtggctcttggcgagtcccacaggtagaattatggtgtgcttcgaggtcgtgcatggtgcaacttcgtcttttgtcatgaaacttgcatcactttcctatgtgaataggtgtacacccagtatggtgtatcctctcatcctttttggtatgtgggtcactgtagagactctggtgcttaggtccccatgactgggattgattggccccacaaggctacgaggacgcacccaacactatat

SEQ ID NO: 89803 - DNA, 732 bp, Zea Mays
aattgttcaagcatccagagcataattattagagacctcgtttcacacataaatacatagataaacttcgcaagcccaagagccttaactacaaaaagcactatcttcttcccaagcattaacttctccccctttttggcaccaagcaccaaaaagagagggaaccgcagacttaccatccactagagccaggacctccacaagagccaggagggggtatgaggggaaaagctgctcaacccaatcatctgcaaaaatcgactcgcgaggagggtcatttgcagggggataggctaaggaagaaggatcctaaaatggaggagggggatttgatggaggaatgaagtgggagagagagggcagcggcggctcaagaggcggtggaattgggtagagaagagagcgatgagaaagaatagcacttaaaacctagtttccctcgacctcactacgtagacccggttgaaccgaggtccaactccggttgaaccgcctgctacgctgaggcctgccagtcagactaacaaacaggcatgcagactgacagacagtcgactggtcaaacccggttgaaccgaccctcaggttcaattgaaccggtttcgactagagatgaccccagttgagcttgtggttcaaccgccaagctcaacctgctttcgctagagacacttttgattgagagtttgaacacggcaactcatgtgcccatctcaaccaaggagaaaaata

SEQ ID NO: 89804 - DNA, 576 bp, Zea Mays
ctcgatcttgtccttagaggtaagacagaacaaggcatgtggcggcttgctgttgtcattgagcacttgggttggtcggtcataaagcattgctagttctcttcgagttttcagattctcctttgttttttcaaaattcatgcaggtgtgtatgagggcttcagcaacattactttcttggtgcatgacatcaatgttgtgcataagaatcaatgacggcatataagggagctcccacagaccacatatatgtgtccagttgtggtccattctgaatccttggtacttgtcccccttttcatttagcacaaggttgttcaactaagcatatattattgttgtgtttaaacgtttaggcagtcctttggtgaccacggtgttctttataaagtttttttatcgctcctaaaggggtgtttcctgggcaaccagcgtcgatggcaatcgaagtaagtgatctttccaccatgagcaagacggaagcaatctgtatctgaaccgcaatatggacatgtcaatctatcatgtgtactccaactggcaaaaatagcatacgccatgaagccatgcaccgac

SEQ ID NO: 89805 - DNA, 533 bp, Zea Mays
cgacgattgctcttttgttcccgcctgcacgccatcatcttgtgtagccaccgagctctccaggtcgacgaggtcctcgatctccttgtccctcatcgcctatgaagacaacatatcaaagcattagaaatcagacaaaaagcatcatcccccaacaaaagagcaatcaatcacctgcgctagcgcctggccagccctctctcggacgactccacggccgtggggaccccacatctgatcgtatagcgcctcgatcgagcactttagcatgtcgtcttcgacctggaatactccctagtctaagcctttgttgctttggttaaaggttttgaagtgcctacaaccctcacgaggcaaggcattcgctgcccctttgtaggtaatgagggaggcgtaagacatgagtcccaccgtgatagacgggagggactccaactcctcttgcaaccagccgaggaagcgggtccccacctctccccctgacttgtcgaaggggccgtctccgcgcccagatcgtgatagacttcaacaaa

SEQ ID NO: 89806 - DNA, 1425 bp, Zea Mays
cctgattgagaataaatgccacatattcacagatcacaagagtctgaagtacatcttcacccaaccagatctcaatctcggttagtgaagatggatagagctaattaaggattatggcatcgaaatccactaccaccctggaaaggctaacgtagtagctgacgccctcagccggaaacctttcgggaagaaagcaacaaacttcctagaagactagaagaaagaatcggcacaactgaatgcttatttgggagaaaatggcagtatggaagttaaatcgatactggaagatctcattcgcaaagctcagcgcttagacaccgagatagcaggacttcaaaaaagggtagcaaagaacaactcccagatatcaggacagatgaaaaggggaccctttggttcaggaaccgtctgtgtgtaccaaagggagaggcacaagaaatcctgctagatgaagcccacaactcagcctattctatccatccagggtctaccaagatgtacctagacctcaaagccagatactggtggagaggaatgaaaaaggagatagctcagtatgtggcctagtgtgatacttgtcgacaaactaaggcagaccatcagagacccgcaggcctactgcaaccccttccagtgcccaaatggaagtgggaagaaataggcatggacttcgtaattggactgcctcgaacccaaaaggggaacaattctatctaggttataatcgaccatctaaccaaagtagctcatttcattcctgtaaagactacctatagaggagccacccttgcctggatatatctcaaagaaatagtcagacttcatggaattccatgaagaatagtgttagacaggggaacgcaattcacctcaaaattctggttgagccttcaacaagctatgggcaccaagctagacttcggcaccacctaccacccccagtcaaatggatagatagaaagagtcaacaaagtcctcaaagatttgttgagagcctgtgtgctgaccttcgacagagactgggagtccagtttgccgtatgcagaattctcgtacaacaacagttaccagtccagcatcaagatgtcaccttttgaagccttgtatggaaggaggtgccaaacccctctgatgtggtcaaatgtaggggaaaagaccctagaatgacatgccttcatcaaggaggcagaagagaaagttgccctgatccacaggagactactcgaagcccagagtcggaaaaagagttacgctgacaacagaaggagagaactcagtttcgaggaagaagattttgtctacctcaaggtctccccaatgcgtggagtcaaaagattccaagcaaaagggaagctagctccgcgattcgttggcccctatcctatcattggaagaataggaccagcagcttaccgccttcag

SEQ ID NO: 89807 - DNA, 315 bp, Zea Mays
cagggaccaagtcagaatatccccagctagcatgtccagcatagcactcatctctgcatcacctggactcataggcatctcaaagtgaacttgcctctcatcattgggaagaaaaacaagtgaagcaaccaggacctcaatatcttcgagagagggtcacactctaagacccaaactactatcaccggcaggaggactggacacaaaatcgaaaaaggacttagaaggtggcagattccaagcagaatatgcaacaggagcaccaatatttgatactttgcccctcaatatcatctccagtcggctcaccaaatc

SEQ ID NO: 89808 - DNA, 725 bp, Zea Mays
agtctctgcttctatgttttaatcttttggcttcgctttggtcggaggggtggtagtggccttgaagataaagggtgattggtgcccgccagtcttcggccattatcagattgattattcgatgctcgtcggtgtcttgtgttatttacagacccttggggtttcttacggctggtgtaccgactatgtgataaaatacatcggatgacaagggttcgcccttcgctgctgctttggctagtgtgtcggcttcttcgttcttgttccgctctatatgttgtaatgtgaaacctttgaattgtttttctaggcatcgaatagtggcaagatactgcattagtatgggttctttggcggagtaatctttttcgatctgtccaccgatgaccttggaatcagttttgataatgcaggtggtcactccgagggctcgcagcttgagaagtcctaagatgactgctttgtattcagcgatgttgtttgtgcacttatctgattctagtgcaaagcggagacgcacgacgtatccgtatttgagtccggcgggtgatgtgtaatacccaaaaatgtgcacaatgagaatatagttgatctcattattttgtgtgccatatatttatcataaaaaggagcataccaataattaagagtgattaactgaaacaaatgatactaaaataaaagaatgtgcatcatgttggagtttatatgtttgtgcgttaaat

SEQ ID NO: 89809 - DNA, 712 bp, Zea Mays
cacaattcttgagcaaagcaaataacttgtcatgatggtttggaggccttgtcgatgtgatattaaggtcaaaccagatccgttttcaaataagatttccattaaatgctcattgaactcaaattcactacctgtcgagtatcgtaattaggggtacctaaattacgtccctaaatgcgcttaatcccgaggtttccgccaggcacataccctgaggacaataatgtataaaccatgactcgtctgaggcccctgtcagcagtcacgcatgaccccacctcacctgagcctgccctcggacaaggtacgtactcgagaaaattctcgtcccggccgaggtcccctttacctagaactaccgtctccgcctcgcccaagcccgtctcaagctaggaagacaaccccgaggtaggtctcagccaaaggtcgcatgggacatgagcatttaatgcgcatacctatcccacgcagcaccgcaggagaacaggagcaacactataggactgtggtcctgtcagctttcaccaactacgatgtcgtatgcctaagtatagtggctactgttcccccacgccgcctgccaacttctgatgggacacgcatactacaaagcgtgggctggacctcaggaggaaactatgcctcgcccgaagccggccttagcatcagaacaaactccgcctcgcccgagcccggtctcggctacctactc

SEQ ID NO: 89810 - DNA, 716 bp, Zea Mays
aaccatagtcttatagaggaaagcacatggagcaataattgggatcaataaacttagttgggtcaaggaggttcactagggtacaaagagggcacacaacatggaggaggagcctaagtacactgatgaaatcatgatgaggttgtgagagaaagagaatgagagagagaggaggaggagagttgtgcaaactccttccttaccatcaagtagtgattgacagatgcccatgagaggtgtggtagcaatcgatacatttgatggtggaggctcttgctccgatcatggctaggccacgtaatggatgaagggcgaggctaggggtgcacacggatgcatgatggaagacattggtgcctttggcctcttatagggtggctacatgcaatgaaaacggaacaaatcctaagtgaaataggattgtgccagtgaagttaggttcggttacaaccagaggggatgtgactgataagtagcccccacctataaacaaaagaaaaggtaggatcaatatgtcatcaagagcaagggcatgcgtcgtgtgggtcaacggtccacatgttaggccatgcagaaaaaggtacgtctagagggaggggcatgtatgctacataactagatttctaggctgagccacggtagaggcatgacgatgggctaagagagagagaactttccttttttgttcaatctccaataaaattttaaaatatgtt

SEQ ID NO: 89811 - DNA, 387 bp, Zea Mays
agaggttgcacccgcgggccgaatcctgctttgagcgaggcagagagattacgcttgaaggccagtctgctcggcttgtcgtattaggcgtcccatcggagggtggcaggtggcgtgcgcacattgtagtgtagatgtaatcatgctgttgcgccagacgtgattgccatcttgtcaatcaatgtgttctactgccacatcgtgggttggcacacacattaaatgtgcatgttcccttcctgttttcgggtgcccctgtcctatctgcctgaggctagctcgagtgagacgggcggtgtgactacgacctcgggcgaggcggagtcctacccgaggtaggagactctcgaggagatgtctcggtttttgtgggtagctcggctgtca

SEQ ID NO: 89812 - DNA, 538 bp, Zea Mays
aggcagtggcccgactcccatttctttccaagttgcgatagaacctattagttttagttcggaagctctggggcgtcggtagtggatcaccggaggggtgggtgctccgccgtgagtcgatggtggccgccggcgtgccatcaagtggtgaagacgagagtcggtcgttgatcctcgattggacggtggcgattagaaatagagtgccggtccggtcggatgtggcgtgggccgttcgattccaatcgatcggacgtgagtgggattaggttatttaaatctggaacgtccaagttagatcgaaaggcttagattgcgtactggttcgtagggtagtggatttaatccatgccgttcacgcttgatcggaagactgaggacttatgatacccctttggatcgctgactttacaaataggaccctctgttttagggaaacaaacccgcagtcctgtgcagctgttcactgagacttaggttttttgcgcagagacccctgctgttatttaattttgatgcgcggtccagtgacccgagg

SEQ ID NO: 89813 - DNA, 855 bp, Zea Mays
gttatattttaattactttttatttaatatgaacaatttttcagatatacataaatatttatcgataatatatatatgctatatttatgtgtatgttataaagggcctccattataggttttgtccagggcctctaaaatgtcaggactggtactggaagtaatacacccttgacatcctagatcaagctgacatgtccgacgaaaagccttgctccacgcctgtctacacctaggcaaaggtcttcaactagtccataatagcctaggaaaccacttaggccctccaatacctcacctccaccaagtttgatgtcgcctacaccgtctagtaggtgtgcatccacatgcacactctatgggagttgcacttcaccactgtgaaacagatccttcattaccttcgcgagaccctcgaccatggcctgctcctttagtcctctccggcctccgagctgatcgtctacaccaatgtcgactagcgggttgtctagacactcatcggtccacctcagattacgtcgtgttcctaggcaccaacttggcctcctgatcctcaaagcgacagcccatcatttcccgctctagcattgaggcgaagtaccacgtcatggccaacggtgtgaccgaggcatcctaactcagtcatctactacaggagcttcatagccctcttgctcgtggcaccctcatttatgtgacaatgttaggtcggtctactgcttcaccaatctcgtgcaacatcaacacagaagcatgtggacactggtctccactttgtccatgggcatgttgctgtcagcgatgtccacgtcctccatgtcacgaccaactcctagttcactgatatattcac

SEQ ID NO: 89814 - DNA, 569 bp, Zea Mays
ggacatgcatagcctcagtagccccaaatggcatccaaattgtagacagtgcatcagcgtctatggataagataaagctcatcaacgaatgagtgcaaaatttagatcaagagcacccgcaagctgatggctcagggcatggtcttacactacctaccagcataaccactgcactaaacgggtactataaaatctcagaattgcaagtgccccatatttcgccgcaatatgagaacgacagtcaggagtcttccccagatccaaccataatgtagcaaccaacaacaagccatctcaaccaggatttcaagtgttgaatcgatccatcaaatgctaacatgtatgtacatgaattgaagtgttgaagcaaagtgaccgaattaagggatctgactactgacttactgagagcacgagtagggggcactcgctggtgctggtgcggttccacttgatggcgttgacgggtgtgcaggcacaggggcctccagtctccacttcatggcaaggaagttggcacgcagactgggcgccctccactgtgtccgttgtgctcccccggggcaagg

SEQ ID NO: 89815 - DNA, 995 bp, Zea Mays
tgacttgacactggcgtatctcctgacccgaagcatatcttagttcgggacacacatagaaaagcaaggatttggagcagggaagagaccctacatgggatccttgccaagataggcacgctagggtagctaaacaagcgcttggataggagcagaagcgataatccacgtgttcgatcgcggctgacactcaggagcgtgctctgaccgcgcacgccacgagctacggtcggctcgactgctcgcctagcctcagccctcacctataagaagccccagcccttagctttgccctcctgcacgccccatactttttactggtgactggacgccggtaatcgctagaacaccgagggtggtgccatctgcaagctcgtcgacgcatcgaccaccgtagcctagccactccaacctatcctcgtcaagtctagctccccggctagtttccccagagactagcggagtttccaagccactcagaccaagcgctacctcgccagagaagccaaaccacctcaccggacttgcccttttcgatggttccctcggtctaggtaatctaaccatccattcatcgattctttgcacacatgcactccctaccactcagtgaacctccctgtgtggtctgattgagctctatcgccgtggtatggccggtgcaaacatcaccgacgagctccatcgcctgagtccgtggacaaaccagctccaagcaccatcgatgccgacccgtacctcgacgtgaccgccagaggctccccatcctcacccgacccatcaccggaaccctaccaatgtcggtaagccgctccgccgtctccttcgccgtgggtactattaacctagctagggaccgtgggttagaggttagcaaaacccagggggttatgcataaaggcctagactcaggtgaatagtgtgccagggaccaatccataagaaaagagggaaaaatgccggggacccgattacaagtgtgttttccctttctt

SEQ ID NO: 89816 - DNA, 917 bp, Zea Mays
aagttactgggtctccaatattcagtctcttacaagaaaggcagtgacaaccgggtagcagacgctctctctcgcaaagcttcacatgagtccagttgcgctgctctgtctacagttacaccttcttgggcagattcagtggctaactcctatttacaagacactcatgctcaggacctgttggctaaattgtcgctggacggtgcatcagtcccacatttttccttacaagatggcatcctccggtacaagaacagagtttgggtaggttctgatgttcctctccaccacaagctggtagcagcatttcatcaaagcccagttggtggccattcgggtgtgcccgttacttacaggaaaatcaaacaagttttcgcatggaagggaatgaagacctttgtgcaaaactgggtagcttcctgccttacatgccaacaagcaaagccagaccgatccaagtaccctggtcttcttcaacctctgcccataccaaagacagcttggcataccatttcaatggacttcattgagggattaccacgttctcagcgctatgattgcattttggtggtggtggatttgtttaccaaatatgcacattttgttaccttatcccaccccttctcagccctcacagttgctcagtccttcttcaaacacatatacaaattacatggtctgccatctgcgattgtgtcagatcgtgataaaatcttcacaagccatttttggaagcagcttttcaaactcgcaggagtcagtcttcgcatgagcagctcataccaccctcaaacagacggccagacggaaagggtaaaccagtgcctggagacttatcttcgatgctttgttcatgcatgtccgtctaagtgggctagttggattgctgcagcagaattctggtataacaccagtca

SEQ ID NO: 89817 - DNA, 590 bp, Zea Mays
ctaccgcgaagccgctccgcctctctctcaccaatctgctgcctgcagccatcgcaggtccgtccgctctctctctctctctatctgtctcttgaagtctctcctcttctctctcgtcgatccgtcgattacgatccgtcgatttgctgcctgctggattgacgccggaggtgttcctctcctcttcctctccctcctcttctcccttaaacatgccggatgggcacgattaagcagggccagcgcttaattgcccgcttagtaggtaagcgatgcgttgaccctctgctcagcgcttaaccgcgcctaatcgcacgcctaatcgcgctttcttgaaccttgccatcaacacatgttacatatttgcagcattaagctagccatattagtctactaagaggactctgtctgaactgcatttttgttccttttttcagcctaacacatatggaaattccacagagtagaggtgaaagagtcaagaggtttatagagtataaattaagttgttatacgttaattattggcagttttcactgggtgccaagtacatgatcctcaaattgctcatgtaatcatgccaccttttg

SEQ ID NO: 89818 - DNA, 458 bp, Zea Mays
gccgagtcaagcctgacttatgtgtccacatacgttgctcaccacatcccacaaaaccaccttagatgaccatgagaccatctatttgttgacaaacttcagcaccagtcatcattgtaggagggcggtctaccactatgacacattttgtaaagttcttgatgtgtagtctaaatgcatggtcaggagggagaaattgtcaatgtttatcaaaaaatatttgccactcttgtttaaccaaacgaacataagagcttccttacaaactgggcatgtgaacttaccgtgaacacactaagcgaagaatagcccatacgctgggaagtcatgcatggagtactggtaccaaacatgcattttgaagtttttccttatagcatggtcgtatgtccataccccttcctccctagcatggactgattcatcaatcacaactccatgtacacacccattttatt

SEQ ID NO: 89819 - DNA, 327 bp, Zea Mays
gaatctttttgagggtgaagagctgagaataatgctgtttaactacagggagatgggtatcatccctaaggttgaaccaatgtaaggtgtgatgccctcgctgcatgtatgtaactataatttgtatgatgaggctgtgtgccttcgctgatccggccgtgcccgtagagaacttgtgcacttgatctagcgcgtttgttgtgttggtccagttgcacccgtagtcggtttttgtatggaggatctggctgcgcccttaggtgacttttgcacttagtcttttgaggaagacttcgattttgcgcacttgctgtgctagtccggctg

SEQ ID NO: 89820 - DNA, 734 bp, Zea Mays
tgggcttactggcccctgagtcgttgagagtcgccaggcatgctcgaagacgacagacctcggtgttggatgcccccacagcggcacgatccgcatccaaatccctttgaagatactccaccgatggacccgcaggggttgatgagccagacgacctatatggagagggagagccatggtctccttgtgggggatggatatcccccgggtccacatgcgcatgaaaacacgtctagggccacctagcaagcatccccctagggcgtcctgtggtgggtcgaccgaaagtaactaggcgaagcaagcccattctgaaccagcaaaggccaacgtttgagttaggcgccatgagagcacgagtatatcgggcatgacggttgcgcccacccgataggctaagcttccggcggtaattcgggcggatgagcgcaaggggttcccaagttgtaggaggacaattcgctacaaaccgggaaataggtgaatggattatgtttattacctgtgtggggatagctacccttggtcgtgtatataaggccaagaggcacccttaccattttgatctcacctcaacccaccgttctcatagttcacagcttgtaatctcatcccaataccaaaaccattgcaggacgtagggtgttacgcctttcacgcggcccgaacttgtataagtctgagtgtttctcatgttgtgccaccgcatgaaccatcgagtcacgatcaacgac

SEQ ID NO: 89821 - DNA, 515 bp, Zea Mays
actgggccatatttgttctcagtctcaactctcaaatcgacgactccaagcagaatgaaggaggtggccatggcggtgagggatgtaaactttgcattagaccgaaatgcactgggctgggctggaggcctgtgtaaggcacttgtcaccccaagaggcttgagacgttgttggactgacagttctaggggcctaggcatcttagattttttataacgaaatcagaaaaggcaattgacgaccatataataataataatttaacaaaaacgatctgacgttgaaaccttttcatgcaagtttcacggcatcctggcggtcaaggctctggggacgtcagtaattttgttgacattttgaagcaggcacgcggttttcagagatctattatatctggatatgcaacgaccttttcctttcattaccgccagccagacagacagcagcaatacaatcatcctgtactcgcacatcatccttggagtgacgtcgaagtttgtgttcagcagcaaaagc

SEQ ID NO: 89822 - DNA, 363 bp, Zea Mays
cccctagcgcggactgtccggcccctgatagaaagttccacttgctttctctatgttgtggcgttatgaacaattcacctatggttctttctcacatatattgcagtggtctgggtggtcttcggaagaagcttgccggtcggttcaaatcaaagcgccctcgtgcagacgatgcagactataatccaaccacagactcagaggcccaatctttagctgggggtagtgtctctatggacacagaaggtgttccacatactcatcttgactatccgattgacatcataggatggacttatccaaagaggaggttctctatggcagaatattactccaggaggactgtcaattagtatgctttgc

SEQ ID NO: 89823 - DNA, 271 bp, Zea Mays
agatatggcctagctgctagacgtgagcctgctagcctattacaggcatgcaaacaggccaaatctgacatgtttttatattggtagagagataaccagaacgcttaaaacatgctcttccggccagtagaaacagtatccaacgcccaacggaacggtacgatacatggatggaggacgtgaatgcagcacgcttacctgcaggtggtcctgcgggttatacctaaggatggcaacagatcggatttggatcggatattgcaaatatcca

SEQ ID NO: 89824 - DNA, 617 bp, Zea Mays
aggcccagcgggtccaacaagtggaggccatagagaagataaaaaatgggagcaggagctggaggacaagaccagcaacattgccctcaccaaggagaacctcaaggagaaggatgcgtccctagataggcgggagaaggatctcgcctttagggaggaaatgcttgaaaagcgggagatgttgctggccgagcatgagctctaggcggaggagaaggagcagaagctgaaggagcgggtccgccagttcgaagaggcgcaggcgacgctaggtccctaggcggcgaaggccgccaagaaggacctggaagatctctaggcagaacaccgcgctagggtctagcggatagctgagtgggccagcgaggcgagcacgacgctggtgcaactggggataagtcccatcccagtgtcggggccgctagtgtcgatctctgatgccctcccggtgctggactccgccgccgaatgcctttgttgcctagaccagatcctcggcacccgcttgaaggcagagggcagcaggctctgccaggcggtggtggattatgtgctgacgtgcttccggagccacgacctggccatgtccttggcgctggtgctcgacggtccggtgg

SEQ ID NO: 89825 - DNA, 428 bp, Zea Mays
cgcccgggtttgcccttatatactcgcgggctgaggaagccgagtcaaccctgtgggctgcgaacgctcgtttggaggaggcgaactcggacctttggcgggagcacgaggcggctggaggtaggcatcctcttctttgatcgcacctttgttagcctttggcgcttatgatcgctccacgatctctcctttgcagacctccaaaagaacttctttgaggcccatgatgctatgaaggcagacgaggaggcaaagaaggcggcggaggatgaagtgtgcaacctttcgattgcctttgacgatgccattacgatgcaagttcaggcgcaaacttcgttgaaggagcacagcgccgaactgcagaagctccacctagccacaagcgaggtgtgtgaccacctctctcctacaccaccaacccatgcgcc

SEQ ID NO: 89826 - DNA, 576 bp, Zea Mays
ccttaccagaataataattagctgaaccaaagtatttgtgagaagatatatcatacaaagtaacagaaaaagttataacctgaacatatccatattcttcatccagttcaggtaactggattctccagccttcctactttcacccacagccagtacctccccataacacattaacagagaatatacaaatttgccatctctctcggatattttgtggtgctctccaaccaagtttttgacaactttttcgtagaacagctttcagcattttaccagtatccctctgcagttgaggaaaaaaaagatagaaattagtgcatagtagcacaacaaatcaaacatgaaacaagtgcacttggacattcttccatacatcacgtttccaagaagatggccataaccatcatgtaataatttctctatttattgctgtttcaagatttctggagccactgtctctcaaacagatgtgtcttcaaagaacatgttatcaagatctaccacctcttcatctacctcctttctacaagttctattgacatccttagaaatcgacttcgtcaaatcagatccttc

SEQ ID NO: 89827 - DNA, 289 bp, Zea Mays
cgaggatgtcatccagtgtccgttcacctccgcgaggtgcacctcgggctcgagcgacgggtggtctggcagcatgtacctcctcacgaggcctcttctcccagcgcttgtcaggttgctggtttgtgtcgcgtcgtggtgcaggtgatgcaggtttcgttcctctgatgacgtcgtaggcccgctcgtcgacggtgatgtagatgtctgcctttcgaaacagttgttcggaggtggttgacgctttctacagtatggatcggacgaaggccaagtcattgaatccctg

SEQ ID NO: 89828 - DNA, 357 bp, Zea Mays
cggatagagctaagaaaggtggtgaaccgttggatcttgatccaatgatccatgggtcatcctggttccgtgggcgctgatctaatctggcgcttagattactgatccgacggccctgagatcgtgataccctttcaccatagtagatttgtaaaagagccctcggggttatttataatgaacccgctgtccttgggcgctgttctctgtgtcttaagacctttgcgtggagccccctgtcttgtatagaaattgaggcgcagtccagggaattatgaaatcagagaaattaatttagaaatggattttaatacgaaaataatagctagaatttatttaattcatagaaaatccatt

SEQ ID NO: 89829 - DNA, 1028 bp, Zea Mays
cgcagtttggaggtggtccacagttctctagccatggtgtagaaccagatgtaccaggctcaggaggcgcatgctgcagagttagcctaggtgcaggaagagttggcccaagttacacttgagaaagacgaagcagtccaggtcagagatgtggctgttttggataacgtgttgtggattggcgaatgccaagactccagaccttactggtggaaatcgttagagaaaggaatgtagctttgactgaggtaggacagctcagggcaacgcaggtcaacctaatgcaccagctgaacaatgcagaagcttggaatgctaatcttcatgaggaggttcaccagcttcatgcccagctcaatccaatcaacccgccaggaccagacgaagcagacgccgttgcagccaatgatggaggtgtagtctccgagaccggtagcgtgcagatatagttgttagctgtcgctagaggataggctaactcatttggatagtgtttctacgagtaggaacatgacttttggagtaaggccaatgtaatgatggcttctgacgcaggtgtgtgtgtgtgaaaaacactcttttggttggttgtgcatgcgagcggaaccatttgcttgtttgtacatttgcattttgtgaagtatgtgatgacgatgttgcgcatgttgggatgtggttcttgccttacgatttttcacatgaagttttcgtcaatgagatattgtacgacatgatttccttatttcacatatgtgcaacgtgactcgccacttactcataataaaaatgtgcagatggtgactactcgcattaacctaggggcgctggagcttctggtagtggtaaccagaagggtgaccatgaagcaccacttcctccacctccgccattcacacctgaatagttcttcacacaatttcttggagctcagaggaacatggagaacttgcaacgaaacatggaggtagagcttcgcaatattgctaacaacacccgtcatgcgcagcctcaggaagctcagggggtca

SEQ ID NO: 89830 - DNA, 688 bp, Zea Mays
ctcgacatcccactcaaggatagcattaaaggatggcgcttggagtggttcattgtggaaaatcatggcaagtccctccctcctcggtcagggagacagccggatgttcgtgctccaagttggattgaatcccccacagacttggagataacagaaaccagggttctgcttgctgagatttgtttgttaaatgagagaggtctgactgttgaagctgtagttgcagactttgtttttaagaatattcagccactgaaggacagagtgtacccggcttatttgtatagtggtgtcactgattcaacccaggttaccaacaataggattcctgctgtggatttggtaagccgactagagatgattcttagaggcaaagtatcaaatattggtgctcatgttgcatattctgcctcgaatctgccaccttccaggtcttttttcgattttgtgtctaatcctcctgctagtggcagtggtttgggtcttagagtgcgaccctctcccgaagaagttgaggctctggttgcttcacttggtgatcttcccaatgatgagaggcgagttcactttgagatgcctataaacccaagcgatgcagagataagtgctatgctggacatgttggctgaggattcttctgactcggtccctgctgaaacaatagctgttgcaactatcccagagcctg

SEQ ID NO: 89831 - DNA, 466 bp, Zea Mays
ttttgggaccaaatagtgacaacatacaactctacctctgaccctcaccttcatcataccgccaagcaacttaaagatcattggggtacctacaaccggaggtcaccaagttcaatgaatactacctccaagaagaaaggttgcatcattgcagattagactatgcaatggtcatggaggtagcaatggtgtggttcgaggataaaatggggcatccattcaagcgccatcaatggtggcaagttgttcaccacaagcctaagtggtcagcaaaccatggtcttgatagtggatttaatgggactgcgaataagagacctcgactcggagtgtctggtgaatgtagttctaaaggcactgaagacaccgaggaagaagtgtctgactagtggggtgtgatagggcaaagacagctacgtgaaaggcgaaggcgaagaagaaagggaaggaagccacaagaagcggg

SEQ ID NO: 89832 - DNA, 535 bp, Zea Mays
caggctgcagctcccaagggggcaatgcacacagtatgtatgtgcctgtctgcacgtcaatggcaatgggattctggccggtgacgcagaaaacttcagatgcagcgggcacaggacagcaggaggaggcagaagggagtttttggtgtcttgtcgtttcaatcttgcggcctttcattctccccgctcccccgttcagtgcagatctcatgcaaaacatgagaccaaacttgttgagaggcatggagatgcagcaggcatcagaaacacacaggaccatcaaccctagtgcactgcaaaccatgtgttgagcgggctggcagtcacagaagaacagcgtccatgcaggccggctgtggcttcactggcttgtgatctccagtacgtccaggctgcacacctttgctggcaatcatgccggccggctctacagctctccgttcgctaccacccatctctgtcttttctcccctactactcctgttccaagggagccgccgcatcaaatgctgcttggttctcacccaacctgtgc

SEQ ID NO: 89833 - DNA, 380 bp, Zea Mays
ttagtatttttagacaaaattgaatttacaagtgcataacaaaatttatgtacctacaaaatcaaatatctgtacgtacatgatgttccacttaggatgcatttgggagatggcgtccacgaacaaatagtatttggttcacgagtgagttggatatgaatatcttgacagaacacctagatgctagatgtcctttctaccaaacaaattgcctaacaagtaattttatctcatctactcttatttaacaaaacagactaataatttattccatccatccaatcaaatagacaacatagctatatgtatctccaaattcatgaactaccatatctaatctactcttgccctcaaacgaaagacaattagcaaaggcaaac

SEQ ID NO: 89834 - DNA, 596 bp, Zea Mays
gcctttgtcaccttcggtaattctgcctctaccggtgggctcagaatttctggcatcatcactgtttttccaattctggctctctgactgcatcatctttggctttggctggcccgactataggcaccttcggtactacaatcgatcctttagtgctccgagcgacgggagcatcttgttttgcttcggtcgtggaggaggtcccctcaccaaattcaggcactacgaccgtttcaatatatcgaggccggtgggtcagaacctttattttcttgcccttcggcacaacagtggtggccgaagcagcaattttcctcttttttccttgccttctcaaggggtaacagtaataaggatatatgaagccaattgcatcaaaaaccctgttcaatcttttcttgccccgaccccgaaggctgaggacaaggcatcatcctcggctctggtatatgccccaagcaactcgtcgctattgcctcgatgcatttcaaccagtcatcatttggttcgtcaaacctgtccctgaatctgaaggtatatttcaattgaactagtccaccttcgctgaattcagcagtagtctccttcggcatctc

SEQ ID NO: 89835 - DNA, 518 bp, Zea Mays
gcagagttgttaagaaaatattggagataattaagcctaaagattggctgtcaggctgattcagtctgaaattcagatattcagtgtagcagagccaactttgagtatgaattccaccatgatctagtgatcaaatgagctcagtccctatagtcgaattgtagatggtatatagctctacaactttgctataggtcactggatgtgttgccatttgaaaatcagagaaaaagtggcttaaacttgctctgtcaggcgactgaataaggaaagtgccatggtacagtgttttgggtggatcagaacgccagctcatctcgccgccgttgatcgcagactggattcgtgcacggtgaaggatggataacgccgggaaaagagtaactcgtacgtacgtggcaccatctcctgagctcggccagagttactcaccggcggccgccatgactcagtggattccgccgcggtaccccttccctttgctcaccgccgtagataaagccgctcgccaccgtcgt

SEQ ID NO: 89836 - DNA, 833 bp, Zea Mays
gataactagttgggataagaaaattacttgttgaaaaaagcacgaatgatatgtgttaagggtacgactggaaattagcctccgccttggtatgtgaaattacttcttgttaaaagactctaggaattgaaggcatgtccgcgcttcatggaggctttgcccatcaacagatcgacgcgtggatggctgcgcggacgtgaatattttctagactacatctgatttctcctcagtcctcacccccgtgcttcacgcctaataccacatctccaaagcctgttggctgtgtccattcgtgccaggccagggacaggcacatactgtgtgaggcactgaggcatggacacgtcttgagtgatggctaaggccatgatgtggggtccgcctatgctcccaccacactcacgtctcatctccactccatcctctgtactcctcttcctcttcccttatctctactctctccttactccagccgcccacgcgtctcctccactcccgtagtggtgaggtttctctccctccattcctttcgcctgctctcctcgcctcatgtcggctcgccctcgctggtgccattcatcggcgccatccatcctacctccgcgtgggtcaccattgtctgtcggctcacctgctcaacctcatcagtgcagtcacaccactgtcctcgcttcttgccttcgtgcgcgtcccctcgctcgcttggacgatcccgagtcgactccactccactccgctattcgctcgcgccgactcctcatcctctcctggcattcccggactcccggtcgactcaagttcactctgctatccgctcgcaccgactcatc

SEQ ID NO: 89837 - DNA, 1092 bp, Zea Mays
gtctttaagtctgaaatcagtggcattggctcaactttgaagcctcatatcttccaaattatgaagattttgccctaggtcaccacatcaagtttgtcaagctatgtaaggagaacaactttgtttaaggaattaaacattgttgttatgaaaaacttggagaaaaatgtgcccaaagttgggctgtcagtcagcctaaccctgaattttggtattcagggacatccaatgaactttgggagtcttttcttagatgatccagtaagtgcttggctatggttgctataacaaaattatagctggatcatcgaacaacaactttgctactggccgatcaataggttgccatgtaaaagcttaagctctaagccctgcaaaatgctttgtcaagtgtctgaatgaagaactaatggtacagtaacctgaacatgatcccaggttcatcccccctcaccgccgatgaatccgcgtcgtgatcgttgtcgccgttacgattcacgctcacaagtgaccggataacgattcggggcaaaagatcttcgcctggggataactccggtagccggccgccatacccccatgccttatggccagcgcagatcagttcaccagcgttggctgtccgtcgatcggctgccatgtgctaaagcgttagaccacgtcgctgtgaatcacgtctcgcatgcacagtgatcgccggtgtactatcacggtgaaagccactcatcttgagcgctagtaccctttttcccctccggccgccacgcgtcttcgtgcaattcatcgaccgccgctcatgaactctataaattgagcgtgtcgtgagctccataggataattacgcatccaaagcaccagctattacctccaatcgttcaccagagaccgcaaattccttacttcccccaatcctgtttccgccatcgaagagtcaccctcgctgcggccagcttgctccaggttagttcaagctctctggtcatttgttctaggatgcttaaatcctcatcaagctcctcgacccccctgattgaactagaccgccctggatcaccgggaacacgttgttcctttgattatccgcgctatca

SEQ ID NO: 89838 - DNA, 510 bp, Zea Mays
taacttcagacgtggcaccatcccacgaacctagccgagagtggccggagatattccaccggcggtcgccatggctcggtcacttccgccgtggtgtcactcatgcctcgcttcccccttactgtgcctcttctttacatggtaaccatgcgtgaacaatgcaatccacggccgtggatcgttagccggaccgccgtgcctataaatagcgccaagaaccacggcgaggcactcacaacttcatcagtgagcacgattgaagccaaaattcgcactgtctcctcctcctttccccaaattaagtgtacacggtgaatcagtagcactttgcgaccgtgtagccccaatctcacctcctaatttcaccagagcccgtcgcggcaccaaatttcccccttctcagacgccggtgagcagaatcctccgcgctccgtggccagtcgctcccaggtctgctcctactcttcctgatcgtgtcttagcacccgtgcatactcgtgatactcatcg

SEQ ID NO: 89839 - DNA, 822 bp, Zea Mays
aacaaccaaaatattcagtatgaatgcaaaaatatattttatgtgtatttattcctttctcttactttgctcgtgtattcattttcatttatgacattcaataagcgagaaattcacattattatataatccaataggtattattatggtgaaatgattcattacttattgatttaaaaggaacacgtttcaacacttagacactaaaaataactctaataccttttcttgattaactaaagtcatgtagatccttactattattcttataaaataataaagaactagtgaaaaatccttaaagcattattcagggtttacaggtttctactaggaccgcaagatcctaaatctacggtccagattagatcactaacgtgatgaaacggtacacgacacccaccgtccggtccaagatcaatgcccctcaacagatcataacccgcgagaccccgctacccctcggatctaacatctacggtctagatcaatcgcgcaaaagggtatatccgtatatctaatctaagccatcaaatgcgcatccaacgacctgcgaatgctttcctcttcaccggctggaacagggcggcagacatgaaccacagtggcatccaaattccggcgaactacgattcggcaatccattggtccatatcccaattaatttaacctactcgacgcaaagttcaaagcaaaattactggcgaggttctcacctaaaataccgatgcatgtgtggcagtccacgatgatctgcggggtggagcttcccttgccgtccgacgagaaattccctgtgccgtgaagacttagggtccgctg

SEQ ID NO: 89840 - DNA, 557 bp, Zea Mays
ctctggggcagtcccatcgtcgcaggtcagctcgccacgactgtggacacgcactcacacgcaccagtgaactcttattcctccaaccgccgtgcgtcgtcgctcaaattcgcggccaccactcgcggactctataaattgaccgtgcccccagctccgccatgtactcaagcagctgctgcacccacctgcatcccaaatccctcactagcgagcacaaattttggattctccccaatccggttctagaacaccgtgaactcaatctcgtcgtggccaacactattcaggtccgctcataccatcttcttccccgtttaagtacactcataggtctacgatgctctccgacccacgtaattgcgctaggagctctctggtcgccgggaacacggttgtctcgccgtgatgttcacggccaccgtggctagagcaagccattgggccatagatggaattaggttaggggaaatgctcgggataggttcgatttgatgtccgccgctcgggaaccctagctgttgccccattcggtcggtgcaggtgctcgccggagc

SEQ ID NO: 89841 - DNA, 721 bp, Zea Mays
agactggtagctgttattataagaaaactctgccaaagaaagacacttgtcccaatccatccatagtgtagtacacatgcccgcaacatgtcttccaaaatctaatttaccctttccgtctggccatctgtttgaggatggtatgctgagcttcgtattacctgggtcccaagtgattcttgtagctgctcccaaaagcgtgccacaaacagtgctcctctgtcagatacaatggtctttggaataccatgcaaccgcactatttgatcaacataaatttctgcatacttctctgtcttgtgggtggtatgcactggtaagaaataagcggtcttggtcaatctgtccacaataacccaaatggaatcatggtgcctggaggtattgggcaatcccacgataaaatccatgcaagtgtcctcccatttccaagatggtatgggaaggggttgcaaagggcctgctgccttcagatgactggctttgattctctggcaggtatcgcactcggatatgtacttgttaatttccctcttcattctggtccaccagtataaggatctgagatcatggtacatcttgttgctgccagggtgcatggagaattttgaaaggtgagcttcatccaatatcttctttctgagctcagggtccttgggaacaaccaatcgatctccaaaaccataaaatccccttgctgtcttgacggaagcacttgtat

SEQ ID NO: 89842 - DNA, 513 bp, Zea Mays
gcgaaaactatattctccaacgggaagagataatgagccatcttttcttgaggtgcaactttgctaaatcttgttggagacctattggtgtttccccctcgagtgacttgcctgttaagggccatcatcagattgaatagacaattacaatttggttgctgcatggagatcataagtctcatgacctagaacatttggagatgccagagtaatttgatcttttagaatagtcataaatggttgactgttgcaggtcctccatgaagcaagagattttggttttacttcatagaagcagttctaggagccattttgactcggtcattcctctttggctctcggtcattgacttgtaattttcatgtatatccttgcccttctccctctctccctcccttctcttcccctgtctctcattattctccatgtttcttttcctttagttcagattcgttttccacctccctgcttctcccctttagattagattggttttcctctttaatatagttt

SEQ ID NO: 89843 - DNA, 365 bp, Zea Mays
tattataaggtatgggtacccatcgggtatagaatacccacacgggtatgggtatgggtgtgcatttatacccgtgcacgggtacgggtattggactggggagtttttagtctgatgaggctaggtctggtgtagcaaaacccggtaggtcttcacccgttgccatctctagatcggacctttcaagaaagctcagggaggctatactcacgtgctggttgccattgacaaattcacaaaatggatagagtacaagcccattgcctctttgacctcagccaaggcagtggaattcatacaagacataatattcaagtttgggataccaaatagcatcattaccgacctgggatccaacttcacca

SEQ ID NO: 89844 - DNA, 556 bp, Zea Mays
ggctaccaaaggttgggctctgacacccggacccaagcacttaggagcaggtgcaacgacaatgctcaacaaaatagatagtagggttgctgaaatgtcttgttaattatgtcccgtctgggtgctgaacgagggtatttacatcataaccaagggactagggcctaaagtatgatcgtaccctcggtcacctaatacattcccagcatatactatacaatagcgtaattacggaatagtaacactcttggcctagttacaccaagcactacacccgctataatatctcacaagtgggcctacctagcatgaaaagggagggggaccacctaggttctttcacttgtgctcagctctaagtcctcatgttcctaggggtccttactttgggccttcatcatggggccttcgttcggaggtcttcactgtcgccttccaaaattttgtcgagtggagctatgacactttgtgcctttcgaggtcctcgccaccaagaacacgacctactccaagagagtcggtagccattcgaggccttcacctgcgaaaaaggtga

SEQ ID NO: 89845 - DNA, 496 bp, Zea Mays
cgacttaagtcgattgctccgttagtagggtatagtggtcaccctgagttaagtaagcatgagcatgtcacaccgccttaggtcgtcgccgacttaagtcgattgctccgttagtagggtatagtggtcaccctgagttaagtaagtgtgagcatgtcacaccgccttaagtcgttgccaacttaagtcgattgctccgttagtagggtatagtggtcaccctgagttaagtaagcgtgagcatgtcacaccgccttaagtcgtcgccgacttaagtcgattgctccgttagtagggtataatggtcaccctgagttaaataagcatgagcatgtcacaccgccttaagtcgttgccgacttaagtcgattgctccgttagtagggtatagtggtcaccctgagttaagtaagcatgcaggttgacagtaaacaatttgagcgcatttgagaatgaagtctttttattgatgatatatttcccagtttacataata

SEQ ID NO: 89846 - DNA, 832 bp, Zea Mays
agcttacgctgctcatcactattcttgaaccattcttggggggtagctccctggcctagaggtaacccccacgtctgggacaacctccagtgagccttagtgacagggggcgagaaagagaaactcttgactcaccaagcttgataaacacgagggtaagtcattttgtttgccttatgcaacaacagcagtatgctgataggcaacttactcaacatgaagctacaggcacagcgctgctgcacgagactggcatttctagaataagacgcgggtatggccccacctgcgggttcgccgcctcacccaaagtgggtctgggggcctctatcgataccctaaatatggggtacccactccagctatgtcaaagtaagaccccaatggctaccattgagggttttacggatggctagctaaggcccaccatatggagtcatggacggggtaagctcatctcctgggctagatcaccatctccataaaagccctataaagggaggaattgacaacttcaactatagatctaggatcctacaaatggaactcggacctcctcgtgggcccatcgaatccctggagaaaggggtctggagggacctcatgacccttgagaagaagacattctctggctacagcaccaagccttcagagtagctccgagcctagaaaataccatccggaccttaggccaggtgaggtctgatgtcaccacgtgtcttgattagtacgaccgagacttggaaccctcgggtgtggtttgggcccacgatcatggagagcctgggaataccgtgtcatcacttattcccgggcctaccccttgtccagg

SEQ ID NO: 89847 - DNA, 498 bp, Zea Mays
tgaaggcagtcaggactctatcgggcaaaagtccaatcaggagaagcattgaaagcctggtcaagtgccgtccagctggacctctcctggttgaagctcagccggccagacccctattcctcaagaaatctagtcggagtgggttcaaaccaagctaggggtggacaagcgtcaccgctggagtacatcaaaatctcctgagggcaggctgaaaagacctttgagttgattactcaaaatcaattcaaagctcggggcccaatagacgcaggaaggcccaaggaggaacgataaactcaaaagcgaacaatgatgacatttgagttgattactcaaaatcaattcaaagctcggggactacacccgttgggagcacctttggtgcacccaatggacagagcataaggaggaagcaaccactgaagaatcgagggagaatcacgagattgggttcatcttaaagtctcaagtcaattatcctaaaaaattgactcaaac

SEQ ID NO: 89848 - DNA, 381 bp, Zea Mays
cacatgtaccttaatgtttagaaataaacaaaattatatttgttgcctagatacgctcgtccgtctcgtggcaacgtacgaacacatatctagtatattattaatagaatgaggctcctccttcaaaataagaccacgcttactacaattaaacaacataatctcaagttgtttggcttcgctaaatagtcgaagctcggactcgaaagttaaatccacatgccagcaggcccaaacaaaacaaagtcaagttcaaacgtgggttgccggtgaacctgccagaagtgggcccacacgtcagcagccaatggggcgaacgacacctaaccctggcagccaaccaaaaccccgtccaaatcaaagagaccccacccgcgtgct

SEQ ID NO: 89849 - DNA, 988 bp, Zea Mays
tattttattaatcgtacctctttaaatattaactaagttgacattttcccttgtagatggtgcgtacaatccaaaccacccgaaccaacaccaactacatccctctgccacgacaaattcccgtctacctagtggtaatcaaagaaatccctgtggatctcccttgcattcgtgtggagaacagagttattctggagtatagctcagaggagtttctgcctacgcccaccccgttggcagaatcagtagccttcactgctagatcgtcatcgtcagcatcgccagcaccagcagtccaagcctctgctcccggaggcgatgacccggacgactctggtgatgatgatgaagacgacgacgacgaagaagaagaagaagagaacataaacgaggaagccaacgatgaacagcaggaccactacgtggggttatggcctgtcaccgaacattatacatcaatgttcgagacagggcacttctctaacctactgcaggatgttttgcatgtgttgggaacctatgttcgacccctgtatgagaccaggcaagtgtgcgaaccccctcgggcttgctactacatcactcgcattcatgttagggtgatggatgcaagtgatagagggttcaggactctgtcagctcatgagtctctgacaccgctatccacctacgctgcttcggtcagcgatgctgctaggcaaactctatggtccctcagccacacctaccggcaggagctgcacaacacgaagtacaaacatctccctctgcgtcttcgtggagaaagccagaccagcattgttccaggtggagctgaagaagatcgcctcaacaccctagctggtgtggtggcaggtcttaacaccgacctggatagtgctaccctagacctctctagggtacacttggagctggaggatgcacacgcaaggattgcagccctggaagctcaactagaaggaagggatccccctgaagctcaaatccc

SEQ ID NO: 89850 - DNA, 617 bp, Zea Mays
gggtctgacactttcgtccatacaatgcttcgaacggtgacatcttgatactggcctgatggctgttgttatatgagaattcggcatacgacaaactagactcccaatttctgtcgaacgtcaacacacatgctcttaataaatcttcgaggaccttgttgaccctttccgtttgaccatctcactgggggtgataggcggtgctgaaatctaacttggtgcccatagcttgctgaaggcttttccaaaattttgaagtgaactgcgtccctctatctgacactatcttccgagggatactgtggagcctgactatctctttaagatatatcctggcaagggtggctccgccaaaagtggttttcactggaatgaagtgggccaccttggtgagacggtctattattacccagatagagtcattccctttttgcgtctggggcagtccggttacaaaatccatgcctatttcctcccacttccattcacgcactaggaggggttgcagtaggcctgcaggtttctagtgttcggcctttgttcgttggcaggtgccacactgagccacatattgtgctatctctttcttcatccctctccaccagtatctggttttg

SEQ ID NO: 89851 - DNA, 452 bp, Zea Mays
tagaggaggtggcgggggaacctgctcgttctgcaagcgacgatgtctagttgccatctaaaaacagaaatttcgtcgttgttaccacgattcatggttccaaacaaagattaaaatcatgagaaaaatgacataacattatatcgaaccaaacaaagataacattcattcattcatttcaccgctcacaaaagttttcccaggttacaacattttaggggatccaccctaaagcctagtccaaaagttggtaccaaaactaagctcacgtgggttcccatcctcctaacatgttaaactaacccgtcaaccatgagtggtagaggcaacgctagatgcaggtgaagggggcactccggagggagccgcaatcagtccggaagctagctctatttcctcgagatcctcctctcccttgttgcctacctcatttgcttccatgtcttggtggt

SEQ ID NO: 89852 - DNA, 520 bp, Zea Mays
ttactgtttctagccttgccacaggtgcaaaaacttcctcataatccactccatgaatctgagaataaccctttgcaactaatctggccttacgttttaccacttcaccggctgggttccttttcaccttgaagacccacttcagcccaatagccttgtggtcttttggaagatcagcaatttcccaggtattgttcttcactattgacatcatctcctcttccatggcttgcctccagcaagcttgttcaagagcctaatcaacactagcgggctcatctgcagccagcatacaaaccccactatattcaaaatccagatcttggtatgttgagtcatacagatcgttcaagcttatgtacctgtagaccccttgactcgagaagcttgaatcatgggaaggtggagttactgatccctggttatgtgtggagccgggagctgaaatgggagtggaatttggtgtttatggctgacccatctcacttccctgttcaactgagttcactccccctaagtt

SEQ ID NO: 89853 - DNA, 298 bp, Zea Mays
ccaaattcatttggcacggttttggcaccgtttgaccttgggaccaggcaatctgacactggcaccttggtgacgctacaactctctgtccctagcctaaaaccgcgcgacatccatacacaaaagacaaagcattgtcaggggaacaaatccttcacagcgatctcgcccaaattcgtgaagatttgcacccaatcagcgttagaactcgggcagaagcaacggttccacgtgtttgaccgtggctgacacccccggttcacgcccgttcgcgcacccgcgctccccagtgcacgct

SEQ ID NO: 89854 - DNA, 299 bp, Zea Mays
atgaactgcttataaaatgggcaattgctctgatatatgtctattaaacccgacaaaaatgaatgcgagattgatgaattagtaggtataggagaacatgatacatgttttggttttcagatcgtccgactaatcgcgattagtcgggctgatcatttctctgtgctcgattagggtgttcgactcgattagtgttactgatcgtccatatcgtccgattagtctgcgatatggaacgattaatcgcctaggagccgatccatcgcgattaatagaggtagtccaacagtctagactgg

SEQ ID NO: 89855 - DNA, 570 bp, Zea Mays
gctgttcgttcgagtaggggctagctgtgtctagcaactatataaagtgatcttaccattgatgaccatatatatagaggaaaagctagctaactagtgaggtggtgtgtctcccgtgcttggaattttggatagagacatgtggtggcacgtagggctggtgatttggagagcacaaagaggaagctttttggaaacaccacggttggcagaggttctacttgagtcgtcgctggaagggagatgaggcaagatgcatatgcaatggggcggcagtttgagtcaagcagcaacactaggccatggaaacacacatgctaccatatctaatctagatggactttgttattctcagtgcccccacatgtttttgaccaatggtctttttttctaataaaacataaatgaaatgatatatctgcgcggaacgttgtgttttcagaattgtttcgctaacctagtattgccggctttaaattttggagggctctaggcaacgatgtttgggtctcctatcctactttttcttttgtgtcgtcaaccactacagtacaaagataaaattttcta

SEQ ID NO: 89856 - DNA, 282 bp, Zea Mays
aatattcagcatgaatttaattattttttattgtataaccttgtccaatcttaaattgtttggtttttgataaaaccagaatggcgtggaatgaatgtagtaagagatatacttcttcaacctcctgccctatcctcctctctctagatatggatttggtagaagggtggcccgcggtcatattgtaagcatattttgtcttttcttcgtcaatttatagttccgtcctcaaacaagataagatcgataggcttgtaaagtgtttccactcctccattgtct

SEQ ID NO: 89857 - DNA, 794 bp, Zea Mays
cgtgccttgacacattaacctcaccaccgtgactcatgttagctcgtccggtggtcgccggggagcttgccaaggtaattgccaccaatcgcgcgcgccagtaaccttcttctccggccgccgtgcgtctctctcaaattcactggccaccgctaaagcctgctataaattgccgaccccgcctgctctgctaagtaattgtgcacccagcagagcaaccagtgcctcgaatcaaccactagaactcccaaatttgggattttcaccgaaatcaccgaagaacaccgagcggagtgacctcgccgtggtcagctcgtctcaggtccgctcataccctctgccctcttgttttagtgttcttgtgtgcccctgatactcctcgaccaactcgcttgagctatgctaccttagatcgccgggaacgcgttggtttagccgttgatcatacggtcaccgtggacagagcaggttagagcgtcgttcgtgaaattagttgaggggaaacgattgttaggccttgaatttggtttcaattgaagtagagcacccgtcatcaagtaatctgatcagagctcggccctgcgctgttcgccgtcgtggatttcgggcggtgaagaaatagaagttgggggatgtttttgtaacgtgttagtgagacatgaaaatagcgtcgtgactcgtttccagttattcaaaccgataggggcctttctgcaaaaccagtagcgcgagcgcgtgcgggcgtgcgtgggcgcgctttcgccagtaaatgggccaacccaggccagtttcag

SEQ ID NO: 89858 - DNA, 303 bp, Zea Mays
caggattagaaggtcgcgataccccttcgcaaatgaaatccgagccacaggttttagatctgacggcagtcgtagcttaccgattcatacgcatcgagatctaatctaaaccacagaatgtagatccaacggccctgtgatcacgataccccttcgcgggtacgttttataaaagagaccctgtcttttacatatatcaacccgccgtccattagtcactatacgctgtgtctcaggtttcttgtcccaagccccctagacttttatcaatttgacgcccagtctagtgccatggcaaactga

SEQ ID NO: 89859 - DNA, 778 bp, Zea Mays
gagattctcatcctagtccctccttatttatattgtttagaccattactagtgatagtgatgcacgtcttgctcatggattttaatggtcataactagcaccattacatgttaatgttagtaacatgatagggcagctatttgctggagaaacatgacatgatagggcatatatttgctggagaaacattagtccattttaatttgttctattgttatgtggggcgcagtgtataagcgtcggccacagcagaaggagggttagtggatgagaaagaataggaaaggatagattaagttagttgagaaagtctagggatgaggattagccgcctaagagatagattgagtagttgagatattctagggatgaggattagccgcatcctccctcaggatactatttaatgtaatgaaatgagaggaacaaagtaagaaagaagttgagtcctgtcgagtacctaggaactgggtacccaaggtaaggctcataacctcttttcggcccgttcgaccgggtaagtccgcgaggcggagcggacgaccaagtccccaccgagcaagtctgtgaggtgaggtggacgaccaagtccctgccaagcaagtccgcaaggcggagcggatgaccaagaccccgccgagtaagtctgcaaggcaaggcgaacgaccgagttcccaccaattggacctgcgaggaaggaaccccagcccgacgcagctggcccacgtcggctacgaagggacgcaccatccttaggccacgcccgtgtaaacgtgcg

SEQ ID NO: 89860 - DNA, 978 bp, Zea Mays
cccatctggtctcgcttcgacctccgaaggctgaaggtgaatattgatagcggtgttgaagcgtgccagaaggcctttagtactatttgcgccttcattggcatgagggatttaattcaagagcatatatccttcagggtgtggccacttgtggagagctgggatatgccgaaggaaactactgccgaatccattgaaggtggcctggttcgattgaaatataccttcaggtttagagagaagtttgatgaaccaaatgatgactggttgaaatgtattgaagctactagtgacaagctgcttggggcatattccaaggctgaagatgataccttgtccgcagacttcgggggtcggggcaagaaaagattgaacagggtatttgatgtgattggcttcgtataccatgattatcactacccgctacgaaggcaaggaaaaaagaggaagactatcgcttcggccaccacagttgtgctgaagggaaaaaaggtgaaggttctgacccaccgaccgcgatatattgaaacggccgcagtgcctgaatttggggaaggaacctcttcaactactgaaacaaaacaagctccttcgattgtgaagagcgccgaagacccgattgaagtgccgaaggtgcctactgtcaggccagccgaagccaaagatggtgcggccgaagaaccaatagtggaaaagacagtgaaaatgccggaaattctgaacccatcagtaggggcagaattactgaaggtacaaaaagctggtgccacaactcccaagaggaggaggatggccagtgtactagacgctgtcatggaaaccacgaaggccttgacccctgctcctaccaagaaatctgtcgaagttatcgaagtccaggccggagccgaagctggatcttcagtgcctattgagatgaagactgtcgcgcctgaggaagatactgagcaacaaacttcagatacccacatggtggcg

SEQ ID NO: 89861 - DNA, 393 bp, Zea Mays
gaatatgtggttttcgattgagccaactttggtcatagcttgttgtgcgaaaacagtatccattgacatcatacccagaaaatgtactgaccctataagcaaagacattgactacttgtctaaactcggcactcatagacggatcactttggccctgcaagtattcgcaagttcaaagatgctaaattgagttcaaggcggatctctttgacaaactaagcacacaccttatgttttaaccaggaaatgaaatcgagcaatccatttcccgcaccctttctaagaagggtatcatattcctgtggagttgggtcccttgatcgacgccagaattcatgaagaaattgttccatgtatggcatcacctcttcaaggttggtcaatacatatagc

SEQ ID NO: 89862 - DNA, 574 bp, Zea Mays
ctcgtcgatcaagatgctcataggatgtcactgcagagtcctggtattttttaaagcttcggtcgcagcgcgcatcatcgccttcaattctagctaggaaacactcatcgtcgttaagcttagggcacttctcctgatatgtttggttctttggtcctgtcattgttagcataaaatagagataaaaaggcaagaaacaaacagtgtgatcctacaactatctcctagggagggtgtggtggtggaacacaagttatgaaagcgtctaaccccgctcttacatggttcttaccagcactacaggtggaaaacgatggttggtgtgactgtccaaagagcgtgtgtatgattgcaaaggaggacttgttctgcttgagaaaaatggtacacacaagtcagtaacagatagtaatgctgagtaagtgttccaagtactcatcctagttgcaagcctagaaaatgtattagaacagcgggacaaaggcacaagaaaggaggaacaagtatctaggtacaacaagaaaacaagttgggagcaaattaatcacagaggtgcatagaacaatggtgtttc

SEQ ID NO: 89863 - DNA, 537 bp, Zea Mays
aacatagagcatctcaggaagttttacccttagctagatttcaaaagctatcggggcagcattgtattctgtaatcggaaactacatcgtcaataaaaagatttcattctcaagggcactccaaccatttattatcaatttgcacgcttactcgacttagggtgaccactataccctactaacggtgcaacatgctcacgcatactcgacttagggtgaccactataccctagtaacggagcagtcagcttaagtcgacagtgacttaagatggtgcaacatgctcacgcttactcgacttagggtgaccactataccctactaacggagcaatcggcttaagtcggcaatgacttaagacggtgcaacatgctcacgcttactcgacttagggtgaccactatatcctactaacggagcaatcggcttaagtcggcaatgacttgagatggtgcaacatgctcacgcttactcgacttagggtgaccactataccctactaacggagcaatcagcttaagtcggtagtgacttaag

SEQ ID NO: 89864 - DNA, 282 bp, Zea Mays
cggagacacgactacacgagctacacacctggacgcttgcacctgcactgcacgacctgcacgttgtggctgtgcctcacggcttcgcggccacggacacgccaagttaaaccgtggtccaatttcccgcaagcaaactgcaccttgcccgcttgccgagagcctaaaacgttacagtataaagtatgtgacgcttcgagtctgcgtctccgccggcgcaagccaccaacgttgcacttcgcctcttcctcagtttactaggttagtgcccgtgcgttacaa

SEQ ID NO: 89865 - DNA, 555 bp, Zea Mays
catgttttagatccctcccttctgtccctttgctgtaggtcttgccttgggaatttgggttggttagcggggacttgatcatagggaggcggtcctgggatgaaggagagatgtggtgaccatgtgctcatcactgggttgcttgaggcatttgcgaccgaaggcagacttggccttggatcttgtgactgagtttaaacatattgcgagatgtagggtgaacaatatgaagatgtactaaacacctcttttagctgtgaaggttgagtagctgacgaagcaagctctttctgcttgttggtggtgtgatggcatgttcttctagggtgtggccgttgtcctcaccacaaaacaagcaggatggcttacttggggcacaccaaacctactaccaaagcttcagcctcccttcgtcttggaggaggtggtcgaaatgtgatatgtgaagattgctgctgagagcttgcttgttgacctgactaacattgtgactgggccatcctttcctcaccctgtgatgggttatggatgcttcggacatgccttggatggaat

SEQ ID NO: 89866 - DNA, 1031 bp, Zea Mays
gtgggaaaaacatataaatgactatgcattcatcacttgaatccactgaataaggcgttactcaactttggaccaggtgaccagagagactgaatgtgaaccaattaaactttcttatcaattggccattgtcctaatcaaccctctaaaaatctaaaatctcaaaacgagaagctctcgactcaactagtgactcgatgctctatagtataaccatataacacagttgaacacttaaaccactagaaaagtcaacacatgcatgaaacaccttgaaatatggaagtggtaatgtcgtggtttcgaaaaccagaggcagtaagatttatgttcggtgggggtgctagtgcagactcactccgaatggtgaagacatggggtttatactggttcgggttcgcaccaaactccagtgtagtgctgatcgtagtgttgcaatgagtgtgttacaacaaatgtgctcgtgtgggaagaaggagggggctctactcttttatatctcaagggtaggaccttacagaggagatctgttttctgctagggagagagagattggctcccctgagttgtcgtggtgggtcctccgtagggttgtatgtagccatactcccggtatggcgccgtctgttactccggctcctgtagcgagtccatcactgacatttttgtagtggtgcgcggcgggtcccacggatcagtctcatggtgtgggcgtacgtggcgtggcttctcctgtcgtcatgagcccttcgtcacatgtcagcgtgcataggcatacactcagtatggtgcgctgtttcgtccttccaatgtatgtgccactgtagagaccccggtgcccattcgacgtgttgtgtgtatgttcgaacgtggcttggtggtgacgcatcctgtcgtaactgatatggtggatcagttgtgttggactcagatctttggctcgccgggttgctcgacggtgggttggtcagccggagctgattggtggagagttggtcattggagttggtcatcgaggagttggtcagccg

SEQ ID NO: 89867 - DNA, 903 bp, Zea Mays
cttctatctcgtgcggtgctgtcattgttcgtccctcggatggtttaagttgtgtatagtatacctagggttgaaaaacttcgtcaggtaattcgagtgttaaatatctcaaatatgctagcatcatgagtcccttgtttaatcaggcatagttgtgcatgggaagtttcaggcatagttctttgccatcattggagttctcactagctaccccatatagagccgcccagctctacggttaaaacaacacaaacctaaagcctttcatctgacgaatggagttggaggtgcttacgatcgttggcaatgcgaataaaaggtggagtcccttgtttaatcaggccagttggtgcacacgcaattgcacgagctgaccgctcagtaatattaattactgtattagttagtgcataaattacgtcgccagtgccctgtccgtcccggcttccggtcccttatcttcaccatccaccaccttcaggccaccccttctcgcccctagttgagactaggagagcacacagctcttggttctttgggaagggccgcccccatgcctcctcctctcctcccccccggatgcctcacttcagctagctaacttccttccttcgaggttttgctaccacctgctgcaacaatctctgctctcgtccgccaagctctgtgctatgtcgctcacggaggtcagcctccacttctgctacctccactccctctccatcgtgcttctccacttcctctacgtgatctcctgatcggccgcctaccgccaagttccgatcgaacaaagctttggtttgattcagagccgaagctttggtcgttccagttccagcaaaaaattacttagtattaattaattactcggtgattgttcctcttcgttccatgatcttgtcc

SEQ ID NO: 89868 - DNA, 510 bp, Zea Mays
gacgaaggaagtattctttttagatcagaggaggttctactactttattgttatgggtgcatctactctcttctttcaccataacctaaaattacacttccatatgccattttttatcttctttcaccataacctagaattgcactttcatatgccattttgtatggagcgaaggaaagtaattatttagaggaggatctactagtttattattatgggtgcaaatgcaattattactctcttctttcaccatgacgtaaaattatacttcgatacaccaatccgaccacgacctcaactttatttaaatgtgagaatccaaatgtcccatctaagctaggacgacccatgcattacttccaaccgaacaaatatcatatttatatatggttttggcttgtacttccaaatccacatatagagaattattgcgtcgactactttcctaagtctgctaagctcgtctccctgtaggaataagaacatcatttgcgtggcgtttggttcaca

SEQ ID NO: 89869 - DNA, 651 bp, Zea Mays
ggacactagagcagaaaagacactagcaaactgttgcagtaatcctaaaatttcagaacataaaggagaggctgaactctctacagctagatgatacacatgagaaatatggaccaacaactcttcaaactactgatgcctagatcccaacaatacaaatgaagaattgtgagaagtaatagagagccatttctgtcggcaatgtatcttcatggggctatgtgtttctagcgagtccatgcccaaaataatatcataactctggagagacaacaccttcaaatcttgctgaaaagtatacccatggatactccattcagcgagagggatatcttcacttgtactagagtttccatgaccatgactaactagagtttgtcaaggagacactgactgatgaatgaatgggtactcccagagtcaaccaaaatggtgactgtgataccttgcatcagaccatcaaactgtaaggtccccttgattggagttgccaccacagcttcagataacaacactgaaaacaaatgctcttcctgcacagatttctgaccatcagtaactggcatgtctttagtaggaaataaatcccacaattcttgcatagctcgaagttggactgaagctgcataggtatgacttcgatgccatttc

SEQ ID NO: 89870 - DNA, 450 bp, Zea Mays
aaaaaatggagaaacttgccagagttagagatatgctactaaagaaacctgtctcacaggcgaatttggaaactggctatatggtgcgtgcctgtcataggacagagctgactaatgacgaagctctcaagaggttagttttgcctctacacctcctatcataatgttgattgcattagaagacccaattaggatgtacttagatgtttatcatttgcagatttgcgaagctgctgtctgatgaaaggcaaattcgtaaggcaagatggccaaaatgaagaaagcccttgtggttgtttcaacacacagagaactctgcattacttcaattaagaattatggttgatattatttgttgatatgaattgtaacaataaaacaacttgtattggatcatgctgacactatgaattgatgatgttggcttctgccgggtgccggctgtctttt

SEQ ID NO: 89871 - DNA, 702 bp, Zea Mays
aagacattaaagaaatcattcagtgacccatctggtctcgcttcggcctccgaagaccaaaggtagaaattgatggcgatgtcgaagcatgtcaaagggcttttagcactgtgtgtgacttcattagcacaagggacttgattcaagagcatatatccttcagggtagggccacttgtggaaagttgggatatgccgaaggagaccaccgccgattctaatgagggtggtctggtccgactgaagtataccttcagatttagggagaagtttgatgagccgaacgacgactggctgaagtgtatcaaagctagcagcgatgagctacttggagcatactccaaggccgaagataatgctctgaacgcagcctttggaggtcggggcaagaaaatattaaacagggtatttgatgctattggcttcgtataccctgattaccgttacccgctgcgagggcaagagaaaaagtggaaatttacccgctgagccgaagagcaaaaaggtgaaggttcagacccaccggccgcgttatattgaaccggtcgtagtgcctaaatttggcgaaggagcctcttcaactgccgaagcaagacaggctgctccaattgcaagagtgttgaggaaacaactgtaatgctgaagacgcctacagttgggccaaccaaacctaaagatgataacgctgaagagccagagattg

SEQ ID NO: 89872 - DNA, 313 bp, Zea Mays
ttaaaatcggttatcgaagtaaacggtcgataagacgttaaaccgatttcgatatcgattacgaaattcaataccgattaccgattccgtttttgggaactaccgttggattggataaaaaattcgaaaacggtttctggaaaaccgaaattttttgaaaccgtttccatccctagttttcatcgcgtgtgattcgggctcggctaacaaagatctcaaattctcataaccgccagggaaattgctatctaggagtttgttatggtccacgcggggttggagatttggtcggtgactataaaaccgagcgccc

SEQ ID NO: 89873 - DNA, 412 bp, Zea Mays
attcaacacttgggctgcggacacaatttccagaaagtacatggtctaaattataaattacagggactagtttgtgattctttagtatttgggtggacggcgggttggtttgttaattttaggagggctcttatgcaaagtcgccaagccgaaagtgtatacgaacaccgctggatgcaggatcaacggcgcagattacacggggttctttatgaaccggtacgcattaaggaccgtttgattggagatccattggtcagcacttcatcaggtcacgtctgtccatagccacatgatccgcatcccatggtgtgatcatccccaccaatctggtaccctgccacaaatcgcggccgttagcgtgggatcggatggtgcactcatgtcgtcccccatgccggctaaaggcggc

SEQ ID NO: 89874 - DNA, 854 bp, Zea Mays
ttatttctcagcgcgaatgcaaactcgataatcaatctcgatttataaatctcgtctaaagctcatttaatcaaacggtcgacagttgctagtcgagccgtgtccgagtccgattcctcgaccttcgatctatgcccgaccattttatccggatcagtactctcaaacgaaatgttatgttgtgtcggtctctaattaattcttaaccgacttggcctaatatctctatgtccgaaccaaactcaaaacccgcatcgacagtgattttaaaatgtcacgattcgccttcttcgacaaaaaacctcaagccgatttaatcgctatctaaattgggactctcatcctaaaacaaaaatataatgtcatatttagaatgcgcttgaagtttataatccaggttgtgcgcgttatcagactaaattacgtacgagggtaataatgtaacaccttaggtgttactatacgcttaacaacgagtatggattgagcatgagatatcagaggaaataacggtctctatgtcttaatcatcttggctcatcccaattttcgatatcgcatctatctccgtttacctgaactgtccaaaatattttgtgcagctcggtgttaaattgccatctacaatgtcgagccatgtgccgcttgagttgcttgactacagcaaatacgaatttggaagttcgacccactctcactattgttgtccgaagtgaaaatatttctggtaactagaagtaaattgtcgtataagacaacgagacctgagtcgttaagccgcttggttatgcgaagatgaattttagatgcgcttgatttatgtgatctggactgtgcacgttgccgtaaaaaaa

SEQ ID NO: 89875 - DNA, 589 bp, Zea Mays
aaggaaaagatgaagccagtcaagatcccaaaggtgctgagagtcagtacccaacccagcgacccgtggaacgatcctgaacataacagaaatcatgattaagaataacacgacattcatgatcagtaagctgatcgatagaaaaactctacatgtccatcctgtccgcaatgatcacaatgaaaaccactaccctttccatgtgcagaaggagaagatgccgatgacatctacaacgacgggggagcaatatactaggaaggcgaagatgaagaccgagcatccaaaatgaaatcgaagaagacaataaactagctgaacaaagacgagtctcattgctaacatcagcaagagcatccaccagattcacacaagggtgacgaatgatgtctgggaaggtgaagacagagaccaagtagccaaaacgaaaccgaagaagacaataaaccacctgtacgaagatgagtctcgttgcgaacatcgacaagggcatccaccagagatacaaaagggcgacgagcaagtaactgggcatgaagaggctcaaactcatcacacaaacaggtcaagaagtcatttgtgcgaagaa

SEQ ID NO: 89876 - DNA, 587 bp, Zea Mays
acgacactgtaaacaaccatatgctagcattagctatctacactttatcaagcgcactacatcaataccactggaaggacgacgattactacctataattaaccaacacaaacaggacatcacaagtatgagcatttatttaattagctacggcttttcattagtttttctattaagcacacaaaaagcataccaacacaagtttaatagaggacatatgcaacaatgtcgatagactcctatatcacaatcaactacagcaagcaagcacattaatcatggaacgcatgttaacctaagtttagatattacaagtctatgtctgttaagtgctaactaagcatttttagtcaaagggtgaactaaacaattaaatacgcacttgcagatttttaggacagcagcgcagcagtcactcatttcaatcataattcttcaattattaatccaaaaatatcaaactaggactttctgtaaagcttaaaaggtgaactacaactttggtattttcaactcaacctgattcaacacttagcaaggtcaaaaagtgcaatcacagcagctctgtccagatttggacagattca

SEQ ID NO: 89877 - DNA, 1140 bp, Zea Mays
accaataggagaattcttgctaaggatttggtgagccagctagacatgatcttgagaggcaaagtgtcaaatgttggtgctcctattgcctactctgcttggaatctaccacctcttaagtcctttttcaattttgtgtctaatcctcctgctggtgatagtggcctgggtcttagaatgcgaccctctctcgaagatattgaggtattggttgcttctctttgtgatcttcctaatgatgagaggcaagttcattttgagatgccaatgagtccagatgatgcagaaatgagtgcaatgcttgacatgtaggctggagaatcatcttactcgggtcctactgaaacaaaggttgttgccactataccagagcttgacaaaatagcggacgcccaaaagcctgagggtactcgcccaaagcgtcatcgccaagtcagtcgtccggctgcgcctgttgaagaaaagaagaagaaaaagagacggcttcggcgattatcatgcctagaccagggcgctggcccttctgctcctattgctgaagaagtaccggcataggtctttactggagttgatcccactggtggtgtacctgctgaagttgaccccaatgggtgtgaccgtgcaccgactgaccctaatgggtgtgaccctgctgaagctgaacccaatgggtgtaatcctgtagcagttgagcccaatgggtgtgatcctacaccatcttttgtcaacattttttctgaggacaaagaagaagaagaagaagttccattaattcgcaagaatagccgactatacagaggtagtagaggagatagtgatattctttatccagccctgtctgctcttgttagccttcaggatttatctataacgaattttgatgagacccttgaggatgtcattcctgaggatatgttgttagagtcgactgatggtgatatgatggatgtttgttctgacattccagatgtgggattagaggtatcccgggcagcatctcatgcgtcgtcgaccttagagggtggtcttcagtgtcaagaagttggtcaagattgcccgactcccatggaggtgactgaagatccttcagccttagaggtggctgttgcagaaaatctagtcctcaagggtgatgttggc

SEQ ID NO: 89878 - DNA, 795 bp, Zea Mays
tccaaaaccgggtgtgacaagtcaactggcttctccagtccctgggtcaaatcccaactctcgtcctttgccgctctcggtccatcggcatgaacccgcatggccttaaccttcgccttcgaacaccgtctccacacctgcacaccacaagcaacaaacatggttgcattacacaagctctcgtaccctggttagtccaagtacacaccagagcactacccatgttttcattcactcattatcaactagaatagcaagggacaagtcaaccttgtgttcacaatctgccccttgattagtgtattatcaacaccaccatcattagaaatcaaagatttgcagaaagaaggaagaagataatctcacttagatgaccaaaagctaaacaaaagctaaaataggtcatctagagtaagcaaagcatggtccccaaagtaatgggcaataactcaacacgaccaagcgagaaaaatggctagtcctcaagaagaggtagaaaaggggctcaacaccactaaccaacagaccaagccatatcggagcacaaaatcagcacaaaagttgtaatagctagttcctctagaaagaagcaacaactcagcacaactagagaaagttcccacaagctcaaacccccatgaaaaaatgtctctcccagaagcatatctcaaaacctcatagatggttagacatcctcaacaaaaaggtgtatatgagaagaactctgcaaaatcttccctaattgcacatcttcaagattttcccccaaaagcacaattctcccaaagattttcc

SEQ ID NO: 89879 - DNA, 430 bp, Zea Mays
tggcctgcacgtgcatgtgcaactaaatcaccttttccaccatttgcctgcatgcgcggagacgagacccggcgaggatctctactaggtcaggcggcgcgtgagccggtcgcatctgtcgcacacaaccaatcacccggataaagactatcagtcggcttgtcacaagctaacatacaaatcgttgttgttaccttctgaactgagtggaatccacattgatgggttgcattgtatctctactatctattaagtcaatagtgtagaccacagtcacaatcatgccccctgctctcgtcgtcctcacgtccggcccgccccccacaactccctcagaaactcgcttcccgctcaatgcgctcgcacacatcgccgccccctggcccacgattgccccctccccgtcaccacctcgtcgtggcctagtacc

SEQ ID NO: 89880 - DNA, 441 bp, Zea Mays
tttggggcagttcaacaagaaagggaaaggatggccaatatgcttaattgttctcttggaacttggccgatgaaataaaaaaagattcctatttcggatggtcgtctcaaaccttctgcgtttgaccatattgttggaaagatggaaaaaagcctggacccatggaaaggtaaacacctgtcttctgggggaagactcattctgactaactcttgtttaagtagtctaccaatctatactatggggttctacctcctacctaataagattcacaagaaaatgagctcgatcagagctaacttcttttgccaaggggccgaagactcaaaaaaataccacatggtgaaatgggatagtttaaccagaccaaaagaccaaggcggtctcgggatcacaaacactctcatgatgaacgaatgcttgattgtgaaatggatatgg

SEQ ID NO: 89881 - DNA, 776 bp, Zea Mays
ggtttgccggtgacctcacgtgtgcccggataaccccattgcgccgacatgtgggcccaggtggcacacacacccgcctggttccttcgcaccgacagcacggtcccaaatgtcaaccattcgtccatcgcttgtgtattctcactaatggtgaccgcatggggccctgtgtggcagccagtccaacctcccccatgcgtccgtatcgctggtttgtgggaccaccacttgacgaaccagctttagctcagtggacgcaacaaacccgccactgtccacccaagattctcgtgcgccatcgttaatccgagctccggatttgtatcctctcggtgtacaaatagcgagtgctagcgtcattgtctatggatgggagagagagaggatgatgtaccgagtggacagcagcggtctccaagggtaggaggggagaattgccgccacgaagaagactctagcacaccctcgtctgagccctggcctgtgtgtgccgatgttcactagaggttaagtatgtcgtgcgtggcatcttcggtcaagaaaggtgactacggagctgacaatttctcgacaggctttgggaatcgtgcgccgtcatgatcgcgcgcaacgacggacttcgtcactggtcagtgccctaattgtgttcgcatgattcttggctgggtattaggcgttgtgggtgtgagattggagcactggggtgctacgacgcggtgctccgacgaggcctcaaccgtgtgggcggaggctcggctgttgccggcggctatggg

SEQ ID NO: 89882 - DNA, 626 bp, Zea Mays
tgcacttcagcgacaacactacgatgaggagagccgttgagaagctttttcgttgcatcccggagaagtataagcagatcgctcgctcaatcgagtcactgctagacctctccacgatgacgatcaaagaagcgattggtcgtctcaaggtcgtcgacggcgacaaaccataggccctctctgggcctatcaccatcggcgggaagctacatctcactcgagagcagtgggaggcctactagggtgacaagaagaagtgggtcctcctcgacacggggccgcaagcgcggcaaggcgcacagagacgcccaagccggggcgcgaggacaagctgagggtgctgcccgcggaggcgcccaaggcggcgccgtcggcaacaagaagccgacatgagatgacggctgtcacaaatgtggcaagcttggccactggaccaaggaatgtcggcagccacgacgcggccaggccaacgtcacacaggcgaaggaggaagctctgctcctagcacatgcaagcatcgaactacctccagcggcaccggccgcagcggcactcctccaccttgatgagtcgaaagcacgcgctttcctcggagacggctccagcaacgacatgatagaaggatg

SEQ ID NO: 89883 - DNA, 541 bp, Zea Mays
gaaaaacaaagggtcaatcaatagaagagtaatgagatggctcaactccataattgactctctacagctgctagagcttgatctcaacggaaaaaaatcacctggataaatgaacaagatgatcctatgatgtctagaattgatagatttttagcgacaacggagtggcatgatctttccccgaggctgacctacaggccattggtaccatgacctcggaccactgccctttaatattgcagggtcattctacttttatctcttataggctttaataatgcagggtcattctacttttaactcctatagggggtttagattcgaagctttctggataaaaattgatgggttcaaagaggtggtttagcaagtttggacgtctagagtgaaccccgcagacaccatcctttgtcttcatgtgaatatgactcgcacgactaaggactaaagtgttggagaaaaaagatagtaggcaatatcaaagtgcaactagcaatcattcagaccatcctcacccttctggagaaggcgcaagaatcta

SEQ ID NO: 89884 - DNA, 470 bp, Zea Mays
ttcgatcagttgaggggagccagtgtgttctcaaagatagatctgaggttaggctaccatcagctcagaatccaaccctcagatataccgaagacaacattcatcaccaagtatggactatatgagttcacagtcatgtcgttcggtttgacgaatgcgccagcctacttcatgtacctgatgaacagtgtgttcatagactaccttgacaagttcatagtagtgttcattgatgacattcttatatattcccagaatgaacaagaacatgaggagcatttgaggaaagtacttcagaggctacgagattgtcaactgtatgtcaagattagcaagtgctcgttctagatcagtgaagtcctattcttgggtcatattataaatcgagagggattggttgtagatccgaagaaggtaacaactatattggactggaaagcaccaaaagatgtccgaggaatcaagagttt

SEQ ID NO: 89885 - DNA, 1047 bp, Zea Mays
cggttttgggctattgatctcgatccgacagagggaaacccactcttttcccccccaaaaccctagtcgccccctccctcttgttcctttgtttggctgcccccctccctctagtcccttttggctgccgccccccccatctccaccttccaaaagttcttgcagcccaccttcctcaaggaggaaaggaagaactaaaggtgattgtgttattatctttttatttgtgctgcaatccaattgttcattcgttcatctatgcgattcggtcgaggtgctgtccagaattttgttggtggaagaacagcagtagtattattagtttttggaaatttttcgtggggtaattggtggtaatcattgtaaaaatcatgtagagctttgtcatacctttccaaagagtacttatgcgcttgattcggagatatattttaggagatatcgcattttgatctcaccaagattgctgtccaaaaactgaacgcatggtgtatttttgtgggttgtttgggggccatttagatgttggaatttaataatcatttgaatacaaaacttgtgggcaattttatgtagatgtttctggagtttttgtttgttaccactgctgtcataattttaaagatatgaaattgtcaagcagcgccgctgcagtttggtgggtgatggggagagatgtcgctcgcgacgggtttggaattgtgcttaggtgcggcgtagtttatgagcatttgttatgtggatttgtgcactaagttgtgtgtcgaaaacatgtgggggacttccggatcgtacctagggttttgtccaaattccctggtgaaggcaagtaaaatagtgatggtttatcccgttggttgatttatgtgtcctatacttgattatatcaatgtcaatcgtgttcatcctcgtatttcatgttgagaattgttgtttgaagacattcatgttctattatttacttacgttgagatgttgttcgagcatgttacacgtgtgaattattattttgaaggagtggaagtataaatttaacacatgttagtt

SEQ ID NO: 89886 - DNA, 330 bp, Zea Mays
gcatttaatgagccctgtccaatctactgacgggcagcggccaggccatctggcaggcggcgtgcctgtccgtttcgttggcaggcactacacccatgctgctgcatgcactgcactcatcatgacatgtacgtcaccaggcaagcttccctagcacgacaatgttgtgcggatcgcagataacagggcagaagaagattgcacccgacccagcattagttgttcgaagtattacgtccgttatatccctgggcccacatgtcagggctcaacatccttttacgtgccccctttagctataaaaggggaggcacacaacgttacaagaca

SEQ ID NO: 89887 - DNA, 528 bp, Zea Mays
gagtttggtacctcgaggatttcatcggtccacgtgttggagatgcagcggcttggttactttggtaataaagtcagccgggccctgggtgcagaggaggtccccgagcctgaaggcgagttgatagtttttgaggcttttttgttgtcggtctttgccttccgacacatcgattcgtggcagaggtgttgtgaaggtttgaagtgcaagtccaccagttgacgccgaacgccatggtggcactggcgaagtatgtctgggcagttacttcctacagcgggcagatgtctgtgaaggtctttgccaaaaattattgcctgcattggcagaagaggaaaataggaaataagatagcacaattcggatcgtgcaccttcacgccgaggactgggaagacttcggctgaggttgtggagatagtccactgcactaggaacaaatgaggtaactggtgggattttttgttctatgtggctcctggtgacgtcaaaggcctgccgagcctgcctccggccattctgtgctcac

SEQ ID NO: 89888 - DNA, 537 bp, Zea Mays
gtgggtcggtgagcatcacagagttatgagaaggctcaaacgagggagagaggaggatgaactgaccggaaagggggctggccgcggtgaggtcagtttcgggtggcggaaacccgaattgggggaaaaccggaattagggctcgctggtgatcggctgggggcaatactggttggggtggtgcgtgataatgtggtggagctagccgcgggctcaatttatagaagaagcgagcggtggtcgtgaatttgggcgctgacgcgcggcggccggaggtgaagaagaatttaggcgctgtgaattcgtggccaccgtcgtggcgagctcaccggcgacgattggacagccgtagcgagtcacggtgtcgttgtggaaagcaaagccacgcggcgcaaggtcgtgcgacggtgatcaccggcgttcttatcggttttagccgcagggcagaggggaagtacgggggggtcaccggagtggcgtccagcgcacgggcggtgaagatctttctacccagagcgttatccccgagtccggtgc

SEQ ID NO: 89889 - DNA, 695 bp, Zea Mays
gttgagttggaagaataggttggagacgactgggatagatccaataagaagaacccagctaggcagctaagctaaaaaaagaagaggaggaaacagctatgaatggtacggcacggacacaataatcttaggacagtggcaccaccgttcatccaaggtaacgctttggcacttccaatgctagtaataataccagcagctataactgatcctgacttgcatcattgtacattcaactgaattaggaggcttattggtcgtccaaacagctcccgcaccttccaattcgaagtttcttgttgagtacagcatggttgacttgatactagcatctgtaatggaattccacaagctgagtaggctaaaaatatggaactgccttctgtgaatctgaaactaaatggcaatagatggcagttttgttcggtccaccttcagcttctcctatcacctttccttttttacacctttgtactgtagtacatgaaaagaaggcatacgtaatcaaatagtcactctaaataacaattattgctaattaccactgagcatatatgtttcgttataaccagcctatgaaacaataacgtaattgtggtattaccaagtgtgagataatatcaagtttagaaagtatctgggagagatgagggtaaacttgtgcgctcaactgcaggttgcacagtatgccagtt

SEQ ID NO: 89890 - DNA, 964 bp, Zea Mays
ccataatcgttagctcgtagcagttttatcacaacaatcagattttcaagaatctacagctaaatcagaggttcagggcacattatggcctattatagcctgagccataccatacttgaaaaaaattaacagatccagcccaactctatctggcccaatcgtctcatgcccacacccttcctccacgactccacacactcgctcttagccgttgtccacactgcacagacttcttgttctataattttattagttgtgtactaaatattatacagtcgggtaaagctatacctaaaaaaattcatcctccgccattgagctaaatcaaacagactctgaatcttgtgtgctattataccattacaaaagtttagtgatcagatgtaacactcgtcagtttggttttcgctctttatttggtcttcacggtgtcccaacgctatcctctctccatgttgcattacattctcatgcagtcgtgctcttgctaaacccgagcaaccggcccactttccatcaccgttgtcaccaaactaggaaagacctcgagttgttgtatcgagcttgagcactatcgattcaattgcctagatggatcacgacaatgacaagaactgcatcgtgttggtgagcctcacaacaatggcaacggagaacaacttaggcaccgctgcctcttcaaaatcctcataatttttctcttgaaccgtcctggtcttgcagccaatgaatgtggctccacccgtgagggcatgactatgttcccccaaggctaagttatattcctcctgtagtgatgggtctaaagttgagtccttgtccctccatcacattaccattatcacgcggatatcccgatacacacccatgtttatgtggtgctcctagacaacatcttcatggatgtgctgacgtgtgttgcacttcctcctctcccgactcctagacaacatcttcatggatg

SEQ ID NO: 89891 - DNA, 771 bp, Zea Mays
gttgttgcgtgcacgagcgttgtactagtttgatgatgtagttcggatggtcctcatcttagccaatcttgactccccctatggtaatatgtttatattaggatttagggcaatgaggtactctatgcccacatcactagcaataaccctgaatgacttcggtgacaagttagtcgaatgactccatcctttaggcactgatgtcgataacctgcatgctgatatttttgaagtaccaatgtcgaagaattttacaccaatgactctagtcgctcatctcctgagcgcccacatgtaatagtgttttgaccttacaaatacgagtgcatgtctcagctcccttaagtaattgaaacttgtatgtacacttgtcggtgttctgaaaccaatgactagtaatgtacgtgctttgcacatctggtacagatggtgtacaaggaggacacaagaattttataccggttcagacgaaatatctctacatctagttgggtgacttgcgttaccctacaccaatatccatcggattttggatatcagaatatattctcggatattcggataccttcccagataattgtgtgcatttaatgttttttacagaaaaaaataataatacacaaatagcagcagaaaatcataaaattttacagaggtcaaaatgtttggaacataacacccacaagatgccaacgtttctttcatttcactttcacttgtttcatgagttatatgtgaaaatcactctaagtatacaagtttcaatataac

SEQ ID NO: 89892 - DNA, 275 bp, Zea Mays
gttctgccgcaactcctaagagaaggatggcaaatgtgctagatgttgtgttggaaacagcaaaaaccttgagtcctgctcctacaagaaaaattaccgaagcttccaaggcgcaacccaaagctgaaacgaagtagacagaagtcgaagctgcaacaattcaagatgaaaccgaagctgggccttcagtgcccacttagacagagcctgccgtagttgaataaaagttgacagagcaaattgcgtctgaaaaggttgaaactcctgctcccaaa

SEQ ID NO: 89893 - DNA, 700 bp, Zea Mays
ggctgttgggcactgatctctgaggcaaatgattgatgaccattaaccaaatagaaataggagtacgttgtaggcaagttcgcaagtggcagtacgcaggactgcaacaagaaacttatttattgagtttaggacttagatgcttgtaatgttgcagacctatattatctctatccggccaccaaaacatatttacttgtggctgtaatgttgcagacttgcaccaattaagttagaaactttataactatattgttctatggcaactttggctgaaaatgttgctttatgtttggtgtaatgttgccataatatgtctgttgaattatttatctattctaatgatgcatgcttaactttaatgccaacttgttgaccaattaactatataataatggttgcatctgttggtgtttccgattttaattaccagttttcaaccattttcgatgtgtttccgatcgtttatatcgtttcccgtcattccgttaatcccggtttcgttttcccgatcggcattaccgtttccgatcctggtttcgtttttaaatatggatttgaaagtggttggaggtttttcccgatcgttttcatccctaatttctgattgaacaagcttgtagcgtgttatgtagtactttcatatccaaaacgttttagaaccctaatgtttcaaatctgtattgtttctattgcattg

SEQ ID NO: 89894 - DNA, 294 bp, Zea Mays
gcggggcatagattcggaaccacctgccaagtcgtcgctcgcaaggcattgagggccctgtgtcaaatttatgaagaagaagtggtcgacaccctgctcagattctttccgccctttcagagagatcgtccagtttggatgaccaggatgcatgcattggaaggacagcagctgcttgaggacgaccccacagtcgtgtacctcactgcatacctgctcaccctggatgcacagtatgatttcttggcttggcaccaccgtcagatgattgccctagcagaatatgcagagaag

SEQ ID NO: 89895 - DNA, 370 bp, Zea Mays
cttgtccctataattagcattgttttttgcagtcccctgcacaaatatggtgaaacctaacaaggcagtaggggttggttgcaaccagcctgacagacattttgttattttgctcatcgaattcattggctgtctgaccggttagtggtagctgaatagatagatgactactcatgtatatctttctttccctgtccttgtaattagcattgttttttcacagtcccgtgcacaactaaggtgaagcatgacaaagcaagagtggttgcttgcaaccgacctgacatgtattttgttattttgctcatcgaatttattggctgtctgatttctgcttacctgattcctacacaatcaaattcattagctc

SEQ ID NO: 89896 - DNA, 684 bp, Zea Mays
tgggcctcaaatccagataaacccaggggctattctacaactaatcctgagactcagagcactgttgctctggacggcgggttgataccctggaagcccgagggctcataagtaaaacgccaaggccgaaggggtacggggttctcacagtcgtccgattacaaaccgacggtccagattagaattgactgcccgcagggcggtatgcgatcccagacgttggatccccccatcggcggccctgatttaacgagtcctagtgcgagtaatcaccacctgatcccgatcggacggtcgccgtgcaattagaacgaaccggtacgcgatttctaatcagagccgtccctgattcgatcgacggttaccactgcctctggtctatcccgcgcccaaaacagagttaacgccggcggcgaacggaaccccgacggcggcgacattaccgtggcaccagtcaagcgcgcgaaagcctaaggccctcctccgaacgactctacacgacactgggacgacactgaatccgatcggaggtcttaccagggattgggagttgcaggagacgctggccacggaggatggcgggtccacggcggagcagcgagtacggtgaagaatcgtcggccaccaagtggttatctccctctgcgaaggtaaccgacaacaccgtggaggcgcggcgaagtt

SEQ ID NO: 89897 - DNA, 682 bp, Zea Mays
gttgtggatctcgaaaagttatggaactttgtagttaacaactttttcatttgaatttatttagttcttcaaacaatcaatttatttagtgcctcatataatcaatttacaatcaatttataattacaagtgagataggggaaggaaaagtaatataaatacaatcaatttgtttagtgcctcaaacaatcaatttacactcgaaagcctgctctcacaatgaggacgactcacgaccttggcattttgaagaccaggtacgagtattgtggaatggccattaacattgccagcccgggtcatctgatgatggcgttgtaggcacattcgaagttggccacctcgaagcggaggaactcggtgcagaagtgatcaggcatgttgtaggtacatgtgccctagtgagtactctccctgacccgttatgatgccaaataagggattgtttgactcttgaagttatgcaatggagatcccaagttcctaaagtgtcttcaggaaagtgatggtgacactccttccatcgtcgatcagcacactcttgactcggctcatgcagaccactaggctaacaagtaatggatacttgcctaggtgatcgaacttgagccattggtcaactcagctgaaggagatcggaatctcagaccagcggtacagcgttggtgggtcggtcatagct

SEQ ID NO: 89898 - DNA, 723 bp, Zea Mays
cacccttcgaagctttatatggacgatgatgtcgcactccgttaaactggtctgaacctggtgaaagaaatttcttcaggcctgatatggtaaaggaaacaaaagagaaggttcaacgaataattcataatttgaagaaagctcaagctcgtcagaagagttacgcagacacacaccggatacccttgtactttccagttggagattatgtctacctaaaagtttcaccaatggtatatcacgtttcggggtaaaagggaagcttgcaccccggtatattggtccttttcctatccttgaaagatatggaccagtggcataccgacttcagttacccgaaaccttgtctgcagtacataacgtgttccacgtgtctcaattgaagaagtgtcttcgggttcccgatcgaaccgttgacgtaacagatgttgccctagaaccagacttgacatattccgagcatccaattcgtcttggatcaaaaggacagaattacccgaagaaaaactctcaagttttacaagatacagtggaaccaacattcagaagatgaggctacatgggaaactcaggactttttagaaaggaatttcccaggcttttttgcctcatgtaatttgtaaagtgtatataattgttgtaataaaggagtgagccccaaaccacccctgccatgtactaagaataaggaaataaagacatgccgtgtttccttttccatta

SEQ ID NO: 89899 - DNA, 350 bp, Zea Mays
acaacctcattattgccttgaaagtagctactatgcatccattattctcattagcattggatagatcaagtgagagtctatgcttgttactcttggtgatcgatatcatctaggcaatttggtggcgagtgggagtttagtgatcattcaaagagcctatgggtgacccaacttgacttgtacatggttgtggatggtttagtgtgctagagtgggaaagaaccaacctatagagaacatttggtccttgtgtggatcaagggagagtgacacccttgtgcaggtgctccaatgaaaaatgatggggagtttagactctgtgataccttgggaaaatatcatggtatttc

SEQ ID NO: 89900 - DNA, 525 bp, Zea Mays
taaaatcaagattcagaacacccaaacctccctgacttttgggagagcacaccgacaaccaatccactaaatgaaattttttggactgacgacccccttgccagagaagacgcctcctaagaatattaatttttttaataaccgacttaggggcaggataaatcgagagcatatataaaggaacattggataagcatctgtttaaaagagtaagtcttccccctagactcaggaatcttccctgccatccagcaagccctttttccaatttctcaatcatgggcacccaaagacttttatttatcttattattatcaattggcaccccaagatacttcataggaagactaccaataggacaagtgaagatatcagcatacaaatagtcaatctccttagcatttccaaaacacaaaatttcacttttgtgaaagttaattttcaaacctgacatgctttcaaacaaacacaatatgaatttaagatttctggcaccttctaagcaatcttgaataagaaaaattg

SEQ ID NO: 89901 - DNA, 651 bp, Zea Mays
ctcggacctcaaggaataatcactgcccgaaccgactttcaaggagctgcagtgtgctttcaaggggctatctagacgaccctcgccaccagaccctcggtagcacttccgacgatgaatgacgacgcatcgacggggcatcgcctcaaaatccccataaatgaagcatctaccactgccaccatgcgactggccgaataaaccaagaaatccaaccttggtttctccaacaaacgcaagatgacgatcatcagttccagcctcaccgccaaataggaaggcacgctcgtccagtttctgcaagacaactgggtgtattcgcgtggcaacccgcggacatgccgggagtccctagagagctggccaagatcaaactgaaggtgtatcctcaagcaaagccgatccgacagaaaatgcatcactttatgcccgacaaaagagaagccatacgtgctcagttagttcgcctagtagcatcaggcttcattagaaaagtaatgcacccgagtggtttgcaaatcctgttcttgtacacaaaaagaataaagtagattggcacatgcgcgtcgactatattgatctcaacaaacacttcctgaaggatccttcgggctccctagaatagatcaagtggtcgactctactgccggc

SEQ ID NO: 89902 - DNA, 279 bp, Zea Mays
aaagaatctgaattccctgccgctgaagcttctactgagggattggaatttatagtgcgtcacgcggcagggaaaaagctatcagaggagcaggttgccaaagctaggcaatatgctaaagatctgaagtatcccccaggatccctggtgtttgatggcactgacgaagatgattttttgtactgccttctggacaacaaggagatatctgtttgccaggggatggtagaaaatataggattcctgaagctagagcttggcctgtctgccatgtcgaag

SEQ ID NO: 89903 - DNA, 978 bp, Zea Mays
gtttgtgatttcggtagtgtaactctgttgttctcggcattcagaaaacagaggggttatgctgccgaaatcatgagcggaaggtacacaagtcagaccaaataacacacaacaggtgccattcttaggtgggtttaggacctatcctcttcctattaggatttgtaattgtgaattggttaataacactgcacactgcacatgtttgccatgcatgacgctgatatatgtttttccattagctttttgaaaatgagtgacgatcgaaaaagggttatgtatgatggattcaatagggacactctggggcactctaatgcatggattaaggttgctgataaattcgtggtgcgtgcatttgctggggagcctcgtgtggtgaaatgttcgtgtactaggtgtcgaaacatgacctgattagacaagtttgacctctccattcatttttgcaaatatggctttaagccacactatctgctatagcgcgagcatggagaggtggatgcccttccggagacgaacacagacgaggacatagaccgaatggaggacatgctagatgacatccgacatgagtatccaacactagagaccgactgaccccgccggaggaagtgcagtagttttacaagttgttagaagcctcggatgcaaaagtgcacgagggcactaacgtgatcgtactttaggtcataatacgacttatggtgatcaagtcaaagtacaacttctcaaataactgctacaacgatatcgtgaagctgattattgatctcctcccggctaaccaaaagatgttagagaacttgtatgagtctaaaaagattgtctcgggtctcggcatgaactatgagaaggttgatgcgtgcgaaaataattgcatgttgttctggagggatcacgagaatgacacccattgcatggactacaacaagtgaaggtatgcaatggtagtggacaaggaagggactgaggtta

SEQ ID NO: 89904 - DNA, 405 bp, Zea Mays
cttgagggtcgggggtcggggcgaggtggagttagactcatacatccaagtcaatattcgatcgtttcaatgtttgtcgcttctatgttacattcgtaggattcaccccaaaagtagccctcgagcctctagaggagcttgttgctccttcatagtcttttggctgccgacgtttatttctactaaggacgcgtgagcgtacttggtgaatctagccccttgagcctctaaagaactgtggatttgttcagagggccttcaactgaaaggtacaaattgtgtcctcaggaggtgtcgctctgcgatcgcatcttcgatcttgttttgcgatatcgacttctaagcctccgcgcatttgcagaggaccaaatagagggtcatttcaacttttacatcggcatcccc

SEQ ID NO: 89905 - DNA, 834 bp, Zea Mays
ggttggacaaatgagtggttttatgtgaaagctgacgagaagaaaagagagaagcttatgagtatggtgatgagccctttgaaattaagcttcggcatgaccagaccactatgcaacatgcagctcggctccccatgccaactagccgaagtagaattcaaggtggtggctgggcatattggcactagggatttagtgtaggaatagttggcaaacagaactttcccaacctctagcggatggggaatgccaaagaagaaggaagaagggaagaagtatgaacttgttcgactccctcaacacttcaaatttcagaagacatttaaagagccatgcactgaatggctagaattgatagaaacaatgtgcaacgagattcttgggaattatacgaagaaggaagagtagttcatgactgccgccttcggctcccggtggaaacaaaggttgaaccgtgttatggatgctcttaactttgagtatcctgactatgagaggcttgatgaaggggccggaggggccaagagaaaaacggttgtcagtattttgggtaggcaagctacccaatctgtaaaggaggactagaaagcttcgaagaaacagaaaactcttttgaagccaaaggattcggctcccaagaagcgtaaacttgccaagatatcttctacggatacgaaggtacaagatgtgccagagaagacaataggtcctccttcgccctctgctgctgaagtttcggaaattctaaaggtaatgactgaatttataccatttgcactactaagtcctctaaggttagatcttactagccttttacgatcaaaggaaactgct

SEQ ID NO: 89906 - DNA, 544 bp, Zea Mays
aaatagctcaggcacagtttggggataaaggtgttcaggttatcaaggaaatgatcaagcagaaagcagagaaatacaagtgtttccgccaggacagcaagggaactttatggtttgaagatcgattggttgttcccaagaacccagagctcagaaagcaaatattggatgaagctcatctttctaagttttccatgcaccctggcagcaacaagatgtaccacgatctcagacctctttactggtggaccaggatgaagagggaaattgccaagtacgtctcagaatgtgacacttgtcagagggtaaaagcaagtcatttgaaagcagcaggccctttgcaaccccttcccgtaccatcttggaaatgggaggatgtttgcatggacttcatagtgggattacccaatacctccaggcaccatgattctatatgggttattgtggacagattgaccaagactgctcatttcttgcctgtgcacaccacccacaagacagagaagtacgcagaaatttacatggatcaaatagtaagattgca

SEQ ID NO: 89907 - DNA, 430 bp, Zea Mays
attatgtttttccacaaatgatttgttgcgaaggaatgagatgctccagaatcacataaaactgatgcaggtatggagttaataagaaacataccatacaccacgtcggcatcctcaggaactgattctgctgtcacatgattaactcttcccttactctggttctgcggagtcttgttctgtgcagatccacgagcagttgtgctctggtcagtcctctggttgctgttcctctggggtgtctgttgattgcgccttgggcattgttagcatagtgaccaagttcgccacacttgaaacaaccattgggttggactggggtgtttgtgctgtttttttggccggtgtgttcacgacgctttcttgacgattctactgttgaccactagacctttgaccggtctgagtgttgttcctctgctggttctga

SEQ ID NO: 89908 - DNA, 419 bp, Zea Mays
gccaaatcaacattgtctgacgtgaggttccgtccaatccctttcaaaaaaacgaacagtgccagcagtggatttactcttctttttcttatcatacggggacactacttttggtatagaaactttagatttctttgatggtcgtggagatggctgtggagaaggtggatccctgaagggcgatgtatgtggcggagatggtgggccaccatgaggatgaggaggagggtcagaaagaggatgaggagcagcatgtgaagtttgaggaggtgatgatggatgtacaataggaacatcaatttgagaaggcggagacggttgggcctgcgacgacggctgtcgtgcgatatcaaccaattcgacatcccttcgaggccaaaggataaaattcttgatagcttgtccaagtgtctcgatac

SEQ ID NO: 89909 - DNA, 290 bp, Zea Mays
cccaattgtagtcggacgacgaccgtgtgagccttagaattatcccacctcgcttaacttgggaggaggaagccactttaaaagggagagccaccctttccccattggactagtcttttggggcgattgggcctttccctgagttgggtgtgcataatgaactgttgggctccgggcaaccctaatttgttaggcctcggccaaccccacctgggctgggtgtatcatctggtatcagagctagggcccattttaagaaggtgggaatgatgaggacatcctccactatt

SEQ ID NO: 89910 - DNA, 688 bp, Zea Mays
ggcagtagccaaaggcgaggccttgccctcctatgtgttctaccatgtcatcggcacaccagctgtccgcaacccagaaggcttacaaataactaatgacgccgatggccatcgcattgtcaacctcatcatggctgaagattggcgagccccaataactttgtatctgcaaggtcattaccacccaagtgatatcaatgaggccaaacgcctcaagcaccgaagccgggacttcgcactagtcgagggccagctatataagaaggggatcagtcagcccatgctaaagtgcatgaccgaaaccaaaggcattcaaatccttcatgaagtccacggcggaacttgtggctcccactcaggacccagggccctcgctgccaaggtgatccgtcaaggattttattggcccacaataatctgtactgtgaatcgagtcgcgaggtcttgcgaagcatgccaaaagttttcccctcgctcaagcaaccctttgcaattcaccaagctaatcgcccatacatggccacttcaacactgggggctggatattgttggaccactgcctacggctcaagggaacctcaaattcaccttcattgtcgtcgagtacttcaccaagtggattgaggccagagcagtatccaccataacgtcgaagaccgcccaaaagttcttctggcaaaacattgtc

SEQ ID NO: 89911 - DNA, 355 bp, Zea Mays
gtcaagtttggttctaaggcaacatctgttacttcaacagttcgatctggaacccgaagacacttcttcaattgagacacgtggaacacattatgcacaacagacaatgtttcgggtaattggagtcggtaggccactgatccatacctttcaaggataggaaaagggccaatgtaccggggtgcaagcttcccctttaccccgaaacgtgatacacccttcattggtgaaactttcaggtagacataatcttcaacttgaaagtgcaagggttgacgtcgcttgtctgcataactcttctgtcaagcttgggcttctttgaaattatgagttattcgttgaacttactcttttg

SEQ ID NO: 89912 - DNA, 667 bp, Zea Mays
actaaatgaatttcttgcgaaatttttttccaacaaatatcatggagcaagatgaatagtcatttaagtccctattttagggcacatatcgatcctcataacgtccaagataaagatcaccatgccccttggatggaaataaatacatacatttcacgcacatagaacctgtacaacaagcttataggattgcgagaaccaagttactcccttagctcgcagagaacctattggactgggatgcatcgggacaccaaatatcttgccattggtaacacggatagtgacaacctttttcttccaccccattttcagctactcagctggcgctgctctgcttccatgttccaagccctttaggatccatagatagtgtgatccatatgctatcatcggcatctcaaactcgataggaatggtgtactacaagatgcagtagttcaccaaggctccgaccatgaagaaatgcagaaatgcatatctgagagccgtgcatttgttatggatagtactctgtgataggatcgtgtggggtttagttgaagaaatggaattggaaggatttagtcaactactgtagttgtggacaatgaaacgactaaccatattcttttcgattgtaccttggcttcctcttccttatccctcatcattctttgttagtttg

SEQ ID NO: 89913 - DNA, 1510 bp, Zea Mays
gagagccatttcgaccatgatccagtaagaatccatttagggatgctatagcaaagatgaagagggattattgctctacaactttgctaaaaagagagattaacaagacatcatatgaaaaatcgagattcgagcactgtaaaatgatctgtcaggaagactgatggtgtcacgccatggtacagtgcaccgggggggatcaggttcagaacctcgccgccgatgaccgatctgcaccgtgatttgtgtcagggtcgggctgagttattgacgggcatctcctcgcgacgatattcttgaagcaggataagatcgccgcggtaggggggtgattattccggccgccacacggtcactgatctttccggccatgcttggtcaccagcgccgctcttctctgttcgtccacgccatcaccgatttgactgctttacggtcgcggttgaacgtggcaagctccaagagaagtaccgcgctcggtgtcgtcgttgatcgccagtagggtccggtgatggttatcaccgtgaccgccgtgatgctcacggagcctataaatccaccctgctctcacttcgttcgtctcaaatcaaccaagcccagctcttcattcctcagttgcgaatccaacaagccactagccatcacgttctatcccccatcctatgtgatcaacggaatttccctgaaccggtttcttccgccgccgtgaagaactcttccgaggccagcactcctcgggttagtgcatacccaattgattcgagttcttgcttgttttagccccctgttgctctcagagccggccaattggagtttacctgagtctcatcaccggaacacccctctgcgccgtagaacgccgccgcgacgccctctttgtcgacccgcctttctactcttgcccagcccaaattctagcgtgtacgtaaactctggtgaacttgtgaagcttacccaagcttcaatttagtcagccatactttcggttgtccgaaacgcattgatccattcaaccatccgcactgtcaccatgaactggttgattcaaagtcccgttagtaaaattgattgaggggaaatacgcgggaggagttcaatccgatgtctgccgctcgagagtaccagtctttgcgccatccggccggtctaacctcgctggtgttcaaagctccgccgtgcgacgtcgtggtcctggcgcggtaaagatatagaagtgcaggggcttttctgcgaatgtcagtgagacgttaaatagtagcaaagggctcttaacggatattcaaggcagcagagacctcggtgcaaaactaccaacgtgggcgcgcgcgcgcgggcgcgtccctgttttctgtgcagattgggccgcctgggctggtttcggcccaagactgttcattccttttctttttcttttctaccagagcttaaacaattcttgaaaattgtagaaaaatggtaaaaatgtcaaaccaattttgctagattcctaattttccatagaatttaataa

SEQ ID NO: 89914 - DNA, 585 bp, Zea Mays
agaaaattaaggaaattaaagctttgattggtttgggtaaagccccagatttcacggaagatgaacaaggcaccctatggtttaagaagagaatctgcgtaccagaaatcgagcacttgcgccaacttattttgagagaagctcatgattcagcttactctattcaccctggaagtacaaagatgtaccatgatcttaaggaaaagtattggtggtacggtttgaaaagagatgttgctactcatgttgcattatgtgacgtgtgtcagcgagttaaagccgaacaccagagaccagcaggattgctacaacctctcaaggtgcctcaatggaaatgggaagaaatcagtatggatttcatagttggactacctcgtactcgagatggctatgattcaatatgggtcatagtagacaggttaactaaagtagcacactttatacctgtgaagacaacttacttaggagcccagttagcagagttatacatgtcgaggattgtttgtctgcatggagtaccgaagaagatcgtatcagatcgaggaacccagtttacctcgtgcttttggaaaagactacatgagt

SEQ ID NO: 89915 - DNA, 389 bp, Zea Mays
ctagggttagactggaagatcgtggaacataagaacacacgaggatttagagtggttcgggctgccagagcgtaataccctacgtccacttgtgagttgtattcctgtgagcttgtgccaccatttcttcatatcgtgtgtgccctcccttttatagtccaagggggcatgtacaggggcgctgaatcccgacaggtgagcccaacgatatagtattaaagaatgtacaacatggagcattaaatgttgcgacggacatcgatcttccgaccaggcatgcctccgccctgtctgccggctcaaatcggctacaaagtagagtatgatatgctgacgtatgtagggggccaattaggctgacgtgcgcaagagttatgacgatggacccg

SEQ ID NO: 89916 - DNA, 946 bp, Zea Mays
tttatatgtgcctgataaattttcatgagtgctggattgtagggtacaacccacctattgtcgagtttgttgcctgacttgataacatatctgttattgtttctacgcctgtagacaacaaacccttggctatcaaatgatgtagtttcatgaaattcttttggatagttttttgaacatctgccatttttcatgcagggacaacctggattgagtggaccacatggaccgtgtatcatatgttcggcaaccaaacaatatgcaagtggatcagtatttggatctggaatttcagcagatataaaagagtcaatgagttctggggtcggctgtgttgtatcagttgagacccaaaatataatatgggaatgaggaaggccacgtttttgaaattctgtagtgtaaagcactgcagtaggtagaacaaattgtacaaagtagtgagtaagtagttttaagcataatcgcagactaattgaatgtatttagttacctaatgtttggttttgtttatctagtgaaagagaatatataaatatgtaattgaatatgtttttttgtgtagatagtaaatgatcaagtttttgtacctgcgttgcatgggccaaaaatagatttagatctaatatcatgaagcatatcctgaagtttcatgtggtaaactcgtacgatcacatcagatctatctggaggattttgcccaggctcgaataagctctctttaatttcaggccaatttgcattgcaggtgaaagtgataaagaaatctggtggtccatgaacacgacagatcgcaatactatcatgatagttttgtatcatataacgtctgtcgccgatatgtgatgcaggtaaaataattgttttacccatctcattgccacttgtgcatccacgactaatagcatctgttataccttgaattgtgtccatgcgtaattttttt

SEQ ID NO: 89917 - DNA, 390 bp, Zea Mays
tccgccctggctataatggattgaattatatatcaaattaaagatcttcaaatttaatctgacaacgagacactaaagtgcataagcaatttatggtcaactaggataaagcattcaaacgacacatccagatgcgataaagcaatcagatcgagcatgcatatgcaactcacagccgaccgatcaaatggagagatcctcgagcagctcatcgagctcattgtcgtcggacggattcagctcaatgcatccgatagccatggcaagttcttcaatctcagcgcagcttcggtcgctggcgctgccgtcctgcccccgcatcatcttcatggcgctgcccatagctctccaggtcgtggttgttgcaagagctgacgctgcagaggtcgt

SEQ ID NO: 89918 - DNA, 350 bp, Zea Mays
tgaggggtttattatttttaaacaggctaggtagtggtttagtacctctctaatttttcttaaccccagtctaaaagtgtagctatttttcccttctttatttagcttttgatcagtttactatttaaatctaaactttaaaatttcttgcagtacttagggtgtttggtatttttcctaagtagttcatattttttagaaactagcaaaatttgtttgaccagatttggttggataaaactgaagttatgaattttacaagctctgtctgcaattaaatgaataatgtttaaaaggttttatgaaaaaccagtttacaccgagaccctgggctttcccttaactaagtc

SEQ ID NO: 89919 - DNA, 281 bp, Zea Mays
gcaatgctggtacgtagccctggcattcttcaacccaaatggcatggagacataacaaaatgttccaaagggggtgatgaaggtggttgcgtgttggaaggtctctttcatggcgatctaatgatagcccgaataggcatccagaaaggaaaggagctcgcaccctgcagtggagtctatgacctggtcgatgtgtgggagaggaaaaggatctttaggacatgccttataaggatcgtgtagtcaacacacatcctccagctgccattcttcttcttaac

SEQ ID NO: 89920 - DNA, 354 bp, Zea Mays
gttttgattaccagccccgggcaatgttggtcgccattgatgtcgtgtgtcgtcgtgtgtttgttgttccggtgcccgcgtacaatatatgccatgcagatgcacactctccttgcttgcttgggccctcgcacgcatgtcgtcgtcgctcgatcgtaatagttgactagactgatcgtacacgaacctttacttctatcccgagtaaagaagcgccagtatcttgcattgcatgttgtgtggtaggtagaccacgcatgcatgtgagcatgtccaaaagaagctctcggcaagaacagcgcgtccaagctttggcagcttccatctcgtacgtccccgttcttggagtgcgcg

SEQ ID NO: 89921 - DNA, 285 bp, Zea Mays
gcatgtgtgtcccttgccttggttggtgcctcctctacttcatgttgttggatcttagcaaacaattgatgaggagtcatctcctcatagtcatcatggtcccttatcatcatttctaggctgttgtacttttttatatgctctcatgaatagcctagtgacttagaatcattccaatcttcactaccaagaactcttatcatgttgaccaaaaccatcaaccaagcaaagagtgattgaagtgactcacccttgatccaatcatatcttgtcaactcactttcc

SEQ ID NO: 89922 - DNA, 831 bp, Zea Mays
aaaagtcttcctcatcacccatacaaatgttgataaggcgtttttcagactgtaaggcattacaacataatagtatagcccatacacggttacaaaaccggtatgcttcctatcttgtctagacatctggatctgatgaaaaccagagtaagcatctaggaaggataagaggtcgcacccggaggtagaatccacgatttgatctattcgtggaagtggatatgggtccttgggacaggccttattgaggttggtgtagtcgatgcacatccgaagcttcccgttagccttgggaatgatgactggattggccagccatactgggtgatggacctcttcgatgaagccagcatccaacagcgtccagacctccttatggatgaaatcttgccgctcgatggactgtctccgaggcttctgactcaccggtttggtgtcagggtggatctttagatggtgctcgatcacctccatggggatcccaggcatctgtgatgtttcccatgcgaatacgtcgggattttcctggaggaaggcgatgagcgcgagttcctatttctcctccagatcacccgcgatgcgagtggtctgggaggaatccacgctgagccagatggtcttgatagggacgccgtctaccccatatggttgcaccttaggcaccttagtaggcgtcttggtacaggaagttgagggatccctcccctcgtcatctgagcgagcgacttctgccgccagagcgtgcaacttctcgacaactgcaagcgcagcagggcggtcaccccgcacggtgaggaccccagcaggagacgacatcttgagtaacaaata

SEQ ID NO: 89923 - DNA, 477 bp, Zea Mays
cagtagctcaatactttgctataaattctcccaattcattagagatgctactacataaaatggatgaatacatcagggtggacaatgattttcactagcgaaaggaagaaacacaaaggtatatagagacatttaggggcttcagaggaaggtttcatcctaggcatgtccaaagcatcaaggacaacaaagccaccaacaatattcatcgtaaatgccaggaacacaacaacaaccattgcatggcaacttttgcccactagcccgagagaggagggagtggaggcctaagcttcgatggaagattcaacaacaatgctcagccaaagaagttgtattgcgttttctgtggagaaaacaaaggccacaccatgaagacttgtcaaataaccatatagaaatagaaatagcttgttgttgcatagacaagtcaactgaaggaggtctttcatagatcttcatacaactccccatact

SEQ ID NO: 89924 - DNA, 1171 bp, Zea Mays
aaaaccaaagggggggattaggggggttagggtttcaaacctgggttgggattttgggatgttacaaacctaccccacttaaaggaatctcgccctcgagatttagactgtatttgggaaaaggtaagggtattccctcctcaagaagtcctcactctcccaggtggcttcctcttctccttctctgctccactgaactttacagagctttacttctgaggtgcgggtttttctgactgccgaatcaagaatcttcactggtttctcacgatattgaaggtctttctgaatctgcactgtctcttcttcgaggtgactttctggtgcttgcaggcatttgcggagctgggacacgtggaacacattgtggatgtcggacatggattctggtagttccaggcggtatgccacaggtcctattcgggaaatgacagggtaaggaccgacgaaacggggtgctagctttcctttcatctgaaaccttttgacaccacgcatcggggaaaccttgagataaacaaaatctccttcctcaaatctgagctcccttcgcctattgtccgcataactcttctgtcgactctgagcttcaagtaaccttctgcggatcaaagcgactttttcttcggcttccttaacaaagtcgggtccttctagtgttctttcccctacattggaccacattaggggagtctggcattttcttccatacagtgcttcgaatggtgacattttgatgctggcctgatggctatttttgtatgagaattcggcgtacggtaaactagactcccaatctctgtcgaaggctaatacgcaggctctgagcaaatcttcaaggaccttgttgactctttccgtttgaccatctgactgggggtgataagcagtgctgaaatctagcttggtgcctaatgcttgctgaaggcccttccaaaattttgaagtgaactgcgttcctctatctgatactatcttccgtggaatgccatgcagcctgactatctccttaaggtataatcgggcgagggctgctcctccaaaagtggtctttactggaatgaaatgggccaccttggtgagacggtcgatgattacccatatggagtcatttcctctttgtgatctgggcagtccggtgacgaaatccatgcctatttcttcccacttc

SEQ ID NO: 89925 - DNA, 344 bp, Zea Mays
actatcttacttaataaaacttgttctctgtactatgggctccaactttgccacacagttcttagtcccaaattacatgtacttgccacaatagagctccaaacagagcaccaaactataaattcaggtttcagtgatctacacaaaactcagtttgtgcacaccgacagtccatttttgggcaagttttactccaaattttgtttggggtcatgtccaactcacttaagtaaagtgtttcaccaacatatggtcttcaattactatatggacatcatgaccaaaaacctcatggattaggcaaaaacaatctccaaaactaccaccaaaacactaaacttctt

SEQ ID NO: 89926 - DNA, 646 bp, Zea Mays
atagagcattgagcgcggaaatcttctcgtcagcacctcaggagagcatctgggatgtcttaatagaggtattgaggtcccgctcaagctctgaaatcaagcaagaaaaacactgatacacagccgaggtagtttgggtaggcgaaatagaggtaaacaacacataccccctaccccggtcctttaggtgctgggccttggactcctaagccttgagttccttggcgagggatctggcttgggaagaggcttcggcagcctgacgccgaaactcctcccgttcactggacaccctcttaaggtcctcttctagcaagcaaactttcttggccaagggtgtcgcctctcgccgcaccgccgcagcctcgtccctcagctccaagcataacacctgaagatacgccacatcggcgctcttctaggcaagctgctcatttgacttagcaagcaaggccatctagcgccgcagcgcatctcaaacgccacgctcgcggtggaggaaaatgaacattgccacggacatcgccataagttcttgaaaggaaagtcgacgccatcaagacatgccctacgcaaaggaatgtgttatcatgcagaatgctcgttccccttacccgcccaaggacccgaaagtcctaccacatct

SEQ ID NO: 89927 - DNA, 372 bp, Zea Mays
tctttttggttttgcatatatggtctggtcctgaaagaatcctatacggatgaatgatgcagtaggctggtagcttgtagtataggaatgggtcggtaggccaactttgagatttgcatcatgttgcgaggaaattattgatagagaaatcaaagcaacaacttcgtgttctggagactgttcatgcacaatatcttgccactatggcactatcgagatctctcaatatgtttttgcttctgtttttgtctctaaaaaatgattgtgtctggtcattcactcattcttcttgtagaattcaagtttctatcttcaaatctgaattgaatttaaatgaaagtgacacaagaaacatgcttcatgctttctttt

SEQ ID NO: 89928 - DNA, 520 bp, Zea Mays
cctgatgggtgctcgtcgccggcgaagcgcccaacgaagatcggggaacctggcgtaggtcggcggcggcggtcgcacagtcgtcgcgaagagagagggagacagcgcacgcgtgctgaactgaacctgagtatctctacttctactaaaagagccaaagccgaaagggctctccgattctcgctcggtcagtcccctccctcccctccgagttcggctcatatacgaccgtacatattgtcggactttgaaattagatcagcacttgcataaacaaatcgatgacatcaccgtaaataagcttgaatgcaaataccacagatctactaaaatttgtcaatttgtcacctcacagtggataaagtctcacaacaaggttaagccccttcagaatgcaaaattgttaaaacttaggaattaaaaaatagaaatagagttgcacgacactttaaaaaacaaaacgtttggatgtaccatacaaagaatctctactatattaaaacatcaatttcaacgatcg

SEQ ID NO: 89929 - DNA, 500 bp, Zea Mays
ctggtgtttgaaaagttgaaggaacacaagtttttttaagaagtcaaagtgtgcttttgggaaggtggagttgtatctgaggcatattatttctcggaagggagtattcacagatccttctaagactgaggctatgaagaggtcgcctacacctaccaatgtgactgagttgagaggtttttgggattgactgggtattacagaatatttgtgcagcattatggcatcatttctaaacctctcgccaaccttctcaaacataatgtgtttcactgtagtcaaggtgttcaggcagccttccagcagttgaaataggctatgtgtgaaacaccggtgctagcattgcctaattttgaagaagtatttgtggtagaaactactgcccggtgctagcattgcctaattttgaagtatttgtggtagaatctaatgcctgcatggatggaattgtggcagttttaatgcaaagaaacagacccattgcatttcttagcaaagct

SEQ ID NO: 89930 - DNA, 588 bp, Zea Mays
cgacatgctcacgcttacatgactaagggtgatcactatagcctactaacggagcaatcgacttaagtcggaaacgccttaagccggcgcgacatgctcacgtttacatgactaagggtgatcattataccctactaacggagcaatcggcttaagtcagaaacaccataagtcggtgcgacatgctcacgcttacatgactaagggtgatcactataccctactaacagagtaatcgacttaattcaaaaacaccttgagtcgatgcgacatgctcacgctcacatgacttagggtgatcactataccctagtagaaaaatagtcaactcaaatcgggagtactttgtaaaaagaaatatttcgcttacagacccaggggtgtttttcagcaccctacctacggaacaatcggttcaaacataattgttgtgcgcatacaagaactcacattacaccttttcactaaaagatgctaactcgataaataagtgttttcaggaaaatcattgcgttgaagtatccctgcaggcaacatcttttgcaggagcaacagaggaagatggacgacttgcagcattaggtgcga

SEQ ID NO: 89931 - DNA, 577 bp, Zea Mays
cacggatgagaagcgccaagagcgtttcttggaaggactaattggaccactgaattatcaacttcagagccatactttccccaatttccagaccctgttgaacaaggcaattggccttgaaagcaaaagaaaggaattatctgaccacaaaagaaaatttcaaggtcagtccagcaggaacacccgtccgaacaacgctcaaggttctcagttccgctctggaaatcaaagcggaaacaattatcagatgcaacactctggacagcaaggccagagaaataatcagagtcagaaccaacaaaggagcaaccctcagaccaaccagaggtctggtggaaattcacagaatcgtcaaggtggcgccagtaacacgtaggccagaaacaacgcacctgtccaacccaatggctgcttcaagtgcggtgagctaggccactatgccaacaactgcccaaggcgcaactagcagacaccccagaaaagcaataaccagagaaatgaccagaacacccccgctcgtggatctgctcagaacaagactccgtagaaccagagtagaggaagggtcaatcacgtc

SEQ ID NO: 89932 - DNA, 343 bp, Zea Mays
ccgactatagaactctgaatgaagtcaccatcaagaacatgtaccccctgccaaggatataattcctatttgatcagctgagaggagccggtgtgttctcaaagatagatctgaggtcaggttaccatcagctcaggatccgaccttcaaatataccgaagatggcattcatcatctagtatgggctatatgattatatagtcatgtccttcggattaacgaatgcgccaactttcttcatttacttgatgaacagtgtgttcatggactatctagaaaaatttgtagtggtgttcatcgatgatatcctcatatattctcagaatgaggaagaacatgagga

SEQ ID NO: 89933 - DNA, 477 bp, Zea Mays
aagcattggcatatcatatgtttgtcacacttagagtgcattcactaggcaaaagttcaaacaagttgtattgatgtgacatttcataagtgaaaccctagggtacagtgtttaaccctagattgggcttaaaggggtaaccaaagcctaaacaagagaaaacttcaaaacttgataataatgatcataaaaaataccaccattaatgaagttaagggatatcaaaaccctaggagaaccaaaagccctaaaaagaacccaagaaagccctaaacttaagccctagggggctaagtgcaaaattagtgcacttttggactaaagtgcaaaaaccatgaaagtaaggcaccttaagtactatggttcacaagtatgtggatttgcaacttaaaccctaagttttggacttatttgcaaaaaagccacacttatactccaatggctaagtctgaatttcagagaattggctcaactttg

SEQ ID NO: 89934 - DNA, 485 bp, Zea Mays
aaaactctctcgagccactggcttgtccttctgcgcccgactcagtgtgccaacctgtacttttgtcgatgtcctcttggcccctgaaccctagttcctgatttttcctccaccgctttctagctttctaagttcccacatcttttcgcgttttgttcctgaactgtgctatttgaaaaaatcatgatggcgcccaggaagagaaaacagagtgctgctacgatggtcatcccttcgatcgatcctgatagccaactctcttttgctggtaaccacgtttctgtcgtttatgaagctaaccttttgcatcttgtcgaaattggtgttctacctcctaaggaactatgttcttggcagatctggcggggagttactgtcctgacggtggatacccatgaggcgattattttcatgccttttctcatccggggactggccttgccagtttctcccttttttcgtggtcttctcgatttttactcttt

SEQ ID NO: 89935 - DNA, 586 bp, Zea Mays
ggttgacgtgcatcccttgattctcattaattctactcttagataatacaaggtttgtgactcatacttgactaagaacattttttacaaagcctgtatgctaagaattttttgcgcgagctcccctttgtcttccccatgcctagctatgcttcgacctacgcacgtatggcgatgtccatggcgtcagtcgaagtgccccccttgccaacaagttccatggaaacgagctcctagggatcgtccagcgtcgaagagaactcacatttagcttgctcgcaagtgtacatggtcttgatagaagaggaagtcgtattgatcctgcgtggtccgggcatcttcatcttcaagtatgtgtagttgggcgcaaccatgaatttggcatagcatggccatccaagtatgacgttgtaggaccctagaaagtccaccacctcgaactttattcgtttggtgcgaaagttggaggggttgccgaacgtgaagggcagagtgatctgcccgagcaggtaggcctagtggctggggatgacgtcgtggaaaggcgcagtgcttggtcgcagcgtagagcgtgtgatccctagtc

SEQ ID NO: 89936 - DNA, 623 bp, Zea Mays
gcttcgggaaccccatacttctggtcgtctcctggtagatagataattctttgttgtctgggaggcaatataagaagtcatctttgtctgtaccattgaacactaaggcccctttcgggcacttcagttctcgggcatagtgtttagcttcaaaaatctcttcttcagataatctttttcccgaagcgtgtcgtataatataatcaagaacttcggaaggcgcttcgagagtaggagtggcagccttttcaggcagaatctgttctatagcttcttcttccgctgccttttctccagtttccaagggtttctccttggcgggctctgaaggcccagcttcggcgtcggcctggcttattgtagcttcgacttcagtcagctttgtctcggtttcaatctgcgctttcgaagccttggcagtttttcctgtagtagagcttcaagcttttattgtctccagcacatctagtacactagctatcctttttctcttgggggttgctgctagacctttttgtgtctttggcacctccactcttgccgaagggcttaggacttctaatgtttttgccccttcgattcttgatttttcaattttgtcaatcttcggcattgcagccggc

SEQ ID NO: 89937 - DNA, 764 bp, Zea Mays
ccgggtgtgacaccaggacatgatgattatggttttcatctttcctggtctattcatttgttgtctcattcttttcattgcaaaaggtacttgggatgtgcagggggcgtgatactcacaagttgccagcaacgatgagcgaagccacatctcaaaaacatatgtccaattgtttcttccttctgtaagatgcaattttcacaggtgtaggattccagttccatatttcttcatatgagtaatgatctggtattgagcctgccttttaggaatatccaaaagaaaactttgtgttttggttggcattttgatttccatagccagcgatacattgggtgtaccgtttcatggacaatcatatgtttgtaggctttttgcaatgagtattgtctattcccccagtcgtacccccactgatccggtgcatttgtgatctgatgcttctgaagggcttcctcaatgaactggagctgctgaaatgcttctgctgacatggcaatgtggaacatatcaacggtatgatgtagggtcttcgcctggaatatggttatatgtttgttcattgcaaaggacatcaattcagggtagacctgagcatgcacctaactgtcccatctatcattccataggtatatggaccgcccatccttcaccttcgccagggcaaactccttgaatgtgtctagcgtttttagaataactctccaccagaatgaaccaacctttcttgaagatggaagtgtcccgtatttgtagtgattgtc

SEQ ID NO: 89938 - DNA, 350 bp, Zea Mays
ccccagcgcgtacaggctagcaacgccctccggcgaagacttagagcactcctggaacattgacaacctccgcaaattttttgtctaaccctcggggcccacgcgcccttgtaatccatcaaacaatattattccggcccacactattttactcccaggggtgaggtttttaacgaggctgagccatgtaatataccagcaaagccccagcaaaaacgaaaactcagacgcaacgtgtcgaaaaagaccgcatcgacggtcttcggcattcgaccaccccgaagtcaccgcgacaggtaacgtagactacccccgcgtgcgacactccgctcaaaagtcgcctaagggtg

SEQ ID NO: 89939 - DNA, 455 bp, Zea Mays
gtgcattgttccaatgtcttgagtttattcttataagtaggcctctcgtgtggccttgttcttacacgcttcgtcctctctatcgagagaggaacagcttccttcctcatcctagcgccccatgaatccaagcaagcgcccgacagatgattctcccctagttctgaggcctctgaggcagtgcttgatcgtttggggggtatggatctcttcagcgtcagaaagtttcatatttcctgtctttcctcttaccttttgcacctttcgtaggcaggtgatctggatgggttagcgaagggactttgcacctttcatctggaggagtcagaccgtcgggtcgttggtgagcggtacattattttcttcttttcttttctcctttttccttctctgacttccttccttgctttctagagctagagacggaggtctcaggcctctgtgagggcactgac

SEQ ID NO: 89940 - DNA, 886 bp, Zea Mays
tgtagatgttaaagttgccttttccttcttctatcttgacgaataagttttgaagactccatatggtcttgtttagcttcatctgttatgcacacatggtaactgcccaaagattttgccttcgtgtgcacatctgtcggcagcttcgactgaagcttaccttcgccatttgtcctgcatcatatgaagtaacatagaaaacagttgttggattagtgttttgaggaccttcggaagaagaagacccccaatagtagcccttcgtggtgctagttcgtttttcataatggcagtccgtgaaacaaacgaagtcttcataccaaaagtccgaaaatacctccatgagcacattattcaaaacggggtaacatatttcgtgccagtccaccgatcagagagtgcaaacggcatgactgctcgcattcaccgcttaccgggctatatagcatgtcctaccgagtgaaagcgtcacaacatttattgtttttgcaccaactgctgcaacaaattcctctgcctccgaagctcttcttcttgtgcttgagccttttcgtagagcttcggcattttgtcaatggccaggtttcgttcaactgccagactgaccaccaaatgtgagacaccagatacaattgagatagttcctatttctgtggtgatgaaagagtcgggtatcattgagccgaaggtcagtgaagaagtaggtgttatagaaacgagtggttccgaagccgaagctagctgcgacaaaaaggtcctagtattcttcgttcaaacaaactgatccacattgagttttgtgggtctattgtaaaatccgaagaccttgatgtgttaaaaaggctttggtatattggcatgaaagaatacgatatgatcagatttg

SEQ ID NO: 89941 - DNA, 367 bp, Zea Mays
gtgatcgtgggcggcgctttgttgcgtgtgtccagttcgataggcaaaggaagaagaatcgtcactctgcctgctaggtaaagcgtccaggggggttttcgcgaaaattgtacagggaggtggggagaggtggaaggagtatttcgcaaaattggctgttgccatcggatgtgtaatggacgctctagatttaatatgcgcatgtgagtacggtaccggtttgagcacaggatacgtcccccaatcgattaacttttacctccgctacatgtatcaccttctgtatggggatttgggtgcatggttgcgagttcggggagctctgacaatggcgtccgctgcaagggaaactacgcgctatggccgg

SEQ ID NO: 89942 - DNA, 549 bp, Zea Mays
agttttcatgagaatatggatacgaagttgaattttagttcgccctaccatccttagactaacggacagactaaaaggactaatcaagtattggaggacatgttgagagcttgtgcccttcagcatggtagtagttgggacaagagtctaccttatactgagttctcatataataataattatcatgccagtctgaagatgttaccgtttgagactctatatggcaggaaatgctggactcctctatattggatcagactagaggaagacagttctttggacctgcacttattcaagaggcagaagaacaagtccgtataattcgggagaatttgagggtagctcagaccagataaaggagctacgcttataacagaagaagaccactggaatttgaggaaggagattatgtgtacctcaaggtgtcaccactttgtggaataaggaggttttaagtcaagggcagattgtcccctcgttttattggaccattcagagtttttaggcgagctggagagatggcctatcaactcgagctacctgataatc

SEQ ID NO: 89943 - DNA, 379 bp, Zea Mays
acgaccacacgctagtattagctatctacactttatcaggctttcaacattaacatcattgaaaatacaacaacattttatttatttacgcgacacaactacgacatcacaagtacacatactttatttatttggatacggcttttcattagttctcctattgatcgcgcaaaagcatcaccgaccacacaagcccaaccaagacaacgtaagcttcaatacagcataggcatcaataattacggaactcctatatcacaatccactagagcaagaaacatacaaaacatgacacacgtacattattaatcttagtcatggcaagtctacattacttaagtgttaatcaaacatttttagcaaataggctgaactaaac

SEQ ID NO: 89944 - DNA, 662 bp, Zea Mays
agaccgactgtcccgtgttagcggcagccatatagagttcatgacgccagttacgtgagtggtgtagagatgatctgagtatgtgttgataacctagaaagatgacgcagaagtagtatgagtgaattgaatgtagtgttgagatgactagattgattatgagtgatccagagattgcatgagcgaatcgatcgtgatgcagagatgattagggttggcgaggtgcgatcagagagatgtgctagaaaaatataactcagtgaaacacaagatgcaacagagaagatttgccttagcgaagaatgagatgcgacagaaaatagtgtcgaggcagaccatgtgccaaaaagtatttcgagaaagtaagaaaagagtagagaacgtttcaacttaccgatgtatgtaatgcacattttgaatgaccagaaataatatgagtaatatgaaaccccgagtgatctagaactaacctagtagattcatagcatttaaatttacgtggctacgatcctacgtggggcgaagattggttaacgtcttcacgccttggagttcgtcgaagtagttcttgctgaggttaggtggggcgagcttgcctccacgatcggtaccatctgagaagatctcttctcggatggatccgcgatgtggtgcaggacgcc

SEQ ID NO: 89945 - DNA, 881 bp, Zea Mays
tttaaaacaaacgcaggggcttatgcgaaaattcccagctgaggggtatcagtgactctcagccatcagatcagaaatgggtgcctcggattagatcagtttaactcgaatcggtatcgcgggatttcgaccgctggatcagaatcctgcgtaccagattaaacaactccccgcgatcggcccagattcaaccgagagcggatcagcgacctccattaaaattgtgctttctcccccgttccatccgatccaaattggatggccaccttcccatggttgaacgttacgcagcttttaatcgcggctgatggttgtgtgatcaacggtcgcggatcatcgtcttcccccgcccgatgacgtctacgaaacaccgcccaactatggtgacggcagcaccggcgtacggccactcgcacccccacgcagcaataaacctaagtgatgacggtaactcgtaccggaaaacagggcgagtaaacagcgagggtcattactgttggtgttgcgatggaagctggacacacggcgaggcagaccgccgcaggagattaactccggtgagcaattcccaggcgctggcgcacgaatcgcccctggcaacttgataaccacactccacggaacccatcgaatccagaggaacacccgccagtagccgcgtcacgctgagcacgaggttcccttgcgacgacgatttacgaagtccacggttcaccctcacagctctactcggacggttctggcgtgtgggaggggaaaggatgaggcgaagacccccgaggcccgctatattgccgtcatgaggttggctagaagtgggcgcgacttggctgccgccaaatccaccgcggtaagcgcctctgcgtggttagcagcgagaa

SEQ ID NO: 89946 - DNA, 918 bp, Zea Mays
ctttcatatgactactatatagcatgtgttacacacgatcctgaggagatgatcgatgatggcggtggcgaaagtgtggagagagggaagggaagggaagggatgattcaaataaagtagttcatggggaagggagatcagttatccaactatctggaccgttgattttgatagtgtgttaagtttgagtacaatatgtttggtgaatttagtgggataatgagtatggggtgatttggttgtgtgacttttgcaaagtttaaactgatggattatatagtggtaagagcataactcttttctattatataaacatatgtaactttctatctttaacgtatactactttatatctaactttctatctttaacttacataccattctatatttaacgcaagttttttattattattattttcccggcaggtcccccctcccctcatcacctgtgcttccgcgaaacaacgctctgaattcaacagtgcctaaattaagtgacacaaccctaaactttcatatgactactatatagcatgtgttacacacgatcccgaggagatgatcgatgatggcagtggcgcatgtgaggagagggggaagggaagggatgagggatgattcaaataaagtagttcatgggaagggagatgagttatccaactatctagaccgctgattttcatggtttgttaagtttgagtacaatatgtttggtgaatttagtaagataatgagtatgggtgatttggttgtgtgacttttgcaaagtttgaactgatggattatatagtggtaagagcataactcttttctattatataaatatatgtaactttctatctttaacgtatacaactttacatctaactttctatctttaacgtacatatcattctatatttaaagcatgtttttt

SEQ ID NO: 89947 - DNA, 450 bp, Zea Mays
ccaatatgtcattgagttgcttggcacattgctactgaggaaaaagaccaggtcaaccacttagcctagctttagctccaccaatgcttacacaatttttttgtaactaaaaatataattatacaaggttcgccacaccatcatcaagtgccacgatatgaacagaaaaataatatacaatggataaaagcaccaaacgttatggtcaaatgaacttaagcaaaagcaggcataagtgtttggatgcaaagagaaggattagagaaatggtatatcctatttttctgatattccgatactctcgaaaaggttgaatatccaaacttcccacttgcttttactatttcgtgattattgcaaattaaggctgccaaacttaaagaacttctgatctcacatgtatccattagaatccacagaaactacagtggaaatcattgttagttgatc

SEQ ID NO: 89948 - DNA, 1164 bp, Zea Mays
catattgcataaatatgtacacggtgtagcatagttagtagcagtatatttcataaaatattttctaacgagtctagctgaagggctgttatagagattctatatttatggacagaataaaatatttaaatcaaaaaaatttccatgcatgcagcagttaacgcttcctaatttttcgcgcatgcaaatgaaaacaaactacgcacatgcaaggaaggaatgagacacatacggctgggaggggctagcgtccaggccggtccatggtgcgggagggggcggctgagactttctgtaactattgaaaactctagacttccaatattatatatatcgctggaagtgaacagactagccgacaagcttgcttgttggatgacaccacatcgtccaacaaacatatcacgatgaaagacgcacatttttttgtcgataagcgtctggtcatctcaaaacgaggaagacctcccttaactgaccatgcagggagtccagctggctcacaagacaacgctcgcccttgccttctctctctctggtgcccttcttacagccaaccaacctggttctcatgaggacatgaggttactgtgagcaaatgagccaagaacctttggttgcgtatgacgcttggtggctctaacttcatgagctgcaagcaacacgagttgcatggccacttggtcgctcgctcgctcgctcgtgtacattccatcagcatgcatgatgggtgtagatagcttagctagctgtggtcgtttatttgctggaaccactatgtgtggcgtgtttaattcctgtggtcatgcatgctttgcacactactgcaaattaatgggtaggggatatataaatgcaaaggctgggactaatgagggttattcgtgatggttctttctctctgtttgtgcatgcattcactcctcatcccgtggcccctcattttcagaatctgggggtgcgtgctttcggtgtgccggaagcacgagggaaaatacctactataaattaaatgctctaaacatgtacacacacgcgcacgcacgtatatataacatgctctactacttatgtgctagtaattcatggtgggatttgggcatgcagatggccgtggtacgcaagtcgatcgaggagtcctagctagctaggcgtagacgaaag

SEQ ID NO: 89949 - DNA, 429 bp, Zea Mays
tagttaaggtactcgtaccatcaactctctgactctgatgatcaattgatctgcttaagccggggaggcctcgattggtagctacaggtggagtgctggcggtactgatgtgaacggagcttgggagtcagattggtgcgtatgggggtgagcgatcggctgcttgcttgctcgtttctaaattgatggagcggggaattgagttgtccgtgtttatggcggcaacatcggccatgagtatgcatgccatgtatttgtggaattgtggcagtctttgctgagtcttggagagctccttctgcggtcatgatctaaagaaggttctcaaagcatggacatctcttagctttgttgaatgattctaatttacatatgtttccatttcaatattaatcttattctattaacaacatattttcttaagtaaca

SEQ ID NO: 89950 - DNA, 839 bp, Zea Mays
aggttgggcttcgtttccccttgcacaagatgttggtcgaagtgcgaaagacatttgagatatatcttcatcagcttactcctgaatccttaattaaagttggagtttttatttgggctatgagaagccaagggttggagccaaatgccaagtgtttctgcaatattcatgagttatcgtaccagaagaaggcaattgggaaggagcagtagcataacaaattcggttattatagcttcatgcctcgttctgatgtgaggtatcatgtgccaacattccgaaagaaatggccagtttcttggatgaagcagtagttttacgtgaaaaatgatctgaatcacagggaggattgagaggtgtgattcaacgtcctatatggtcactcatcggcatcaaaaggccatcaatcgcacttgggaatgaagtgcaagcctgccaaatggctttcaacaccatatgcacctacattggcacaagagatttagttcaagaacacatcgctatcagagtgtggcctctggcaaatgagtaggaaatgctgaacgaagctgccgctggctccagcaaagatggcttggtttatctgaattacatcttccagtacaggaaccagtttgatgagctaaatgatgactggctagatgctatagaggccacgagtgatgagctacttaattagagcgtactcgagggcagaagacgaggccatgacagttgccttcggcggtcgcgggaaaaagaggctgaacagggtgttcgatgttattgggtttgtttactcagattactgttttcccatctaaaggcaagggggaaaaggaaagttgctgcttcaacat

SEQ ID NO: 89951 - DNA, 610 bp, Zea Mays
gtgtgggtttgcttctgccatggttcaacggccgatttgagcaccttagcgtgcagatcttggaaaaacccccgtgtacggtctcttccctgcaccaaatcctacctttttgatgtgagtcccaagtaaggatacggtcggggtagggagatataggggtgagaagttgtctttgtcctagctgtccaaaccgagacaaaagccatgccaagtcatgtcaaacgacttagggttgggttcaaacttttccagggtgttctagaggtattttggcgccactttgtcaattgggtcaagtggttttgaagtttgaatgagggtgaacatgtttgatctttggaaaagggttggttttggacttagaagaattctgatttttctcttatgtttctccctttggtgaaccttttggggtttttctgaaatctttttggggtcactttcttactatcatttgtagggtattaagtgtactacatcttttataattggcccaagtcatgatcatggggttttcatagccttttggtcatacttacttctagggctccaattgtccacaggggtttgaattagggtttgagcaattctccccattatatgtgcatga

SEQ ID NO: 89952 - DNA, 619 bp, Zea Mays
gcaagctataaatgtgttgcagtctgaggggttcatacgtcatgagtgcattgcggcctgaggggttcgtatgtcatgagtgggaggcgaacggtgccgcagtcgtagctcgtcgctaggtatagttaatgcggctggtcacttatgacaggtcattctcgggccaggcatgggacccactcgagtggtttcccttcggcgcgcccggtccccctttcaggttccgccacgcccaaccccgggctcagtgccaaaggttacctatctcctccggctgaccagcacgccctagttgccagaagcctttccctagtgcactagctaaccaatggaccctaggggccagggatcgtatccccgacagtagccaccgagcctctgaggagagggtatctccccttggggggctggtctcgggtcaagcgctgtctttttatccatagttttcgtatttgttatcaaaccatcgcctctttccacatgtggcgtttggtatctgttctattttgcaatgccttgtatttttctataaatggtcattccctcgagtgtcttcgttgtatccttcctttctttcattattgaaggacgatttcttcatgcccccatggacttaggc

SEQ ID NO: 89953 - DNA, 567 bp, Zea Mays
tcagggagcttcacccggtccccatgaaggtttccatggcattgctaagccggagggagcctcgttgtcaccgtgattgctcgctggagtcgcaggctcgcgcagagccgacattcatcgtgggagggagactacacaacctgatcaccggtaaggcaaccccatagagtttgctttactctcctctctattctgcacatgtctgcgctaggattagctcgtcggggcaccgattcagccctctccggctaggggcgtcgccgtgagatagggaggattgtgcaccgttgagcgtaagatgaccgaccaggattagatattctccgtttgaaatctgggccctcgatctgtgatcagatggctcagttcggccgatatcccttcatctgagaaatctttctaaagagcccctggaaaatctagttattaaccgcacttcacctctgttcaagaatcgtcataaatgaattcgtttttatgcaaagaagtccctttagtttctatagaactaaactacactccactttactcggtttatttataaatttaattcaaaattgattttta

SEQ ID NO: 89954 - DNA, 1629 bp, Zea Mays
aagtaatcaggctaattatagtaatccaacaccccccgcagtctgaacgtggtcagctacagggaaaaacattcagactggacctgaactccgtgaacaccgacgaaggcaatcctttagtgaagatatcagcatactgagaggaagtgggaacatgcaatacgcgaactgcaccggccgcaacacgttcccgaacgaagtgtagatcaatctcaatatgcttcgtacgctgatggttcactgggttcgaggagaggtagactgcactaacattatcacagaaaacaacagtggcgcgcttcaggggaagatgcatttcctgaaggagctgtcgtagccaggtagtctcagcaactgtatttgccactgcacgatactctgcttcagcactggaacgggacacagtaggctgacgcttggatgaccaggagacgagattatcaccaagaaaaacagcaaaccccgaggtcgaccgacgggtgtcaggacaaccggcccaatcagcatcagagtaggcaaccaatgtggagacatccgtgggacgaagatgtaggccatgatccagtgtcccatgcagatagcgaagaatccgtttgatcaacatgtaatgtggttccctaggatcatgcatgtgaagacaaacttgctgaacagcatatgaaatgtcagggcgagtgaaagtgagatactgtagtgcgccggccagacctcgatagtgagtcggatcggtgacagattgaccctcagtgccagaaagcttgccactcgtgtcaacgggagtagaacatggcttacaatctgtcatacctgcacgttcaagaacctcaagaatatactgccgctgagacagatgaaatccatcagcatgtcgagtcacggtgaggcctagaaaatggtgcagggggccgaggtcggtcatagagaattcttgctgtagagccgtgatcacccactgtagaagagagtatgaagatgctgtcaacacaatatcatccacatagagaagtaaatagattgtgtcatggccatgttgatatataaacagagatgtgtcagatttggcactcacaaagccaagggagagaatgtgagtggcaaaacgactgtaccaggcacgcgaagcttgtttcaacccataaagagacttgttcaaacgatagacatgatcaggccgagagctatcaacaaaaccagcaggctgcacacaatacacagtctcatcaagggtgccatgtaagaatgcattcttcacgtcgagctgatggactggccaactatggaagagagccactgtgagcactgtacggatggtagctggtttgacaactggactaaaagtctcatcaaaatcaattccagggcgttgagtgaatccgcgaaaaacccatcgaaccttgtatcgctctagagaaccatcagaacgaaacttgtgacgataaacccatttgccggtcacaatatttgcacccgaaggacgaggaaccaaatcccaagttttattcgtctgtagtgcaagaaactcctcagacatagcagccctccagtttggatcggccagtgcccctctgtaggattttggtacaggagacaaggcagcagcatgcagatcaagcggtacctttggttgac

SEQ ID NO: 89955 - DNA, 371 bp, Zea Mays
gttcattagacatctgagaaggtttaggagattcgtcagaatattctagccgctcagagctgtcagaaaagttatactgatgtgaggaggcaagacttagaatttgcagtgggtgatcaagttcttctcagggtatcacctactaaaggagtcgttcagtttggtgtctttggaaaacttagtccgaggtacattggaccgtttcactatcttagcctgggttggcagcttggcttatcgcttgcagttaccagaatccatggcaggggtacacccaatatttcatgtctctatgttgaggaagtacctgcgatatccggaccatcaaatagagttagagccgatcgtcgtgcaacacgatctgactctgg

SEQ ID NO: 89956 - DNA, 379 bp, Zea Mays
gaaagtgagacatcagaaaaatcgagcaaaccaaatgatccaaaaaaactactcaatacctgagggcggtgctcgggaggctcccttgcaggggaagacctcacattaggcataaaacccgagcccgaagctcgaaacccgaaaaatccgagcctggacccgtatagctcaatacctgttagccgaagtatttgtgcgggtagtaaaacttaaaacccaatattatttcgggcttaatagagtactagaacccgctacccgaattatccaaaaatacccgaacttaggtaagccgggctgtgcgcacactgcagtccaagtcatctcgagcaaagggaacttaagatcaattgctgatcaaggtcagtttttattttgc

SEQ ID NO: 89957 - DNA, 718 bp, Zea Mays
ctgggttacaccgcaacattcagcgtattattgagtttcagccgtaccaaagtcttattgatttggtacatcaagccaccaaagctgaacgccagctgcaacaagatgctaagagcaccaagcccttgtcatatggtgcacgaaccatgactggaggaagcaaatcaatctcaaggtttactgttgcatcctcagcgacaaaaggttcaattggaggcttgcaatccaatattcaaggcaattctagtgaaaagaacggtgctactccaaacacgagttataaaccagcagcatccacttcaacatcagtgggttcaacagccaagagtagtggtattcagtgcttcaagtgtggaggtcgtggtcatgtcataaaggagtgtccaaataatcgtgtgatccttgtgaatgatgatggataatatacatcatctagtgaagaggaagcagaagcaggaaatgtagaagacactcataaaattgaggaacacattggatgtgaatttgagaatggtactactcttgtggttacacaaatcttgagtgttcaaatgaaagaagcttaaattgggcagcgacataatctttttcaaacgcgatcaaaagtgcaagacaaagtagtaaaggtgatcattgatggagggagctgccataatcttgtaagtcgtgagatggttgaaaagcttggtttgaagttgcagcgacaccctcatccata

SEQ ID NO: 89958 - DNA, 541 bp, Zea Mays
gagatttatggtctatggcaatatatccttttatgcgtgaaatcatgttgtgttgaggtttgagttaaacattgagtttccattatgcagatgtaaatgtttacgatattcattgtatactttttttcagcagaggcttaacatgagatgcaacccccaagatgtattagtaagcatccagatattaaatgacagacagcgccaagcaattgcacggaggggattttccagtattcttgatatgagactggacgcactcggcagcagatcacatttagcttggctgatggaaaagctcgaccacaatgacatgacaattcgagccggcccagggaaggagctgaaaattacaaaggatacggtgcacctaattttggggttaccaaatgctggtggaggaactgcattgggcatcgatgaagctgttgctgccaacaatttaagagctgaacttggtttatcgaaagaagattttggggttgcagctcttcaagatcgtctgaggaaagggtctgacgatgatttaagcatcagatccttt

SEQ ID NO: 89959 - DNA, 660 bp, Zea Mays
ccgaggaagaaaatggactactgttgtgctgaataatgcctgatttcaacatgactccattctgtctttccacttcatctttaatggccggtggatagcgataaggatgaatctgaaaaggcaccgcactagcaaccaacggaatagtgtcatcacagtcacgggagggtggtaacccagtaggttccataaacacagactcaaatttagacaatagttggatgaaaatttcaggtaaacccaactcagtgaatttgggggactgactgttcactgcagccacttccacaactgatctggtgggaagagacgatgctaatccatgtagcagcacctgagaccctttatacggaataacaatccaattttgcccccaatgtaccttcatcggactatgagcacccaaccaatccacaccaagaataagatcataggctgaaatattcaaaactctgaaatcagtcgcaaagttacattgctgcactgaccattgagcagccaacagttgctgggagcaagccaattgacccccatcagccacctggacaattactggtttgtgcatatcagtaatacccgtcatttgtgctgcaaaattcgatgagacaaaagaatgagaactacccaagtctactaagatcagcacctccagaccctgaa

SEQ ID NO: 89960 - DNA, 483 bp, Zea Mays
cgaaggcacacctgctgccgaagctgaacaggctgatattgaagaagaaaatgctaatgaggaagaggaggattataacattttgattccatcaaaacccaaccacctagattttgagaaatctactgtgtctgaagctgacatgcccatgatgatgaagctaggctactttggagaagctgaaaggaaacttgttcgatttgccggagaagaaaccaccccagcgccgaaggatgatgaaatagtggttttcaagagttttttcagagcgggattgcggtttcctccgaacgagatgataggagaagtgctaaagaattttgaaatttatcttcatcagctgactcctaacgccatcgttaggctcaacatcttcatctgggccctccgaagccaagggatggacccagatgccgaagcattctgctgagtgcatgaattgcactaccagacaaaggccagggcagacggtttacatgaaaa

SEQ ID NO: 89961 - DNA, 502 bp, Zea Mays
ttccacccacgttagcagactaggaggcgccaccagtacggcgacgacgaacgccggtgagccctcccgactcacgcactcaccctaatcccataatcgaacgcggatacactatgtgtacaccaatgcgaattacatggagaagtccttaccgtgcgccacgcgagcaggagcactgaccacggcggagggcggaattgcggtggttcctctacttcggcgagaaattgccgcgcgactgcccaagttctggggggtaaggtcatgacaccattgggacacctctacgaccctcccaagccatctatcgaggacagagcgactctggacacaagccgtcgacggcgctcttccgcttttctctcttcctgccgctcccgagctccgactgcgtcactcccctcccgatctctctctcacgctcggtcgcgggtagcatgcgttgatgggaggaaaagacggcagcccaagcgcccagtcttatagccccgaggaaggccgg

SEQ ID NO: 89962 - DNA, 375 bp, Zea Mays
agtgaccgaggtggaatttagggtggtggatgagcacattagcactagggactcggtgcaggaatatttggcaaacagaactttctcaacctctagtggatggggaatgccgaagaagaaggaagagggaaaaaagtatgaacatgtatgccttccttatcagtttaaattccaaaaaagattcagcaaaccatgcgctgaatggttagagctgatagaaacaatgtgcaacgagattctcgggaactacatgaagaaggaagatcagctgatgactacagccttcggcacccagccgaaacgaaggttgaaccatgtaatggatgctcttaactttgagtatcctgactatcaaaggcttgatgaaggggccag

SEQ ID NO: 89963 - DNA, 316 bp, Zea Mays
cacaaatgttgaactacaagctcctggaaatttgcagcgcgccatgaacctggcaagggcctatgagagaagggaactggaagcaagaaaaaggggaggatacaaagttgctgagaagagtttggtattcaaggaagctggcaacaacgcgccatctaaggtagctgctgcgccccggcctcgattcaaacggctatcaccggaagaactagcagcgaagcgtgcaaaaggggaatgctatcattgcacagagaagtactcactggaccacaaatgtgctgctcgaggggttttcttgctggaattagaagatgac

SEQ ID NO: 89964 - DNA, 574 bp, Zea Mays
cttctaagggttcctctgccttgatgaagagtggtggttgagtttcggagaactctagataggtagtatctcgttgtccttgcggggaactcttcctccgtgctgttgaaattggttgcccgccatttcgcgcaaaaggcgtgtattgtcggcggtggcattgaccaaggcagcgatagcctcggccaaagtaggtggtacgggtggcggattgcgagtgtcctccccaccacgggatgtacaagccccatcctgtgcacggctccaggaaggcatctgaggcaaagaaacatttggaaaaatataacatgccatcatacaccatctttatttcattgcggaacagtaataattatacagactccattatacaactcaacgtttcttacttattttacataagtacaatacttagactatactactctagtcttcttcatccttcgctgttctgctgtctgctgcaggagaccgttcatcagcaaggttcatggaaggaggggttccaaaaaggtcaatccccccatcagatcctcaatttgttgttacagatggtccagctcccattgctgcc

SEQ ID NO: 89965 - DNA, 490 bp, Zea Mays
gtttatcgatgcgctcttcacacaataatttgctttttaaattagacatcacatgagcaccactaattttacccgcgaccataaccatacacatttagaccacaacaagcaattcatcgtgattacgagcttaaccgaaccatctaactagagcaacgacatagcccgctaaataacatacacgtcggtttgcctgtcactacatacattacaacctctttataaacacacatattcataagtattttcgcacactgaccaaatcatacgaatcgtaaaccactaatctccaaatcgcaatcaccacacatttacttcccaaatcatgaacgcatacatgtttatcctacgaaccggagcatttcaataattatcctaaaaacaactaatctccattacacacttgtatcacaaacctaattgacttacttggagtgtctactcaaaattgtgagcacaatcatacaccatatgcgaagcataatttaac

SEQ ID NO: 89966 - DNA, 713 bp, Zea Mays
tgtatccacaataacatcaaagactgcacagaaattcttctggcaaaacattgttttccgctttggagtaccgaccgaactcacagttgacaacggcaagtagtttgacagccaagacttcaaggatttctgcttctccattggcaccaagcttgcctttgcctcagtataccacccgcagtccaacggagttgtggaacgcgcaaatggcaaaattttcacagctatcaagaagatgctcctcgacgagaaaaagggcaaatgggccgatttgttacctgaagcggtctaggcgctaaacacgaatgagtgcagggcgactgggttcacccctttccgccttctatatggatcggagcccatgaccccgcaagaaataaaacatgggtccccaccgacagtctcgtcagctgtccccgacgtggacgaacccacttcgaaggatctcatcgatggtgaccgcgtcttcgccctacaggctctaaataagtaccaagcccaaacaaaagcatggtgtgaccacgcagtcatcccgagggaattcagcgaaggggatctcgtactcgtccgaacagctcggacagagtccaggggcaaactggagcccaagtgggagggccctttcatcgtcaagacgaaggcatcccccagcgcatacaggctcgcaacgccatccggcaaggacttggagcattcctggaacattgataacc

SEQ ID NO: 89967 - DNA, 362 bp, Zea Mays
tgatgctggtatataagtaagcggggtaaattctgtccttcaaaggttgaatgttttttaagacgaaatcaacaaccacaacttgagcggtcagacccccatccttcagcaagcagatctcatcaagtagagccttagcctcggttatctctggaaaggtgggagattctatccagcaaggtgtgcgaacatttggttgcctctctgaccgagggggagagatttgcaatgattttccatgatgaaccactcaagacaccatcctttaatactgtccttgagggcaatatcaagatactccactttcctcccctggcgaagctctaaacttgcgccgccaacaagctgatgctgcccccagc

SEQ ID NO: 89968 - DNA, 427 bp, Zea Mays
gctaaacaggcccgtatatggcccagtgcaactgggccgacggaaccaggccaccaatatcagtaggcctccaattatgaattctccatatacacgtggtccatgtatgctggtccaggatatacttggcctccaaatttgtgcattacgattggaattctaggctttgtttcttccttccgtagttccgccaatctcgctagctgaaatgacgccgatctgggagtgcgccgccaccacaaacgctccatcgccagtcatcacgccatcgatgccgagctactatggggccgtgatctcgccgttgccgacgctttgaccgtttgccgcacctggacgttgcaaggtcgacgcaacaagccaatcgagactgcaggtatgtgatcaggaaacactccattgtttttttcctttgcttgcaaattgc

SEQ ID NO: 89969 - DNA, 627 bp, Zea Mays
tcccaaacgggtgtccccttgatcgtcgtgggctgcgccgccctcgctgaccatcttcgcacggcgtcatggccgcccaagttccggccacatctaccggaaaaatacgatggggcaacgaacccatcggagttcctgcaagtatatgtcaccgccatcacggcagcaggtggaaacaccgccgtaatggcgacatattttcatgtcgccctgtttggaccagcccggacttggctcatgaaccttgccctaggatcaatctactcctgggaagagctctatgcgtggttcgtggcgaacttcgccagtgcttatcaacacacggtgtggaggcccacctccatgctgtgaggcaggagccagggagaccctccggaagttcatctcccgcttcaccaaggtgcgaggtacgatacctcgtatttccgatgcctccatcatcacggccttccaacagggagtacgtgataagaaaatgttggagaaactggccacacatgatgtggagactgtccccacgctcttcgccctggcggacaagtgtgccagagctgctgaaggccgggcatggcactcggccccacaaaccgggaccacccagacgggtggttcgggtgccatcccccg

SEQ ID NO: 89970 - DNA, 370 bp, Zea Mays
gccaccgccgctggttcatctcgatggctgctcacctccccatcgcctccactcctcacggttgcccatctccccacgctacccttgcctagcgccgtgtgcccgtgcccagcccacgtccagccgcaaacatcgtgacagtttcttccgtcgagccattcctcctctattaatggtgtttacagctcctgttttcgtagtggaatgaaactatgcatcaaagggccatcacggagcctttaaaccagccataatctctcccctaacctccctataaataaatacggcacaactcgcctccgctcaatccctgcccagcctatgcgtctctgctccctcctcgctctctgtactcaggccaccgcttagc

SEQ ID NO: 89971 - DNA, 443 bp, Zea Mays
agagttccaagtgctatttggtagctctcgtcctctgcatccttttgatccttcagagccttactgaggattagaccctgccaaacaaaagagcgaacaaacaataaaagtaagaattaccaaaaaaaatagctcgaaaaataccaaatacgaagccaaaatatgcaaaccttcaagctattgtaagcaaggttgtctgcaagttggtcctttgtcatagcggacaaaccaagctcaagcttcggaaatcccatgttgttcatcatttcgcggcaaacattaacctccttactgtcgggaagacagcagaggaagtcgtcttcgtcatcccctctgtataccaaggaccctcaggggtatttcaagtccttggcatagtgttctacttcggcaatttgttccaatgataactgctttcccgaagcgtgtcgaacaatgtattc

SEQ ID NO: 89972 - DNA, 418 bp, Zea Mays
gtcgaggctgcctcctggagccgttgccaactcttttaggtatgctagtatccagcctcgacacgtcgagcctacatcccaggggggccaggtaccagggaagagtcggcaacgccacagacaacagggacaaatagtatgcagataggtgctaatactgctcgataagtagtactcaaaagtaccttacaaaaacaaagttattacatccgccttcaagcgggaccctagccttatgtctacaggtatgacctactcgacatcagtagggtcgcgttggaagcacgcggccgccgtctccgcgacatcttgtacgacctcctgggtggcgtcttcagccgccgggccagcggtcaccattggaggcggcactgaagccatcaaagccaaagagatggagccgcagctcggctcgctt

SEQ ID NO: 89973 - DNA, 481 bp, Zea Mays
ttttggggacttgattggttttctggtcttcacacaaatagtctagcgttgctcaatctaccatagaggctgagtatgtcgccgccgctagctgtttctggcagttgttatggatgatggctactttatgagattttggcttggattttcatcttgtgcctctgctttgtgatagcacgagtgccataagtgtttccaagaatactgtgatgcattcaaggaccaagcacattgatgttcattttcactttctttgtgaccattctaagaaaggtgacattgaattgcaccacgttgatatccatcaagagatggctgatatattcaccaaaccccttaatcagtctacttttgcgcatttgcgagggaattggatgtttgcttccctttttgactgagggccccttttggtattatttctctcttctgctttttcatgtagattttagtcattctttcttgattcctctattatatttgc

SEQ ID NO: 89974 - DNA, 629 bp, Zea Mays
gctcgatccctagacacccctcgcaaacggcggtgaagatggccacctgagcgatgaagattgggttgaagttgtgtagctccaccccgtagtagtgcagtagagcccgcatgaagcggatcgtcggaactccaaacccccgctcatggaacgaggtgaagctcaccatgtagctcacgggcggatctgacatctactcatcacccggcgcgaaccactcgggctgcggggcgggggagcgagggcggagcagaccgaagtcgaccagcgcctccaaatccttattagcgacagaggagatggcccatgggtcgcgagggggaagaacgttgatcttcttgggcatcgggatggaggaagaagacagggagaatacaaagaactcttttttttacaaaaggcgagggcggcgtgtaaagcaggaaggctgaagcggtaaggtaacggtctgaagcatctgtctcgggcgaatttatagggacgggcaaagtcaccaaggtgcgaatcgtcacggccagacggttgttgtttcgaatcctgtgcgcatgcgcgctgcaaacggtcggctcactgacaggacgccccgtcacattaaataattgtgccccctccaagaaaaaatgtgtcga

SEQ ID NO: 89975 - DNA, 452 bp, Zea Mays
tatgcacatgtagtctgttaaaggttctgaaagtatagaaagagataattgtatgactgacctgctgaatcggccgaattcctcgaatgttgtggctcatctgtctcgttttctaaattatcggactcggcacgtagtacctcgtcgataagctctataaacttgtctgctatgtcatattgcttctcaataattttgtcaatgttgtcttttatggctatgcatgccttgtcaacctccaagtcatatgcagcaagtttgtctgtgaatttagatcgatgacgaggtgggagctcgttgatcttacttgacatcatctccttgatcgatggaagttggatgttaaaagtgggccgaggagtaggggccgggcgcggtgcatcaaaaatgttggtcctgcactttggctggttgttcagcaaaaataataagaatccatgaccacattccta

SEQ ID NO: 89976 - DNA, 591 bp, Zea Mays
ttttcatacaaattttaggacttacacccggctactcacagatagtaatggatcggtgatgccgagatccaggcgcggtggcatcctcttctctctctccttcccatttacattgcttggcaccgctctctctggatggcgcctgatggatcggtgcacaggccatgatggggcgggatgggggttcaattttatacccaacaatggatggagtccgagcgtggattgagggattggccccaaagtcccagcggtgaactcgttgtttctgttatggagctcgagtggaagatgaagctgacaactaggagccactggtagaactcggcgtgccaaaaaaactctctcagttgggacccacccagcagtgtctgtgatggcacgcacgcatgggaaggctgggcagtgggtccatggtgtcggcaccatgagcttcctgggcggctgggtgaagggaaatgggacgggtgaggcaaattcggcccacatcgtaggtttgagtttctctcttttttttcttttctttttttctattttagttttcaaattttcaaattcctatttcaaactcaaacttaatttgggtttcaa

SEQ ID NO: 89977 - DNA, 749 bp, Zea Mays
tgctacaacataaggacatattgtttaactacaacatatatttttaagataagattgacaagctcctctgttttagttacccactcatgaaaagtaacatcctttttccatcgtcatatacccattgatgatccacatccatacttaagactaaacaatgcaacaatacgatttataagtataggttctaaacccacctgagagtggtctataaactatgaacgtgtgtcgagtcatgggtttgaaccatatttcgacagcataatcaggttgtccttcatttgcacatccaaaaataatacagtagagaacaataagtttatggtaccgaaatctcgtttgaacacgtgacgcgtcgtaaatccattcctttatcggtcactctaaggttgtaaaaaaaggaaacaatttcggaacaacacatctgagagatgtgaggcatgcaaaccgaaacgggtgtggtttcatgacctaatctttaaggatgcaatcaccactgcttctttcgacagaaacaatcatattaaagtaacctgatcttagcacccaatcgttgattgaactttgcatcaatgagagctcacgtgtggggagacggtgacggtgtaacgggctagctctacgtacgggataggttattggtggcataatacgcgacgtgtggcgcggggacagaacggagtcgatcggcacctagtgactatcctagagctatatacactagtgttttttagtgtcaccagtactag

SEQ ID NO: 89978 - DNA, 375 bp, Zea Mays
cggacacccggggaataaaatgggcgtgtacatggagccttttattgatcaattggtacatgcttgggaggaatgggtatggacgtatgaccgagctatgaagacaaacttcaaaatgcatgtttggtactagtactcaatgcctgacttaccagcgtatgggctattctgtgtctggtgtgttcacggtatgttcccatgcctagtttgcaaggaagctcttaggttcatttggttgaaaaagggtggcaaatatccatcgttcgataaacattgacaatttctccctcctaaccatccattccgcctagacatcaagaactttacgaaaggtgtcatagtgacagaccacccacctgcaatgatgactggtgc

SEQ ID NO: 89979 - DNA, 408 bp, Zea Mays
tgagttgttatcgggtaatctgagtgggggtccaagctccattcgataggagtcagctagtggtccggatacacaccccaaaagtacttatgggtcattcacctggtcccgaacccgtttgatggggtttgagggctcgatgcctccctacgatgggacaccgtcaaaaaatcgctcccaggggtcttggatatgccttagggtacctcgggattgtagcccaaacctcagccatgtacccatagtcatccctgactctgtgctcagaatcggttatgaagcccttccgaggggccaacctttgaacccctgatcagtaacggactcggagcccaagtgtcctgaggcggtttcctgaaccctgttgagggcccaacctttgaacccctgaatagtatgctgcttttt

SEQ ID NO: 89980 - DNA, 703 bp, Zea Mays
gagcctgtgaagcatcttcaggagcaggtaggagttctgtgttaggatatttttgacccctagaccacctgattaccgctggctgtagacaacagaccaaggaactaagcatttgtcaccatttgcttgttcagagccagcctagaggaaaccccgtcgtttcctttcaatcctagcaaccgctgcaggggatagtcaaattgcacccataatgtagttgatttgaccatcaagatcagagttgagaaggacaaggcgacccatcgggttgagaagcttggattgccacccagcgaggtattgtttgttttgtcaatagtgggcatgaaggagtggagacagagtttgcagtttgaaagtggcaggcctaggtagctttgtgggaagcctatccgacggtagccaaaggcaaccacacagtccagagctaggtgatcatccaggtgcataggaaccatgacacttttggagttgtttatgaagagcccagtggctagagtgaactgatccagggtagacttaagggcttgtgcagcactaacataacctttgaggaggattagtgtgtcatcggcatactaaggatggtaggaggggtgtctgggacaatggggtgctcaatggacctatccattttgatcaaggctcaggtaaggtgaaaggggaccaccttgtctgaggcctttcttgcacgagaaccatg

SEQ ID NO: 89981 - DNA, 603 bp, Zea Mays
ttacgtcagaccatccaaagcaaggtatgcagaaccatatgcaaattactatcaacaaaccccctacccacccaagcataacttctctctacctcaaaatcatgatgcaattccaccaacacgtggtatgagtcctttttagctcccaggaggccggatagattcaacacgcaatatggggcacatagagccaacaataatggcccacataacccaaacctatcgacaagggagcgtcataatgatacactagcaaccacacatatggaccaaggggctagtggattgccaccgccctccattgaaatagtaagagaggtgatagctggggcattccgagacaaactcggagttaacatgtcccatggggcaggctactcttatcggaggccatatgacagtcgattcgactacgacccatacctgcaggggacgagaataccccaatttataaaattttcgggtgaccagggcaggagcacgcacgagcatataaggcagcaattaggggaattgaccgataaggaggcattctgtgtatgtttattttcattatccctaatcgatactgctttcagatggtacacaaccttaccagctaac

SEQ ID NO: 89982 - DNA, 473 bp, Zea Mays
gttaagactggaggtggaagagtgtgacctagtcagggtgaaggtggctagtggtgatgtgatggtgagcactcaaagggtgaaagaagtgaagtggtggattggagggcatacctttgcttttcccatgagagtgttggatattggagtatatgattctattctgggctttgattggttgagagctcacagtcctatgaattgtgattgggataagaagactctggagttttatcacaagggacagtggagtcaacttcaaggagattgtgttgatattacagagatctcccaagtgcatgatgtttaggtgcaaaagtggttgaagggaaatgaggtatgggcctttgtgtatctagaacaggtagtgcctaggaaagaagaagtgaaggggcagttggacactctactcacagagttccaggatctatttgcttagtctgcagccttatcacctaaaagggtatttgatc

SEQ ID NO: 89983 - DNA, 401 bp, Zea Mays
agaagaagggttaaggaatccactcaccgataactagagaagaggttttgaaacagtggtcacgacatgacggtggtgacgggcaagacgatggaggcaccatccactattggagtgggagatgacaacggagcaaagctggtggtagggtagtcacgatgcaggtgatttggggagggcaaggtcgcgaggggaagtaggatatgaatgacatggtgaggtagccgccaaccgtagaagacgggactagagtgataacaatgatgacgaggtcgtagagatctatttctatatatatggatatgattaatttttgccactagatgaacctttttcgttccttttatggcacaatgcaattagtattcgattctctattaaacttttcttatctttatttc

SEQ ID NO: 89984 - DNA, 534 bp, Zea Mays
tcgcccctgatgacttctccttgtcgcatttcagcacggtgactttggactacagcgtggcaatgaagccgttgagttgctcaatcatcttggcgaggtcggtattggatggttcagccatgggtgaactggaggatgcgactgaaggtggggagggtggtgggctttgtggtggcacggtagggctgagtggagcgctagcggcggactcgacatcggcggaggtggatgagtaggatcggtgtgaccatgataccaggttgtcaagggccttagtgtctagggtaggtggccctcggctacgaagatcatagccgcggtccgtcgtcttctctagcgaggttatgccactctgtcgccggcttagtttagagagagatttggataatgaactttcttgattccaactcaggtcttgttacaggaatatataggcccctaagcctaaccgcatggagctaactgctccctaattctaggcatgcagacaacccttaattctaggcatgtaaacaaacttatctagtttctatc

SEQ ID NO: 89985 - DNA, 750 bp, Zea Mays
cagccggacaagcacaacaagtgcgcaatacgaagtctttactaaaagacaaatccgcgcaaaagtcgcctaagggtccagccggacaagcacaacaagtgcgcaatgcgaagtctttactaaaagacaaatccgcgccaaagccgcctaagggtgcagccggacatacattacgagtgcgtcgtacgaagtctttacgacaagtcatccaagcaaaagcccacacattgttgcggcaagcgaagtccccatctcatttcacaacaaacaatgtcatagtttacatacacacagcagagggccaccggccacattgtacaaataaatacctaccgcattttgccaccatccctcttaatcgtgagccgggggagggcagcatcttcgctcactatcgtgatacaagagcgagggcagcatacacgctacattgtctcagccttcgggataacgcccgcctcacgaaaattaaacaacatcatcttcaactcctcaccctcaaaaagattttgtagattccctccccaatacacgtcccagacgatgaggacaacaaatctcgttggccactccgatctacccgtagacgggttcgttacatccccatccgacgacgtctaccacttcgtgacatctcgccaccactatgcttcgacaccactcttcgacggtggtgctccacggacctcgccctagccgggggattagatgcttcgcgcacttccagccgcggcacagcctccaccgcgg

SEQ ID NO: 89986 - DNA, 621 bp, Zea Mays
cgggggtggaaagtggaatacctcgacattcccctcaaggacagcattaagggatggcgcctcgagtggttcaccatggagaatcacaacaaatccctccccctcggtcaggaaggcagcccaatgttcgcacgcccagctaggtggagtaccctacttactcagaggcagccgaagccaaggtgttgcttgctgaaatttgctcattgaaggacaggggtctgattgctgaggccgtggttgctgactttgtcttcaagaatattcaacctttgaaggacagagtctaacctacttacttgtatactggcattaatgattctacccgggtcacaaacaagcagattcccaatgagtacatgttgagccgactggatatgatactgaggggtagggtctcgaatgctggtgctcccttagcttactctgcatggaacctgcctccaaataatcccttctctgaatttgtctccaatcctcctgctccagatggtagcccgggccatagagtgcggccctcctccaaggacattgaagccttgattgctccccttcggaatcttctcgaggctgagaagcaaactcactttgagacgccatccagcactgatgatgctgaaa

SEQ ID NO: 89987 - DNA, 1249 bp, Zea Mays
gagagaagccaaagcaagactgtggacagtgcccccgctcacagctcaggggaagatggtcccttgcagactaggttttaggagccctcgggagaaggaagaccgatcagtcggcgcttcactaacccgaaaaatttcattgtccacctcgcccactaaggagtggacacggatcactcggaagaaggaagtaaacatcccaagtcagggaaggagagcacgtcaatccacctttccgatacctttgccctcaaaggaggataggaggaagaacactgtcgtgccggctcctttctaccctgacatcctcttcatataggggacattggagtcagtgcccatctccgacgatgagcctaccatgcaaggggaggaacctccccagcgtgatgcccggcgacgaagaaacagacgtcggaacatgcggtgacatcatgaagccggggaacaggatccagtgcagcccgtgtcctaggacgaagccttggaagtgggagaaactctcgacgaacgagtacaccggaaaagacgtaactcccgccgccgtgatcgccgtcaggctcaagatcgggagcgagagctagccgaacaagatgctaggctctggcaagagaaccctctcctcgctcgaaacctgtaccccgatttcgcttgagcactaaacacaccgagtgaagttggaggagtactagcacaggtagctgacagccttctgcgaaccccagatgcagaaggttaccagtggctacttactcaggtggcaaatcatcttctacccctcgctcatcttgcgaatgacctgtgtcacgccattaacagccgacgagacgtgcggagcaccatcagcgcatcgcgtgaccggcgacatgaaaatgagataaggcgtcgagaggagtacgaccgagatcacagcgtaccgcgcgcggagtcgtgccacccgaattgagtcggcggtcgcgtcgaccagtggtccgttccggggacggtcgagacgaccaactacgactccccttcccgggaccgacgacacgaacatcggcaggaggatacgtgtggagtttccacgcttacccccccgtctccaagccatccaattttctcccaacttcaaggtctccaatgtagacaagtacgagcttaagcaggacctaggaggctggttggccgtctatacgatcgccacctgggctgcaggagcaacagaggacgtcatgatgacgtacttgcccattgtcctgggacaagacgc

SEQ ID NO: 89988 - DNA, 732 bp, Zea Mays
cccctcctgtggtccatcccaacatagcgtcgggcacctgcgcgcgccgtggagacaaaccctgggcggagcagagagaccactgagtgctcgatctgaaccatgtcgttagcaagaccgtggtgaagcactaggtttttcgtgggtgacctacaaagtttggcgtggcctcaccgggcacaattggggacctatgcgatggcaatttctcgctgtcggctcggtgccgccgtgggccgcatcacgccatggtcaacgatctgcgctatgtaaccgtcggtgagtcctggatgaccgcattcactttttccccctctttcgatcgcgcttgggatcagcctgcatgctccgttgttccatggggtgagcaatcaatgacgagggcactgtcgtctgcctcgtcgcgccaccgtgtgcgatagctagaggttggggaaggtgattggtgccgtagagaggttcatgtgtggcgaggattagatcaggggagaggatcatcgtgggccgttgatcgattgatgatcaggccggatcaaaccagggtaacgtttcggtccagggaatcttgtatgttagatcgcgatcatgcggttatgcgtcgttcgcgggttcataatgcgctagatctattctgaaccatcgggcgctgatccaacggctcagattggcacgtaccccttcgctgcgtaaattttacataaggaaccctatccttttcccttatcaacccgc

SEQ ID NO: 89989 - DNA, 292 bp, Zea Mays
aaaacagagactcaagtttgcaattagaggacacccctacttgcaatcaacaagcaacaaacgttgcaattggagcaacaatagagactcaagtttgcaattagcggatacccctagttgcaatcaacaagcaacaaacgttgcaactggaataacaacacaccatacaatggtaatcaaagagtaaaaacagagactcaagtttgcaattagaggatacccctagttgcaatcaacaagcaacaaacgttgcaactggagcaacaacagagactcaagtttgcaattagcg

SEQ ID NO: 89990 - DNA, 536 bp, Zea Mays
cgggggctgggccatagtttgcgctacccacttgagctggatcatctccggcagtaccctcgggggctgggtagtggcttgcgcttcccacccgagccgagtcatccccggcgacatcctcgggggctgggtaagtgtcagcaccatccttgaggaccaagttctctgcagtagccgcctctaaggctgagggtccctcagttacttccatgggaccaagacgatccaagtcagtttcctgaccctcaagaccgcgctctaaggtcgatgaggcgcgggacgctgcccgggataaccccaacccggcgtcgagcacatcagcacaaacatccgtcgcaccatcatccgctggctctgataacagatcctctggaaccatatcttcaagagtctgatcaaagttcgccagggacaattcttgtagaccaatgagggtagacagggcaggagaaggaactccactactttccccactggcgacatactgccgactgttcttccgactcaaagggacctcatcttcttcctccccgtcg

SEQ ID NO: 89991 - DNA, 664 bp, Zea Mays
taagtacattgcatagttcaaacgtccggtaagacatatatgcaagaatcccgtatttgaaacatatggtagtcacacatatatttgtttacttatatcagttatgctaccatttaagctaatatacagtcccatatacatagggtagtgtctaacatatcgaggatatgtacctctatagctagttatttacctagatcaattatatagcgatctttcgctatatatacattgttgtacaagcaaattgcgaagcacatgcaatgtatggatacaatttgaacgagaaaatgaaatcccaattctacatctgcgcatgaattggtagatcatataacatcgatggtgacagattaaagtgtgtaccaagtacttggttgatgcagtcactgagctccagaggtattactccatgtggttcgacccaaaaaagcagaaatgaggaggacctaaaacacctggagcacataaactcagtcaacaaaatgtaattgtaaaatgataacacattacgtaagggtagtacagaattataacctatagaccatatacctatttacaaaataatgtaaacgaaaatgaggccaacataatgaaatctcaattgtacatttgaataagagatgtagctatgttaacatccttacgtgaaaaagtatttcgg

SEQ ID NO: 89992 - DNA, 721 bp, Zea Mays
gcgcattaaaacagaaaacatcaggggcttctatgcaaaagtacttagactcagaactccctgcgcaggactgcaggttcatttactaacagcccgaggggcgagggctctttagcataacgccaacgcgaaggggtatgaagcgttgacggtcgtccgatcggcaacagagcgcccagattataacgcgcagcgtataacatatacctcatctcggccgttagatctaacatccacggatgagagcgatctcgacccgactcatcccacctcgtccgatcctaatccaacgttccagatttaataccaccgaaggttatttccggttctaatcctggtcgccgacgccccatccaacgacccatgagtgccagcacacatcctctgcgctatcgcgacggcgccgccctccactcacccgaccgagctctggcgaggaagttaatcgatgttccccgggcactaggtaccaaattgaaccgaactatccaacgcgaatggcatgatgaacataagcaacggaatacttaccgaggaaacgcaacacaggggctcggccatggtgttgtgcaggcaggcagaccggacgcaactccgatcagaaattgacggtcgccggggcttgtattcccccggtgagtcagcgggcggattccgtggtggctggcgaacccctctgtacactcgcccaacacgggcaatggcgtggtcaccgatcgat

SEQ ID NO: 89993 - DNA, 995 bp, Zea Mays
ctgagccttgatgttgtacaaaaattgaagttagttggacttgaagttgggctgtcagtcagccataaggctgaattctgactaacagtgaagtcagatgaactttgagatcagttttgagtaggattcagtgactatttgattgtggatgctataccaaaattaaagatggattattggataacaagtttgctacagacagatgatcaagtcgctacataaaaattggagaaaaacatccctcaaattgctctgtcagatgctctgatagagatcgctatggtacaatacctgcaaaagatcgctggtgcactgaacctcaccgctggtgactcccgcgcttggattcgtgccagcgctgcaatttgtgcccggtggcacgctgataactttgcggggtgaaagatctttggcaagagatgaagatgggacactgtggtcgctttgtcactgtgcccacttgcgccgcgacgtggccacgcaaccatcgccgtcgtgccgtcgttcctcgcggtcatgccatgccgtcaaccatttcaccacgtcgcaatagaccgcagtagatagccagtctatcaccaaagtcattacctcagtgaaagccacgacaacttgcgctagtgaactccctccctcctcggccgataacgcatcttctcaaaatttggcgccaccgctgataaccactataaattgagcgttcggctagctccattaggatgttacgtgtccagtacaccagtcctcacctccaattagccaccgtagctcatgaatttcaacttcccccaattcggttctccacgccgtcgtgaaccacagcgccatggaccgccgtctccagatccgttcacatcctccgtaccctcgtttcagcacccttgcatgctaaggatgattctcggcccaaccaattgaactagaccacgctagatcaccgggaacacctcgatttcccctcaggtttcgtcgtcgtcgtgggaagaaagactttg

SEQ ID NO: 89994 - DNA, 357 bp, Zea Mays
gttgatatattatactagcatacaacacgtgctaacgctatgattccggggagaggagggaagggttcgacggtggcggcggcacgagtgaaggggggtggcagggacgatggggagggacgaaggataggggacgatctaaataatattgttcattggatttaagtaaggaagagagggtacatcgatctgaactgttggttttgattgtctattaagtctgggtgtaatttgtttggtggatttagtggaggttatgcatgcgggggtgatttggttgggtaggttttgcaaagtttaaacgggtgggttatatagtggtatagatatccgacttgtgccaaaattttatttaaa

SEQ ID NO: 89995 - DNA, 611 bp, Zea Mays
tcatcattgtaggtgggcggtctatcactaagacacctttcgtaaagttctagatgtctaggcggaatggatggtcaggagggagaaattgtcgatgtttatcgaacgacgaatatttgccacccttcttcaagcaaataaacctaagaactcccttgcaaactgggcatgggaacttactatgaacacactaggcgcagaatagcccatactctggtaagtcatgcatggagtactggtaccaaacatgcattttgaagtttgtctttatagcttggtcatacatccataccccttcctcccaagcatggaccaattcataaatcaaatgatccatgtacacgcccataatattatcaacgacatgaatatgttgtgtatttgaaagcatacatcgaggggagattgatggggataacaaacatgggccaacatgtgtacggggcaacgctaattccatagggattaaacccatttgtggctagcgcaacacatacattatgagcctctttggctttctcacggtgagtggcatcaaagtgtttccatgcttcactattggatgtgtgcaccatcttgtcaggattgtatcgtttgccatttttgtgcca

SEQ ID NO: 89996 - DNA, 505 bp, Zea Mays
tgtttaaactttaaataggctaaatgatcatctaggtgaacagtggttagatgcactaggacacgagggacatctgtgacatacatcgtctgctgccccaagtcgtgagggggttccatgagcttgtactactagatgctccaagatgtgagaggatccaagggctaatattgctagttgcccccataacgagagaaggctcaagagcttatatcgttagatgcatcatgacacgtgggaccccaagggtcattagatgccccggggcatgaggtccccggaaagctcatcatgctagatgccctagagtgcgagagggcaccaagggcatatgttgttgagtgtcctaagacacgagtggccttagatgcttcatttttgggtgcctcacgacatagggagccctgaggggttagactgggtaggtggcttggggaacgagatgccatagatcttatttctgcatgctacatcatgtggtataacagactaagctaaggatact

SEQ ID NO: 89997 - DNA, 827 bp, Zea Mays
gaacaagtccccaacaggtatgatagctgataactggagtctttgcatctttgcgataagcaaaattatagcatctgaagttctcgtgcagcccatcttctctagcttttgtctgataatgaagctcatgtgcccggcagaagccttcggcaagcggttctgccccttggcttcggagagcccagatgtagacgctaagtctaatgatggcgttgggagttagctgatgaagataaatcccaaacttcaccaaaacatctgcaatcatctcattcaaaggaaatcttaatcctgctttaaagaagcttttaaaaactaccacatcatccttttctgtcttcggagtaatttcctctccgccaaaccgaattagtccctttttggcctcactaaaatatcctaacttcatcaacttaggcatatcattttcggtaacagtggacctcccaaactccaggtggctgggtttagatggcacgacactataatcatcttcagattcaccttcctcagcaccaacccacttagcttcagcggcaggtgcaccttcgtcagaaacatcctccggcgctaccagccccgaccgtttcatcacttcggaaatcggagcagtttcagcagcttcggcttcttctccgtcacgtgtaaccctagcagtggaacgtacccttgccatttgatgatgaatttctcacagtttttgatgaagttgttgactttgttaattttttaattttcctgaagctcttccacttgtgacgaagcaaaaccgacatcggtgcttcggttgagtgcgatgaacaagcttcggctatggtcaaattttt

SEQ ID NO: 89998 - DNA, 1114 bp, Zea Mays
atgtgatggtacagtatatgcaaaagatcacagatgtagtgaacgttgtcgccaatgaactctgcgccgcgatcctcgtcggcattgtgattcgtgcactctggcgtgcggataacggtcgacgatgaaaagatcttgcacgaggatgaccttggggcactgttttgccctatcgacgtacccacttgcaccggcgatgtggctgcacgaccatcaccgtcgtgccgccgtctagctcggttgtgacacgccttaagtcatctcaccactcgtcgcaagccatgaagactcggcagtgaccgccgtagaccgtaaaccagtgagggccacgttagcaactccggtgactcttccccctttctcaccacaagcacttccccatccaaattcaccctcctcgcgtccgtcctctataaattgatgcctcggcccgttacgctagattgttatgaacccagagcacccactctcgccctcaattagccaccatagatggaagaatttcgttcttcccccaaatctgttgcctgcgccaccgtgagacgccgcgtcgtggccagtcacctccaggtccaccctcgccctcgttgtccatgtttcagcgcccacgcatgcttgtgatgctcgtcggctcgaccaattaagctataccacgctagatcgttaggaacgcttcgggaatgtctcaaacttcgccggtgtgcgtggaccgacctctagaacggcgttcggaccaaattggtgattcccagtggcgtgccaaggttagaattaggcgtagaccgaattagagcatggattattgagtatggcggccggtacaagttcgccggagcacccacgtcgtcgtccatcatcggggacccggtcttgcgaagaagaaagaatagaggggcattagtgcacatgttagagaaacaagggaatagtgaataaagattctttacgggttcctcgaatcgccgaggacccctgcgcaaaatcaccagcgcgggcacgctttgcctggtcgtgggcctgatcaagctagattcagcccaatactattcatacttttcctttttctttttctgccagacttggaaatttataggaaattctagaaaaattgtat

SEQ ID NO: 89999 - DNA, 696 bp, Zea Mays
ttgaccctagcaatgctgaatcccttgctagaacctggagtttgttgcttgttttggacgggggtgctggcaatcctctgtggacaaacattggcatagtgcccaacctgaccacacttgtagcatgtagtgtctgcactctgtcctatgggtctcgccgaggtgccagtgggggcaacctgacgagtatgtggagtctatggagtcccctgtggtgcctactgagctgggcgcggtcctcctccaggacgagctagtgtaccctggggcggaacatagcaaggacgaatgtactgctcccatgcccctgggtgatagccttcctcttcatttccccctgttgaacacgcttgtgttcaatagccagagccttgtctaggagtctctaaaatgatggaaaggtgtgagcaaccagtgaatactatagtggtgcattaagtccttcaatgaagtgttcctgcttcctttcatcgtctaccacttgatctggagcgtatctagatagctgaataaacttgtcgcgatactcactgactgacatactaccttgcttcagcgacaaaaaatccttctttatcttcatcagtccaacaagaatgtgatagtttctgaaatgagtagcaaattctgcccaggtgatattgttggcaacatcatgagcagcagtataagaatcccaccaatcagtagaggggc

SEQ ID NO: 90000 - DNA, 1237 bp, Zea Mays
tagtgcttgcctgcgcttgggcctaatctatcagtctcggcccagatagccgcatcaccacggcccaacacaacccgcccttctgtgtttctctgagacgatggcgcgtgggccgcggaaacggattggtattccttgcgccgacgcaggggacccacaggtcagcctcacgaattacttggccaggcgcgatcgtagcggaaacgtggtgggcccctatggtcattcgctagcatgtcacaatggtctgcggacccggtatgccaacgagcactgtagatcttcccagtcaactgctcgccgatttcaccgccagctcgagcgcagctgcgcccaaccgacatctctgggctattaagggtggatcacgggttcttccttctctcgttgttttcccttaatccagaccgccactcttaccgtgaggaagaagggcgaagtcgcgaccacctccataggtccacctctgcgcatcatgagaatccccgggctacagcgttgggcggtcgaagaatcagtggaaggcatcaccactgcgtggagaatccgagcggagttctattgaatcggatttcaaccataccagggaagaatcgctcgccggtgcaggtgccctgcctccagcgtcgcgcttgccgtggtccgggatccttgcgccaccatcataggtatggattctcagtaaagtttcgcctggattctaggatggtgtaaagcttctcgtatggccggttgggccatgggtgtaccgcatcggctgtgcgccggtggaaccccgccgtgggtgtgccatctccaccgttctggtggtcgtggggtggaagacttccgtgagccgttgatccgatcacgtacgcgcgagatttgaccgatgtgtgtacccctccgttcttttgatccgaggcgttgatcggcgatccgacggattgggtcggtttaggcctcagtaaaatccgcgccgttggatctttatccatcggtgatggttgcatacccgtttggtggaatcccggtctaatctgagccacccatttaagatcagacggcccatatgagatcataccccttcgggccatccattttgcataagagcccttacgcttccccgaaaacaacccgcagtccatgtagtagtagtctgtgtctcggtaatcttacgacagagccccctgagttttccaggaattgacgcctagtccagagcgtatttaaaataagtaaatgaattagtaaatgc

SEQ ID NO: 90001 - DNA, 654 bp, Zea Mays
taggtttgatagtacgaatcctagaggttctggtggtgaccaaaacactacgagcctatttcaaccatctgtgagccctctctaacccctatgtttatgagagttagtgattaacggttggttaagagttagagaacatattaagagcaagccaaccttgaacacatgtcgagcttcatcaatatgcattgtgcattcattactcttaaagttgaagctttatagatagctatacattatttgatgagcttgtgcttgtggtaagcagttgtggtgagttagagaagaggaacgagggaaaagaggctccaaagcctttatggcttcctcaacaacgtggatataagccttgatagcaagctgaaccacgaaataaagcatgtgctttctcctatgattttgagttgtgttacgtgctttccagtcgttgtgaatatttgtgactgtaagcacttagtggacttcgctggacatcaccaaacacatctctagcattatttgcaggtgtagttgttgaacactttgcatcgaacgacaaccacatgtgttgagtgacagtgtcgctaagcaacagtgccacactgatttctaacaagttcatgttttattttaaacatgccaacaccctagacgacatcaaggtcctttcagtta

SEQ ID NO: 90002 - DNA, 319 bp, Zea Mays
cgaacagggagtgatagagatggtccagttcagtttcagttgcgaacagcagatctatatgttttcaatctaggaacatttatgctccaagttgtaatctggatatttcctagttttatattgttcaattgcaaactgattatgctgcataaaccaaccaattctggcatccatacatgaaaaatacataaccctcctgaagagattataatcaacactctctgattgcataccagaactttgaatcttttaggctctactgtccagagagcagaatcctcctctgtatactgatttttggcagtgaacaatataggtg

SEQ ID NO: 90003 - DNA, 848 bp, Zea Mays
acagcgtctagcacgctggccatcctcctcctcttgggagttgtggcaagagcctttgtcatcttcggcaattttgcctctgccggtgggctcaaaatctttggcatcatcattgtttttttccacttctagctctctagccgtatcatccttggcttcggctggcccgactataggcaccttcggcactacaatcgattcttcaacgctttgcacggagggagcagctggttttgcttcggcagttgaagatgtcccttcaccaaattcaggcactacgaccggttcaatatatcgtggccggtgggtcaggaccttcattttcttgcccttcggtacagcagtggtggccaaagcggcaatttttctcttcttccattgccttcgcaatgggtagtgataatcagggtacacgaagccaattgcatcaaacactctgttcaatcttttcttgccccgacccccaaaggctgcggacaaggcatcatcttcggccttcaaatatgtcccaagcagctcgtcgctggtagcttcaatgcatttcaaccagtcatcatttggttcgtcaaacttctctctgaatctgaaggtatatttcaatcgaaccaggccaccttcactcggttcagtagtagtttcctttggcatttcccagctatccacaagtggccacaccctataggctatgtgctcttggactatatctcttgtgccaatgaaggcacaaacattgctaaaggccttctggcatgcttcgatgtcaccttcaatagccaccttcagccttcggaggccgaagtgagaccagatggggtgctggataatttccttgatatcctccctttcaa

SEQ ID NO: 90004 - DNA, 761 bp, Zea Mays
gatagatataacaacacataatcaaaacctaagctgcacatatagatatattatctattgtatatgttttgactagggtggaaattacatgccatcgtttgtgaaatagtttttaagttttctaagtcacccactctaaggcaacatttcccttcaagaccctcttctttggatggaggctagcccactggtcaaggagtgggtaggagcttattggaggtcttaggtaggtcaactgatctacacagggtttggccatccccctctcttgtatgtggggccattccctctggttgggttgccccataatccatattgagtgggtttgcactgaaggggtcacttgttcatgttgtttccttttgtctaggtccattaatccacgtgagatgtgtatgagccatctagagaaaacacaaacttcatccaatagtctatagagcttgtgagtgtgttttctcaatgatcacagggattgaaggcatatgggcccactagggggtcagctagccccacctagggggacctgaccataggggatggccctagcactacttcgcttcatttactccttatacatacataaaaatccaatacatgtgaaactcaattccttttattccgaggtatgttgatagtaatttcagggtgtagaaatgtgtcataattactatcaatagtgaggcataatatttatgtcaagtctagatctgattccaattttgaatagaaaaatcataatgaggatgttcttgttgttg

SEQ ID NO: 90005 - DNA, 982 bp, Zea Mays
cgagcgatcgttttgcatttgtctcttgaatcgtattgaggcggacgcgctttggtttgagtttgtggttggtatgccacttgtgctacatacagctgttgtgtccccccacccgcccgctagcctgccacagtggttcgaaacgaggatggactctcgatgctggtgacacgtagcaggagtgtgagtctgcgtatgcttgggttgggtgacagcaataccctcttcttttttcgttcacccagaacatcgcttgtgactgtcaggaccttgcctggtactgccgctggtggctgccatgatgtctagactgcactgagtaggctttgcaccatgaatcttcttttagcagttctgtactttaccaagccctttttctgtagtttcttaattgcctgctaacctttgatttgaccggttgatttgtatcttttctcatgtcatcctaaagttttacatgtcttgatgagaaaaacttcgtatttcttaaccagcactacccacggttgatttgttttttaataccttcgttgcaatggatgattataaatgtgcgtggaaataccaatatgataatatcatctgggtgcggtgcccaagtcaatgacatcgtcgtcgctgaaaatgttcctggcatgtagtgcaaccacaccagcacgcttctgcaactccatagacaatggccagggaaacccaaaaaaactcttaaaattacaattaatcacgtaacagtgaataaaggaaggtgacccatgattccacccggtggccacataagccccgatgcgtaggatcaagaacaacctagcgtgcgtaacaaccttcacgaccctcaccaggttgaactattcctcactactactgcaatccaacaaaatccaagagcaacattttgcaagttgctttaaaattgagtgctagatgcagcaaaatgtttcctatccaaagctcgtatactatatgtgtttcatgaacttaattt

SEQ ID NO: 90006 - DNA, 712 bp, Zea Mays
catgcacaagggagctagaccctgacaagtgggcccagcgtgcttgtcttaaacacatactgcccaaagctataagtacaacagcgggctgagatcttccctcccgactatcgtgccgactccacgatcaagtatgttctccttgtccattgtcctatgtctgctttggaaaccatccagcatgctaacgttgcagggacagggtgtgccgacgtacgtatgtactaatgtgatatctttgtattgtcacacccggcctgcgcagcagcaggcgtatcgggtggccgagcgatgcctcatgatggtgttgctcacacgcccgagataaacacctcgatgactcgcgttatcttgaacatacattaaatacgtgtgtcgtagtcatgctgttgtgtgccttggaaacacatgagacagtcttgttggtctgtacaacctgtcacgctccgcgacctagagagcacgcttccggcaccctgcaataaatgcgggcaatatgactgtaggtggagagtttacttctagatgaagggttgtgctacgtgctctagggctacgtgacgactcctgacccctgcttgcgtagagcgtgcgggacaagggcgcacttatagagtaagcctagactcacacctttttgggtccgagtttcaacgcttgaggttcgagcgtttacacgtgctaggccaagcccgccctaggtggactttag

SEQ ID NO: 90007 - DNA, 769 bp, Zea Mays
tatgaatataatgaaagtagcacaagatattcaaatacacggtagcgaactaaacattaaattgtaagacaccgtaaacaaccatacgctagcattagttatctacacgtcattgggcatacgtaaccaataccattacaaagacgacaaatactttctagaattaaccagcccaacacggcatcactcgtgcaagcatttataacattcgctctaatttttcattagtttctttattattatactagttaagtacacatcaatttgccatggcttctatatagacaaacttagttaaaagggaataatcacttaatcgggttctaccattattcacaatatcctaatgcgagcacacacccaagagcacacacagaaagcgatagcctaatcacactgcttcttatactagtctaatgaggttggttatttagcaatattagctttgccacgcaagtattaaaaatggtaacgtatcattaattgtgtttctagtccatataatgacacttgctaaatgtttttaagctaagttactccttaggctttaaccaatttcgtgcactatcattattactcaaactcagtcaaaatccaaaacaacaagcagtcgactcaagacaagcacactagagtggaacaatcaatcacatctaaaatgtttaggacagcagcacaacagttgattgtttcagttataacttacaagatatttatccaaaaatagtgaacagatactttttggaaagcttaagaaactctctacaac

SEQ ID NO: 90008 - DNA, 482 bp, Zea Mays
cgacggatctgcgcacatctggtgaggagatcgaagatacccgggttgtgaagaagatgctgcgcgtactacctcaacgatatgcccagatcgcgatctcgatcgaaactctactcgatctgaagactttgactatcgaggagctggtcggccgtcttcgcatggctgaagaccagattgggattgaatctgtcactaacaaggcgggacgtttattgttgacagaggaggattgggtgtcgagaaatcgatatcgtcttctgccggagtcgtcgtcgtcaggcggcagcgagaaaaagtcgggatacagtcctggcaaatggaagaatggaggtcacagtgacaagaaagacaaccctgtgaagctaacatcagaaggaactccacggcgaaaaggtcgatgcaggaactgtggcatatacagccactggcgtgtagactgcaagcggccacctaagggcctgttcggttgtaccggaata

SEQ ID NO: 90009 - DNA, 593 bp, Zea Mays
gcggacgatccggccaaatatgtcgaatggtcctcgatgtagttggatggtctgattgtgtctagaaccggtcgcgtgcaggcggcggtggctgtggtgttgctatgaatgtattcatcgacataccatataatgggtgagtacatgatgacccatttgcagccgatgtgttaggtgcgggtgacttcgtattaggttcatgcaagggaaaactagatgcaaattcatctatatattgttttaactgatccctcgttgttctatgaaatctttaaaagatggacctggaatacttacaataggagtatgaggcgaaggtaggagagattccatatggatctccccttgacggattatcttctggtggcgatccaccgtgaagtatgacaagtattttcccttcgtcttctcgctccattcgatgagttgtcgtagcagctcttcctccttgcgcctcatgaggtcatcaaagcgctgctggtcatcaactggagtgcttctagggttagcttgatgatgttgaaggcagagacgtcggtgtgatctttagaaccgaccatccatgggtcgatttttagtagatctaaacaccc

SEQ ID NO: 90010 - DNA, 508 bp, Zea Mays
agattatggcagctccctccatcaatgatcacctttattaccttgtcttgcacttttgctcacgtttgaaaaagattatgtcgctgtccaatttcagcttctttcatttgaacactcaagatttgtgtaaccacaagagtagtaccatgctcaaattcacatctagtatgttcctcaattttatgagtgacatctacatttcttgcttaagcttcctcttcactagctgatgtatattctccatcatcattcacaaggatcacacgattatttagacactcctttatgacgtgaccatgacctccgcacttgaagcactgaataccactactcttggctgttgaacccactgatgttgaagtggatgttgctggtttataacccatgtttggagcagcatcgttctttctactacaatttcctttattattggatcgcaagcctccaattgaacattttattgttgaggatgcaacagtaaaccttgagattgatttacttcctccag

SEQ ID NO: 90011 - DNA, 715 bp, Zea Mays
gagggttttgtagagttttgaaccctatggaccataagctagaagctaacctaaccaagacgtccaaagagcatcggatagagtgtcgtaccaaagtcaagcaggtaaaaagaccaagatgttcaagaggtggggtgaattaggctattctaaaagttctcacatcaattaattcctacaaaatatctagcctcaccccttgtgcctaatagtgttttctatcttatacacaaaagttttacatcctaggttctaaccctacactagtatgacaattctagtaatataaatataagaaagcattactgaaagtgaatgcgtaatgtaaggagtacgtgttagacacacgatgttttcttgaggtatcggaaagatggcactcccactagtctttgatggagcacccgcttaaggttgtagcaacacatgatcagcacaaggtttaagtgctctctacgagttgattattcgacactctaggatggtgaatcacccacaaccgtttacaccatgagtcggttcatccacaatctccatctggagatcatcaagttctcaatcaacaccaagtcatctaggtgatgtcgatcaccaagagtacaagcaaaaatctcacttaatctaatcaagcctaaagaggaagatggatgcacactttctactctatgtactaatgttaaaggatcaaaatacctagagggcgtggataggtata

SEQ ID NO: 90012 - DNA, 540 bp, Zea Mays
gcatgatgcagcaaatcaaggaaattaactctagggtttactattatcatataacttaaagttttgaagacgggtgaggttttagcgaaaagaaatgggaaagagaggtaacacccgaatttggagagtgaagaaaagaaaaaattcaactccaaaaaattcggggtgttacagttgttggcctcttgatttcaaaggatatcccttattgactgcaatgaaggtattattatatggtgcgattgaaattgacgtagaagctttcttgaggccataagtgtggtgtatagcacattttcaacctctaagtagtttgtttggattgtatatggacttctgatacaaattacactaaacttttttactaccatcttttgttctctctcgcaaaaaagtagcacatacagtatagaaagaagttggcacataatacaacaaagtccctagcgtcggtggtgatagagtggtgaactagatcaaataccgctttaaatattccaaggcttataattggactggcctccactgaaatatttctat

SEQ ID NO: 90013 - DNA, 598 bp, Zea Mays
cggaggaagaggcaaagaccgtagcggaggacgaggcctagaagctctcgcttgcccgagacaacatcgttgtcgcgtgagttcaagcggaggcttcactcttaaagcagagctcggagctctaggctctgggcggccgtgattgtggtgtgcgtccgcctttctccccctctattgtcgaagttgccctacccgatcggctgcgagcgctgccctaccaattggaacatgtggtccttgagggtgcactccatgggagtagcatatccctagggtagatggtctctcagtttgacgagatcgatgcagccgtgatcgcagagggcttcaccgccggatagagcgacgagacgcttgataacattgaagaacaaggtctccctcatgcccgattgatcgtaagctgagtcgatgcgaaattcctcctgacctgcccttggagtttggagctgcttgtcggcgtctaaacgatgttaattcaatgtcatgtaacaaactttctttgaatgatggaccaatcatatattcttgccttttggcatgattttgtttcttgcttaagtattctgccacatcctttcctggccctcgcgatcgg

SEQ ID NO: 90014 - DNA, 464 bp, Zea Mays
actatgccaagaattgtccaaggaatcagcagaggcagatgccagcaccaaatcaagacaagggaagaaagcagaagatacaagtcaggcaagggaagctcaacttcactaccctggaggaagtacctgagggagcccccatcatgaccggtatcttttcaatttataaccaacctgctttaattctgtttgattctggtgcatctcatagtttcattagccaaaagtttagtgctaaatgtcaactgcctttctaccactcaaaagggtcatttatgatagccacacctgggggtaaaattgcaactaatcaattaaaccaaagtgtgcctattcaactgggaagccacattgtcaaaaccacccttcttgttttgggtttggaaaatgtggacattattctgggagctaattggatgaccctgcaccaagtagtgcttgatgtagccagccgcatcgtggaa

SEQ ID NO: 90015 - DNA, 1006 bp, Zea Mays
gctatttgtcagtttgtgtagccagtagccgtgcgtgcgtgcatcaccaccatccggtgcgcatctaaaggcccgtctagtttaagtgactaaaaattaattcctctattttagtcacatttagttcagtgggcgcgaggccaatatggggattgagggaggccaatatggtgattgcgggtgcgctttccatcggcgtgtgcaggcagagcgggggcacgtcacgcctagtgtggacgcccacactgttgttttacagagtagtagtagattaatggagataaaatgacgttgaatgatgaatagttgtaaaaaataatattttatggttgagatgaggtaaaggaggagaatttagggagaaacaaatgtgaagatgagaaaagtagagggtagagcctatgtgacgtggctgcatagtgtggtatatggaaaaaaaattaggaggaactgttgtgaatagtctaatctactacccctagcaagcatcaatcaagtatgtgtgtgttattaagtgctggggttacacctactctacgcctaatcttgcactgccgccgcaatacgcaacacaaatgctgtggaccgtgtgggtctcatcgcttctactagtgccactgtcacttgcctaacctactacaaggtgcattttggccaatctatatgtagcaaaaggaattcgtctgtccaaccgctgtctctctttacgggaagacatttctggctatctccaatagatctttcatcacattctctctcatctcttatttcaatttttttgctacaaacagtgccatctacagtctcgtagagacttctatttcaacgggcatatgatttctgaattgatgttttttggaaaaaaaatctgtaatgggcatattatttttttaatccatcgatgtttttttgttgaatctagaaggggaacgaaaagtaaaagaaaaaaaacgtcattacgaatttacgtcgtgctatagctgtagcagacgacgatagcgatttc

SEQ ID NO: 90016 - DNA, 645 bp, Zea Mays
tggctttagtctgatagtgtagttcatggactcgacagaaacctttgctgaacggttccactccttgactacgaagggcccaaatataaacacttaatctaacaatggcattaggggtcagctgatgaaggtaaaccccaaatttcttcaaaacgtcagcaatcatcccattcaaaggaaatcttaatcctgctttaaagaagcttttgaacactactacctcattcttttccggcttcggagtagtttcctctccgccaaaacgaaccagctccttttttgcttcgctgaagtagcccagcttcaccatttttggaaggtcagcttcagagatggtggactttccaaagtccaaatgactaggtttagttggtaccctgcagctgagctcatcctcagaaccaacttctccaacatcagcttgtgttgcttcggcagcaggtgtgtcctctgttgtaactagcccggagcgcctcatcgcttcagaaatcggaacagtttcagcaacttcggcctcatctccatcacgctcaactctagcagtagagcgcactctggccatttgattttgaatttcttaaaaattcctcggaaattaataaccttttttccgaagctcttcttctgacgaagcagaggctaaac

SEQ ID NO: 90017 - DNA, 616 bp, Zea Mays
tgaagatttgcaagccaaacccttagttttggacaaatttgcaaaaagaccccaattgtgattccactctaagtctagaaaacagtgttatgggctcaactttggagctttgtatctttcaaattctagggcttttgccctaggtcaccacatcaaaattgtagaccaaacaaaggagaacaactttgcttaagagagtaagcatagttgttgagaagatgttggagataattaagcccaaagttggactgtcaggctggtggaactctgaaattcagaacttcagtgtaacagagctaactttggacttggatttaaacatgatccagtgcaagtttgggcatgattcgcataacaaatttgtagctggtatgtagctccacaattttgctgcagagatctggacgagttgctatatgaatctgagagaaaatgaggcccaaactctgtttgtcagaccgacttatgaacatatcccatggtatagtactggaaatatcaccggagtggataactctcgccgtcgacgaccaccgtgcacggattcgcgtattgggtcgccgtgattcgtgctgaccgagtggataacacttgggatcaagtaagggtccccgcc

SEQ ID NO: 90018 - DNA, 532 bp, Zea Mays
gtcggggactgcggaggagaaagaggaggcgtcagcgtggtttgcaacgaggtttgcggtggacatagccctcgcggagatttgcgaacctcgacaaagtgcaggaagggagcgagaggggaactgactcggacgcggcaccatatatctccatcatccagcacattgaagtcaaagaagtggaggtcgtggtctcgtggagagggaggctgcgagagtggggctgatcaagcggttgggcgctccgtcgtgcggacgaccgaagaagaagactgctactcctgctgtcgcgcgactatgggccgccccaaacgtagctggagcatgggccacaccaaaaaatcaacccaaaacacctgcactgctgtgtagttgtattgtcttgcaaaaacttagtaccatactggctaataaaggagacattgagcagcttataaacgttggcgcagacttaacactaagaattctgttggtggctgaactggtcaggttcaactcgcgcgggcatgataatttttgctgaacacctgcg

SEQ ID NO: 90019 - DNA, 928 bp, Zea Mays
aggtgcgccatcagcgaacgatctgttgcagctcgtggactatttctccccgcctatttaagaaaacgcggccgaagcctctccttcctacatctcccttccctcgcaacctccttgagtcgactgcggaaagaacaatgcccgggcggctgagctcctcgccgccattgaaattcaggcgctagtgccgatttggggccctctggtggacgtgggaagttagcccagtgcttgcgatggggattacgtccggaaacaccgcggtgcgccggtggaactccgccaattcctggtcggagttggtcatcggaggtcgcgaccgccatccctgctgctgaccacaacctcgccgcgccggtggtaagtttgccacggcccagttcaccgcattgtccacatcgtgtaactagtactagatctggttgcggggcaccgggggccggaaatcggtggcgccgccggccgctccgtcgtggggagattctacgccgttgtcagacacactgtgggttgtcgccgattgagtaactgtggatcctcgtttggacggtccggattagaccctgtaggtaccccttcgcagcattaaggagctggccgttgatcacccatcgtacggctagggataacacgtgtgtatctgtcgttcatcattaatcccacggatctggactctgatctagcggtcagatatcttcaataccccttcggccgagaacatttactatagagatcatgcgcttatcagaaaataacccacaatccatatcacagtggtctgtgtctcggtatatttagcgtcagagaccctgccttttctggtaattgaggagcagtccagggaattgggaaatcaggaaaatgaattagaaaatgaatttttaatatgaaaacaattcctagaatttttataattcatagaaaattc

SEQ ID NO: 90020 - DNA, 764 bp, Zea Mays
gtttttcctttttctttttctattttctatttcttatttctatttcttttatctccttttcttttgaacaaataattagctaaataatcttaggtgctaaaaaaatattctatgtgaggtgcttctaacaatcatagtgtatgcataagatgagatgtcctatgaggtggagtctagggagtgattaagggggggttccaaaccttaggttaaattttgggatgttacaagaaatccccgcagtcacttaagatttcttcaaagctctcggcttccccacttatccattcaataacaccttcgggttaggagattagggttccaaaccttgggttaaattttgggatgttacaaacctaccccacttaaaggaatctcgcccttgagattcagactaagcttgagaaaaggtaagggtattccctcctcaaggagtcctcactctcccaggtagcttccttttctccttctctgctccactgaactttacaaagtctcacttctgagtttcgggtctttcggaatgccgagtcaagaatttttactggcttttctcggtactgaagatccttctgaatctggattgtctcctctttgatgtgattttctggtacttgcaggcatttgcggagctgggacacgtgaaacacattgtggatatctgacatggattctggcaatttgaggcggtatgctgcgggtcctactctgccaatgataggataggggccgacgaaccgcggagctagcttccctttcacttg

SEQ ID NO: 90021 - DNA, 843 bp, Zea Mays
cccgatgataatttaattgctagtttacattatgctgacatttttgtcaataaaagaaaagatgcatagaaaaaacaaagagcaatcttcttttcggcggttggcattagttttccatgacttccccattgctgctgcgttggaagaatagacaaatacctcatcccacccacgaagggaacatgtcaatatcttaatcttgtggcactgtggggtttaagtggcacagtgctctgtaactcgcggttcaaagtgagttaaggctaaacatcgtatttttttacaaaattacactgggtgaacgtacacatgtaaactctaactatgagcattttcgaaaactgggtcatcgacgaagtggttaatattagaatattagctctcacggagagtcgaacctatacatacaattctacaaatatcatattctaaccacagatgaaaagatcctgcgcattaatgttgcagcggcgagtcaaacgcctaatcttctcacacgcacgagtgcgtccaactaacaatgcattaaagcatccaaagcatccttcaaaaactaaaagaagcgttaagcttaaggacttgtttaacctattagtttgaagatagtggactcagagtgcaggcatcacattaatcttccttttaatgctagtacgaacccaggagtagactactgcaagaaactgacacgttgttagagggaacaaagcattaacccagttgcttgaagatactgccattgaacatcatagcccaacttgaataaacaacacagagtttggagcctccataataccaccacaagtgtcattagttcaagctacagttctaatgtcaacccat

SEQ ID NO: 90022 - DNA, 454 bp, Zea Mays
gtagatggtcctctatgagatgcagtgaatggccctctctgagatgcagcaaacgtgttttcaaaactctcgccatgagacttggcgaatggtttattgtgagatgcaatgaacatgttttcaaaatttttaccatgaaacttgatgaatggttcattgtgggatgcaatgaacgaattttcaaaaggttactataatgtaacgattcaccatgggacttgatgaacgtttcattgtggatataatgaacgttgaagttattggtttgtaagggattttactaaacataatgttttataaaaagagggttagaatgcttttcaagcacaaataaaacttgatcaactaaaagcaaccgctcaagctagcccactatatagccaacccacttttaccaaagtgaggtacttgttgagtgcgaaagtactcactctagccttttccacccctgtcc

SEQ ID NO: 90023 - DNA, 411 bp, Zea Mays
atctagtctagggcttatgaaactcaatagatatacaatttcggatataacatatttgtgagttattgatttgttttagaaaaagatcctcctcttatctggtgggaaggggagatgcagctcctgctcctacaatagaacattccatggaagctattgtgtgtatctgaactctaaaaatattctgctgccaagagtttatgagctttggcttctttgttctcacttaacccacatggacagtttgattaacattgttgcttctctgtcatgttttgcagtttggacttctgtagcaccgttggtctgaatctaaaaatctacatcgtgctagttgctagttgacacattgaactatgttgatttgtgctccaggatcaatggtgttctacgatctaatgataaagaaac

SEQ ID NO: 90024 - DNA, 336 bp, Zea Mays
tttgtatgataaggctgcgcgccttcgttgatccggtcgcgctcgtgggcgacttctgcacggagagtcttttggaaagtacttcgattttgcgggcctattattccggctgcacccttaggcgacttttgcacggagagtcttttggaaaagacttcgattttgcgcgcctattattccggctgcacccttagacgacttttgcacggagagtattttgggaaagactttgattttgcgcacttgttgtgctagtctggctgcacccttaggcgacttttgcacggagagtcttttgggaaagacttcgatattgcgcacttgttgtgctattct

SEQ ID NO: 90025 - DNA, 666 bp, Zea Mays
ctgccccaaacatctattcattaaagcaatatgtaaataaggatggtgcgaactcgagagaggcttcctcaccgtaattagtgtgatacaaccctcttcccacaagccgcgacgggtctcgacgtccagtgaagaattccgctctccaccgtggttgatctcttcactctcagccacgaggacttccaagcaacaccgtgaatctcccagacccaccgtggtgccaggaatgccggttgggacgagttccgcattggcagcgattttctatgtggcttgacgaggactaccactctctcacagcggctaccggtgctggtgaacagggggcaagagctcgtatttatacactgtgacagagacaaaccaggcacaagctatttggattaggatgagaaatccgcacgggcgatctcccaagaactccgctcaatctcacgcagaggatagcgattctgttacggtaggagatcaagctgacagacgggacccacccggcagacacgacccacctcgtgcgcgcgtggatctcggttctggcaagacgacgccagtggttagtgaggtgagcatgggctagttgaaggggtgctggcccgtgtgagattttgggccgacgagatagagttggcctaggcatgtctaattccttccccattttctttc

SEQ ID NO: 90026 - DNA, 695 bp, Zea Mays
atagcagcatagagaggcgcattccagagtccacctcctcaggaaatttcgcaaatacatgcccaggacttggcacacccatcacacggacgtgtaatactaagcagttttgacgaagtcaggcaaccttcgcaaaatgacgctttccaagctttcaatttcatcgatagtaggtgtccgctctacgctaggctataggcaacaccctggccaagcaattacaaggtcgaaaactagcccaagtacaatgggaaggccaacctgtcgcagttcatcatgagataccaagttgtagtggccttatccagcggagacaacaatgagctatcattgtgcagacatcggcctttgcgattactataacatgttcatgtcgctcatgtcccagttgccatcagtagaggatggaatcgccattcattatgccatcagtggcctatgtgttagccacttatatagtcacttcatctaggacccaccaacaacaccccaagagttataccaataccgcaaggttgaggcacaacgcaagccaaagaatccttctcatccgaggagcctcaaaacatgggtgcaaatgcaacaaccttctccgtataccacaaatccacaatgttcaacaacaaaaacaacctaaatacacccatcatagttacgaccaaagttaccagctcgcaagaggcggtagaactcca

SEQ ID NO: 90027 - DNA, 692 bp, Zea Mays
gcctagtgttatgaacacacttgtgacaaatgatacacattgtagtgtttcagctgcctaaaagcataaatagtacaactgaattcagtatactcagaggcttcattatgacgatcatagctgaaccttctaatatcagctggaagtggtttgatcttgttcagactatggaatgtcaagtagtgtagaagagtagcacggttctcaagggataggtcctacaagacaagtatatatgtcagaataaaattaaaggtttaaatggatatatattaattatgaaaatatcagttagaataccgtgtcaatctcatcaggcatatacccttctgcatattcatacaagataatgaatctggtgacaaagaagccacaatcatttgagcctactggcatagttggacagtctttatcaggatcgatcttgaaattcccaaatttaggaagcatttactttggcctagctaaatgcattcccatactgagtcgagacatcatcagtctcgatcaagtatactttttcttttggaaggttatgatttcgttgtgataatgtttctaggtggtaccgccaattgcaggcccatacggatttgagtctaaaatatctatgcaacacatatggaagttaacaacatataatgtccagtgtccccggcgtagcattggtatcattaactggatgtaagaaa

SEQ ID NO: 90028 - DNA, 320 bp, Zea Mays
aaaaatttctagattgtggctgatgttattgtagctagtggtttagcttcgatccattttgagaaatacttcactgctactacaacatatctcagattttcttgggctggcagtagtggtcccaataaatctaatccccatctctataatggccaagtgggttgaattagttgcgttagagatgaaagtttcttttgatccctggcacacttctgacaattctcacatttttgcactaggtctgctgcatctgaagcagccttcggcctgtagaaaccttgtctaaagaccttgcctaggagtggcctggatccaatatg

SEQ ID NO: 90029 - DNA, 331 bp, Zea Mays
gaatcattgacgttgccatcaacctcgagtagtggcgaatccacctccaagaagtgccaccaacaaaagacggttaaatcaaactatattcgatcctctttcaattactctcgcattcctcacaatacgactactcccttactatcggctccacttggaaaactaccacattttgatggtgaagactattcttggcggagccacaaagtgaaggtgttcttgttgaattaggatgaagataccgaatagtgacgactactactacaatccagtggaggcgaagcaaatcatacactgcaactcgcaagccaccatgtgtaccaactcaaat

SEQ ID NO: 90030 - DNA, 543 bp, Zea Mays
acatcttgatttcagtcaacgaagcagtcagcactcagcgaggactgaatatttgaaggcatcctacggttggattgtgtggggcccttgcatgtcccctatatactagcggtggtacaaggcatgcatgcatgtacagagttctatgttgcaagacttgcatacatgtacgtactcatgtacagacgtacggccgggcaaaagaccatagtagcagcagttcgtgagaaatcgatcatgatggcttgctcctgagctgactctgattgtgaagcagcagcatcggccttttctatctagctcaccacatgtgcataagcatatttacccggcgagatcctctgcagtaacatggctcgaccatgtagtcacgaagtttccggatcaatgaggtcgaggaatggctacatgtgagagactgttacatggtgtttacgaaaatgaccctgcgttttcgggttggggatgacgtttccaagtcgatggttgctagcactgtatccgtttcttgtgactatgggttggacgttgccgtgaccggta

SEQ ID NO: 90031 - DNA, 381 bp, Zea Mays
gtatagtggctccttcttgaggaagccaccggcgaccgacccccaccttgacctataaaaggaagaggtcggtcacgagacaaggagaggttgagatcctaggagtctcaggacccagatgaaccaaaagaaggacacacgatggaagataatgacaaatgttcgacaagacctgaagacttggaggccggagccaaggcttagtgtgggactctagttttgcagtatttaggtccacccatgcataagagacttgggagatatccttccctctatcgcccacttgtaacccctactacaagctttgagcaataaatgtgtcgttagcgcgagccgttgaatactggatgtagggacgttctgcccgaaccattataaacc

SEQ ID NO: 90032 - DNA, 639 bp, Zea Mays
actagacttgcagaatcctctaaacctacttctctatgcctagctcaaactcctcattaatagcaaattgcctgacagccaacctaaattcatccattgatgggtacaatgtgccaagatccaattttgggtgatccttatcatatgttatcactacctcatctggtatggcatcactaataggaatggcaacatcttcagtattttcatctccctgctcacgcacgcattgtacgaccattcggttcagctacctttctcctctcatcctcatccctcaagcccaatatcacatatagctgatcctcactcaatggttcaactcttccttcctcatcatgagtctctactatttttaagttattgtgggataggtaaagaagcctcaaacaacaacaatggagcatcagtattgctccccatggcaacctccgaatctaccctgcttgcaacaattaggaaaacgtgaagccataattgattgaatcataaatgctctaatcataatttatgagcaaagttgtccatatcaacattgaaaacctgatcctgttggtggttaaccacgattcatcactgtaaataatactgctgaaggctgatactgaaaatataattactaataccgtctagatgact

SEQ ID NO: 90033 - DNA, 500 bp, Zea Mays
cgaagcttaatcatcgtgctcagacgaaaccccgcttttgaatctgcttcgtcacaaaaggaagatcaggaaaatcagaaaagtcaacaacgaaaaaatttcaagaaagacatagttaaatggtcagagttcgctccgttgctaggattgatcgcgagggagatgagaccgaagctgttgagaccgttccgatttccgaagccatgaagcggtctgggctggtaacatcggaggacgtccctgccgccggagcagagcaagttgatgttgaggagaccgattctgaggatgattatagcagcgctgtgccgagcaaacccagccaccttgattttggaaaatccatagtctctgaaggtgacctacctaaaacgttgaaattggggtatttcaatgaagagaagaaagagctaattcgcattggtggagaggaaactactccgaagccaggaaaagatgaaatagtagtttttaagagtttcttcaaagctggtttgaga

SEQ ID NO: 90034 - DNA, 367 bp, Zea Mays
ggggcatcagattaagatcctacggctagggtgttatgaagatgtgatctaatcccggtcatcgaactaccatcctacggctcggatccgtttgatgaaggggtatgctgattctaatcctgaccgtccacgcagagatcaacgtcccaaaacaatcagctgcacaatttaatccccactgttggatgaggatccaacgccaagaacgtcatctgccaccccaagcgcttggacacggcggagcataccccgcgcggcgggcttcacgccaacgagcagcgcatccagggttacagagcccaaatcctagaatagattggcgcaaaacgtagaggggcagctagcggagttatccggtggacactta

SEQ ID NO: 90035 - DNA, 359 bp, Zea Mays
atgtaagtgtggaaataagggggatagcatttcccgctaacctcatagtaatgggtactcagggaatagatgtcatcctagggatgaactggctagacaagtatcagacagttatcagttgtgataagaggacaatcaagttggtgtccccattaggagaggaagtggtgaccgagttagtcccgcctgagccgaagaaaggaagttgttatcagatggctgttaatagcagtgaagcagacacaattgagattatcaaggttgtgtccgagttcccagatgtgttcccaaaggacttaccaggtatgccaccagagcgaaaagttgagtttgctatagagcttcttcctagcaccgcc

SEQ ID NO: 90036 - DNA, 595 bp, Zea Mays
aaattttctaagagatcaggggcccgactgctaaaaacaggactcaattgttttattcttataatactatggatggggggttagttattaaattccgcggggtgtcttttgcaaataagcctcggcgaaggggtatcagtgcataagggccgcaggatcaagatccgatgcccacgattaaatctcgaaccgataagcaactgagaccacacgatcccaatcctatgttcaagattttatgaaatgagaccaaacctaacccgtccgattagcagatcaacgatcaagatctcgtccgaaagggtacgctagagatcaaatcaagatcgttaaataacaatccaacggttcccacgctctcttcctcaccaggacacacacccggcggcgccacgaaatctggcggccggacctcgccggtgaacagcgatttggcgcactgatagagtattccccagcccaaatcattcatgcagactagtgcagaatgtcacacagactagtgcagaacatggcagaggacaaggcaaaactagaggagtactactcacctgctatggtgcagtggagaactcggcccacggtaaacagtgac

SEQ ID NO: 90037 - DNA, 284 bp, Zea Mays
gttcatgcttgagttggacacatttgtggtggttttcatcgacgacatattggtatattcgaagaatgaggaagagcatgccaatcatctgcacatagtttttcgacgtctaagagaccaccgcttgtacgctaagttttccaaatgtgctttctggctaaaggagaataactattgacccaggtaaggtgcgataggtaatggattggaaaccttcgaccatcgttcaccaaattcagagttttctgtgactacctggatattatctctgctttattctagat

SEQ ID NO: 90038 - DNA, 332 bp, Zea Mays
tagttatgggtaaccaggatacaactatagatgtcatcctagggatgaattggctaaccaagtaccaagccagtcttagctgtgataagagaacagtgaagttagtgtccctatcaggagaagaagtgttagtggaattggtcttgtctggatcaaggaaagggagttgtcaccaagtcaccgctcatattgatgaaattaaaccatcagaggctatcaatatagtgtcagatttcctagatgtgtttcccgaggagttagcaggtatgccacctaaaaggaaggtcgaatttgccatagagcttataccaggcaccgcccttatttccaag

SEQ ID NO: 90039 - DNA, 591 bp, Zea Mays
tttgtccctcatgtggcttataatgagatggaaaaggcgagctagttccgtcagggtctaaaaccttctatcaggcatgcactgggagcctttccgttggtggacttccgtactatagtggagcaggcactgggtgtggagatgcaacactagtataccatggagtcgcagaagtcttcgggtgttgatcagcctcgtggccaggacgcgaggaggggcaacacgggaggttcagcccacaagaagggcaagtctcagcatcagtgccaccatccttatcgtggcaaatcttctgactcgggtacttcgggaggaagtactcagaggtttcgggctgttcctaagcccgagctggggctagtgtgtttccgctgtggtgatgcgcatcgccgtgcagagtgccagtggagtggcaagtgttctatctgcagtcaggaccacaaggatgtggtgtgtaggaggaatcctaatgggaagcttagatgggagccggtgacttcctcctcttctcagggcactatcaacatgatgtcaagtgctgagcagcagttttcagttcctcttcctccgcagcagctttatgtgcctggg

SEQ ID NO: 90040 - DNA, 395 bp, Zea Mays
gaattgttcagggccagaacactgtctaagctatttagaattgaggcgaaaacattattaagatccacagaattggttaccttgcacttggaggcatcagggtcatgtgaggtttcctggttgacaccgccaacagaccctggcgtgcttccaacaccagcagcaagctccaggccgcctacctgcggccagacagcagaaacaacagggtctgcaaatgaaacagttttgccctttctcttgggcacccagcagcgagttgatggtgtcatccccagaccatgacgacggaaaggagttgaatgcctatgcttgtcgttggagctatagcagtcatccatccctccccggcatcgcgatgaacgcgcccaaccggaaagacttcggtgcctacg

SEQ ID NO: 90041 - DNA, 464 bp, Zea Mays
tgctgtagtgctgtcgccgcctctaccttccagaacctaaggatttacaaggatttcgattcatgatgatagggccatcacccatgctgctgcaagagatgaggcggtgagaggcagataaggatgcaatgaatgcgctccaagaaaattgcaaggcatggggataaacggataactgggaaatttggcatatccagatgtgatactggatattttgatcaacaatatattcaactacggtatcgagtaacaagttttagcatagaaaggttcccgccgtgaaaaaaaagtagaacgcaattaactagctgtgtgagctgcagacttgtaagcaatgttactcacaggcagtagcgccgcggtgttgagaagcaagccaactcgtgcgcttccttggcccttaggagttgagatatgccatcgtgctgaaaaataggatgattaacagcaataacgcagcaagc

SEQ ID NO: 90042 - DNA, 521 bp, Zea Mays
gtcggagaaagaggagagcactgtcgcaagagattcgtggcttacaccgtggcaagctcaccggcgatcaccggacgtgtgtaatacaagctactgcgacgtggtaagacaccaaggcatgtggcgcatggtcgataggtggctaactccggtgagttcatccgaatcgaccgtgactcaagcgggcacggcggctggagtgaaacagcggctcaagttcatccacaaggtgatatttactaccctgagcaactagcagttctccgttgagcacgaatcatagcgtctggcgcgaatccgagtgtgtggtcgccggcggcgagatgaactgattctgatcctatccagttactataccattagaaccattcattagagcacctgacagagtagattaaaggctttggttctccaatttttgcatgacaacttgataggccttctgcaataaagttgttaacctatgtacaggctttaattcgatcatagggactttggtcattcccacactcgatcaagca

SEQ ID NO: 90043 - DNA, 692 bp, Zea Mays
gagaagccaagcgggagattccccgtcgtgtggcacggctgatgaagggagagggtgagcgcagggagccgagaagggagttcaggttcttcaacgacgaagcacgcaggggcgggccacggtgcttccccataccgcgcgggagtcgtccgcgtccgcgacttcaccgagccggagactggagcatcgctgtcggatcgaagggcaccgtcacgccgagaccttccgtaggcaaccgtatttatgccggtaagaccacgttcctgtaattcgccatcctctccgctatgcgtaggttcgatccgcgctccgatccatactctagggccgcttatccgcctgtccgctggatttgcaccctcccggtgcatggcgccgcaatccggaatgtcgtggggaggaagaagatcctagggccgttgatcgggtaatatgcggtggagattagaccggcgtgtacccgttcgcaggatttgatcggtgccgtaggaggggtgatggagggtgtatatgtagtggtagtcgtggctgctgctcggccgtcgaacacaggatcgacgattccagtcacaccacaattcgtaaaactcctgatctaatctggtccgttggtgggagatcggacggctcgggttgaaagatacccattcgccgtgtaattttgtttgagtccctgagcttctacatattca

SEQ ID NO: 90044 - DNA, 542 bp, Zea Mays
gccttgttgaacttcggaaagtttgagccactatcaaactggggctcaaatgatttggataacctgcgtgattcaggatatgcttttaaccaatgcggtacataggtcaaatttttgttgtcgttggagtgaattcatggatttcggccgtccaaaaaggatgatggatgcatttttcatcttgctaatgaattggcattgtgtaggatccattggttggaactttggaacacctaaaatcactcaaatgccagttgcagcttgtgactacttatatcctagctgttcctatttgcccattgcaaattcacaatgataaaccatgtccttgtcctagttgcgaacaatcctttttatttgtgctcctcgtaactgtgttcccttgtactgctctgcatatggaaccgaacaatccttttggtttgtgtgttactctcattgcgtttgcttgtactgttccgtgtatgccgtagctccttatcagcatatcttgcaatacatatataaccaaaagtttcctttcgtttctgtgttcatcgcat

SEQ ID NO: 90045 - DNA, 585 bp, Zea Mays
gtttgggatcgatctcctaccaaagaaaccactgaacagcaaacatggctgcagcattgggtgtactctagttttcaaatcagtccacataggattcgtctgagttttatacatccaaagccacctaaaatttataaagctcaattaaaaacattaaatttaacacaatatagtggtttttgatatttctatataaagcacaatttgaaacattaaattgatcacagtattgcagtagcctcaagatggtatcatcattgaggaagaaattgtgtaagcacactgatgggagcaggaaatcaaattcaggagatcacatgctgattgatggagccaacatggccagaagtcattttttctcatatgagatctttttttccttttagatcttgctgcagaccttttgtttagatcatcaattgattatcagttactccatagttacagttggaatgggaaaccctaaccctaatcaggttgggagatgtattaaatagaccaagtagtagttgggccagtccaattacacaggggtatataggtaaatacaagaggactaagccaaaaccctaacgaggttctaac

SEQ ID NO: 90046 - DNA, 906 bp, Zea Mays
tcctatatgccccttgtcaaaaactattttattctagcatggtctatacttctctcagtctattagatctgatctcactcttatgcttgcgacatctttgtagatgccccctgactataaccttcttgcctttttgggatttttccctcgttcgtcattaaattgctaccatcgggcaaactctagttctttggtattgacatgcacgtacacctagattcttcaatactcttgtttcgaatacctacatctaaatttctcccgcctacttaaacactccagtttaacgcccatgaccttcttgtcttctgagatcccttcctattccactattgagttgtcatcctttagccttttctattcccttgtcttggtatgcccgtatccttggaatcttgcataccccaatgactgctcaagacatttcaattcacatgcccttgaccactcttgtttctagacgatccatgagcgatcattgtattttgtacatccttggtgatctcgttgatccttataacttctctcagtaatgaattgttttttacttcaaccactctgttggaaccttacctaccttacccttgattgttttcttcactttgtcgctttgcgagtcttgccttaactatatcctttgttatgcttttaattattatcatatgcacccttgacacctctatatcttaccttgatgtttatcttatacctaccctttaaaatcttctctctcccatctcaatctgagaattgtatgttttacctaattttctcttgaacgtattatcttctttgtcaatttcgagtttttaactccatcctttgtcgtgtttttgtttgttattgcctttgcctttctcatcccttaaccttaccttggcgattacattatgtctgttatctaca

SEQ ID NO: 90047 - DNA, 401 bp, Zea Mays
ggataagatcttatcttttaagatcagccaaagaaaaactttgattctctggggaatttttgccttccagataaaccaatatggagttctggtcatactattgtcaaaattttaatacatcaacttcacagaataacctttcttatctagcaaccatgaaggcttgtcctccctgtccatgagacaatacacttcacaatttttttcaaatcttccaattgtttagccccttcaccaaataaccttcttctaaaggttaatgaattacaattatcactcaaagcccaattcacatttatctctttattaagagatagctcaaacaatctcttatattttattgacaaagggacatcaccacatcaattatcactccagaaactggtagagtagccattccc

SEQ ID NO: 90048 - DNA, 419 bp, Zea Mays
gagtttcctttctccccctttcggttttttacagaatgaacccacggttggatggacctactgtggttttatttttcatgcagtggtcaacctgcaagttacagtcgcgttgacattgtcatccgtttggttctgctacagttgcttcacaggtttgtactcgccgtttgctaccagatctgttacatctgtctcagcctcttttgacaccatttgaatccatgatgaatataaacatctctcctcaggattcctacatttgggctaaccaaaaaactcaatttacattttctatgacttttaccaattctttgtaagctgtgaattgtggtggtgagctcatcgtcgttctacctcgacgagacaagcatattgttcacattgtggttatgtgaagttccatgttacctccggattcc

SEQ ID NO: 90049 - DNA, 1334 bp, Zea Mays
gagcatttagacaacttgacttgccaacgatcacgagacagcaagtgcaaaacctcttctaggtgctgtaaatgagactcccaggttggactataaaccaatatgtcatcgaaaaataccaacacacatgttcttagtaaagacgcaagtgtcttattcattgctccttggaaggttgcaggtgccccagtgagcccaaaggacatgacgcgaaattcaaattggccatgatgcgtctgaaacgcagtcttatgctgatcttgtggtgccatgcgtatttggtgaaatccagcacgtaaatccaacgtagagaaccaagctgaaccattcaattcatctagtaactcgtcaatgactggcacaggaaaacgagtcttaacagtgagggcattgaggtgcctataatcaacacaaaatctgtacgtgctgtcctttttcttgactaggatgaccggagaagaaaattcactttggctcctttgtatgatgcctgaggacaacatttcctccacctgttgttctatttcggtcttgagtgctggcgcataccgataaggcctgatgtggaacgggtgggctccaggcaacaactgaatgtgatgatcacaatcacgctgtggaggcaagccagtgggcaaggcaaataccgactgaaatttctggactagtgactgcagctcgactgacaatccagcaattatcgactggtccttctccggcaggtcctgtaactgacacagctcaataacagaacactgacccttcgatgactgtaatccatacagcttgagacaggttttctcataaggaataacaagccacttgtcagcccagtgtaccaacatagggctaaacatttccaaccaatccatgcctataatcaagtcatatgtttgtaatggtaacacccgcaggttggacttaaactcataacctgaaagcgaccacgcagctcccaacaactcctgtgtacaagagagtagagaaccatttgccactcttactgacagtgctttgggcaacatagagagacctgtcacatgatcagccacctgtgtactcaagaaggaatgtgagctgcccgaatccaacaggaccaacaaatccattccctgaatgtgtccaacaaactgcatggttttaggagcagccttgccactaacagcagcttgggacaaccatagggcatttatctcttctgacgaattgtcctcctctgttacctgcccttgcaatatttgccacagctcttcaaccacatgaagctgcacattatcagcacacctgtgaccccgtatataaggaagaccacacttgtagcacagtcctttcgc

SEQ ID NO: 90050 - DNA, 492 bp, Zea Mays
aaagtttggcacgaaacaacgataataacgagcaagccccaagaaacttcagatttctaagacgctagaaggtctcttccactccaccacaacaacgacattcttggggtcaactgcaatgccatgctgattaatcacatgacccagaaaagcaacttcagaaagccaaaagacacacttcttcaacttgccatagaattgattcttcctaagagcatctagaacgagacgaagatgtcgctcatgctcttcctccgtcttcgagtaaatcagaatatcatcaagaaacacaaccacaaggtcatccaagaactcatggaacatcttattcattgcttccataaaagcagcaggggcattagttaagccaaaggacatgacgataaactcgaagtgcccatacctggtgctaaaagctgtcttctcaatatcctcctcgtgaatcctcaattgatgataaccagagttcaaatcaatcttatagaatacctg

SEQ ID NO: 90051 - DNA, 743 bp, Zea Mays
ggatctggcaaaaacattatgtgctcggctccacaccttgtcttcatactgcctgaataaaaagcctcattatcataatggaattaggagtaagatggtgcaagaaaatattaaatcttttcagcaccccgaccaccatcttatgtagttagaatcaaagcccaacattcaagaagcttcgaaatataaccacttcattgtccttcggctctggtgtgatctcttcacctccaagacgaactaagtcaatatcgcttatgcaatacctattcttaaacacttcgatatgaccgattcagattgatgacttccataagacaatttggctcgacttcgtcgtcgtggtctcttcgttgtcctcttcaacgtctatgtcttcactgtcatcattggacccatctgttacaccagccatgttgccccggcaatctcagtcaagagcatgccctcaccacgaaccatcttattagctagcagtgtccaaagctctcaccagcgcgagatctgaagctaccttctctcctgacatccctaccaagctagaaagtcacctgaaaaactcaaagcgatgttaccaaaaggaagttcgaagcaagcttcggatatggagaaaattaacagtagaacacgaaagacggtgaatgttgtgcctttcgcagcgagccttgcccacttttatacaaaaaagttatcaaacccaatagctcgctcactaggtaatggaccctaccaaccaaaagtcc

SEQ ID NO: 90052 - DNA, 341 bp, Zea Mays
cggggatgtttgcgcgttctccggtgcaaggggaatttcagcaatcctggagaaggtgggatgcgaccatgtcaagaccctggcccaggccaaagctgccttctccgtgaatgatacaaaggatccctcagctgaagcaagtttaatgggcgggaaattttacaatgacatttgggtaaatggtgcctgagagatggctcacaaaattatgaagaaaagtgaaaaagacatccatgacgcccgagtacaagcaaaacaagctgaagaagctgcagagcgcgagaaacgcataggtattgtttcgcgacttttagcttcggcattcgtttttgtggcttcgg

SEQ ID NO: 90053 - DNA, 481 bp, Zea Mays
tactaagaccaagggcatagaaattgtcgaaagatagctacataacaacagaataagaaaggatctcagaagacaagaaggtcatggacacataaactgaactgtttaaataggcaacaaaggtacaagggtaagtactttagattaagggataagggtattaaaaattcaaggatacgagcatgtcaataacaaaatgaaataaagatggtcaaatggtagcaatttaataatggacgaggaaagagtcccaaaagactaaaggctatggtcaggggcatctacaaagatgtcacaagcacaagagtgagatctgatctaataaattgagagaagtatagaccatactagaataaaatacttttggcaagggggcatataggagcacaaaatagaattagtcgatatgactaatattttgaagcaacatcaaggatgaggtgaagtaatagtcaataagtccttaaacgaccaatgctac

SEQ ID NO: 90054 - DNA, 417 bp, Zea Mays
cctatttatttttgtgatatttaatgaatcacaatgttagaaattggaatgttcttaattggaacattagaggtttgaatgatgaaggcaaagcccatgcaatgcggcaaaaaattgaagaaagtggttgttccgtcttctgcatccaagaaacaaaaatgaaggactttacccctcattctttcaaacgtttcgcccctagcgcttcaccaaatttgcctttagcgcctctagaggtgcctcggggggtattatgatgggttcgaataattctttgcttcagggctcgatccaagaggttaatcttttctctattacggtggagtttgtctctcgtctttctgcggaccattggaagttaacaatcgtgtatggtccttgtattagatcggatcgtattgcttttatcaactggtt

SEQ ID NO: 90055 - DNA, 527 bp, Zea Mays
tgagatacacgactgtggggtcatcctcaagcagctgctgcccttccaatgcacacatcctggccatccaaactggacggtctctctgaaagggtggaaagaatctgagcgaggtgtcggccacttcttcatagatttgacacagggccctcaatgccttacgagcgatgacttggcaggtgtctctgaatctgtgccccacagcagtgacactccattccacatggtgcggactggatccaatgtatacagtcacgacacacttctctgtgccatgctcgacgaattcacgaccatcatactctggctggctcctgattccaaggcgaactgtgcatgctctcaacaacttggggaaaccatcttcattctggcaaaagttggtttggcagtgaacctccatctgacttctgagagaaggaaaggggaaaacatttttgaaatggagggatgagaacaagaattgtttttaagaaaatagttttgactcaaaaacttttgtatcaagcctaagggttatgtcctgc

SEQ ID NO: 90056 - DNA, 917 bp, Zea Mays
taaaattgtttgtgcgtgttctaggtccgaatggtgtgcttagtgggtgcaagatttatatcgattcggatagaacatccatacatccaggctctggtggcttgtgctttcgataccatgttgctcaatgctaatagtacgggttacaagcgggcgagagagggaggcgctcaaaagtctcttattcgtggctatacctaaggactacgagtttggtgctctctattaagccttgggcatcgtggtggttctctccttgtctttggcctccgttgtcctctggaccttctggtgtggtggcccgtccgtctgcgtgagtctatccctcatgcgtcgtacgacctcccctttttataagtcaaggtgggggtcggctatcagtagcttctcaaggaaggagctacggcgatgtggtagaacgggacgttctaccttggtaaagtcgtgtttgtccgcatgcgcctcggtcgttcgggcttccctagtcgtgttctttatggctagcaggatgggtggtgaagagctctggcatcatcattatcgtctatgtgcctcgccgacccctagcctccgtagcctaggtcttggcacaacccgtcgtgttgcggatcctatagtcggctaatgcactcaggtctaggcttgataggtcatgagttggccacatgcctaggggccgtaggccatgagtggaaggtgaactgactctctctccgtggaacagtgctaggtgcaattaatgcctcttacgttgggtcagtcctgggtcaggcgtgaaatccactcaagcggcttcctctcaatccgcttgttccctcttctagccccgcctcgcgtgaccctaggctcggtgcctcgggacttatctaggggcgggtccttctagggcgaacctttcactcacccttatactaact

SEQ ID NO: 90057 - DNA, 671 bp, Zea Mays
cgagggtgaggagggcgagagcggacctagagacggcggtccacgacgcggtgactcacggcggcgcggagaaccgatttggtggaaattgcgattgctcgggctatggtgagtaatcagaggcgaggagcgatgcactggatgcgtaacaagctaacggagcacgctgagcgctcaatttatagagagcaactgcgagtacgacgaacttggatggagaagagcttgcggtgagaaaggagaggagtcactggaggccgctcaacgtggcattcactgggctaagtccttagcgacagaggggctatctacaatgatctactgcgacgtggtaacaaggccagtagcgtggcatgcccaggggtaacagcgatcatcacgacgatggtcgcgcagccatgccgccgggcaagtgggtacgacaaagctggttctatccattcccctgctgatcttttcactcccgcggtgatatccgctacacactgagcacgaatcgcgacgccgacgtgaatccaggcgcggggatcaccggcggcgaagtgcggtgtatctgctgatctttgtcaggctactgtaccatcagaaccttcatcagtctgtctgacagagcatcttcaaaggtgtttttcacaaatttttatgtggcaactccctaatccgtctttaac

SEQ ID NO: 90058 - DNA, 782 bp, Zea Mays
gttgctgtgaagatgcagccaagaggaacaggtcggcgtggagctgcgcgcggatatggtcgtggttctggccgcgaccacgtctggaggagaattgaagatggagctgtacaaaatcaaagaggtggtcgcaatattgaggaggcggacttgggagaggagggtgataccttgaatcaaggtaacccatctccctgggaaggtcaagctaatagatctgaagaaaagaatgaagatagttggaaaggaaatccccatcctatgggagaagatggccccaaagattctcacgtgaaaaaagaggtaacccgcaattttaatctagatagatctggttgtgctttctgtcactttaagaaccatcttactaaggattgtcgacatcactttccttgtgacatttgtggttgtgatgatcatgttgtgtttgattgcaaaaaatgcttgccttggaattttggtccggatctttgtgctgcacaagttgaggatcagagttttttctatattgaagaaaaagtggataataggatgattaaagaaaaatccagcactgctattatcacggttgttcaagggaatgttggagaaaaacaaattgaattggaattcatgagcatgttaggcaagaacttatggagatggtctgctagatctgtggaggacaataagtttgtaatgagatttctagatcctaagatgataggggatcttggatactttagacctttgggcatgagaacagctaaagctcagatcacaattgatccttggacacctgc

SEQ ID NO: 90059 - DNA, 1088 bp, Zea Mays
attcaagtaactaagagcttgcactacaacatcctctaattacactactacatgagctctttcggctctgacaaactgagaatagtacataggataggaacacgggtctctttatatcctcaacttcttcatatgtataagattagattgacaatagactatattaaaactatacgatttaaagagatctaaaactctataatcgataacttataatttttgagatggctcggaagtctaaatgaggagctcttccaatagtgggaattcgagtgcaatctatagtgggactagaaactgaaggcacgttcaaatctccaaaaaaaagaagagccaaattagcagactacacaagcaacatcgtctgtgggggagcagcgatactcaagcacgcgcggatctagttgtagatgtcgagggagaaggccacgttgaacgctcagcttggggcagcagagcgaatccttgtgcacgacgacgaagggcatctcggtcgcggattcgggatggaatcaccacctcctcgctggatctttgccaacagtcttcaaatccaccccgagattcccaccgggcaaggaatcgccctctgctgaaggtcacttcccggcctcagtcccaacttcatccctcggacgacctaagtcttctggaatgcaaacctaagtctttctggaatgcaggagatgaagaggtcgggggatcaagatgccaggaacgcgggagatgaagagggaaatgggacgacctaagtctttttggaatgcaaacctcagtcccaactggtcacgtcgaccaatctttcctctgccctcgatgtccactaccaccctattgtctaaataggaggaactatgggagagcaaactatttttactactaatagctatttggcaacttactaaacaaaagtttagatagcttttttcgagaaaactatcggagtttgctctaacatggtgttcccatctttcagcatagcggcattcaatatttctttttcatatgtttaaatttatatattgccacgaagaccaaaaccaacgtcttttcgtaaaaatgctactctttatctttttaaatgtaaa

SEQ ID NO: 90060 - DNA, 391 bp, Zea Mays
gccgatcgatccaagatcgacgacgtacaagtcatctagtgaaaggggttttcaacttataatcttggccgctaccctaagatccaatggctgtgatgcctctcttccaccacccagcgcgcaagcacggtggcgcagggccatccgcaacggaccatcgccggaggaaaccaatccgagtcaacgttgcaccaagcaccctaacccgaggttctacacataactggatcgatagcgaatcggaggacgacaatcttactagcggggacaactcacccaggtcaattgatgctcggtcgcgaacgagagtctacgcacccgctccggtgagcgattcccaagctcccagcgcacagagcacccaggttgtgaggagaacaccctcccgaac

SEQ ID NO: 90061 - DNA, 1505 bp, Zea Mays
tcatcgaaaacaacatgtcgagacttaagagatgatgatgcaataggtgagaagatcaaggcactagtaccccttgtgatcagagcactcgaggaaaaggcagcgagtggatatgggcccaagtttgtggggagcggtggtggaggtgcgaataggaaggggtggtgccaaaaaggcgaagaaaggagtggatgactgatcaccttggaggggaggtggttcaggaaataggtggcgatgtggataccctcaacccagtaatgagtaggaaggaggcctggaattggagggtgcgaatgaggttggtgatggcgccaatcatgggctcggccttaccgttctgaggggaggtgtacccgcaattgcacgccgcgcgagagaaagaaggcatgagatgtggagttatcaaacttctgcccgttttcacattgcacaacctggatggtgcaaccgaactgagtcaacacccatgcgaataaatgagatagggcggtgatggtgccagaattacgaaggagggggaaaatccataggtagtgagagaaatcatctaggatgaccagatagtactggtaaccggaaatgctcggtatcggggatctccaaaggtcacaatggacgacatcaatggggtgagcggttcaggacatggaagagaagggtaagcaagtctgacgccaagctgacaagcatggcaacgcagtgttgccatagggtaggggattgtcgagccatagagatgcccgagagtctggataggacgtcgtgaccaaggtggccaagccaatggtgccacgtggaggtataggcagtggctgcgagagcatagggtgtggcaacacaggatgagggaggtggggcagagaaccgaatatgatataggggtccagaactgtcacatcgggcaaccacgacacgagtagtaagatcccatatggtgagcccccacgaatcaaactcgatggaacaatggttgtcagtggtgaagcgacaaattgagaggaatctatgtgatattgggggcaacaagatgttattgaggtacaaatgaccaagaagaaccgtgttgcctactgaggtgacaggtagagtcgacccattatcgacaatgatggaagaaggtaaggtggggctacgaggatggggtaaggaaacaatatcaggtcaggagtggtgtggtacgaggtgtcggagtcagcaacctagttggtgggagtaacaaaagtgggccaccgggatgggcgctggggtcgacagtggcgagcaggctaacggtgagcatgagcggtggagataatcttggtactacggaacacaaacggcctagtagtgtggttgccttcttgaggatggacggaggccggagggtggtagagctcgatgcagtcacggagaagcgggttcatggcccgatcaaaggccacgaacgttccccggagagattatctgtcgtgaagggatacacgcacacggtagggaggcacatggaccacggcagggcgaag

SEQ ID NO: 90062 - DNA, 1179 bp, Zea Mays
cgaggagtaagcgtggagactccgcacgcatcttcttgtcgatgttcgagtcgtcgatcccagggaagggagtcagtatgaggtcgtctctaccgtccctagaatgggctgttggttgaagctaccaccgactcgatccatgttgcacggcttcgcgctggtacaccatgatctcggacgtactcctcccagcgccttatttcatttttgtgtcgttggtcgtgtgaagcattgatggtgctccatgcatctcgtcggctgttgatggcgtgacacaagtcgttcgcaggatgagcaagaggtagaagatgattggccgcctgagcaagcagccgctgataaccctccgcgtctagggttcgcggaagatcgtcggctatctgcgccagcactcctttgacttcactcggcgtgttcaatgctcgggcgaagtcgaggtataggtttcgagcgaggagagggttctcccgccggagtctagcatcttgctcagctagttcccattcccgttcttgagcctatcggcgatcgcagcggcttgagttgcgtctttattggtgtactcgttcatcagaagtttctcccacttccaaagcttcgtcctaggataccggttgcaccgggtcccgttccccggctttgtgatgccgccgcacattccggcatctgtttcttcgtcgtcgggcatcacgctggggaggttcctccccttgcatggtaggttcattgtcagagacgggcaatgactccaatctcccctaaatgaaaagaggatgtcggggtagaaaggagcaggtatggcggtgtgcttcttcccatcctcctttgaaggcagaggtgccgggaagattgctcgatgtgtcttccttcctcggcatggcacattcacttcctttttccgagtgatctacgtccactccttagtgggtgagttggacaacagagttctttgggtcggagaggccccgactgactggccctccatcctccgagggcactcgagccctggcttgcgagggggcatcttcccctgagatgtgagcaagggcatggcttacgggcttgcatcagcttctctcaagatttccaaggtgggtcttttctcgggcgtatctactatgcggcaccgagttccccctttgtccgctatgcatgagatggttctgaagcggaacatag

SEQ ID NO: 90063 - DNA, 450 bp, Zea Mays
ctcggttctaaccttaaaataatgtgatttgtttagcctcaatatctaggcccagctacttgcgcaaaaattgttaatcgcatcgttcttcagtaaactgtttagaggagaaaaatcaaatggcttcggatgtcagataaatttttatccgatttcgattaaaccagtgttgtctcaaatattgtatctgatatccagtccatctagaccccgccccaaatccaaactgtagaaatcgaatatatatagatgtttgtgttcatgggagggcatggaaaaatctcttttgtctactaaactcccactgtcttccgtattcagatatttttggccgtagctttatctccttcgcctgggatttttgtgccgtcattctcatccgtgtcacacagcaccaggaaaaaatcccgccgctcaaccgccgttctcctcagatatttttttcaccgc

SEQ ID NO: 90064 - DNA, 509 bp, Zea Mays
ggaaatcgtcaccactttcgtcatccactagtttgttatttgctgtggcctttgacggacgaacggaaggtggttgtggatgcagtgcggactgctgactctgaagcgccaatcatcaggagaagaccgagtagagacagatactacgtaatgcgacacgtacacatcttccttggcggatcatctgtgcggaccgtgcggctaggacaatgttggatttatgcgtttcatctaattgaaaaattcaattaaatcttagaaaaattacaaaaaaaccaatgtatggcaagagaggtagctatccgatcgcgacattatcggatcacgaacagatcggatcgtgagcttatcggttcgtggacgtagctctatataaggcagcccatgccagagaccatcccatccaaaccacgaattaggttttgcctctgcttactgctgcgctgtcactgtggtcttgttcgtcctaagcgccagcgtgcatctgcgaccgggagagcagatctccg

SEQ ID NO: 90065 - DNA, 587 bp, Zea Mays
ctcagtttgtccggggaaagaaaatcttgtcaactatgagcatgaaatgtttgttagatcgcaggtgaactcagagaggttatattaggcaattgggtcagttacttactttggcatcatactgttaggccttttcaaactgtgagttgcatctattagttatggatgtgtggctgggtcaggggtgacaattggttggagtcaagttagtcttacggaatacagagtatttcactaggaacccatctgttttggtgttgcatttggtactacatatgccacttgtgactggctattttgttgtggatgggattctaggaattcttatttagttgagccattcctgatttgactttactagccatgtacatagatcataatgctttccttgttggaatctccttatgccaggaaaatgcctcgcaaagttgtatctggacccgactacgatgatgactatgatgagtatgatgatgagtatgatgaaaccagatatggcaataatactcctgttatgacagggaaaggtatccttccgaatcttctagccttattcatatcatctgtaaagagggggaaatggtcat

SEQ ID NO: 90066 - DNA, 513 bp, Zea Mays
aattgtgactccgaatatggggtctagacgtgtaatctgacttgatctgtagccagaaagggtgtggagatatcggtgggtcgctcttgcacaacaataaattaaacgtcaaattttgtcttggtcgcatggattagcatgtagtggttgcaccaatcggctcctttgagcccattgtcatctttctagattgataataatcatgattaaacgaagcaatcatgcattgaaagcgaccaacagcaggaaataaatttgactaaagcatgcttgagtcaattgtttattatggagcggtgcaagctatgtgcatgacgatgagatctaatctacaatatgtatcatgctgatgatcataaaaacatccaccattaggagctgatgaacatgtacgtgaacatagatcgggacctctaacggagtccattcagaataaacaaagagactaaacatgtaagatagggtgctagatatatgttgatctctcgagttgttgcatgcacatgttgcatc

SEQ ID NO: 90067 - DNA, 601 bp, Zea Mays
gttccctgttatcgtgtagttgttcactatgtaatgtcgcattcaattcgaagttcgagtggatatggcgagttttggccagggccggccatggcgccgccgtaggaacccggacgccaccgtgtgcgcggcatcggaggggtggcgcgtgcgccggtgtgttgtgggccgttgattctctgcgtaacggccaggattagacaaacgtgtacccgttcgcgcgattgatctggcgccgtggatccgtgatcctgcggtccatgttgggactggcttcattaaatctggaccgtacattcggaatctgatggtgtctggtgagagcgagggtttattcgggtttgatctaatcgtggtcgttcacaatcaatcggacggctcagattcaccgataccctttcgtcgtgcccatattgctaaagagcccctctgtttatttagaaacaacccgcggtccatactcctgtaccgtgagtctttgttttcttagcatcggggcccctggactttccagattttgacgcccagtccagtgcgcatgaaaatcaattaaaagaattagaaattgcatttttaatatgaaaataaaccctagaacctg

SEQ ID NO: 90068 - DNA, 655 bp, Zea Mays
tccgttagtagggtatagtggtcaccctcggttgagtaagtgttctgatttcaagtttaatcaagtcgaagtcgatggataaccaatagtttgaatgcttttgagaatgaaatcttttattgatgacgtattttccaattacagaatacaacattgctccgatagttcttgccaagggtaaaacttcctggggtgctctacattccatgatttccctacttcgatcctggccgagtgacctccgacactatgaatggcccctgccatagcggcgataatttgtgtcgtccttctcccattagaattcgacgaaggaccaaatctcccactatgaaggattgatgtcgtatagtcttatcatgatagcgcctcagggtctgctgatatctagctgactgaattaatgtattcaactgctcttcttccagtacgtcaatatcttctagcctggtagcttccgcttcagctatgctttcaaagaccagccttggtgccccaaacctaaggtcggcaggtagcactgcctccgaaccatagaccatgaagaagggggtgtttccatgcagagctcgactgacgttgagttcttaggctccaaaccacataaggtaattctctgatccactttcctgcaaacttttcattcttgtcgaag

SEQ ID NO: 90069 - DNA, 650 bp, Zea Mays
gaagtggtggagatgaacaaggccaaatttcagaggaattatttaggtggcaaagtaatggtgaacacagtgaaaggagatcctagaggagtaactggccctgctgatttggctaaggagaggcagctaagagagtttcggaggctaaacggtttatgttttggttgtggagagaagtacgagccaggacatcaagctaaatgccttaaaagaggtggagcacaattacataatctgactgtagaggatatggggttggtgttgtcagatgagacgttgcaacagctggattaggaagataaggaagtggaggaagcatataagctgtctataaatgctatcagtggaactgaccgtgagaattgtatgagagttcgggcactgatccagaatcaagtgttggtgatgttggtagactcgggcagctcctcaagttttgtcagtcagaggatggtagatcagttggctttatcaactgaagttgtttcaccggtaagagttaaggtggcaaatggtgagttcatgttgagttcaaaaagggtggcagcgctggagtggtgggcagaagggcacacttatgccagtaacatgagagtactggatttagaagcctatgatgctatattggggtatgattggctaaagagcca

SEQ ID NO: 90070 - DNA, 484 bp, Zea Mays
agctgatggcctcgacctaaagtactaccctcgtcgttcgaccggcagtgctggaggtgtgattgtctcgcccgttggtgaggacaatcctaggctgaacaacatggtcaacctggtcgccatgctcaacacagagctagaccacgcccttgatgagttgggcaaggttcgggcagaggttgcggaattatgtgttgagcgcgcagcgcgccactatcaagatggtggttctcccgctcctgtcgggattaagcacccttaccgttcgccgccccatggtcgctttgattacggcacccctgactgtaggacccagatagatttggagccatagatcgacagagtcagagtctgtaataattcttaattctgtgtcttggtcttagtctgtcttagttagagttagtttgcttatcatatgttttgatgcttgtcgtgatgaacttgtaatgaagttggatctttgtaataattgtcataaagg

SEQ ID NO: 90071 - DNA, 385 bp, Zea Mays
cttgaggcaccaacacgcaagattcctggggctaatgtgtgggatgccttaagggccaatgcccaaggtgcttctagggctaatatgcgaggtgcccaccaagggtcgacgcacaaggtgttatgagggttaatgctcatggttcataaagggttgggcaagaggtgccctgaggatcgatgcatgaggtgccctaggggtcagaccaagatgttcctcgaaggccaatgcatgtggtggcctatgggttatgacatcttggatggaaaccataagttgccttgagccccacaaggcctagcgactaattgcaagatgtcatgcgacacgggtgggctcgatggctgaaatggttgtatcattaaaaggaatgtcctcatcaaag

SEQ ID NO: 90072 - DNA, 895 bp, Zea Mays
aatagatgcctctagcctattaatttccacttctctacatttattgttgacaacctttttgaaatctaactctaaaagccaattcttgtcaaagaaaaaatatctatgcccaggagtaccacgctctccaaagtccaaaataattgggcaatggtcagatcccaccctagtcagacctcatgccctgcacagagggaacctttcctcccaatcagttgacattaaaaacatgtccaacttaactagcacatggatgatttttgttagaccaggtgtatttgagtccacccatggaaacctctctgagattatgtttccggatgaagccattaaaaatatctatgagattctgatcaatgtgaagggaatttttctcactctcactcctaagcaggttaaaatctcccccaattataactggcagcatctcattttcacataattccgaaagctcctaaagaaacatcctagagaaatggtgattggccggaccatacacatttatggcacaccaccaaaaatttcattttttgtccctgatcaccgctttaattccgtaattaaaaatttcccgattttctacttcccgagagtcacccttgatcccccatcaagacacatctataatgacccttcactaataaccatttccaactaaactgtctttgttgtccaacgtacacaactctctattaggaaagttttgtttaatggtctcctggatcccaataatgtcaactttctcctgggctatatactcccttaattggtttaccctcaccttgtttcccatcccccctaatgttccaactaagaaacttcattgataacttttgaattttttgccggtctcccttttccccctttttggatctcaattaccataggtccttcg

SEQ ID NO: 90073 - DNA, 887 bp, Zea Mays
gtctggctgactctggaggctcaccctctgtagctgggttggcgttcccttgattctgagactatcgggttcagggcagaagacaccaccgaggctgcagcacttaagaccctaaccaccttctgcggatatcatcccctggagatggtgatgcatccactaggactcttccccgctgagaagagggatgaccccatgtggtgcaacagagtgagccacgtaaaggacgtgtgagctatgcatcccaaccatgttgggaggatcaccgttcagtgtacgagcacatcgtaccgcctacaagccctgcaaagcgacgccatggcacacctcaccaaccttgctcagaccactaagctcaccctcgatagtcaagaggacttcatggtcgacttgtcttcaaaattggtggaaaaggacctacaggtggaacagttaagccagcgcatcatgaccttagatcagcaggtggaaatccaggataacactatcgatatcctggagatctagctccatgatgtgcaggaggagcttgaggaagccaacgaccacctagagatgcaccatcaggatatggaggcaaacaaggcaggaagtgagggagaagaggctcccgaggaactggagccagcccctggtcccaatgcgactccctctggaatgccccgttcacctgcatccagcgttgtttctaccactcagggttgacgggatagtttgacatattaggaggataggaacccacgcaagcttagtttggcatcagattttgggactaggcttatgggtaattcccctaaaaggttgtaacccaggaaaacttttatgagtaatgaaacgaatgcagcatgttattctcgtttggtttcagtactatgttatgatctttt

SEQ ID NO: 90074 - DNA, 567 bp, Zea Mays
agtgaatgttgtcttgggtacatcttctgctcgaatctttaactgatgatatcctgaccttagatctatcttcgagaatatcttagctcccttcatctgatcaaacaaatcttcaatccgaggtaatggttatttattcttaattgttacttcattcaaacttctataatcaacacacattcttctcgaaccatctttcttgctcacaaatagaactggggctccccaaggggatgaacttgggcgaatgaaacctttttctagtaattcctctatttgtttcttcagttcaactaaatctttgacatccattctgtaaggtcttttcgagataggtgcagttctgggtaataattcaatagaaaactctatatcacgatcaggtggcatacctggtaattcctccagaaatacgtctagttattcacacactaccttgatattttccaagggcttttcttccaagtgatttaccattgtctctccttttgcatttgttgacatgtctgtgtaacttggattctttcaccttgtggacttgtcaacataattggtcctttggcacat

SEQ ID NO: 90075 - DNA, 438 bp, Zea Mays
cgctttctttggttttggctcttcggccggttctgccctagcttcgacagggtcggagcgactgggctcagatgcggaagaagacccctcaataggcctcggcactttggccgtttcaatgcgtttggggcgatgtgttaaaactttaacttttttcgacctcggcgtgctagaaatcgccaaagcagcagtctttcttttctttccttgctttcgcgaaggataacagtaatctgggtatacaaacccgatgacatcaaatactctattcagcctctttttgcctcgagccccgaaggccattgtcatagcatcataaagccttcgagtaggcaccaagcaattcatcactggttgcttcaatggcatctaaccagtaatcatttgcctcatcaaactggctcctgtatttgaatgtgtacttcaggtagaccaaac

SEQ ID NO: 90076 - DNA, 545 bp, Zea Mays
aggatggtaggggcagccgtggaggatccctggattgacgctttccattgatggagcgcgagcgagggaggatgtcggaggcgggaacatgatccacatggtgcacgggtctggacgactacattgaagccttatagagtagtacagagtagagatagagataatggtatagtctcatgcatttatgtgtaggcccccatttcaaaccacacttataacacaatcctttagctttgcggtaagccattagggctaaggctttgcttacatatgtgttgcctttactgatttcctttgatcgacgtgtgattttttcaatgagagcagtgttctgagctggaatgattgctgaagaaggagcaactgccacctgacgagatgtattcttagctgtaacattatcaattacccggcctgatgaaggtgggtatttggagaccagtaattcctcctataacaaggcaagggagacaacagtatctaggtcgagaggtctatgtaaaaacattgtagcttcaattgcaggttgtaaaccatctatgaat

SEQ ID NO: 90077 - DNA, 793 bp, Zea Mays
tgcagggtgcgtgtactacttcattcattctgctgttggaacgaaccaggaaccatgcatgcatgttcgttgcgattctttgtcaatgatttcgacggcgacgactggctggccaactgggtattagcggcggcttcaccacggaattgggcccaattaatcgtgttactgcatgatttacactagtattaaatgggaacgccgagtgccgtacggctcgtactagctgggtgatggtaccggaccggcttgtactgtgacttcgtctaccttccgaattccgatataagcctgcgcatgtggaggagcatggtgttgggttactgtcgttcgtcgtcaattgttgcttcggctcgagaagacaaagcgaaccacggaactccgaggtccgtacggtaccgtaccgcgcgtttcctgctggcctactctactccacctgcccactcgttgtttacggccacatttgtggagtaaaggcgttggtacggcgacgctgaaagctgacgagaggtggaagaaaaagagagaatgaagaagagaagtttgctgtaaattcactaccggttgatatgaaaaatcaagaaatgttatgacagcgataagatcatgtattaaatactagtaaagagataactgctacagatggaatgagagataagttatgaatatccatacgcattgatagagcttagttagggccataatacgctatgccctctctaataaagctagagaatttgataatagaagtcttagtttcaccactttgtgtgatgataaaatattaatctgc

SEQ ID NO: 90078 - DNA, 285 bp, Zea Mays
gggacgtcgaaaccgtcagaattcctacaggtctacgtcaccgccatcatgatggcaggcggaaacgatgctgtcatggcgagcaacttccatgtagctctgaccgggccaccctagacttagatcatgaacatgaccccagggtccatccattcctgggaaggactctgcgtgtagttcaccgccaactttgctagcgcctaccagcaacacgatgccaattggagtatcatttacttaggaatgttgaataagttatgtgacgtgcttaacttaataaatcat

SEQ ID NO: 90079 - DNA, 351 bp, Zea Mays
ttttcggttgggtcgttggtttcttctccgccacctgtcgtcttctcttccactgacatctcctattcgaccctagctcctcctcgatcgatctcacctgcctagtgactcgtctccaataacctcgatcaatcttgcccaaccaacaacgccctctctgacctcaaccaaccctatgcattaggtgatgtcttcccattcatcgtctcctacacacccgccatcacctcctcagactaggatcacagttcctcttcgaccaaatttgcccatcctgcaatattttcgcctgaccccatctcctccccctccgatgtcatcgcctctcgatccaagtttgactcactctcc

SEQ ID NO: 90080 - DNA, 271 bp, Zea Mays
gtgggcggctgcaaatgtagaggactgcatggagcgggtgggagaggatcgtcgagacctcgataccaggttgtcaagggcacggtgatcccgagtagctggccctcgactgtggagctcgtagtcggtggccgattcctccagggcggaggttatgcccctcacggccgcctgggctttaacactagggagagagagattgatagttgatcttgcttgcccctttcataatctgagtacaatgtatatataggccaaccggccaacaact

SEQ ID NO: 90081 - DNA, 326 bp, Zea Mays
cctgtaatcggtctttgcgcggatagtttttcgacaaagatttttgcacggatgtaatgtgccttcgattttgcgcacttgttgtgctagtccggctgcacccttgggcgacttgtgcacagagtcttttgaagaagacttcgattttgcgcacttgttgtgctagtccggctgcacccttaggcaacttttgcacggatagtcttttgaagaagacttcgattttgcgcacttgttgtgctagtccggctgcacccttaggcgacttttgcacggattgtcttttgaagaagacttcgattttgcgcacttgttgtgctagtccg

SEQ ID NO: 90082 - DNA, 406 bp, Zea Mays
gggaagatcacaaagaggagcaaccagagcctcaatgtctacaggagagggtcgcactctaagacccagaccactatcactggcaggagggttggacacgaaattgaaaaatgacctaggaggtggcagattccaagtagaataagcaacaggagcaccaacatttgataccttgcccctcaggatcatgtctagtcggctcactagatcctcagaaggaattttcctgtcgataacccgagttgaatcagtaataccactgtacaagtaagctggatacgccctatctttcaaaggctgaatattcttgaaaacgaagtcagcaactacagcttcggcagtcagacctctttccttcagcagacagatctcagcaagcagaaccctagcttccgtcacctccaac

SEQ ID NO: 90083 - DNA, 636 bp, Zea Mays
aatggaaagcagaaaataaaaagataaaaggaaaacatcgtttgggcccaaatcccggttggcctgctcatcctcacccttgccttggcccaatatcgtatttccactgcgcggcccattctcccttctttcccccgtgccacgcactggcatctgggccccacctgcacttgtggtcgacaagtggacccaggtctgtgagccgagttgcgtgtttcctcttcactggtggctagtggaccccacatcgtcaggtgcttcgtctttaccggatctgctccatctcgttcgtcgccgcgcgcaaccaaattagcgctccggtctctactggattcctggaaatccgggcggttccccttcatctgaagcctgcgcagggaccccgacggcttaatctcatgcgctctccttatccctacaggtccggtgcctgcacgattatgcatggccaggaatctcgcgaccagacgtctaggctctgcccggatccttcgcaaccgaccttctcagcgcggggatcgatcatagtgactccaccctcaactataaataggaccgtgacttattacgccgttgcagccgcgtattgggggtgcggtgagctgagtatgcgaagaaagggagggccgccgtgat

SEQ ID NO: 90084 - DNA, 1012 bp, Zea Mays
atgtctttttccagcttcgagaatctgatactctttgacagcgtactcacaatttttgccccagcacgatcacgaatgcatcccaagatctcttcatccccgccaaagagaacagatccaggctagtagccaccagacatagcaaattcttttaattcagatatatcatctttggaaagttgttggcctcccaggtcccgtaagtcgaagcttttatctttcgaaaaggcttctttgattctttttccctttgacactgaagtctcaggagcaatcgtccccttggtattcttctcaggcgctactttagcaataagtctatcaatctctgataaagttgttctgaggggaccgccactgctttcggcctgttgaggcacttcgtcagcaatagagggggcagtcctcttttgaattgtcggtggcagggtatcaagaacagccctcatcacattcatcatatggcgcttcttttgcgcatttcccccaccgggtgccgatggctctttttctgcctctgattcgatggtttccctaggatctttcttacgtggttgtaataagcttgttagctctgatcctagaggacttagcatcgtgaaaggctagggttcatacgttacctctaaatttctatcacgccaatagaagttgtcgaaggggtctctgcaaattgcttcggcgaagaatatctttcttcttcttcgcgactcgatgatataatctttatttttttagatgttgaaggttttggcattaacttcggttttttgttaaccttttctttttgtccttctcgacagatctttgtgcttgtatttttagaatactcacaactcttttctttttcactcccccggcctcttcgtcaagtctatcatggttaggatactcaaagctaagggcatccatcactcgatgtagccttcatttctctcatgtgccaaaggcagcggtcattacacattgtctcaatgacctccaaccattcaacacaagggccgctgaaggt

SEQ ID NO: 90085 - DNA, 755 bp, Zea Mays
tgtggaaaacaacacagggattgggaagcaacgcgttttcatcatatggtggggggtaaatccatcaaaatttccaagttcactggtggtccttttctcttaggaggcatgggtgcgaactatggagaaggggatctcgcccaagatggtggggtagaggctctgctcacggtgctctgtggactacatcagtgttttgaacgacgacaatgaactcccataccccagatatgctatcctcaacgatgctcgatattacaaaatagggagacaaaagcaaaggcactaaaggggttctcgccgatggtgaagatggcgacgaggctagccacgttgatggtggcccgacggcagataacttgctccgacaagtaatttctcggttccccggccacactccgagctcgatacactttgtagacgctctgtggacacgtgcagacccttgagccgcgaccctagggtccaagcataagtgaatcgcgaccctgtcgatggcggctcccacgttacaaacgtcagactcctctattctccgttctctcctctcggttggcttcgtgactccgtcgatggaggagggggtctcggccggtgtttatatgggcagaaatgagtccaaggtagtgtggggatcgacttatgtgcgagtagatcgtgggttgttaggggatatattctggttcccggtggtttcgatttagggaagatgacactgatggggcagaaccaccgcccagcggcaaagagatttc

SEQ ID NO: 90086 - DNA, 543 bp, Zea Mays
gctaagtctccgaaactgtcagattatgacaatctgtaaagagtcagatccactgttatgtcaatcagcaaagaaccgtcatgtgaacggatcctaagactggggcgacaattgcgcatcatcatcctctgaagaatggatacaggcatgcagcaaagatgagaaaaaaaaaagaacacaaatgtaacacactgcaacggatgggaggaagtggtgaaggcgaactcatgaacagtggagtcagaaacgataacatgtcaatcagcaaaggtccggaagtccggatcctaagactggggcgacaaaaaccatatcatcatcctccgacacgaccatcgacactgatgaattcaaaagaaatcaaaatcaaaagatgggaaaacaacactgtttcgaccaaaaaacgcaccgagcagcgagaaatcatgggagtcaagaatgctagacgaccgtagaagaattcggctacacgcgttgtgtatttatattcagctaccgccggtgaggtgtcttcagactgcgagcggcggcgcgcagcggctg

SEQ ID NO: 90087 - DNA, 346 bp, Zea Mays
gtaactccaaatgtagcaaattatctaattaagagatattctaacctaaaattgttggagaaccccaaaatagaattctgaggtgttacaaggaataggaagcaacaaatcaccaccaatgttttgagtgtttgtgatcgacacatgaagtttgtttatgttctagctggatgggaagggtcagcttcagattcacgtgtgctacatgatgccatgtctcagcacgatgcatttgctattccaagtggaaaatattacctagtagatgttggatacaccaatggaccaggctttcttgctccatatcgatccactcgctaccacttgaatgagtgggctgcctaag

SEQ ID NO: 90088 - DNA, 338 bp, Zea Mays
ggccatgcgacgtcgatcctttgcagtgggagatctcgtcctccgccgaattctaacgggggagggacaacacaagttgtcacccctatgggaaggaccattcatagtagcagaagtcactcggccgggatcatatcgtctcactcagatggatggcacgaaaattaggaactcatggaatatagaacacctcaggaagttttatccctagttgtatttcaaaagctatcgggacgacaatgcactctgtaaaatgggaaatatgtcatcaataaaaaaggcttcaagaatactcagtttgttcatgatcgacctacattcttacttaactcggggtg

SEQ ID NO: 90089 - DNA, 696 bp, Zea Mays
gtctagtggctgctagctacatcttcggggatctagctcgtcttccattattgttggcaatggcaactcccttcttgttcttgcctagagccactctcttcttccagcttcattctctgatgacctctttctctcccaccgacagtatgtcgttgacctcctacaacgggtgggcatggccaagtttcattctacatcaactcatgttgacactcgcgccaagttctcttccaccagcggcgtgcctattactaatctgattgagtattagagccttgccagcacattgcaatatcttacactcactcatcccgacttggcgtatgttgtccagtaggtctgtctctttatgcatgatccccgtgagccccatctcgtgttgatcaagcgtttcatttggtatgtcaagggcacgttgtcctatgaccttcacatcggcactggcccgcttcagttcttgactacttacacacatgcagactgggctggcggtccggattcccggcgttctacctccggttactatgtctatcttggtgataatctcgtcttttggtcctcaaaatgccagacgattgtctctcgctccagtgccgagctagagtaccatgttgtttcccatgttatcgccgagtgctactagttacaacaaccgctacaagaacttcacatctccgttccttcggcgcaggggcg

SEQ ID NO: 90090 - DNA, 733 bp, Zea Mays
attatttctgaatacatgtgaaaataatgttatataacatgtaggtaattttagtacggagctaacgcaactggaacgaaccaattcggagttaaaacaattaaattatgaattttctaagatttttagtttgtttctacactaaaaatcaatttcagaattaatttatcactaaactgaggttactggactgcgaccaaaattgcctaaaaactcaaggtttaatttgtaagaaaacagatcttggcgcaatgatctagcaataccttggacggcgggttgatatacctatttctaagggtctcttaaacaagtgttctttgggcgaaggggtatcggtgtgtttcatccattcgatcaaactcctactatttagattaaatggctttataaatcgaattggtatgcgacgaatactgcaggtcaaagatctacggtccgaaatacagcttctacttttctctactccagccctcggatcacgaaccaacagctcagattttaaaccacagtgatcagctcaggctcacccgatcccgattcgacgatcaccatctccggcccaactgaatcatttcaccctcttctagtcccatctgcccatcggtggatcaacagatcacgtcaactctcctcctctctcccaccagccgcggcagggcacgcacgttggcgctctcgtcggagaacgcccgatcagccctccagaaccccgactgtgatatcctggccc

SEQ ID NO: 90091 - DNA, 428 bp, Zea Mays
cgccttctcacccgcgggggcgaagacacagaggcgatgtccataaccatggcgaggtgggctagtccctggctaggctgggcccactagtcagccttctatggggtataaatctggtgtaactaggaaaagttgttccgccctacaattaccctattgtacaacatatttcgggaatgtagcaggtaaccgggggcatgggcgtatttaagccacctttccctggttaccttataaataccctcgtcctgtacctggatgtgacacgcttaagaagacatatgcactccttgcctactgtttgttgagacatccatttgtcacctatcacacccgctcttgagtgcttgaacccactgttctcagtaccaacatcaatcactgcatttgatttttttcatgaagaatgaggttgaacacaagatttc

SEQ ID NO: 90092 - DNA, 349 bp, Zea Mays
cccccaaatcagtccaaaacaccgtgcgaagtgacctcgcaggggccagtgtgtttcaggtctgatcctgtcctctgctctcttatttcagtacccttatgtgcccctgatacttctcgacccaaccgattaggctagaacccattagatcgccaggaacgctccatgttgtccagtgatcgcgctgtcactgtgggcagtgtgatttatagctcaaatcttgcaattaagtgagggaaatggtcgtttagggttgaatttagtgtccagcaaaggggagggctagccgttgcttattctggccagtacaagctcgccggagctcggcctggcgccgttcgccgtcaag

SEQ ID NO: 90093 - DNA, 456 bp, Zea Mays
tttctattctcttttcgtggatttttctatttactggactgggcgcacgatatctagacaacccaggggataacccgcaaaagtctcaagacaaagtgcatagtagcacgggactgtgggtttaatctcaataaatccagggcctcttttaaaagactgccagggccgaaggggtatcggcaactgtgggctgtctgatccaacgcgaactacacaaattagacttaacataaaatgaaccggtacgcgatctgggctgctggatcaatgatccacgattcacattcaccgcgcccacgacctaatcactaccatttggatccaacgccaacggcctggatcacaccgaacgaagggacatcctatcatctgatctaagccgtccaaagaaaatcacacggcagccaggcgatcacgcactgaccggactagaaccgcacatcaccgaatcaacgt

SEQ ID NO: 90094 - DNA, 999 bp, Zea Mays
tatttagagcaagggatgtaatttttgtttacttatacatatctgtaatttttttaatacatctatgtaatttttttgctgctatgtaattttgtaatgttttctaacagacaactctaaatgctttagtatttttactgttggatttgaattgacaattgacatattactttgttgtgtgttgagacatgacagttctattgcgggggctgagagtgggattgaaactgagagcagcatgcaaccccaatctgtgaatgattcagagccaatacaaattgatgatgatgttgatgaaattgaagaagtgattgtaggaccaaagaggaagttacatctattgtttggaatgaattcaagagggtgaagttaagttctggtgaaatcaaggcacaatgttcttattgtcataagaagcttaaatggaaaagtactcatggaacaaagcatcttcatgatcatttgaagatttgtgttttgcgcaagataaagctcactagccagaacaaaattatgtcacaatcatctttgaggtttagttcacaagaaggggggaaagtatccgtggagagctacacttttgatcctgaagttgctagaaaggagcttgctgctatgatagcattgcatgaatatcctttgtgcatcgttgagcatattggctttcgtcgatttgtgagtgcatgtcagccattattcaagatggttagtaggaatactattaggtaaggaatacactattctttgtatcaagatttgtgatttgaagtgttgtgctatttctaattttgtgatgtggcagaaaggacattatggatgcatatacagaagaaaagaaaagagtgttgcagtacatgtgtgcatgtaagtcacgagttgctatcactacagacatgtggacttctgacaaccaaaaaagaggttacatggctgtcatagcccatttcatcgatgattcttggaacttgaggagcattataatgaggtaagaacttttac

SEQ ID NO: 90095 - DNA, 417 bp, Zea Mays
caaaactctttatgatatcatgattataataacaaccatgtgatggaatgatggccataagaacatttaaaattaataaataatcttaacttttattgaaagctattccatctagaatttttttccacccttaacttatcgaaaggatgcactttctaaccaacgagatggtgaacgatcgcccaggtcccagagacacccgtaatcagcgtgctggtcagcagttgccaccaccacccaacccaccatggagcagttcattgctgcatagatgcaacttctacaaggcatcactgcttcagtgcagcaaatccaacagaaccaacagaatccccaacagaagaatgcaccccaagctcgggacaagcacaaagattttatgagtcatcatccccctgcgatttctcattctgttga

SEQ ID NO: 90096 - DNA, 403 bp, Zea Mays
tgcattcgcacgtcctcaaagcaccacttgtttggtagcttatacactggggtacatgctagcatgattcttaaggacccatttgtctccgtcggattggatcgtttctgaccttgttccgggtgaaataagttggcccggattgaaatttgatcgggatggctgaaagcgttcgtttggaccagaacccggaagcaaattgggcccggtttagactttctcttccttccaaggctcgatacaaaccctggcatcgtcccctctggatccaatcatgaccggtgcaaggcgagacgttggcgacataggaacaggaggcgaagaggcgacagtgcatagccccaatggtgaccctccccgtcgccttctcaccagtaagggccctctcttccttcccctctcc

SEQ ID NO: 90097 - DNA, 947 bp, Zea Mays
aaccttatgtcttgtgtgttgtggatattgtgttgctttcatcttgaggttacaaaaatttgttgctagctcgaggtgatggtatgggataactaagagatggatattagggatgactgactcattcgtaggggcccctaacccgttgtatataggctaacaaatttaggattacaagttggatttttttctcccttgtcacaagtcctacggtcttgtgagtttgttcatgagtcgcccgcaagctttaacacccttctcaacgaaaataatatgttgctctgccttgatcttcaagccttcacactatctctaggcctgagttggtcgatcaacccatgaaattagccgcacggcccacttaggacctctaatagcctatgtaccagattcgcgccataaggacctaggggatatttatcccccacaaaaggtgcatccatttggtgttggttgcatggcactcacctatgcactccgataaatagcctggccacataagtttcatccctatcttctggagaagtatgatgggaccattaacccgactgagttcctctacatgaatgctactaccatcaagatcattggaggcaacaaagaagtgatgacaaactatttacctgtcgacttaagtcgcttgacttggtcatggttcatgaacttgcccgaggcctccatatggccatgagaaaagctctgtcgctagtttgtgtccaacttcgatagcacctactttctccctggtgcggagtttgatctctatgttgttcaaaagtagcctagtgagtctctatgcctttgtacaatgtttttaggttagaaacaccattcctcacatctttataatgtacattgttgtcatcttcagacgaggaatctatgacaagaaaatgcttcagaagctcgccacctacaacatctaggatgtcaaagagctactctat

SEQ ID NO: 90098 - DNA, 1075 bp, Zea Mays
cccggaatcatcttgatctcaaaagctgcatcgcgctccggaggaatccctggaagctctgccggaaacacgtcatcaaactcgaacaccacacggatgtcctgtacccgcaaggcagcctcaccctccaccactatggagaaaaagattcccgacttccttcaccggtgatccggaagcaattgcgccaacaaggataacgtgtactttggggaacatcccaagaataccacctccctacgcgacggcgcctgcaataacactgtcttccaaaaacaggatataactgcgtgatactgagataaccaatccatacccaagataacattgaatgcccccaaggaaatcacaacaagattggccgaaaagacctcatcagcaagaataacggaacacccctaacaaactgaacagctactaatggagccattagcagaaccaaccaaaattgggtgacccgacatctgcaccgaaagaccagcctgcgacaccaaatcctccaaaacaaacaaatagctagcgccagagtcaaaaagagcatgggccacaaacgaatcaactgaaatcgtacctatcaccacgtctccttgctctctgccatccgcagcgggtagcacataagctccggaaatacccacagaagaggaagctcctggagtgaaattaacagaagaaccccactgagccaccgggtgaggcagacgcggagctccaaactgagatggcataggagtagtcggtgcaggagtaggcgcagccagatactgaggaaaaccctacaccgactcgaattgagaagtcccaagcacataaaactgctgcggaggaagtggaactgaaagttgctgctcagcgcttgatatcatgttgacagtgccgtgagaagaggaggaagtcactggctcccatctaagcttcccattgggattcctcctacacaccacatccttatggtcttgactgcagattgaacacttcccgttccactagcactctgcacggcgatgcgcatcaccacaacggaaacacactatccctagcctagacttaggaacagcatgaaacctctaagtac

SEQ ID NO: 90099 - DNA, 871 bp, Zea Mays
caaacaatgggagtattattcatattagaattttatggtatatttgcaaaactgaaattcaaaactagaatttgaatttagtttggaacatgaaaggaatggaaataaggaaagaagagaaatataaataataaaaggaaaatgagacctcagaacttgtcctgggcccaaagtggatcttttggcccagttagcctttgagtccggtggcccaaccaaccaaaagcacgctgacatgcgggccccagttgttagctagactcggttggatgcgctcacacgcgcgagctctgctctctctcgctgcaggggaacgctgacaccgggccccgctagtcaggctcctttgtcgggctgccgctgactcatgggcccatggggaccctgtagatattcccccctggcgggcgcaactacctaaccgagcatggtgcggccgagcgacccagctggcataacagcctccgcactagcgggatcagttgcgcggtggatataatccccccttgggtcttgccgcatcgtcgtgccctaatcatcacctgccaccgtagtcagtcgttttgccgtgaacgagagtgagaggagccgtcgtcacgttgcgggccaccatagcgtcatccagggcttgcagattgttcgtggaggttttggcgccaccctgtgagaactccgactggggggagccgaggaattgctcactggcgtgtcctctccgccatggaactgtgcatcgccgtcgcctaggacctctgcgccataatcaatggtgagatattcttcatgttgttcgcatttcccccacctacgtataacaccactccctgatgtatttagcgcattagggtgaaatggggaccctactccggcg

SEQ ID NO: 90100 - DNA, 504 bp, Zea Mays
agctcacatctaatcggtcctacatggagtataagcgagagtggactatatgaatagcttattacctgcaatcctgatgccgaaagccgcgaccacgcaccacggaggaagagaggcaccggtggtcaattacttgcgcccagatggttctccgagcccaatcgactctgcaccaacactccataaggcgaggtgaggcgcgggaccctaactctgaggacgctgcgtcaatgggacaaggatcaccggtggtggcacggacgggttcaatcttggctacagcggtggctctcgggttatgggacaagcacgacaaagcaataagatagggccgcaacggaagctttatgcgcgaggggagaacgggggcagtctcaacgactcggcgattcaggtgctcaccgttgaatctctgcaccgcacggtaacgtctgactgaaccccgggtccacctgtaagtgggtgagcggtaaggggcggcagtcgctgactaggcggtcccag

SEQ ID NO: 90101 - DNA, 1094 bp, Zea Mays
cctgcctgtctatagaggaaaatagggttaaattggctagccttgctgatagaaaaagaggacgaccgtctgggtctagaaacaagaattcaacaatggccccgcagtggaatgagacatccacatcaaaaaagcataaacataccaattctggagaacatggttcggatgacgataatttaacatgattgtaaaacatctatacataaataatggatgatattgaaatgttatgatcatgatactatttgatgattatgaatatttacgttaaaagctcactgtatggattatatctattaatgcaatgtaattatttcttatgagctatgctaatgttgggtttgtttggccatataatcatatattcactgcatcacatacaatattgaaaaaatcaaacagccggctaactgaagtcaatatgtatgtactggcaccaagcataaaaaactgaatgaataagcgtaaaccgtatcagatttttgcataatcaatacaaagaagaactgaaaatagtgtacataactgaacgtagaaaggcagcacattggcactggatatacaggcgcatacagtaaataagtatataaaaagacgtaaaccagttcagttatatgcataatcacaccagagcagaactgacgaacgtacataactgaataaaacagccgatgcattgaagtactaggtatatgctgcaaatatcataaaaaactacataaaaattcataaaccattgcagatagatgcataatcacgccagaacacaaatgataaagtgtataactagcatatataaatatgtccatctaaaacatacctagaacgacatatctaggagtttgctaacagcgcatatggacaaaagtattatctgaatgctaacataagccaacagaccaatatgtacatcaacaccattcagtgacagtaccctaaactaggctagtactgaaataacttgaagccaacaaaagccaacagaccatcatgttcagactaccattcagtgagagtaaactatactaggctactactgagagaacttgaatctatccagatgtgaaaccatggagttgtttctgtttagt

SEQ ID NO: 90102 - DNA, 906 bp, Zea Mays
cacaagtcgataaccgccgataggatatcaaaagaatggatgtctacctggaaatctcacacgagaggtaaaaatccaggcaggacaggagacgcctcacgggcaggcgaggtcaatgaaatgacagaagaggtgagcacgtattagtcacatagtcataagtatatgaaatatgaataaatacatacacagggtgttatggcacagaaaacgagagatatggcgatcgaggggtcaaacgacgcgaaaacgacgtttgaacgagaaatagtgccataggaggtttggaattcgaattgagcatgaaatgacgtggaattgagctgatacttcacaaataggtttatatgggtaaatatgagtgaagtgtgcgtttggtttgattttaggcgaagaaaaaggaatttgggcactcagctcagaatcgatcgctagaaacggggaattgtgtgaaattgaagcctggtatatcggattggcgtgaaatttggcgaatatgttactggaggtattgtgaaggtgcctgaaaagtttgggttcaatcggagcaattttggctggtttgggcatttcgccgagcacgtggcgtgcagtgttttagggttttggagatatggccattttgggtggtgaaaccctccctaaggagctaggaacctgcacgagtactcaaggagcataaagggactcaaacatgcacttggatttataggatttgatagaaattggaatttgaatccaaggggtgggatttggttaattgagagctccatatagagaaatcagagagaaagagggtagggaggagctcaccaaaggaggggggccgagcacaagcctggtcgctggaggatcgccggagaggagctgggatcactggcggcgaggaggagacaccagagagga

SEQ ID NO: 90103 - DNA, 439 bp, Zea Mays
ttggggttctctaacaatgacattgctcgcaatcgtgagtgcatccatgaatatcatttgcccagcagagaggaagcaaaggccctgcacatctctgaacatgaggagtattggaagtctaccaacatgcataggtactacatgtaccttaatgctttgttcagaatgactcattaccaagggaggaaatcagatgaatgtattgggtgagagcaaggtgttgttaactttcatgaagcctaatgacagatccaggctaaacctttttgatatgatctggcacgagatttttcatgtctcttgcagtccaaataaggatgtttgcatgccccattcatcatgaaaatggttcaagtggtcactctaacttggtttgagaaagagtccagacattcaccttatactccctattgtattgacccaaacaacccttccagtc

SEQ ID NO: 90104 - DNA, 1020 bp, Zea Mays
gttcagttagtgaattccaagcttccaactaccctttagtagtgtgcgaagagtgcaaacagaaaagcgttatcctgatgctcaaacaatgaacccattttgttttgtgtttttttctttccaaacagggattgccccccagaattcagggaagctgtctcaaccctgatatttgctgctgctcgctatcctgatttacctgaactttgtgacctaaggcacatattcacagaaagatatggaaattttgttgagcattttgttagccaggaggtacgcaatatgatgctaatatgttgttattgaattgtcttatgcttttgtggtcctttgctttacacacaatattataatttgatccttctgtctgcagttcattcggaaacttgacagtacagagttcactaatgaggaaaggttccaagtcatgcaaagtgttgctgaagaattatccgtcagttttgatgccaaggaattggaactcaagttatgggcctcactacaaacagaacatgtaagtcctccacaaatttattacctatttttccaaaacaaatttattacatgaactgtgatgtaggcacactaaaatgtccttaacttgaaatcatttaatgtgttttacactttcccttaggatatgcttgagaagggttcaaggaagccagcagaactagcaatgccttcatcgagcaagcagatatgtgtcgagaatgcttcatgtgaagaacaagaggatatccttgagaagagtttgacaaggccaacagaaccagcaatgtctttatttgacaagacaaagtacaatggggatgctccatgtgaaagaaaaaataaggatatgcttgagaattactcaaccaagcccatagaactagcaactgcttcatccaacaagcagaaggttactgagaatgttccaggtaaaagaaactatgatgctgaacctgcacaccataccgagaaagtggagatacagttggtccaaaaagatattcagtctgttgctgatgcacatca

SEQ ID NO: 90105 - DNA, 576 bp, Zea Mays
atcattcacaaatataaaaacattattatagatgtaacattatattatttactcacttaatatcacatgtcaagataatattaccatccgcctcatattaataaagtgatacaagatgtacattgtatttataccttcgtcttgctcgaaggtgaaagcgtgattacaattccaatccagcgtgagcagtacgaaagtattgttcatttatttatatgcaaggaacatagtccaagcaaaagtacatttatgacactgatacctacacattatcctaacacaagtatcaaggattaacgagtattttcctcactggctcaatgtcacatctggccttcataaccatcttgagccaaagttataatccttcggtgttttgcgcttgtctgttacagcttcggcgttcagtctctttggttgtagacgataacttcgtcctaaggaccttcggcagagaaggagactcccagcacataccaaatgatgaatttgtgttagcagcttagtagcgtgaaacatgaaaaaaggtggcttggcagttggtaactaaacagagtaattgctaaaaacatcaag

SEQ ID NO: 90106 - DNA, 785 bp, Zea Mays
gtattatcgtggtaccaagcctggcgtgggccacacggcgcttggcaagcgcaaaccaccgaagcgaggcccttccattctgtcaaaaccgtctagctcatctcggtctcggcattgttctaaacgaaacatatagagtgaatgattttaatagaagaaacatatagagtgaatgattttaatagaagaatgcattaacattcgcagtggcggaggacaaaataataataaggtatggctggagaaagataaaaaagagaaaaatatgatacaacacataggactcgaacttgaaacctatttgattaatataaatagtatgaacttaccactatatcaaacatgatttttaggtatggcttaagtcatacttggtcataacgggtgctccgccactgaacattcgcattatcgatatagttccactgaattctggtaaaaaatattttcacagaatcagagtcggcgaagttcagagtacgtgagctcatggttcaaagagagagacagagagaaagtactgtcagtaatccgagacagcatcgaactccattcacttattatagtatataagttttgatcgactgactttaagcttggtgaaactagtagtttggtggcttaattaacacaacgtgtctagtttctttgtgtctggactggacgggaacgggcggcaaatgcatgtggctctcaacgtgcatgcagtcacatgcatgccagcatcgcacgcatctacggctattatatacggattactactgtattactaaccatgcatgtac

SEQ ID NO: 90107 - DNA, 546 bp, Zea Mays
gcaagattggagccatgggtggtggtggtagtagcggggtccatgcagcttgtgaatggcttgccgaagcaactaatgttgtggactgctagttgcccacatactcggggatgtatggggaatagcatgaagcagtatgtaggacctgcttcgtctgattgtgtcgtgcttcatcttcagctatttccttttatttctggattgtgacttggcatgtccttgttgtatgtccattgtcttctcgacagaataaacaaaacaaccttattggttcggagctgaactttccaccgaagcttcttcctcctctgcctcttggagctggtggcctaaaagagctttgttgtgtccctgatgactgagagttgtgctgatgcccttgagtatgattgcccctatcatcacttgatctagggttatgaatcgtcctgacatgcctagggtggagcctccctcttaagcccctagtcatctcggagtatctgtaggcctcttctcttctctaccgaaagtcattggtagccctgatatattcgtccatatttt

SEQ ID NO: 90108 - DNA, 507 bp, Zea Mays
gggctacgatagtatagtaagcctccgtaataagcgcaacaggcacaattatggctcggtaattggggtacacgataaatccacgcaacatgcgcaacagacacaattgtggctcgcgacagacagacattgcctacagggcatgcaaaaaatacgcggctcgacaatgatggtctgactcaactggagtggtccgattaagcgagagtgcgacatagcaatcacatgacgcaaccaagttcgaacgacacaaatattgcgtcgtgttgccaaggcgcagtcaatattcagctaatgccataactcagccgataataacatagtttgatcagtgtgtctgagtaccaactatacaatttaatcgctccatgtgagtccgaaggctcaacacataacaaatatttagagcgatatgaaaaaaagtagcatggccttcacatgcattttaataattatctactaaatatttgctacgagaaataaaagtagaaaaataaacaccaaaat

SEQ ID NO: 90109 - DNA, 293 bp, Zea Mays
ggtgttgaggtccatctctagttggcttgtttcttgtagtattgtagataaatagtattgcattgatggtttgaggctgtttgatttgttgtgccactgtagtagttgaggcatgcttaaggttgattaggttgtcgatgctgcttatgttgctatcaatcgatatgaattggccatcagtgagaggaaagtattgttgttacattttggtgtccagtgatcatgataccaaatgattgccttttaattttttagttgatggatcgtgatgagtaaggagtatctagttccca

SEQ ID NO: 90110 - DNA, 488 bp, Zea Mays
gtggattgagctcgtcggtgaaaagatcacaccgcggataagttcgggacattgtggccgcgctgtccctcggtcatttgcgccggcgacgtggccttatggccatcatcggagtatgcgtcattcaccgcgattgcgccatgcctcaggaccttaaccacgtcgcattagctcaggtcatctgtatccagtgatcgccggagagccgccacggtagatgcaaccaagctctcacgacagtgctcttctcactctccggccgccaccacgccaaaccaaattcactggccaccgcttagcgcccctataaaatgacagcacggtctgttgcgctaagttatcaccaagccagagcacccgctcctacctccgattagccaccataactctccaatttctctttctccccggatctgttttccgccaccgtgaaagaggccttgccgtggctagctcatgtcaggtccgttcatgccctctattcactt

SEQ ID NO: 90111 - DNA, 499 bp, Zea Mays
ctatttgtaattcttgatcgagtgcttcatcttgttgagtcgggctgcctgccttcctcttttgattgcatgcttgctgtagcgcttcttcttccttgttcatgtccaaggatgctaggacgaagctagtcactgctgtcttttttggtggcatgacaaagctttgttgtggtcattgaaatgagttcacaggaggcgggcgccaatgttggtacttgatttcaatcccctaaaggtatcgaaaaccaaggcaacacaagttgaatatcaagaccttcgtcctatgatataacacttctttgaagtgttagaacaaaggatgaatgtttttaaagagaagcattaatgaaatgatatgaaaaatacaatgtgaaacattatatggaactcatcccgaatgctttagcactttattccatctttccttatattaagtaattacaagcatacctttggatttttaagaataagaacctcgaaggtagcttcggaagcccgg

SEQ ID NO: 90112 - DNA, 830 bp, Zea Mays
tcgagtcagaagactgaattgtgactgacagtgaacactgaagaactttggggtggatttgagcttaatccagtaggtaaatggccagggtttctataatcgaattgtagctgaattatagggcaaaaaatttgttacagagggattgacaagttatcatatggaaatcagagatcaaagcctagtaaaatgctctgtcagatagacttaatggagtttcgattgtacagtaactgaagaagatctttggtgcgttgcaccttgccgcccgctaccccacgccaagattcgcgccggcgatacgattcgtgcccgttggcgcacagataacgccttggggtgaaaagatcttcactgcagatgagattgggagctggccgccgtactcacttgccttatcgccggtccagataacctcaccggagtttgccgcccgccactcgggtgccacgtgcttgagaggtttaacacgtcacagtaaacctgtgttgcaagcccatccatcaccggaggccttgccacggtgactgccacgataacttactccagtgacccttccctctctccggccgccagcatgccattccaaaattaggagccaccgctcttggacactataaattgagcataccactagctctgttaggtaatcacgaagccagagcacccgctcctgcccccgattagccaccatagctctctaattcctatcttcccccaaatcgggtttccacgccaccgtgaacgccacgcagtggccagctctctgcaggtccgttcacgccctcctcgctctcgtttcaacacccatgtgtgctatagatgcttat

SEQ ID NO: 90113 - DNA, 394 bp, Zea Mays
gatggccttcatgaaaattttggttgttacaactttgcgtatcagaagggtacgaaggcaccagtccttagttactgcaccaaatggccaatcgggtggaagagtgaatggttctatatgaaggctgacaagaaaaagagagagaagttgatgaccatggtcatgagtccactttccttgagcttcggaatgaccagacccttatgcaatatgcagctggggtcaccttgttagttggctgaagtagagttcagagtggttcctgagcagatcagtaccagggacttggtgcaggaatacttgggaaataggacatatccaacgtcaagtggttggggaatgccgaagaggaaagaagcgaagaagaagcatgaacttgttcgacttgcttatc

SEQ ID NO: 90114 - DNA, 449 bp, Zea Mays
atggctggcacaagccagagccacaacgaggcacaggaacacacatctaatgggtccaagattaaaagaacgtaatggggaattgtactggaggtaccttaagagcagttgtgcggaagagcacaccacccacgacacggtggtgatggatgagcgacggtgagaaatttcagggccttcgcttgataataccgcgttacaaggccatggatgcccttcccttggtctgatgaagactcgacgcaccaatccggggccacggtagtgtggaatccacgggtcaactacggcgacgacgaggttgtcgcgtccaatactccaactttggttctatggtgttggcggcggggttccaagggggaagaaggaatccagtctcgcccttttatggacgcctgaggtcggaccggaggtggcaaccaccaagctcgagaagcgctgcggaagtc

SEQ ID NO: 90115 - DNA, 934 bp, Zea Mays
ctccactaaattattttggagctgatcatggaccagactaacatggattggtgtctcatgttgaaggataattgaaatctcagggtgcttcgttggtgctgtaacataggactccactatcttgcaattgtccacattgtatcctccactgtgctcatcctcaatgattatgtgcggaatgatacatacacatatgatcacacgaatacttgatggaaaaagaacgacatgagctagcgagaatatgaatgcgagcattgaggaccctaaatgctctctctacatccttccacatgccttcctagcatgcatttaacgttcgttgctttagtgtgtaagaggaaaatggttttcacaagcattgactatcggaggtagatatcattggtgaggtagtacctttgattgtactcgtgtccattcgtcgtgaatttcacataaggtgcttgtcccttgagcatgttagtgaacaatgacgatcgatttaaacacgttgacgtcattgttcaatcttgctactctaaaaaagcatgccaaattcacaagttatatgcggcatccacctcaatcatgatggtcgggtatataatatgtctctagtaaactgcccttttccatcaaatgggacagttcctccactttcaacacatgcaatttatactccctatcataacataacatgaaaccctctcttctctcccttagctaaaagttgcataaggttatcaacaatgggacaacaaccatactctttgccaaaacatgaaataacacccctacaaaaatatgtgagacgctctaaggccaagctcccaattttgatacaatcatgaatgaagtcagtaaccctaacatagaagagcatgtagagggaaacaatgcatctttggtggagggggagaaaccactatggttgagtgtaacagttataaga

SEQ ID NO: 90116 - DNA, 629 bp, Zea Mays
ttcctagactgggcgcactaatacagagaaggtcggggtttattctgtaaaatctaccagactcagactactcccgcggggatggcgggttgaataccggaaaccagggggtttcctttgtaaaagtcgcgaggccgaaggggtatcggacgaccctggttgtccgatcaagatctaaccaccaggattggatcccaagccacgcgaacgggtatgtgcccattgtcattagatctaagattcacgatctcgatttaaaataacatgcctcgctctcggccgcagatcaacaggccaacgcccggatttcaatcgctgaatagctcacctggccgattcaatccaatccgttaaacaagcgaatggacggccagtgcattctcccccttcctcggccggacaccgcaccgcgtcgtactagcccacgacggtgccatggccggcgattccaatccgcacaatccgttgattattccccaattcagtatagccaaactacgcggagagaacgagggatccaagggtcagctcattaccttggatcctgtggtgtattaaccccgccgccgtatgagtctctgttaaacccgcagctcgacgtcgttgaaggattccggtcgccattctcc

SEQ ID NO: 90117 - DNA, 306 bp, Zea Mays
ccgtggcgagtgtgtggtacactggtactacgggcgacgtgttttacctcgaggcgagtgtcggtcgtcgcgtgtagactaatgaaagtttagtgacataacatggcaagttagtgatactaagtgactccgacgtggcattcggcatccggttttattacaaaccgattttagatatttgttgtatggactgacaaagttcgaggatctgtttctctgattttctaagtttaagaataaacgtgatacaacgtgccaagttcgttgaccactagtgtattttactccatcatattccattcctcg

SEQ ID NO: 90118 - DNA, 1645 bp, Zea Mays
acttgcgagggcaggcgctagcgaaacagcgaaggaaggtctccaagcattggttcacgcgttccgtctgtccgtctgtttgtgggtggtaagaagagctgagctgaagctgagtgccagtcaatttaaagaggtgctgccacaacttactagtgaatactgggtcacgatctgaaatgatgactgcgggaagaccgtgtaatttgtacacattgtcgatgaacgagtgagccactgttgcagcagtatatggatgcagtaaaggaatgaagtgcccatatttagaaaacttatccactaccacgaaaatacagttggctgacccagaccgaggaagtccatcaatgaaatccatggaaattgtgtcccatgctgttttgggcactggtaggggttgaagtttgccgggatacgctgcacgatctggtttggcttgtaagcaggtctgacactggtcgacaaaattgtggacgaaggctttcatgcggcgccaagcaaacaactgtttcagtctgcaatatgtaactggcacgccagaaagaccacctactggcgaagagtggagagcagcgaccagcctgttctgcaataaggcatcattgccgacccagattcgacctttgaaccgaagcaagccatcccttaaaacaaaattaggcagcgccgagggatccacagacagcttggacaacagggactgagcatcaaggtcctgggaataactggcctgtatatcagacaaccatttgggagtaactgaagagatggccgacaattcaggctgcacttgtcgggacagggcatccgctaccctattatctgtacccttacgatatacaattttataatggagacccagtagcttagtgaacaccttgcgttgccatggagtgtgtaggcgttgttcattgagttgagccaaactctggtgatcagtgagaatgacaaattcaccctgctgaagatacgagcgccactgttggactgcacacaacactgccatgaactccttctcataagtggataaccctctgcccttaggacccagagctttgctaaagaaggctaaaggatggccacgttgcatcaacactgctccaacccctgagtcactggcgtcagtttcgacagtaaagggtactgagaaatcaggcagggccaacacgggcgcagatgttaatgcttttttcagtgtctgaaatgccagggactgatcagatgtccacacaaagagtacccctttcttcaacaaggcatgaaggggctgacatatgattccaaagtgacgaataaatttcctgtaatatcccgccaaccctaaaaaactgcgcaattctttgatggaagaaggcacacgccaatcagcaatggcttgaattttagaggggtcggtagccacgcctttactgctaaccacgtggccgaggtacgccacctgggactgggcgaatgagcacatggaaatcttgactttccaatgatctctgttgagcagttcaaacacttgttgcagatgtaataagtgatcatcccacatggcgctgtacacgagtatgtcgtcgaagaagactaatgcgcacttcctcagcagcggagccaaagtgtggttcatagccttttggaatgtgtcgggtgctccagtgag

SEQ ID NO: 90119 - DNA, 442 bp, Zea Mays
cttgtcgtggtatattcattgcgtatatgttgcaggtctcaccgcttcagaaaatctcggagaatctgggtggtacacccaatggatgtctgcctagtaaaagatgtccatctatagtcttgaaatagtaacttgatgtgacagggaggtgtaatactccgtttgagcagttgaccttgattccatctggtgtcgtgttatgtgaaatggcgctagacgcctcactcatttctttggaggcttgtaccgctattgaattcttgtaactgttcggtgagcgggtaggaagtgaacggtcgtctgtcggcccctttaaatatcccactcgccttggttgctctccccactcattctcattcagtcgctttcttcttccttgcttcttctccttccgaaagagtgatggctggaggaaaaagaggcaagaaggggtgccgcccga

SEQ ID NO: 90120 - DNA, 581 bp, Zea Mays
gtgcgaggtcgcttgctgttgactgctccatcctcgagtgcctcttgagggatctcgccgacaagggccgccttgtctttcttttcggcgagggctgtcttcgtcgtgtcatccagggaggtggtggccttcgaagtcgctttcttgggagccatcacatgattggtttgttgaagcatgaacggtggctgccaaatgttggaaccgactgacacgtggtcgagtaggcccaaacaatgggaagcaggaatgctcaggtgctcaacaaaacaatgggcaaggaacaatagtgtctcgttatgcgtgtcctgtcaatgtacaatgtaggggtatttataggtaacgaagtgggtgggcatgaccttctaagtacgattatgccctcggttacctgctcctccccagaatattcccccttgggggtcattacatgtaattacaatgaagttaagcacatcctgattaaatataccacaaagcctaccccaggatgggcttacaaaatgggcccaaatggccagcgaggcatcacgtgagcccattccacagaccacacagacagggagtggcggtcttcgctc

SEQ ID NO: 90121 - DNA, 311 bp, Zea Mays
tgaagctaatcactatgccagagaattaaaatatccgaagggggcattagtgttcaatgggacagacgaagatgacttcctatactgcctcccagacaacaaagaattatccgtttgtcgggagatggctagaagtatggggtttccaaagctcgaagttggattatgtgctatgacgaaggaggatctcgcggatagtcttgcgtacaatagcctgaaggtatgagaattggatgtttacaaattttataattcgtaactcattcttttattctcataccaacctttttttacatatagggtttaatttt

SEQ ID NO: 90122 - DNA, 837 bp, Zea Mays
cgtcgaccgagcctcgtcttgtacgattttggtgttcactagagcatgctgaaggtgtctggggattagcgactggggtgcgggtaatttgtcgccgaagtacacgggtcacggcggatccgctccccaccgtggtcgggccgcgccaccactcctaaccgctggtaaggctcctccctcgtgtttgccccagtcccatgaacgtatactatcgatccttactgtatgccctccaactgataagtggggattcctcatcggagtattagcgccaccgcggagccacccttcaccatggtcaggatccccttctacgctatgtaccagtaagtggtccctagcgtattccaagggaattctgtgttgtgtggcgctagtgggcacatggagtagttcgccggagcactgagtcgaaactcactggcgtgttgccgctgtcgtgcatatgcgtcgccgctttgctcaggttggggatggagatcgctgggcaccattaatcctaccaccgatgactgggattaaaagatgggacaaccattcagtgatcgaattggagccatcgatctgggatcggatggatctaagttgataccagcaatttttaaatctagggcattgattcgtagcccaacggctctggttacatactggatactggttcattataatgttcgatctaatcctaggcagagaacttaaatctaacgacgcaaattagtcgataccccttcattgtggcataattgttaaagtggccctggaaatatagaaactaacccaccgtctatagctatgcaaagaatatgatgattaggtcctaaaatttgaacaaaaccc

SEQ ID NO: 90123 - DNA, 297 bp, Zea Mays
aaaaaggccaaaaggtaatccatactttggaggcaagaaatggagcaaggttaaacccagtttcagcaaatccaaaacaaacgtaaagaaaaacccatgtaattaagtaacagaaaatgatcagatatataggttgcggggctattcgcttcatattaaagtcagcttcatattaaagccaactgtttagactgcactgtaaatgtaaggaaaaacccatgtaattttttgttgtggctgtagctgcttccataactaagtacatctcggtttgccttttgcagccgctaatacctg

SEQ ID NO: 90124 - DNA, 326 bp, Zea Mays
aaattgccaagtacatatccgagtgtgacacctgccagagaatcaaagctagtcacttgaaggcagcaggccctttgcaaccccttcccataccatcttggaaatgggaagacatttgcatggacttcatagtgggattacccaatacctccaggcaccatgattctatttgggttattgtggacaggttgaccaagaccgctcatttcttgccagtgcacaccacccacaagacagagaagtacgcagaaacttatattgatcagatagtaagattgcatggtattccaaagaccattgtatctgacagaggagcactgtttgtg

SEQ ID NO: 90125 - DNA, 448 bp, Zea Mays
ccattccatcttggttttctgctattcacgttctcattcccattctcatcctggttctgcccacacaccctagccgtacaacgtctgacatgtggggtccccacaccactggcctgttctccattcccattcccatccccgttggcttgttctccattcccatcaaggttctgcccacaccctgtcgtacaacgtctgacaggtgggtcccacacccctggtcttgcatgtggggtccttgtcttcgtgcaccgcgcatttgaccaaaaaagcctgctatttggggtgacaacaatggtcaggtaagaatacacaagatgttccgcacaaaaacttataaacatgtgtctgcacaattcagtggtcgatgtggtactaagtttagcttgcaaatacaaagtgcatgcgtcctcgaaggcccatctgcttgttgcggcccataccaaat

SEQ ID NO: 90126 - DNA, 754 bp, Zea Mays
aacagaacccagtcaacctctaggagttataccagcttttcaaaaaaaaacgcctgttcaaaggagctccaccacaggaaagttgagttccacaataagaccacccccaccaagaccgcggccatcagctccaattaataatattgccaatcagtggcaaccaggcaaagcccccagcactaggactaccctcagcggtaaggccgcgacagcaggcaagccaagaggaagaggccaaggcaaagccccccaacaacccaaaaagttttgttgcatgttccatgacgaagattcagcgcacccaaccagagattgtccagaaaccaaagactgcatggccagagcggccccacaaacaatcaaagagccatcgctcacacttatcaccctcaccagtacctccatcctctatacaaaaataaacacccataccacactcagtcgcagctgaattacaaccaaagtgcccccatcatccataactctagtaccaagaaagattaccactcccacctccaccgctccctaattaaaccagcaacttgtcaaccataaccacccctaaagcaagaagatgacttcgcccacccttagttaaggggagtcatccacatgatcgctggagtgtccaacatagaatttgagaacaaatgacagaagaaaaaccactaccaaagggtcaattagggtgccctcactagccccatggtccagacgaagtggtctgacatctcgcttactttaaacacaaggg

SEQ ID NO: 90127 - DNA, 850 bp, Zea Mays
gcgaacctgtactggccagaatgcgtagagactgacgccctaatttggttgataccagttcctacccccggtgacctaaagccctccgttaattgcacaaatccgcgccggcgaacactaaggacaaaccgaggtgttcccgatgattgggtgcggtttagctcaattgatcgggtcgacaagcatgccaagtgtgcctgagtgctaaaacaagggtgcggagggcgagaacggacctggagacggtggtccacggcgcggtggctcacggtggcgcggagaaccgaattgggggaagaaaggaattagggcgctatggtggctaatcggaagcaagggctggtgctctggcttcgttacaacctagcggagctcactggggtagcaatttatagactccatcggtggtggtgtccaatttgaagaaggcgcgcttgtggccagagagagaggaagtgcactggcgtgggttgtcgtggctttcaccgtggcaaagcctctggcgatggatggacttactactatggttcactgcgacgtgttaaagctcctaggcacgtggcgaacgggaggaaagcggccaacgcccgcaaggattatcacgaccgaccgcagaccaagtggatccggtgaactatctgggtgccaagatcttttactcccctcggttatccacttgtgctaagcacgaatcgcggcgaccggcccgaatccgggcgcagggtcactggtggcgaagtgcagcgaacctgtgatctttttcagtctactgtacaatggaaagccccattcagagtacctgacagagcgctttgcagggccttgatctccaatttttatgtggcaactt

SEQ ID NO: 90128 - DNA, 595 bp, Zea Mays
ggaatccaaaattgtaggtgttgataaaagatggaacccttttttgtttcccaaaatctgtgtttctaaatgtttcaactaatatatcatgaccaggttaataaggaccaaagggcccctttcttgatgtccggttgcaaggttgcagatggttatggctctatgctggtaagcatcagactttttcctaggactagctgagtataccttaattgactctttcaaattatatatgttgagtggagtatgttgctttagctacatattctttcctgtacagtattacgtgtaacgactgctactatcacattcattatgacactatattgaccacaaacatgatctttctgcacttgctatcaatataaaggtaactggtgtcggtatcaatactgaatggggtatgctgatggccaacctttcagaggatattggtgaagaaaccccgttacaggttaatctcttaagttgccttttgaaaagggatgtgcatgtactatgagcctgtattgactcaatgttgattggtccttactcccacttgctttgacataggtacgcttgaatggtgttgctactcttattggtatagtgg

SEQ ID NO: 90129 - DNA, 706 bp, Zea Mays
ctcctttctttattgtctatggtttggaggcagtgctacctgctgatctcaagtttggggcaccaagattaatcttcaaaaacatagctgaagctgaagctactagactagaggatgttgatatactagaagaagaacgattgaacacagtgattcagtcagcccgatatcagcaaactctaaggcgtcaccatgatagggccatatggcatcgatccttcgcagtgggagatcttgtcctctgcccgaattctaacgggggaggaacggcacaaattgtcgccactatgggaaggaccattcatagtagcagaagtcactcggcctggatcatatcgtcttactcaaatggacggcacataaatagggaactcatggaatatagagcatctatggaaattttatccctagctagatttcaaaagctattgggacggcattgtattctgtaattggatgatacactatcaataaaaagacttcactctcaagggcactcgaactgtttattgtcaaatctgcacacttacttaattcagggtgaccactataccctactaacggagcaatcggcttaagtcggcgatgacttaagacggtgtgacatgctcacgcttacttaacctagggtgaccactatgccctactaacggagcaatcggcttaagtcggcgatgacttaagacggtgtgacatgctcacgctt

SEQ ID NO: 90130 - DNA, 425 bp, Zea Mays
gacatgccactcaaattttgggatgaagctttcatcatagccacatatctcataaatcaactccctacacatgtcatagataatgtattccctctagaacaattgtttaacacacattttatgctacatatctttggttgtgcatgtactctgatgttgattatagacaagctctttctacgcgatggtacacctctatcatagtgtggttggtcccgtctaatacttatcattcacatgtcctaatatatcattctcagttaatcaagttagcaagtatatttcgacaccgattacctctcattgggctatggtgaagcgcatcttgtagtctcttctgatgtggattggacgagcaacctagaataacgtagcgctatggttgcattgtcttctcggtggtaatctcatttcatggagtttta

SEQ ID NO: 90131 - DNA, 1069 bp, Zea Mays
gagcatagtacatagacaaacactaaagcaaatcatgacggttgcacgacctgaggggaggagggaggtgtgacgcgttgactgctctagccgactgtgccatcctattaggtagggggagggagtagacacacgacctacgtgcttcacatatgacgcgtgacgaccttgaaatggtagtagtagagaagaggttagttaaaagttgaacatgttaaaattttggttttgtatataagaggagaaaacacggacaacaacaatagcggaaggagataaggctaggtggaatcactgatgtgcacgagccgactgtcggtaccgactagccaagctctaacatcaatcgatttggccagctgatcggttggactgttgactccttagtccagtaggtaccaatcacattggagctgaaccgatcgttacctacccacgcgttggagaaacggttggaccgaccgcctatagccactatcacgttctgattggtctatatcgttttcaagcccaacaagttcaaaaaatctaaaatttccaaaaatccaatctataaatagatggagtgtttaggttcattcacacatctaactcttcaatttgcctttaccacttcctatttcactcttctcactcacatttcactctactacccaaagacatcttattatacaagaccctgacgagtggggaccaagcacgatatcgtattattctaggactctgcccacttgctaggggaatactaggaccatccagataagacgtaggcacgtgatcttactcttacccgatcaagtagataagtaacaatcatgtaatatggtagaggccggatgataaaaaaactcgcatgtaaaggtagaactaaaagttctagatagacttagttaaagcaacatgtatccttgtttggtatgatactagataaacttcctataaccgctcctccttagattataaaaggagggacaaagcaccccaggtcagatgatcagatcgtaagcaatagccactaatatacatgacgtaggatattatcttacatcgagagcctgaacctatctaa

SEQ ID NO: 90132 - DNA, 666 bp, Zea Mays
gtggtggcaggcgactgaagtccggcgacgatgatcttgctgtttcggtgaggcagggcttcgatccttgcttggagaagcttcacagctcctcggggaagctgtccaagggctctattgaggccgagggtctttggaagtggctggccatggtggtcggcgcttgggtggctcggacgggtggcacagagctcgccggagctaaggatggtgtctggccagcgaaggtgcgtgaagagaggtcaagttcaagcgcggattgactccaaatctttgcgattatggccataatcccgttgagagatctcttccccctgacattcctttatcgtttgtgtgtggaggcttatgggttttgctgactggagccaaagatatggagtgatgaggtttggtttgtctcactgctgaactctgagaggaaatcccagatttgacgtgtctagggcacgaatctcgatgccatcttcacacacgttgcagaggggttagtttagaacaattttgtcaatggggacttaagaatttgagctagggatcaaggtgaacatgctcaggttctaggtgagggctgaaattcagaaatctgaatttcagattttccctagagagcttccacttggatggcctttttggggattttaatcattttttggccaaactttt

SEQ ID NO: 90133 - DNA, 939 bp, Zea Mays
taaaagaaccctctgtcgaagctattagtctagcacgaaaattttattctgaaatttggctcaatggtggggggagatagcagatgaagctatcagacaggatgaagaagaggtcatttcaaattctgaactcttactttttacatctgcgacttactgtctgtgtttattttactcttacatttttcttaggctcatcgggctaaagaagaagctaggaaagctaaagaagctgccaagcttgaacggtgcatcgactagttcgtgccatgcgaattccagtacggttgcctcgtattgtgtggattagctctggttatggttctgcggtcgttcggagatcgagttgaagtgtgcacggtttcggtgtctctcttcgcgttgcttggtcacctccgaccttgatcaggtataaagtcagttaccgctattcttcagcaaatttacgttgttattctgttacttttatatctaaccatcctatttatcaacctactgtcgtgaagatcgggccaccctagtactgaatataactcggtacctatcatctggtatcaaagctttcattgcacggtaggtcttactgtcatccacttatttatcgcaatgttcatccatcttatattttgttttgtcctatagtccaaagccacaaaaaacctatagccctttggttgtatggttaccttgtgtcttttgagttcctcaagttgctagttaccaccatcatattcatattgtgtcattgcatttgatctctgcaccccattagtgttataaaaaagtgagaaagaaaaaaagagagaaagaaaaaaaagaagagaaagaagtcaaaaaaggacaatgaaaaaaatttgaaaggggattgtgttacagtgtgttgctgaaaatttcggtatacattgattcggtgataatctttctagcaacaatttcata

SEQ ID NO: 90134 - DNA, 1573 bp, Zea Mays
tagatatgttggctgggatcattttatatctaaaagggaacagatgtaatctgaaaaaaccttttttttcttaatgcataaacgcaatgacacaggtctgcacattcaagaaaaacatagctagggagaaacctatgttaatgatgcttagtgggttgcccttgaataagatatataaatgtatgttgtagccttcattgggtgttattacagctattccttttcctttcttaagaaacacttttgataatcaaggaatagccacctttctaaaatgtaggtacatacctcagactacacaaggaaactcataatggtagattcaggaatcaggagccacctatgcttgctttccaatgttttaaattttttgaatacgctggagagctacatatcattgtattaaggtagaagataaaaaagggggttcttacaaaagtaaaactacacccccactccgaacattcgttgtcgaggcttggtgatggtttttcttacttggagccaaccaagtctccctgctaaaggcacgacaggcagtgctggagtgtctcagtctcaggctcttgtgaacaaagtttgcaattcccactattaggtagcccatgtctttgcaacctctccgacgtccaacaacgaccaagaagagccagccacatgaagtatttgcaattgtttggcgctcgcaccttccaaagttacttggcatcgaggattgccgtttgccccacaaaaaatgatttgtaggcactcaatgccgagctatatctatcaacatactcacttttgtgatcaatattcatattcattcaatattcaatattcaatgaccaacaactcaataattagttagtgatccgaaaaaataactatttagtgaatttttacatcgtttattaacaatgacgaatctagccaaaaatactgttggggtcattagggccagtttcattatatgctacactatttttatgactttagcagtgctttattaaaggatttacaaattttatcggggtcaactgaccccaataaaccccctagatttgcccatgtttattaagcgaaagcctaatagagatgcatagactcttagactaatgaatgaatatctgccttggttaggattagtggcactaaaaatatttcacggctaaactcaatagcggtgtttagtggagctaaagcgtcattagcggagcaatgggcaatattgcagtggcagaccttatgaaaaataaataaagagatccattttgtctttctaaccagaagcagtttgttcatggtaacatcatggcattttacactacaagacctactagaatatctagtagtagttgttagagtatattaggtaacaccggatatggatagtttaggattgattgtaatcccatgatagccttccttatctctaggagaggtgtcttgccctccaaaccatgtaaccttatataaacagtccgagggctcaaggaataatcatctcacacattatacacattctctccttcctttatggtatcacaagtttaggttttagatctaacaagcgtcttccgctgccccg

SEQ ID NO: 90135 - DNA, 964 bp, Zea Mays
tgctgaatcaaggatctttactggcttctcacggcactgaagatctttctgaatctgtattgcctcttcttcgatgtgactttctggtgcttgcaggcatttgcagagctgggacacttgaaacacattgtggatatcagacatggattctggtagatcaagacggtatgctgcgggtcctactctgccgatgatgggatagggaccgacgaatcgcggtgctagctttcctttcacttggaaccttctgacaccacgcatcggggagaccttgaggtagacgaagtctccttcctcaaatctgagttctcttcgcctgttgtccgtataactcttctaccgactctgagcttcaagtaatcttctgcggatcagggcaactttctcctcagcctctttaacaaaggcaggtccttctagtgccttttcccctacgttggaccacatgagaggggtctagcattttcgtccatacaatgcttcgaacggtgacatcttgatgctggcctgatggctgttgttatacgagaactccgcgtaaggcaaactggattcccaacttctatcgaatgttaacacacaggctcttaatagatcttcgaggaccttgttgaccctttctgtctgcccatctgtctgagggtgataggcgatgctgaagtctagcttggtgcccatagctttctgaaggcttgtccagaatttggaggtgaactgggttcctctgtctgacactatctttcttggaatgccatggagcctgactatctctttgagataaattcgggcaagggtggctcctccaaaggtagttttcatgggaatgaaatgggctaccttggtaaggcggtctattattacccagatagagtcattccctttttgtgtccggggtagtccggttacaaaatccatgcctatttcttcccacttccattcaggcactgggaggggttgcaatagg

SEQ ID NO: 90136 - DNA, 307 bp, Zea Mays
tgtacacagtaattctacagacaggagaagcacagatcttacgagcataaaaatagaaagcacagcggatttaaaattccacatcaaatggtgtgctccaagtgcttagaaacatcggcggtactcaatttataattcttgagtcataggaatcgccgtgcaattaagagggatccacgatggttaagtaagttatgcaatgagttaagttcaaaatcccttgaaaacatcttcgagaacatttttccagatcatgaatgcccttgagaaaaacaaattttacttcccacaaaaaactccacttttg

SEQ ID NO: 90137 - DNA, 395 bp, Zea Mays
agaaatcaaatgtaagtgatataaatgtaatcataatttatatggttgcataaacaaatctcacacgagatcaaagggactgaggttagataatcattgcatgatccaagaacagacaactacaaagaatctcaatgtgcatgagaacagatatgtccatgtagagaataaaacccttgttttgttttatcattaacacacgagatcacaattagataatcattaacacacgagataacaaatctcacacgagatcaaagggactgaagccattaattgaacttgttcacaattagcacgcaagactctaatgcagtagaagcagaagcaaacataagaccaccaaaaaatcaaagggagtagacagaaaacaaagtgtgaagcttgaatgatgc

SEQ ID NO: 90138 - DNA, 506 bp, Zea Mays
aaaagtacgagatagatcttcttatatgtattgccttccaagcatgagaaatatgaagaatcataattaaagggaataagtaactaatgaagcaattaatctatgcctcgttttggagattttatttgtgcattaaaactcaaacaaataagtgaaacaagcataaattttaaaaaaatctagttagaggattaaaatataggagcaaaggagtgaaaataatgggaaaaataaataattaaggcaaatagtatgaactatattcccatttagaattctattaaatttttgcaagactgagaaattcaaaaccagaatttgaatttagtttgaatctttgatttggggataaaataggaatttttaaaagaaaaagaaataagatgtttggtgggccgtcactcccccattcggcccacttttcttaacccatgaccatcccgcgccgacccacatcttgtttcctctgtgcctgccacgcgggcccgcctagccggccaccctgt

SEQ ID NO: 90139 - DNA, 568 bp, Zea Mays
tgagccatctaaatctatatgaattactccaatggcatcaagtcatgtctttaaatgttgtggtcttcaatatcacataacccttcacaacttgatgaacttgactcttgcaagcattctcttattcaccttcacttttggtacttcagtcctcttgaccttctcccttgattagtacctcgaggttcttccttgccttagtcctcggtctaccaaactatctacaagtcgtgttcattgattatgaacctattcaatgttcgctcttcttatttaccatcttcaacttaggatcactctcctcagcatgacttctcttgagctttattggttcttcgagtcaatgcaagtacttgcttcttctccctagctttggtacctcagttatcctagccttctccttttgctttagttctttgaagccccatttccttattgtcttcactttgtcaagccttccttaagtcatgacatcctgagtgtacattgaatattcttcttgtgatacccataatccatattttaactcagcttatatggaatatcacttttacctcatgtgttgaac

SEQ ID NO: 90140 - DNA, 540 bp, Zea Mays
gatgggtggtgtttttcctaacattttttatgggcagatgccgcaacactagtattatcctcagtatgttaaccccagtgctgtgccatttgctcaccccgtgtatttttactgatgcaggacggaggcatggagaacatatggctcatggattccaattgttcatcccacatgaccgaaagcaaaaaaatgattctctagcctcgaccccatgattggtaagaaatccatcacattcggggataagtcgagaggtaaggttgtcgctcgtggctccgtttgagtgaacgagagttttgtcctcaaggatattgctttggtttcaaatttgaatttcaatatgctttccgttttacaactccttgaggatgactatgaagtgtgctttaaaagggcttgtctcgggttttggatgcatatggggattttttgtcggatttccccttttggtcgagttttcagttgattttttatattattctggcccttcttgatatttgctagtaggatcctcttctttgatttggaagtggcatagga

SEQ ID NO: 90141 - DNA, 583 bp, Zea Mays
aatgtagacgacgaggtcggtggtcgcatagcatcagagaaggaggctgaaattgatggtgccttgaacgaaccgcttcatagtggtgagatatgttcctaggtgtcgtgcatacggaggcacaccagttgaatggtgtaggtgatatcgggccgggtgaagacaatgtactacagggccccgataagactccgatagcatgtgggatcaagcaccggggtcgtcgtcagaggaggccttgccctgagtgtccatcagagtcatacagggcttgcagtcagccatgcaagtgcgctcgaggatatcgacatgtactaatgctggtggagaaacatgccatggtgacaacattccaaggtgacccctaggaagtggtgcaactctcttaggtccttcaccgtgaacttttgctggcggaaggagatgatgcaccataggagctcgagggaggagaccttgagaacaatgtcgtcaacatatagaaggaagtatgccacgtccggaccacgacggaagacgaaaagggaggtgtccaccttggcctcgatgaaaccctacgagagcaagaaggtgtaaaaacgac

SEQ ID NO: 90142 - DNA, 625 bp, Zea Mays
caacgtggacgtccatggaaacagcagaaggggagcctgctccaacaccctcgggggctaggtcgcccccaacaccaccctcgggggctgagtcctctgtggcagccacctctaaggctaaagatcccccagccatgtccataggagccgggtgactcggatcaacgtcttcatgagctagaccgccctccaaggtcaacaaagcacgagagactacccaggttatttcttgcccagcaggatcacgatgcagaagaccatcatctggaacctctaaatagataatgggactgtcagcttcaggaggctctgatagaaggtcctcggggatgatctcttccaacgcctggtcaaaatcagatattgacaacccctggaggctgacaagcgctgacaaggcctgtatgggaatgtcgctgcctctgttgcgacggctattcttgcggatcagcggaatttcttcttcttcctcctcttcctcatcaagcataccgtcggcaacctgaacatcgtcacaaccttcggcattgtcctcgaggatagtgctcgtcaggccatcgctgaggaaaatgtggaggggccagcatcttcctccaagcatgacaaccgctggagtcaccttttc

SEQ ID NO: 90143 - DNA, 944 bp, Zea Mays
catcattcatctcttggcaagtctccatttgaagtgctttatggtcatttgccaacacaagtgggactggtcgctgctgaacagtgtgaagttccggaccttcaacagtttctggacgatagacaaaatgtgcttcgacaggttcgcatgcatctgcaatgagctcaagcacgaatgaaaaggcaggctgcagaactgaacgttccttttcagttggtgaccaagtgtttctaaaattgcagccatattgtcagtcgtcggtaaccgagaggcagaaccagaaactttcttttcggttctttggtccttatactatcagcaaatagatcaatctagtggcttatgaactggcgttaccagctgacaattctattcatcctgtctttcacgtttctcaactcaaggcagtcatcggatctcgtattccggtgagtcctgtgttacctgatttgtctcataatcttcaggtgccggttgctgtgcttgataccagactgaggcgtcaagcgagaaaggtccagaaccaattgctgattcaatggagcggatggcatccgacattagccatctgggaggaagaaagcgacatcaagcgatgttttccattcgcaccagcttggggacaagctggcgtttcaggaggggaaaatgtcagtgtaccggtggtaaaacagtcccaggcggatgaagacgcaagcgtcagcgcgggaggaagacgtgaagcgaagacaggcgcgcgcgctgatggactcagacggagccaacgggtgacacggcccaacgtccggctcttgggccgtgagtgggtgaagtgagtaggccagacgtgtgatacggaggggagaggaatataggcggcgactgagaggaggagaggacagactggcattttggacttgacccggctgcgtccggcgaaccgacggtgtgccgtcgtgtaacca

SEQ ID NO: 90144 - DNA, 518 bp, Zea Mays
tcttcttctactgttcttctgcggagaacctatacatcgcctggctcgccgcgtcctccaggaccggaggctcgacggatctgtaacccatcagcccgagggaacaaacggaaaacccggatgatcaggtcgaaacatagaaaatggggataaagcggaggcaagctcttcgacttaccaaagacacataaccctagtcagggctcatcgggacctgagtaaggatgtcataatcggccttacccactatgcccttgacccgcttggggaggtcgtcagtggtgagggtggccgatgacatctgagagctatccacctcggtctcgggcgtcatctcatacatgcgcaaccgttgctccaataacgacaacaccctccgacgatgaaaggcggcgacgactcgggcagcgataagaccatggtcgtggagtctccgtaaggcatctaggaggggctccagcttgagctggtacgcccacgcaatgccccaccgcctgttatcccctgtagcgtttatg

SEQ ID NO: 90145 - DNA, 487 bp, Zea Mays
gggttcttatgtgaaatgcgacggtgaaggggtatcgcggattctaaaccatccgatctaaaccaagggcccagattaaatagatctcacccgaatcggtaaggcatagcagtcgccggatctaatttcaaccgtcgagatttaatgaaccgggatcaccctacgtccgcacgatctgagatcgacgtctgtcattactcccggcaagggttacgcgataaccgatccgatccgcacgatcgtgatccaacgactgtcacttgcactactctccgtctaatcacgaccgatcatcacgacatccacggtcccgacaccttcttcctcctaggaacgtactcaccacggccaggaatgcccatggtgcgcaacggcaggtgccgcacgacacccggagactaccaggcttcagatcacggtttctatgcgtctagacaacatgagggagttgaacagagggcttttttttgttaccagggcacgaaca

SEQ ID NO: 90146 - DNA, 1317 bp, Zea Mays
ctcatgctagttgcatcgatcaactcccttgagttgattgtcctctttttttatggttagttcaatgaactagcctcatgcattaactttatgtagatcgctgggatcattatttttgtctgtactacatgaatatactctttgcgaccgatcgcatgaacttgctagatcccattttttgagactagtgtctcctttagctaaacatggaagctatttggcagaatgaacaccatgttgatgtccattgattgtgtcgattcttcatgggcatcttgttgtgtcctttattaccacaccatgagcttaggttggtgtggcggttccacatgttgatgacgtagagcatccatgatcatgttgaccttcctaggaaagcagatatacctctcctccacatgctctaggctctacagtcgttatacccagcgcttctacgattgtgagaggccatcggggcaccaccatggttggtgattgttgttgtgttgcgcctccttcctcactctctagaatatctactaggtggtggaacctctcgaattggctcccagtggcatgctggtgtgggcccaagccactaaaagaccaacactcagtattgatgacgacatgaactgacggacttgaggcagtcgtcgatggttggtgtctgatgcatccccttgctctaccaaaactataagaaggggtagtcctagtgcttacattatcagggcatatcatgttgatatcgttcttcctacgtcattgtcgtctcttgggatgagaatgttcttgcccttgtgattggcatcatgcatgtgggggcaagaactctaggccacctaggtgacaataatcactaagagtaatatgagcgtaaccagaccaagtcactcaactagtgtcacaagatgcaataaccctatgaactgcactatgggtgctccagtcccacccaaatgatgaactacaagataaaagtgagcggaatgtatttctctgatgaactcgttggacataccactagacacgtcttgcaagcattgagtcgatctgtgcaattttacaagatctctaagtgccatgtctaatgtggtctcctatgctacatcgaacacatctggggcactatagagcagaagtgcgcatttgacatgctgtcttagtgtcctatataggtctagtgggccatctggcgcctcactgaacatgtctagttcaccataaccagtgcacaccagacaccaatgcgtttggatgaaaattgtaaagtaaatacatgccgacttcgtacctagcatggtgtcatatttggtgcatcatgcaccaaac

SEQ ID NO: 90147 - DNA, 708 bp, Zea Mays
ctgggagggaatatcgctgcccctgtcgctgcctctatagtgagggctgcctctatagtgacggctgttcttgcggatcagtggaatttcttcttcttcttcctcttcatcctctttaaacacaccgctagcagcctgcacatcatcacaaccttcagcattgaccttggcaatggcatccactagaacatcaccaaggatcgacgcagaaggaccagcatcttgatcaaggcacgacagtcgccgaagtcgcctcttcttcttcttctcctcaataggtgtagtcgggcggttcactcggcatgaacgctttgggcgggcaccttcgggtttatggatcttcacatcctcgccaaactcttgtccagtcgtgatggccatcggctcggtacaggtagagtcagacgattccccagctagcaagctaagcacgacgtccatctcaacatcatcggtgctagctggcatctcaaaatgagtttggctctcagcctcaggaagactccgaagtggggcaatcaaggcttcaatatccttaggggagggtcacactctatggcccgggctaccatcacgagcaggagagttggagacaaattcagagaatagcctatttggaggcaggttccacgcagagtaagctaagggagcaccagcattcaagactctgcccctcagaatcatatccaatcggctcagcaagtcctc

SEQ ID NO: 90148 - DNA, 823 bp, Zea Mays
gaaatttgctcctcttaaaagcaactatttttgtgtatgtgaatttgcatatttaaaatatgatacttaaatgagataataataaatatttatacactttgcatcatgttggggtttatttgattgtgcatttaaaaataataataataggaatatacaaatggtgaaataggtatttaaacctaaatttggaaagggaaggagaaaagaaaggagaaaagaaggaaaagaatatgcactataatggaaaatatacgcgaataattatattccttcatgttgacactcttatttgtgcacttaatatgtgtgtgaaactcatcaacaaatttgaattttaaaaccaaagttggaaattcggaaagaattgcaaaattgaaaaggaaaagaaaaagataaagaaaaccaacgcttgggccatttcccctaaactagtcggcccacttctcaaacccgcgtggcccattattcctacgcggcccgtactcaaccaaccccgcgctggcccatcctgggaactcactccctcccctagatcgcaaaaatgccttggtctgtctatgctcgatgggccccactggtcaggtgcatctcccaactctgcatccggctatggaatcggatttctggcaacaaacctcgcgtgggcgccgatttccttggtcgtcgcggaatcctctcaggctcgtgctcatctcgccatgggacagcgtgacggaagaggccaccgctgtggtcttgatttgcccgcggttgaccatggcgcggagtcctggtgcagtgcagcaattagccccagcccactagcctcctctggcgggac

SEQ ID NO: 90149 - DNA, 445 bp, Zea Mays
gcgttcagcggtatacatgcagcacacgttactttcatcctgattcctgactcccgtcccgacggctgctctgatgaaaatgacgcgtgaattaatccggcaggagggttcgggagctacatgttcgcgatgagtgagaggattagcgagcaatcgggggagacatgggatgcgcacaacatcaagaaccccggtctgggctggatgatcggtttcctcttcatcgtcagcttcctcggcctcttctccgtcgtgcctctcaggaaggtacgaacgcacgcgcacccacaaactctgtgtccgacgtttattcatcacatcatgatatgatgccggccggctgtgttcagataatgatcatcgactacaagctcatctacccgagcggcaccgcgactgcccacctcatcaacagcttccacactccccagggcgccaagcttgc

SEQ ID NO: 90150 - DNA, 820 bp, Zea Mays
ctttgaaacctttttttattgatgatatatttctcgatttacagaatacatcgtcgttccaagagcttctgggatgtagctaggggtaaaacttcctgaggtgttctatgttccatgagttcccaatttccgtgccgtccatctgagtgagacgatatgatcccggccgagtgacttctgctactatgaatggtccttcccatagaggtgacaatttatgttgtccctcccccgttagaattcggcggaggatgagatctcccactgcgaaggatcgatgtcgtatggccttatcatgatagcgcctcagagtttgctgataccgcgctgattgaatcaccgtattcagtcgctcttcttcaagtatatcaacatcctccagcctagtagcttcagcttctgctatgttttcaaagattaacctcggtgccccaaacttgagatcagcaggtagcactgccttcgaacgataaaccataaagaagggagtatttccatgtagagctcggctaggttgagttctcaggctccaaaccacatacgacagctctctgatccactttcctgcgaacttctcgtttttgtcgaagactttctttctgagtgcttctaatatcatcctgttggccctttctacttgcccgttggctcttgggtgcgccaccgaggcatatttgatctgaatgctcttttgctcgcagaaatcgaagaactctgaactagtgaagttggatcctaggtcagttatgatgctattcggtatcctgaacctgaatattatgtcttgtatgaattccactgccttagctgaagttagaga

SEQ ID NO: 90151 - DNA, 337 bp, Zea Mays
gcaatgcctgaggccgggggctggtgaacgaattggagttcctagtgtcttctagttttaaacagttcaagtgtgtgttactgtgtttaagtgcagaattgagttatgagtgcgttgagggagaggtgctaattaccagttctatccttagtaacgtcaatgcaactgttgctgctgacatttcaacttagaggtgtcaatgagacccgatactcgttaaccttacggttagagtatgaaaagattttaatcctcgtaggtgcaaatttgggagaaaatctttttccattgggtatggtgggtatgggtatgagaaaccagaatccgaatccgatta

SEQ ID NO: 90152 - DNA, 538 bp, Zea Mays
ccactactgccagatcctccctcgcacccgttcactgacgaataggccctggtggctagttccctttcctttcccgtgaccgctcgcgcgccttgatcactcattgactcgtgggaccgggatgtcggtcgtcctcctcccagcgacgtggtggggatgatgcagctggggatctcggagttctgttgcaatagactccaagtccacctccctctcctcggctggtgcgttactcccatcggtataagtccccaggctctcctcctctcgcccgggtgcgcaggccgaaccagcacatgccaccatgatccatgttcgccatggtggagagagaaatgatgtcgctgttatgccgttgtgctggcagaacagattgagagggagagggaaaaccacatgtcgcgccgtcgctcgggttaacttagtaccgtgaggaatgctttcgttgactgaaccgtgcgtgtggatggccgggaacctcacgccgttgaggagcttcgccgttgtgcaatggcatgccgtggctagggtacctgag

SEQ ID NO: 90153 - DNA, 386 bp, Zea Mays
ggtaaaatactcgacggcgacgaaggtgaacttgaggttcccttgggccatgggtagtggcccgacaatgtccagcccccagcgttgaagtggccatgtgtgggcaattagctttgtgaattgcgaagggttgcccgatcgaggagaaaacttctggcaggatttgcatgaccttgtgactcgattcgcggtgcagattatagcgggccagtagaacccttgacggatcaccttggcagcgagggccctaggccccgagtgagagccacaagttccgctgtggacttcgcgcagaatctggatgccttctgtttcggtgacgcatttgagcatgggttgactgacccccttcttgtatagctggccctcaatgattgcgaagtccc

SEQ ID NO: 90154 - DNA, 551 bp, Zea Mays
acctgcctctgcagtcacgcgatctgtgccgtttgttgtggatccaaccgttaacagctctcaggctctccatttctctgtaagctggatgttggcccaataaatttgacccactcaatcactagcaaggaggcaacagaaggcgtttggcgaaagtcacgaacaggtggtggacctccggccactccgaccggcgcagctaacaggccaggaatgccattagaagcgatcttcagagtacaacaattggcacagtcaaaagagttttatttacggcaacagagcacttgtggcaacaaacaaccaaacatttttgcatcaccagattctagcaatcaaagagcagtacttaacatatatgggttcacttgaattataaaagcaaaagctattccaaccaagttctggtactagaattcagcattcaggtggcaacaaagcatcaacagcaacagagaactcagctatgctctccaccaagctttgttattagaattcagcatcaagatcgttactgactccactctgcaaaattaaaaaaacaagtgaac

SEQ ID NO: 90155 - DNA, 880 bp, Zea Mays
cttcgacttcgctcctcttcaacttttctgaatgaccgtgtaattagggggaattgcgttcgatctgtgtcgtttcgtctccctatcggtactctgatctggatctgtaactgggatgagatactgttttttgacgatgcctggaggtggatggagcatttgatgtttatgtggcggtggatgttggttggtaagatgccttagatgacctggttagctctacatgctggtgctaggtttggagctgtccctacaacctttggtgaccatgaaagtgctgataagtgtcttctctgtatgatggtatgtcatagaagtgtcttgtaaaaactcagacctgcgtgggctaacagtgtcttgcgtgtgtgtgtgttcgctgttgcctggtcccaaaaaggcttttgaattggggaatatatgcaaagggtgtctagatggtagtggtggtggtggtgtcgcctgttcagcaaagctgaggtcaatctcggaattccaatatctgtaaagttcgaaccaaaggtggccctaaaacactaggcaattctagatgcctacgctcttattttagcaactgcaaggatgatgagacattgtgttgggctacaaaatgtgcattaggactgtcatattgtctggagtagcatactttgaggctttcaaaatgttgtgggattagttaaaaaaagttgtcccactggttttaactttggtgcacttgctggttttgttcattttcatctcgacacacaaaagtgcattgcacaatgagctcttaacaattccagtcaccaataaagcaggtagagtaaaattttctatgacatattgctgtttgtgttcttggaagcaccaatggcactagttgttagtattatagttt

SEQ ID NO: 90156 - DNA, 516 bp, Zea Mays
gcacaatgcaaacccagcagcagcactacaactaccaactccagctttccccttccttcccataaacccacccccaaagaaagctgctaaaacctaaagcgtggaaagttgcatcttctcactctcgtttggtgctgtctctgtagcagctccacaaaagccaacaccaaagaccccttcttcccaccaccaccctccacccctccttaataattccttctcccagcacaacctgagttgtaattattatactagtactcgtcagtattcaccttcgtttattgtttgttcccccatctggttgttgatctcttcttctcccctcgggcgctctgcggctatatatatacgtccaatccaatcccctctccattcggtctccatcgcctgatcaaactagctagaggtggtgggggggaaaaggaacaagttttctggctcttcttcttgttccctagtccctcctccgtactattcttagcgctagctgctcttcaccgagatcgcctcgccgtc

SEQ ID NO: 90157 - DNA, 488 bp, Zea Mays
tcatcgatctagcgaccataacatggttccttttgaaccgtgtgagaggatatggaaaacctgggcgcctccaaaatgtcggttttttctgtggttagttgctcataaaagttgttggatagctgatcgacttgcaaaaagaggattggatcaccctaacttgaacaagagagtgaaacaatagaccatttactggtctcttgtgttttctcaagggagtgtcggttccttttgttgagacaatttggactgcatacactgtgccctcaaccggaaaatggtagtttccttgactggtggagaaaaataagtgaaatgtcaactggacaaatgaaaatggggattaactcccttgttttgcttggtgcttggacctgatgcaaacaccgaaaccagtgtgtcgtggaggcaggttggagaagagcgaaggttgtgggagatggcaggagacctagcagctaacctccctcccggctaatttctgttta

SEQ ID NO: 90158 - DNA, 496 bp, Zea Mays
cgaggaattattgcggcagagatggaaagggaagctcggagagtttcactgacccaaggggatgatggaacatgcacacaacaaacaaacaaccccccggaaagccctggccacggcagggtggggaaactggacggtgtggtcacaggctacaggaagacggcgcgcgatagacctgggcaaacaactggggtgacatgggaggattaacgtagacgtgggaacatgaaacacaacaacacacggtgagctgggttagacccggggatagaggtagggctttactgaaccaagattgtggcaatatggagcaggcaaacagacgccggtcgagcatgatcagaccacgcaagacaagggccctgaggtgtcaatggttgcatgagcttggctacgtggctttactcacccatcaccacgctggttcaaagggacagcggggcagtgaaccaggtccggcaatgggtaaggattttatcggataactctgaattcc

SEQ ID NO: 90159 - DNA, 677 bp, Zea Mays
gttcaatgcaattggttggaccgatgagcttcaagggcacacaggaatcctagaacaagagcgaggagaacatgatcggacctgtggagcgctgaccgcgacgagctcacacacacagtgttcttgaccgatttgggggaaatcccaaattggtgagctctggtggatgatttgaggcacgagttggtgtattggctgtgtgactacctagcggagccaatggaacgctcaatttatagggcctgagggtgatggcccatgaatttgagatggcgcggtggcggccggagagaggggagagcactgtcgccaggaattggtggctttcaccgtggcgagctccccggcgatcaacggacatgcgtaatacgagttactgcgatgtggtaaggcacctaagcacgtggcgcgcggtggataggcggccaactcctgcgatcttatctgaaccggccgtgagtcaggcggacacggtggccggggttgaacagtggcctaagttcatcctcaaggcgatatttactaccccgagcaactatcagtactccgttgagcacgaatcgcagcgcctagcgcgaacccgagcgcatggtcaccggcggagaggttcattgaaccagcagatcttttgctattgtaccatcaagaactgcttcagtcgttctgacagagcaaat

SEQ ID NO: 90160 - DNA, 330 bp, Zea Mays
aatacacaaactcgtgcctcaaatcgtccaacagagctcgccaattcgagatttcccccaaatcggtccagagcaccacacaaagtgacctcgccgtggccagcgtgctaccagtctgttcatgtccggtgctctcttgtttcagtacccttatgtgcccttgatacttctcgacccgaccgattaagctagaacccattagatcaccgggaacactttgaattgtccccgggttgcgcggtcaccgtgagtagagaagttgggagctcaaatcgtgcaattgatcgaggggaaacgtttgttagatgttgaattaggtatcagccaagt

SEQ ID NO: 90161 - DNA, 464 bp, Zea Mays
ggactagttcggtttgctggggaagaggtgattccaaaaccaaaagatgacaaagtcgtagtcttcaaaagcttcttcagggcaggacttcggttccccctatacgagatgatcggtgaggttctgaagaagttcgaaatttaccttcatcagctaaccccaatgccatagttagacttagtgtgtacatctggctctccgaagccaagtgaagagtgccaatgctgaagggttttatcgggtgcacgaactccattatcagacaaaggctagagcagatggactacacaagaactttggatgctacaacttcgcatatcgaaaggacaccaaggctcctgtgattggttaccgcactaagtggccaacccgctcgacgaatgaatggttttacgtgaaggctcacaaaaacaagagggagaagcttatgggtatggtgatgagtcccttaagattgagcttcg

SEQ ID NO: 90162 - DNA, 538 bp, Zea Mays
tacatattaagatatttttaccattttcagcaatttatagtttagagctttgttaggccatgtacacgtaggttctcttttgtgagtgtatatttggattttggaattaggtagtttgggataacagtggacgtagctttcacatcttttagtgcatggtatgctgtgatcatacgcagtagtgattgattttggcggaaagttatttatggctttgattttttttcttggaatgaacttggtctgccatctttcttacagtgcactgatatggttcttaagaaatgacagaaataatgcaaggaagaaaacgaaaaaatgaagagggtatatacgcgaagacatgagccaaaaactatgctccgtttggatgtcgatatctgagcacgtgtaattaaattggattcattatcaaagcaactattctattgtttggatgacgttatattagagtttgaaattgtgtggtctaattccacgcaatagggatgccattttgtattggagagggaggtttcagttagagtccaataccatg

SEQ ID NO: 90163 - DNA, 1105 bp, Zea Mays
taatgacaaagcgaatacacatctgcgtccatggatgaagcatgtgagctatgcagacttgagtttgtttagtagtttggggaccaaaatagtgggcacctaagtttacgactttggaccacaaaactacgaaagaacatgaagtgagaaacaatttggtagcatgtggagacacctctgagttgcccttgtatggtaattggctaggttagacagtagggggttactaaaataagtaatgatgacactataaacaagagtagtggtttcccaatacaataacaccattcattttctagggctagctaagtacgcgggtatgtagcaagaaataagctagaatatggctcaaggactgtctaacattgtgttacttagtgggttcgcccactaagagcatattaccccaccaaccctagttatacaatttctccctctagccttcccacactttcgcccttgcctgacgctattctagcacccctcttagatctcccttctcgccatccattgtccctcactgactcattgtcttcctctctttttatatccccttcatcgtgtaccgcaaggccccactctcgtcctctcatttcccttcatctcctcttctataggcatggtcacatgagatagacgttgaggatgacgactatgttatgcaccatgccactcactatcaagctctgtagacttcatggctctataactacttgatatctgaggcttaaagccgaagacatgctccatccgtccaacgccatccctctctaagatccaaactgctaaagctacgagccacatagatctagtcctcacctccgcaactctatgcagatttagtctactgttactacaacggtgaaccattgacgtcctccacactttaggtttggtgcttcttcaccaagatgttaggtaaattcctaatgatggaagccactctaccatgcccgacactagccaactaggcaaaattcaacatggaaaactgaccaacattctcgtgcttggactaagggtcaagctcatgggtggacacaacacagttcataagaaacatcctgttgtacttaggctatagtgtatgtaggaaacgggtgac

SEQ ID NO: 90164 - DNA, 761 bp, Zea Mays
cttaaatcgctctaaatatttatattatattgagcttttgaactcacgctgagcgattaaattgtatagtgggtactcggacacgccgatcaggctgcgttattaaccggctgagttatggcatcagctatgcattggttgcgccctggcaacacgacgcagtatttgtgtcgtacgaacttggctacgtcatgtgattgctatgtagcactctcgtttattcggacagctcccgttgagtcgacccgccatcactgagtcgcgtatttttcgcatgccctgtaggcactgtctgtctgccgtgatcattgagccacaattgcgcctattgcgcacgttgcgtggatttatcgtgtaccccaattaccgagccataattgtgcctgttgcgcttattacgaaggcttgctatactgtcgtagccctgatggccgcacacgcgttgacaccagatacgctagagcttgtactcgcgtggattgtggtgggttgttcaaggtcctaaagtcacattatgtgcaaccttcgtaaacaattttgttttcactttatattttgtttgattgtgttgtgtggcatcatatatttatttatatcgccaagtggccataacaactatattaaatctggaaaattaaatcaaaatacaatgaaacacagataagttaaatctctgctctctcctcgtgcataaagttttacccgaagtaacctgaagaaattcaatattaatgcatgaaagcctttttggcacagaaaac

SEQ ID NO: 90165 - DNA, 921 bp, Zea Mays
tagcgaagcccgcctgctaggaccttccctcgcttgttgtctaggtgagatcttcaccataacctttggagtctttgatggaccaggtgaaagttgcctagagggtctcaataaacaaaacctgaattttaactcaaacaacaaaagttgatataatatatataattcttaaatgttagaacaagcggggttatcccggaataaatccaagtctaatacttgtgatatgttgctaataaatataagtatggaattgaacttagtaacaatgttatatgtgaaggaagagcggtgtgagtatgaacttagggaggaatgggcaagccaaatcacaaaatgaaagcacaaagaggcacaacaatttatttactggagttcggtttcacaaagaaacctacatctccgttgaggagtcactaaggattaagtctatttcaaccctttcctcactcaagtgattgccaagatcaaacttgagttatctttctcttagctctagtgagatagtctccacaaggctctctgcagcttacaggttattgcctactttacaatctaaaggggggcttaactccaagaaattaagatcacaacacactccacacttcaactcaacacaagttctcaaccacttttctcacaatgaatggttatcactaagctcacaactcaatttgaggcacttggggaacttggatcagctagaggtgttgctctagcttttatgctttgtttctcagctcttgcatattgtatcaattggttggagtcatgacactctacgtcaagtatccattctgaaaagatgtcaactatcaagtagcgcacactagacacaccacgtaagtcgattattagatctttgcttccaactgttgggtgtactatttgtttggtggcacaccggacatgtccagtgtg

SEQ ID NO: 90166 - DNA, 524 bp, Zea Mays
ttacaattcgtgtatctaatctaagtataacatttggagaatcgagctggcaactgcgagtttgtcagtaagaagtttctcgggcaactttaacttatgctacaattggcaaatcagttgacaagaaaatagcctcttctcagtttgaaccaaatagtagtagttgcacagtgcatgatcgtatctgttactttgataggagcgttatgcacatagtaccacacagtactggtgagcaaatgatcttgtttaatgttttctttacttctaggcaacgaatactatgatacgaaatatagagcatatggccagagacaacaatatacttctcattattttatacataattcggttatggttatctgttcatgtctccgctaacgaagggatccaaaactatccctcttgttaacctatgaactcagtgcctcagtatgtgtgcactttcgagcgatatacgacctgttactcttcaaagacccatgtactttagaattcagatagtaatcactctgcaaaacagt

SEQ ID NO: 90167 - DNA, 385 bp, Zea Mays
ggcatctgtgcccacttactccaactcggtgaatggccccaagagtgccctagcacccacctccaaggcacgttcctccaacagccaacagagcaagacctagtatcatggcagggcacgcgtaaccacgtcgacgcaagaagctcagcaagccccaggagtagtgctcggtgagttcctagttgaatttactcccgctgctatactttttgattcaggagcatctcattcattcatagccaccaatttcgtggaaaagcatggcattcccactgcacacctagaaattcccttggtcacttgaaccccagggtcagaccttctatgccatctcaaatgctcccaagtcaagattcttttaagtggggtagtgttcttggcagac

SEQ ID NO: 90168 - DNA, 929 bp, Zea Mays
tgaccatcaccgtagccttcgaagagtaggtgttcatagtcacgaccagcttccctcgtgggttcttccgttcatgttatccgtctcgctggtctgcctctagcaaatactgaggcggggccgccctgcccaatgcttttcctaggttttgatcatgaaggtccctggttacattgtcctgagaccccttgcccgtcgagggtgccccaacaaagaaagagcggtacgacgttgtgtttcgccaaaaacccctacaatgaaaggcaacgaaaattcgaagcacttaatttcgaaagataaaagagtgacatagctagttttgcgatgggggttcccgcttgttactctgccgagtttgttgttcatttgtcttgtcttgtttggctcctagcacgctttctatcctgaaagtcactaagtgaaaacgataaaaagaagggtgagaagagggaaagaagggaaaagaaagagtagggactttgccgaggttctctccctaattaccatgttttgcatcgagtgcagttccaaaagcgtgctttattcataactgtttgagggttttagaatcaaggtacggatccgctccggtctggcatctaccatggactgtcgtcgaaagcattacatccaacgatcctctcgtgttcaaccaagcgtagtgccctactttgcttgtcttgccgacagggcgcaacaactaggcagtctttgttttccttaccactggagggctcttcttcgtcgctctcagggggactcaggtccgagtttgagaccgtgaaactgcatcgaagatgaagtccccaccgctggcgaccatccatatgaactccaagttgtttgaggtggggagatggccgcggtccactagtgcagcaatcaccgccagggcgtggcacagctgaggtgcgaaggcgtcgggttgt

SEQ ID NO: 90169 - DNA, 560 bp, Zea Mays
cgttattacttagggcgtcagccattaatgttgcgccaggtggagcaggggcggaggacctaatgtggcgaggtatggcccacgccataccttagcctagcccattagcatcactaggtcgaagacctttggtctttcttcgcgtctgacatctgtcttgcttctttgttgcgccgtcgctcgcaaacagacacagttgctcgcttctctgtcacctgtctggcttcttggttgcgccgatgctcgcacaggcaggtgcaattgctcgcttccctgtcgtcggctatcggttgtcgctcgctcgttttgcctccgcacctctaaggatagccgctcacgtcttctaatctttgtgctcgcctcgaccctgttctacgctcacctttatctgctgccgcctcggtcgctcacctctgcttcgccgccgcaaaccgcgggcgtcgaccgccgagcgaaggaggaagacaccgttcaatcataaacagtagtttgttccctaattaggtaatcccaaatcgaaaaatccctagctagttgacttaatctcatgtttattattt

SEQ ID NO: 90170 - DNA, 632 bp, Zea Mays
gcgccgggttgttgaatggctgggcgccggtaatggcgccatcgttggggctgggcggcggcgccgcggtccggtaagggctgatttggtgacccggatcccaagaggattggaggggtttgagggggaaattagtttattaattgggaaggatataggagagaatcgcgtggggcgttgataggacgatgtgtggctgtgatcagcttgagataccggatcagcttggatagatcctaaccgtccgatcggtgattagcggaggggatttgagcggggccatacggttctgggttagatttcaaccatcaatcgcagatctggtggaccaaagcacattgcggtctgtggcctgttatgggtcgttgatcttgtatccagtgaccgtgatactcgctatggtcttttaaatggtgatcgcttgatcaagatccaaccgctgataccggataccggtttgattgtgctcggatctaatcctggccctcggggcgtgatccaatggctttgatccgcccataccccttcggcgccgcaacattgctaaaacacccctggagttttagaaaatcaacccgtgctcctgtcttagtcaagaatcatcacaaataggtcctttcctttgtaaaaac

SEQ ID NO: 90171 - DNA, 419 bp, Zea Mays
gatactaaataccatgatttgaaatgttgttgtattgtttggagtgatgtacaaaatactacagttatgtcatgacgttttaaaatcatagtattctagaaccatagttttgaaatactttacttccaaacatgtccttagtagcatcataaaaatgtgtacttcaatcgagcatacttcgcacatgagggggcattggaagttggtgaaatttgagtatacttatctcgttttcttgccatagttcatttcaatctcatagtcaattcgccttatctacaccactaattgtccagctccaactaaccatgaacgatacctatctaggtaataaaaatatccagaaatgtcaaaccattttcacgatttagagcaactcagcttttctatacctccctaattgctaggaatgtatattt

SEQ ID NO: 90172 - DNA, 312 bp, Zea Mays
tgcagatctaatctatccaaccggtacgccccgtttaatcagggccatccgttcctagatctatgactccgctcagttttccccaccccgagcttgaacacggcggcgccgccgtgcttctacgacggagaagtccggcgaggtcccccccactaggggctacggtgctccgattcactatggacatgtgtatgacgttcgtataatcgcggtggaggtagtcgagggacataccgaggggttggagcgatggcgaggacagaccacgtggtgtcgcggctgccatggcggagaagcaccgcgacgagaaat

SEQ ID NO: 90173 - DNA, 1231 bp, Zea Mays
gggatgttagaacaagcgacggagaaacttgaactgacctgagttgagctagccgcggtgagggtgttcttgtggtgtttttgagcagattgggggaagttcaaaattcgagctcactggtgatcgactgggagcaatactgggtggtgtggtgcatgataatgttgtggagctgacggtggcttcaatttatagggagcgagagcggtggccaggaattggaacgatgacgcgcggcggtcggaagaagggggagctcactgggcagtgaattcgtgtcctacgccgtggcagtcactccagcgatcaacggggagctaaagtaagtcacggcgatgtggtggagatgcttagacatgcggcacaaggccggaaagcgacggtcaccggcgtgcttatcgggttccaccacgacaaactctgtacggtggtcggatttgtttaccggccggacttatccacggcgacgtgactctgagcgtcatttgatcaacccgagcatgaatcaagacgccggcaacacgaatcgcggcggagaggtcgtcggcggtgagactgctgcgctggcgatctgatccccaagtctggcactgtaccatggtgaattgcattcagtcggtctgacagagtaacttcagggcaaattttctctagatttcgcatgacaactttatcatccctctgcactaaagttgtagagctataaacttgctataattttgctatagcagcagtagccaaattcctattgaatcaagcttgaattcatgcccaaagtctttgtaactacactgtcagtctgaaattcagacttcaacagcatgacaacccatctttgggtgaaattttctccactttcttctcaataaatatgcttacactcttaagcaaagttgttctcctttcatagggctacaaaattgttgtggtgacctagggcaaaaaccttataatttgaaagttacaaagctccaaagttgagcctatatcactaaatttcagacttaggtgaatagggtttaagtggtgctttttttgcaaatagacccaaaacttagggtttaacttgcaaatccacatatttgtgatccatatgacttaggacactttattatcatggtttttgcactttagtccaaaagtgcactgatttttcacttagccccctagggtttaggtttagggttttctagggtccttattagggtttttggtatttcaagagtgtgaa

SEQ ID NO: 90174 - DNA, 370 bp, Zea Mays
gtgaaatctgaaacctttgaactattgttctgtctgtgaaacatgttaagtttttatgtgtaacctgtaaactaatgtgaaatctgaaacatgtactatattagtcactaacctgtcaacttgtgcaaacactggttccccttggctggacagatttcaaactgaatatgaggttgtctctatcagcagcaagggaagaaaacttgacggttaatcctggaagatggcgagtgctctatcttggagacttggaagatggcgaatcttggaagaacaatcaaaaggatggtaagattaatggttttagcccaaacattaggccaagttatgttcctgcacctagatggatggatcacggatcataatatcc

SEQ ID NO: 90175 - DNA, 687 bp, Zea Mays
aatgccctcacggtgaaaaacaagtacccgttgccaataattgatgaacttttggatgagcttcagggtgctttgtggtttacaagtttggacttgagttcgggatatcatcaaattcaaatggatcctcaggatgttcacaaaacagcttttcaaactcacaatggtcactatgagtataaagtgatgccttatggtgtcaccgggggtccagcaactttccaactagccatgaattcagtattgtctccatttctcagaaaatgtgtggtcgtgttcatagacgacatcttgatttacagctcaaattggactacacacttacatcaactccgagcagtgtttgctacattggaccaacatcattttaaagtgaacctctcaaagtgttcttttgctaaaacacaacttcattacctaggtcatgtgattagccaaaatggggtggctacagatcctggaaaagtgtcggtcatcaaatcatggccatctcctcgatcagccaaagagatacgaagctttctgggtctagcgggttactacaggaagtttgtagctaacttcggaattctcagccgaccactgaccaatctgctaaaaaagggacagctgtttgtatggcattctgaacatgaacaagcttttaatgccttgaaacaagcgctgatcaacgcaccggtgctcgct

SEQ ID NO: 90176 - DNA, 344 bp, Zea Mays
ttcttattggagatggatgatgacatggaggaagacgcaacagcggaggacctgggcatttcccttcacgccctcacgggcattgacatcagtagcaccatgaagctcaggtcaggaacaaggatctgacgttggtggcattggtggacacaggctctacccacacattcatccgggaagctgtggccacccaactgggcctccaagtcgcactaagaccgggcctctccatcaaggcagctaacagggacaacgtcgccagcagtgggatatatcccaagctccgagtcactattgccgaggagaccttcaacatcacctgctacgtcctccctctggccagc

SEQ ID NO: 90177 - DNA, 657 bp, Zea Mays
cgtagatatacatattgactgtctacttctatcatgttcataacaggaaatcactgtctaacataagcttgagtggcggaactctaagatacagcacacaattgtggtggacaattgcagtggaactctaagccagggcacataataaaggctattatgttcatatgttcagtgaaatctacagtttgtcattgtgtaactggtagttttcatatgtgaagcttgccatatttcacgcaagaagtatagtttcagttagtgagacatgccttttctagcagttttttaggctccttggtcgtcgaggagagagcaagcaacgcttcattgctggtctgaattatagtttctgtaaacacggtgcactcgaccacgtaaactcaaaaaatgggaggtagaagtctacaaaggtgctaactgaccaacctgctgaaaggcacaagtgacctgctgaagactcccgcaacagtaacctacaaaagaatgtagcagacattacaacaagcaactggtaacagtttgtgatgagctcatgtataaaaaagagaataaaaaagacagtttcagaatcgctggtgttgtttagtggcacgcacgcttcattccgtcatttgctaacacacacttgatccattcaccaaaaatattcagcaccaa

SEQ ID NO: 90178 - DNA, 406 bp, Zea Mays
tattgctcgatgctctgaccgggagaaggtgctttatgcttctggttgtcttattggacccgctgttgactggtgggattcttatactgctacccatgatgccgctaacactatcacctgggcagaattcacgacacagttcagaaattatcacattcctgatgggctgatgaaggttaagaagaaggagtttctgtctctaaagcaaggcaatatgtcagtaagcgagtatcatgacaaattcattgaacaatcaagatatgctccagatgaagtggcggatgatgagagaaagcaagagcactttatagagggactcaatgggccactatagtatgcactggttgctcacacgttttcatcatttcagaggctcttatacaaagctttagctattgaacacaag

SEQ ID NO: 90179 - DNA, 746 bp, Zea Mays
aaactctcaaccacttaaaatcagaacccaatttctaagttatgcttcacacaaccatcttccacgtataggcacttatgctgtctccaacagctcccctatatcatcatcttttacatgattcatccaaggcaatcttattatttccccacatatccttacatgaagtgcccaacccaatacctataggggcaaaattatctctagagttttgttgatgcatcgactggacccaatgtctttgtgacttcattttgtcttgatgcaagctttgcaatgacccaacatatcacgtcacttgcttcctaggtcttaatcccaaactagttaaacccacaacctatcgctagttattttgggacttaaaccatcaaacactccatgcttagttttgagaaccaaagcagcaaaccctcttgcacacccccacaaaaagcatgtctcacatatacaatgtccgttcaacctcaactaatgtttgacaccttcgtcttcctccttggcttgattgacaccatctttatcatccagaatgtagacttgtgcctagtctttgtaaagtgccaccacaatattatactcatccttgacttggatagcaccatcttcattatcctcttcactccatgtacgttttctctacttctaagtgggatcatcagtcttattcagtccactcgtcctaagccacctcacttgcccttcactactttgatccataggcgtgaaccatacttgacattcac

SEQ ID NO: 90180 - DNA, 527 bp, Zea Mays
gcagtataagatatcgaagataatgacgtggtttggtaccagtttaaaattaatagaataaggcaaattaaaaacgtcacctaattatttcgctcttgctcgagcgatctttacgaactctgtagcgataacattaagggtggactttttataataaatcgaacttgaactaaatgaaaccaaaacaacggttagccgatatcgctttaatccggtctatttgcacaaaatctaatccgacaactggatatatacacatggttttgtaaagaaaatagagaagaaaagtcccaattctcattttcctactcattccttatcccatcgcagaattgggtcattgtgatctctatctctattgttatcctctccagtctccacatactagttttctaccttgttctagcagccatatctctatacgttgctattctcattccaggaaatgctgctcacgtcatctcctctcagcccaacgccttggcctctccttcccagccgtggacgtcgtcctctgtccctcttcc

SEQ ID NO: 90181 - DNA, 729 bp, Zea Mays
gagctcaagccaaaagggtatgcatgctctaatctgggccgcacatctataacacaacggctaggggacatcttcccccacccgactccatgcatcggcagcgctgccccttcttgccatggcccatcgccggagtgaaggcactcgacaccctggtgctcgaatccacgaatgaacgggcgctacgtgatgtacgggtgatatagaatgtcatggatgtggtcttacccgatcccatgacacagagagctccacccatggcgcacgacgacttcttggtgactgggttactccgatgagcgattaccggcttcccgcccatcaatcttgcctgatatcatttcagacttcttccacgcagcacagagaagcatctcgtcgcactcccgatgcttccacgcgggtgtagccgagccccacccgcggcggcttcacgacatggtggatgctccagcgagcaattccattccaccaaggggcttcacgtgtgattacaactttcgacgaccttcacgggccctagagaagccccacgatgacttgccccaggtgaaccggctgctccctttttctttcgtcccagcggcgaactttcttgactctccagtcctcggaggtgcaccctgcgcctactctatcttggctacctctaatttgatgctattgtcaagggggtgcaatttcctgggtatataaataccggttggttaggatctctagccgagaact

SEQ ID NO: 90182 - DNA, 893 bp, Zea Mays
ttcatatcatctcctcctcctacaaagcttgtcaagcacattttggtacccttcgcttgatgggtccgccaaggttagtaaacaaagatctaggaacccaaaagtcctttgtgttagcgcttggtaacttcattacctttctagcacaagttgcatttttgggttgcctagttacatgagaattaattgacaagataggagtggagttgttaccaatgggacaatccttgcattgatgtccctttttccggcatatgtagcaaagtcgatcttcaatccttgaagactttttctttccttgtttgttgcttgctacatggttagtaaatattttcttttctaaccctatgcctttttgtttcaaatggtgacaagatttgactaagtgtcccttctttgagcatttaaaacaacgtctatcatccttgttaataatcaagccatttttaatgtagggacatgacctaatcaagtgtccctcttcaaagcattcactacacttcttacttttcttaatgtgaagtgtggcttgatcattaccttggatgttaccttgtatggagacatggttgaggcttttggaagaggtattgattttcttcttttgcattttcctcttggcaatcctcaagttcttgacatgttcttcaagggatttatgcatgccacggttgttcctgtctcaagcttcttcaccatgtgatcacggttatcttgagaaggttgagcaatgcacttccctttaagttgtgtcaagctcttctttagcctctcattatcttctttgagcttttgatatgtgtcttcttttgttcctgtgaattctagctcaaaagaagatttgcttgtcgacggacaacaagcattagcacatggtaatgtagtatcaatat

SEQ ID NO: 90183 - DNA, 793 bp, Zea Mays
ccaaagtggctagatcatcttgtgctagctcgacaaacagattgacacttgccactacggtatcatcatcctgaagcaacggcgacccaacctaaacctccatcgaagcagcgggggaacaccctaccaccacaccctcgggggttgtagcaccctcaggggctggggccgggtcgacggggtgatgaaccactacatcaacttcctgaaagattggtagacttacctctggctctgccaataaactaacatcagggacctcatctaagcgatcaacacaaatgtccacaacatggacctcaggcagctcatataacaaggcctctgagacagcctcttcaaggtgacattccatgactgatattgctaggccctagattttcatcatccttgcggaacggcaaagctcgaagcatcactatgatccttcgtgcaccgctcatgacggaccagcggaagatccacttcctcatcctcctctgcctcttccacgacatatctagccgacttaccagcaccaccaccctccaccttatcgaccaaatcaacgtccaccccttcatcaccaacagtcggctcagctcaagcaaacaccgattgcatatctgaagtgcgtcagagttttctcctcttctgtttgccctccgagacatcagtctatgcatctggctagcttggtcgcttgtgcctaggacttgcaaggctatacactttctccttgatggcgcccggttgctcgggggctccgctcccctgttcaagctctgcagacttagaggactctccagccagc

SEQ ID NO: 90184 - DNA, 946 bp, Zea Mays
gaaattttgagcaaggatggagtaagtgagggagagaggtttcaaaagagatggtataagtaggctttctgccatatccctgtgttatgatacatagcaggtgactgttgcggacacaaggaataaacaattcgaagcttcatatcctcaacggatattttaaagtccggtagtgttgtacatatacatgacagtgccacataggttaactttggcactaactatctagacttaggtagaggtgatatatggactttgagcatttgagaaccaaaaatgactgcaaacccactaattcttgatattacaacatctctacactatgaaatagataaaacatacaacatattttataagcttctggtgtccctcctttatcatgagcattctccctttttggtgtttttcctgttacaatgcttggcaaataaattattcctctagttgtatggtcattatcaccaaaacccacaaattagggcttgattgtacctacattcttcaatttgtttttgcgtttttgatcaagcccctccaccaaaaccgtgtcgccgtacccacgtcggcacgcgctcatgacgcttatgccgagcctgcctcggacaagccttatcacacgccaaacaagccttgcctcactgtgccccacactcgttgaggcgcgccctggccaagccttgcactcaccgagaatcatcgccatcgagcatagacacaagaaccaaaaaattatataagagacaagtgggtcatgcattaacagtgagcagttaactactacacaaacgagatattcttacaaccaagagttggttatattactaaactcgctctaaggggagaagagtggtgagaaaagagatgaaaaactcaattgtaatataatctttgcactctgttcttcctatcgcttctatgactggtcaagttctttgatgaaaacatg

SEQ ID NO: 90185 - DNA, 772 bp, Zea Mays
atttgtttgagtcactgacaaatgcagataggccctcctcctttttctttacaatccgcgatccccgacggtgaatggcgatagacggagcttcggtgagcttgtactggtcggaatgggcaacggctagggctctagcttggctgacacttaatttaacccctaacaatcatttccactcaactaatttcaaggttcaaggtctcattctctctgcccatggtgaccgtgcgatcaacagaaaacttgaagtgttcccggtgatctaccccggtgtagtgcaattggttgggccgatgagcttcaaggatatatcagagtactgaaacaaaggaacagagggtgggaatggacctgtaacgcgctggccacggcgaggtcactccgtgcggtgctctggaccgatttgggggaaatttcaaattggtgggctctagtggacgatttgaggcacgagttgatggattgggtgcttgactacctagcggagccgacaacacactcaatttataggatccggggacggtggtccgtgaattggagatggcgcggtggcgaccggagagggaaggagttactggcgcaagcaattcatggatgttaccgtggcaagaccaccggcgacgacctggctatctaaggtggcttagtgcaacgtggtaattagcctgaggcgtggcacggccgtggtgaagggcgcaaactccggtgatggccgcttggccacgtcgctggcgcaagtgggcacgacataggacaaaacagtgctcca

SEQ ID NO: 90186 - DNA, 408 bp, Zea Mays
ggataaaaatgggtcgacgtcccatctcttggcatgcgtgtgcaggcccctggtacggatccgagctctccggcattgccttgatgtcgtcgtctctggaggaagcgtgctggtagggctctgagctctccggcatcgtctcgacgtcgttgtcgtctctagaggaggcgactactgcgccagcatcgtcacctccttccctctgccgtctcaggtacattgtaaggtcctcaagaacctggtctgttaagagtcctctatgtttataaacaacctatagctggtctagaattttattggctccactgcttacaaaattgtcattactgctttgtgtcttaatcacacattacattactttagatctgatcaatgttattccgatcgctatgatcctatctaccaatg

SEQ ID NO: 90187 - DNA, 1730 bp, Zea Mays
gtaggatttgtaaaccctaagaccgagctaagaattcgggtattcctttatgtcttttataaagaataatattacgaagttgagtaaacataaaataggaataccttcaatctagtaggacaagttattctccgcaagaaatttaaagaatgcccttaaatatattcaagataaagtggctcttggtaaaagagaatacattatttttcccgtaataagtaaggtaatggatattaatttttgttaacttgaaattgatcacaaactgaaaagtaatattttgctaaaataaaacaatatgtgtgcatgacatgctttgaagcatttacttggaggaatataataatgaataaataatcacaaatacttttgtaggtccatgctggaattcctatttgaacaatacaacttgaacctaaatctaaaatagagtttgaattggatttgaaataagaaagaaaaaaatagaaataagaaaataaaaagaggagaacttctcgcagtccgaatttgctcctcacggcccactaccccgcgccggcccgcttctactacccaccgcgcgtgcgtatgtaaacttaacattgactcgtgggcctggtcctgcttgcgcgcgtaccgcccactcactcgatgcttgtgggaccccctcgacagtagggtcttcttccccgtttgactcggacgacaccgttgcgaacggatcaaccatggacctcggggttcatcaccacgggatataagtaccagccgtcgccgttcctcgcatgacttggaaggttttcgccgtgtaggattgccgccattgaaacaaccgacgagaggagccaagacatagtagtcgtggggcgagggagtatccagccgcgaagggtgagctcgacggagggtctacgatgtgcgtggagttcgccgctttcgttcttcgcgctcgacggcggggttctgggcatgggaggtgaaggaccgtgccttgacaactcgccaagaggattcgcgctccgccacaagtccaccagcgaccatcttccccgtcaccatccgaattctggtgcgttaacctccccgtaagtctcataaccgcgtaacccgcgcctagctactacagtagttattgcctgtccgtcgtgggcctagtcaccggggtactcatcgccgtggaggggtgggggcaaccggcgagcatacaaccatgaggagagagaaaaggggatagaaggatgcagagaggaagaagacagccggtggtccgttgagtggtagatggacggtggagagagtatacggtgtctgggccgttggattcacatggagcggtgatgatttggttggtgcgtaccacttccgggcgcccatccgagccgttgattgagtgacgggtggtagagattagatcccgggggtgacgacaccacatccgtagatctgggatcggccggtccgcaatgcataccagttcacagttgatgctgatctaattaggaacgctcatccatgatccatcggccgaaactaaaccatactgtttcgaccccccgctttgcagaaagacccccgaagaaatcactaaacaacccgcggtcctgggcaagctcggtctgattctactaaagttttatagttttacccctgcacttgctacttataatgcggccagtccagaagaatagaaaatccagtaaaagtaaatagaaattgatttttaatgcttaaataaatgccagagtttg

SEQ ID NO: 90188 - DNA, 280 bp, Zea Mays
cgtgcttcgattctattgtgcattggaacgggacagggctcagagagcatgtatcttgtacacttcgaggcaatgtgtgacagacgtatctcatgatgtgtttggtgaaagcatcagatacctcagagaggtaataactagtttctagttgttcgaattatagctgacgaaaaggtaccatacgtctctagcgcaggagctgtcggtacgtcgaaaatgtttgatggtcctcattttagcccatcatgaggtagccattcaaatttaatgtgaggttcta

SEQ ID NO: 90189 - DNA, 1439 bp, Zea Mays
cagctgaccaacattgcagacaccgatgttatcgacactttcatctcgaggaccaccaacaaaaccctcctgcacaagctgggacggaagagcccgcgaacgacaaaggagctttttgacattgcgaccatccatgcatcggggggaggacgcggtgggagccatcttcgatcaccgcaagcgaaaggctagacatgacaaagagtcggacgagggtgtcggcaactagctcaatgcaaaaggtagataaaactaatggcaatgagttgacgtgttgatagacgcgataagtaggatggaaagaaggcctccaatcgaggagaccaccgacgactttgagaatctccttgaagtcccatgttcgaaccatcggtactcagtccgacacacctataagaattgtgggttacataggaaattcctaagcaagaagatatcgttcggaaggggacccgagccccggagagacagaaagccagggaaagggatcgctttccccacgctgatctttgaggagcgcgattactatgcctcgaggaggcgccaaaaaactcgaacgatgtaaggtgttcgacacctgaccagtgggcttggcctctttcggtcgatccaactacgccatcacattcaatcaatttgcctgctctgagtgcattcctcggcctggccaatgcctacctattatcgaccccaccaatggtatagcacgtctgaccaaagcacacatggctaggggtagcaggcttttcgtcctatactccacctcgagcgacgccatgggtcttggcaaggaccgcctttggccaaccggaggaccgtcgccacgggcaccacacggtgcagcatgcgtaagaatgtaacattgaatgttgtgagccggctaaggggctgccctcactttggagctatcggatgaactacggcccgacgacaagcaggactctgatgcgagaaaggtgggcacaatcctcaagacgacgggcgacgcaaggagaaaggacaccttggcacagtgaccctttgacacgggaggcatcctgagggaagctaccaaatgctctttgaggatctgtctcggctccaaggcccctgaagaaggttgcccatgatgcctccacaagcacaagcgaggcgtcgtcaggcaggggctggtagaatcttcgcagtcggcatcttcgttaactagcataagcgctcaactcagtactaggccagaagagaaacgaagcgtgagggatgtatgcctgtaacgtcgacctagataaagcatgcttgaagaacccgtctccccttccgcatactaggtagcaggccaacattgcctctagttacgagacactgagttgggagacgagaaaaagaggacgctagctgacgccggaaccatcgagcaaaaagaacaactcgactcacgacaagttttcatcaccctggaccgg

SEQ ID NO: 90190 - DNA, 550 bp, Zea Mays
gtatttgcagtattttccagtctatattaggcgcatatctaagtaaacagtaaaaaattggcctgatatatggtgtacatctaagtatacggtacaaaattatcaagaaaggcaaaacgagttagaatttgaaatggatagcagacacttcccagcaaagttcccaaaacgagcgacccggccacaacatccaagcagaagagcttcaatcttacattgaagggaatcgctgacaggaaggctaatcaagaattcgccaaagttagacaggagggcttcgcagtgatcaacatgggtggcagcaccaaacgccaataagcaggaaacagctagtgtagactccagtgtggtaaactctctagtgtaaagtgctacgtgatgtaagcagttattactgcactagtcgtatggaccgaatagtcatgggacatgtcccttcgcacgttctccactttcgcacgtcttcgcatctgccttttcacttgtatatatacgagaatgcaataaagaaagtgctctcggttcctattttcactttcaccagttttac

SEQ ID NO: 90191 - DNA, 386 bp, Zea Mays
gctgaccctaggtcgttagactagttagaaatggaaagcctagttattcaaaacttgctaatttcattcttataaattatgttatcagtcttacctctttaaaatttcaactgagttgactcttctcttgtagatggttcgtactctccaaactacccgcatcaacaccagctacacccctcagccccggtagatcccggtctacccagtggtagtcgaggaagttccagcagatctccctcccatccgagtggagaatgtagtcaacctggaggatagctcggaggagcagctctcgacgcctaccccgttggcagaatccctggcctttgcagctaggtcatcgacgtcagcaccgcctgcaccagccttccaagcacctgcac

SEQ ID NO: 90192 - DNA, 1090 bp, Zea Mays
gcagaaacagagattgagggcgatgagaaattcacggtctctggtgaacgattggaggcaagacttggtggcttggtgtgtgatttccctacggacccgatggtgcgctcaacttatagagtccgcgagcggtggtcggtgaattagacgatgacgcgcgacggccagagaaacaagaagttgctagcgcgcgcgattggtgtcctattaccgtggcaagctccctggcgatgaacggagggttattgcgagtcacggcgatgcggtggatgtgccaaggcacgtggcgcaaggccgtgaggcggctatctccggcgaactcatccgaatctgccgtggctagctcgggtacggtggttggagtaatttagtggccggagcatatccacggtgcgatatttactgacccccggcgctatccaaccgatctaagcgcgaatcacggcggcgaaagcacgaatccatgcgcggctcgtcgacggcgagggactgagctggcaatctgatcagcgcactgtaccatcacgaaccttattcagttggcctgatagtgctcttttgagggcaatttgtgccaaattttatatagtgaccagaccaacactcaacatcaaacttgtagttcaataaaccagcttcaagtttgccacagaggttttggttaaacaactactgaatcgagcgctacatggttccaaagttgatcctacacaatgttaaccagagttttagacttgaggctgactgacagcccaactttgggcttgcttttctccaatttttacacagcatcagtgcttggtcacttaataagaattgttctcctttcatagctctataggtttgatgtgttgatctagggcaaactcctcctaatttggaagttacaaagcttcaaagttgagccaattctctgaatttcagacttagccaatagagttcaaataggactttttgcaaataagtccaaatctcaaggttcatcttgcaaatccacatacttgtgaaccatatgacttaaggtgccttactttcatggtttttgcactttagtccaaaagtgcactaattttgcacttagccccctagg

SEQ ID NO: 90193 - DNA, 338 bp, Zea Mays
tcatatacaataacatggcctaatttctaatatactgcatgatggaattaaaattagacttatatccctcaaaaacacaaccatttctatgctgccaaatccaccatgtcaccaggatgaggatgaccaaagaacagagcaagaaatagagtcaatgaagtggatattaatggtacaacatagatggtgggacaacacatgtggctgcaaacaggcatacaacaacaattttgtgttaaggaccctaaatgtttgaatcataaatactcctacttatcaagaaacttgagtttccatggtcacaattcaagtatcaccactaaatattctcacaatat

SEQ ID NO: 90194 - DNA, 1135 bp, Zea Mays
aataattatattcctaatctttcttttctaataaaccaaaccaatctaatatgtctagcactctacttctcataacactactccactcttccaggatagcttatccttgagttgtgctggtggctatagctttatatgtcgatgttcccttagagatgtggtacttagaagagcaccatccaaacgatggagttgcatgtatacaaccatttatcccatggcatagcctggtgggtgtcgagaattaagagtggtcgcaataatggctagtggagatgaccccacggagaccggcgaggaaatatggtgatgcaatgcattgtgcactcgcaagtaaccttatgctttctccccactagaagtctgctagtccacgccttcatgtcacaccgagaagtccccaaagctaaggttccctaggggtcgaaactcagaagagtttcctcgagagccagatgaggagttgcccaaggggcggatagataccatagggaccagcacaagtgctccaaggacctgtacatgaagtgccatgggggttaaaaatagatgctccccatggtggccagtcatgagagaacggtgacctactgcaccttgaggtcgatcaactgctagatgacctcgaagaaggcctttatttatatcatcaagggcggatggtggcactccctacgatgtcaatggcataagctactatgccaatgaagaaaacatcttagcatccatcacagtagtagcttccaaaccaaagatctttgatacaagatagctgaaggattatggggaggctacactagcgcaaaacaaattttcgaccacataaaccaagatctattgttgttatatgtcatgcaattaccactagacgtgcagggcagcggaagcatctcgacgtagacgaacatgtcgagcagtgtcgtgcaatcgccgacatccttcacgtcctcgcatagttcatcctagtgctccagatgtatcacctttgaggtatccacacgtacagggaggaagcacagtgtattgaactgctaggttcgagacgttggcttgatgagggagagaggggcgcgactgctggtttgctggtggcgaattaggttaacctaaccgtgtcactatccctcattatata

SEQ ID NO: 90195 - DNA, 311 bp, Zea Mays
ggcctgtttgacgtgaccgacgacgagatggtgcggcggatggcgatcgaggggccagaggcgacggtggaggtgaataccgtggtcacggtggaccagagtggcgccgggaatttcaccacgatcggggacgccgtggctgccgcgccgagaaacctcaacggcagcaccgggtactacgtggtctacgtgcttgctggcgtctacgaggagaacgtggtggtgcccaagcacagcaagtacatcatgctggtcggcgacggcatcggccagaccgtggtcaccggcaaccggagcgtcgtcgacggctg

SEQ ID NO: 90196 - DNA, 285 bp, Zea Mays
ctttacctatagtcatcgaagtgcttgcactctcctcctcaactatcaccgttacaacttcttcgtgcaggtcgaccgcctctagcgttgccgatgctaccatgacttctttttccgaagcccccaagttagctttgccttcgttatcctctatgttgtcaaataataaagcattgattagaggaactatccgttcactttttggaatgtcagccaaagatcctagagttggcatttgcttcggtttcatgtacatgtttgctagagggtcttgtcgagtatgtg

SEQ ID NO: 90197 - DNA, 352 bp, Zea Mays
catacaattcatatctatccaatctatcttgaacccttgttgccatcataggacaaacttgattcttagatagaacactcatattccccatgaaattgatatcttcaagtactcatggatacatgcacttgcgattctatctatatgccattgttggtgtcaaagtttttgaagtgggtcacatgaacccatgaacaaccatcaactcatgggatctccacctacttctccatcatggaagaagttgtccgagctaacttcacaaatgagtagggttgggaaagacatagggccgctcacaaggggaataatgattattgcatactagtacaaaagcaattataaggacaag

SEQ ID NO: 90198 - DNA, 582 bp, Zea Mays
attccaggcaagaggtggaggtatggcgccgccgcggaatgaagatccgatggcgcagctgcttgccaagatcgaggagggcaacaaggagacacatcggcgcatggagacgatccagtcgtccatggcgagcgtggaggcaacagtgaaagggatgatgaaggaacaaggtgaatttcgcaagtggcgtccagaagtggaggcgaaggtggcggaggtggcagaggccttgaagacaattcaatctaaggtggatcaattcggtccacagccgctggagggcgatccttctggcgtgagcaaagcgaagggaactgcgtcgaccaccgcccaactgggggttccaccgatcgacgcgacgcaagggcaaaatcgccaccgcttcactgaaaatcaccggagatcgggtgttgggatggaaaccatccacacaccccctccggtcggaggtatgcaccctcctcctgaacgtacaccaatgtttatggattggggttcaatgggaagggattccagcgcaaattggtctcatctgtcgggatcgggtatgccccacatgagttttcctgtttttgagggatc

SEQ ID NO: 90199 - DNA, 274 bp, Zea Mays
attcatagaagagccacacttgtggtcgacctatctgattcatcattcatgcgcctagacctagtgccaaagtggaacaagtccggatcatgccacatttcatcccaggacccgacgtatgtacgtagaccaactccagcaatgccccgtatacgggcacgcttctgtaaaatacgcggccgaggccattattcacgcggccaggggactccgtatccgggcgcggagaacacgcggcgccggtgctcactcccttttctcgcgtcctctctct

SEQ ID NO: 90200 - DNA, 1444 bp, Zea Mays
aaaaataaaaggaaaaagaaacataaaagaaaaggagaaagaaaagccagatgggccactactctccatttcgacccactagaggaaactagcactgcgcgcttctccactgaacaaaaccctagccgccacttctacctcaccgcgtgcgtctgggctcactgcagcgtccgttggtcccagctgtaagtctctcgtcctcttagcacacacctaatgaaccactggcgtgtggggacaccctgtcatccctttcgcgatcgcctcacgtaacagactcgcgcacgttgtcggggggaggcctctattttcacgcagatcaaggattccgttgccaccatctatgaccgactcgctagggtccataaaaccgaaagtcgagttttcccctcctccatttgttcgctgtgtgcaagtttccctcaacaacgagaaagagaggttccgctgccgggcagtgacggtgagggagcttgtccgtgtcgcgtcaccaaacctcggcgcgcccttagcactgctggtgttctgtgttggcgggcagtgggttacagcaggtgtcgacgacgtgagtgttgtcgccgggagagtgttcaacacagccgtgctttggacatcctagtacttgcctgtgcacgtggcgtgaaacggaccaagccacctcgccgatcgtcgaagaccgtgcgaaggttcgccatggagggagaagctggtaagggcgtccgattggagaagggtcgtctcgggctccggctactgctgcgatgcgtgtgcgccgccgctggtatgcctcatgctgtgggcgggtctcggcgcaacatccctgtggtgagttttctctctagtgcgcgctttcacggattgcgtgtcgctcatctttctgttgtgattaactcaccattgttgcggtcgggatttaacgacgaagtcaccggcgcgatgcggcctctacgtggtcgtccgggcacagacgtgagagagtgagctgtagtagggtgaggttgaagatgaccttgggccgttgaataatagatcatcggttaggattgtgcctgcataccggttcggccaccttcgttttggaccgtccgatcggaatctagcgcttgtgagcgagcctggcagtttaaaatccgaggcgttaacccttgaccctacggctacgactgagtgagatgcgcatagcgcgcggcctgatccacaccgcatactgccgatccaatggcggggagtactggataccccttcgaaccggcgttttcttaaagaaaccctttgtttttataaaataaacccgcagtccaaagcgtgttggctctgagtcttgtgaaacttacacgttagcccctgcgctttctgaaatttgaggcccaatccagagagcattgaaaatcagaaattaatatcagaaattaatttttagtgcataaataaatgttagaacttg

SEQ ID NO: 90201 - DNA, 752 bp, Zea Mays
ctcataaactgctcaaataccgagtgaaccccaagcaatccacatggattactcgagggctacatctagcagatgcgcttgcacgcacccaataatttggtcctcagcgaaagcctccgtgcaaatccaaggtgttacatgaatgctcggggcttgctatcgagtactcaagaaccgggtacctaaaatagacccatgacctcttaaaaacgacccacctttcgaccaagtctctatcgagcaactttgtgacaggacgcgtcaccatcaagccacgtccgaacattcacatagcacgtcgaatgggcatcaaggtttctacagtgacctatacattggaaggaagggacaacacgccataccgagcgtgtgcctgtgcacgctggtaggtgacaaagggcccatgacgacaggagaagccacgccacatatgaccgcactttgagaatatctttggaacctgtcgcacaccattacgaagatgtcagcgatggactcgctacaagagccagagcaggggcgaggataacgccatgccgagagtacgactacgctcgaccctatgtaggacccaacatgccaaccaggtgagcagatctctctctccctccctctctctctccagtagaatacatgtcccactgtaaggtcctacccttgagatataaaaaagaagccccctccttcgcctactcatgagcacactagttgtaacacgcctctcggcaatactacgatcagcactacaccag

SEQ ID NO: 90202 - DNA, 489 bp, Zea Mays
atgatctaatctagagtaagttacttaatgctggtacaaaagataaggccatacccctcatgcacttaaaactaaactagtgccttaaaccaactcatccacatgcatgagaactgatccaaccaatagagtcatgaagaattgtataatccatctattcccacctaacattaaaacaaacttttgacctacatcatgcagtctatctcatccaaatctatcttcaccatattccccaatcgcgacgatatacactaacctcgaataagtgagaccaaggtcggaaaagaagagatcaacctcgtcaaggaaggagaaaagtcaaactcaatgttcagatgccttaccactcaacatggagttctttcccaccataaactttcttaccctaggctattcttgctctaaactacccatcttttagcctacataataatgtggctatacctatgtatacctatgctcttctaatcacccacaaattttttt

SEQ ID NO: 90203 - DNA, 754 bp, Zea Mays
gaaacattagaggctagcaccaaagcgatttcagaggccactgtaaaacccaaaatcaagaaaaaagggtacgttgaactcagaatttataaagtctgagtgattatttttcttatttatggatatcaataatactaggcttgatcaaaacaactaacaattaaataaataaaataaattgataaataactaaatgaatactgcagcacttgcatttaaattggtaatacaagcgtgcaattgaaaatgtgaaataggtacgaaaaacaaaaagaaaaaaaagaaaagaacataagaaaaaggcaaaagccgacctagctagccccttttcagcccgcgctagtccatcttgaaggcgtcaatgccgacacatagggcactctggtaaaccactataccacccctactgtcatgtctcgtacgtcagcttcacccccctcctctcgtcgtgtgccattgcaagcgtagcaagtccgtggccaccgcgtgtgctcgtggttggctgaccatggccccatatgctagccttcgcgatcacctatgccatgtggaccccaacgacaccaaaatgattccctcggtttcttacactgttgcgaccatcgcgcaatccgtggcaatgccgttaagcgtaacaaacaccgacatcaactggtgaagctgttatagcccctgactcgacgtatataactaggatccccgcacgccttgtcctcattaggcatagtttgggtactctagtattgaccccaat

SEQ ID NO: 90204 - DNA, 671 bp, Zea Mays
ttgtcaacaacttcgttagcaatcttcattacatctaaagcctctttcattattggatccgcctcaggattgtatggctccggtggtggcgaaaggccagctgtaataaaatgcataatgattaattttcgaagatataaacaaacaacaagacaaaaaagttttttttaaaaaaggacacctataatcaatgcacattcaacaatttcttcagcctcatttgcctccattcgtgcatcgtgagattctttttcactctttttatagcttcatcagccatatcacagtcgcccttcatccagatatcgaaatagaacttcccgtccatcaaagtagcttcggttgaaggttccttcgtatcgtctacagagaagatggcttcttcctgggttgcagccttaacatgttcacagccagttttctccaaaactgctgcaaccccctcaggcaccagcgaaggcacaaaaatctccatggtgactgagtattcttcaaaagcttcgacctcttcgccgatccattgaataactccttcaggatcgcctcagataaatctttgctccgatgagtatgcacccacctttgcaaagctatctttaagtttcttcgcacaattcatggatacttcgtaccatttttctttgcaatcccgaagttcttcaatatttttc

SEQ ID NO: 90205 - DNA, 521 bp, Zea Mays
tttatagcctcttttttcgtttctccttcgatttccaaggatttctccttggcgagctctgaaggcccaacttcggcctcggtctggctttttgtagctttgtcttcggatggttttgcctcaatctgcgttttcagcgcttcggcagttttcttcggagtggtgcttgaagattttattgtctccagcacatctagtacattgaccatccttttcctttttggagtcgctataagatctttttgtgccttcagcactgttgcttttgccgaagggctcagaactgatattttgtctttgactccaggctcttcaattttgttaaccttcggctttacagccggttcttcaatcttctgtgtaaaagtaagttctttggcttcaatagtcgaagaggtctcaccgccaaattcaggcacttcggccggttcaatatatcgcggccggtgagtaaggaccttcacctttttcctcttcggcgcgggctcgcttgaagcagctggagcagcatctttcccgga

SEQ ID NO: 90206 - DNA, 511 bp, Zea Mays
ctttgatcgaactatcagtcccaacaccgctaagtgtcatattggtcttgacaagatcatcatcttgctttcttaattttctgtacaatgagtaaggcattaaatttatgaccgtctctccatctaccaacatcttagcaatcggtattccatcaatatgactgcgcacgaagagcggctttaaatggttgaccgattcttttggcttagtgaaggcgacctctttaggaccaaaattgaattgagagatgacaggttcatcgtcaccgataatagtacaatcgatggagaacataataacatttacgtccatacctgagtgttcaggcgtagctccgtaattgaccaagtcctcttctagcaggtcgtccccctccataggtattgacacgtccttggagatgtcctggcgtagagcggacgatctgtgtcattcgcagacggtacggcctttatagcccgactgtctgtcgtacctgtagagagttgtaaagttgctatctcacaaagg

SEQ ID NO: 90207 - DNA, 566 bp, Zea Mays
gcctagtgatggatcctggttccccatagcgaatcctcttgcggggaggggacaacgccatggcggggacttgggcttcagggggatcccgtccttgaagttgagcttctagggctacaatcctggcgtgggcatcctccagctccaagtgcaccctagagagatctagggtggcactgtccaggtcggtgttaagacctgctactacaccaggtagggtgttgaggcgatcttctccagctccacctggaacgatgctggtctgactctctccactaagacgcagaggaagaagcatgtactttgtgtcatgcaactgctgccggtaggtgtggctgagagaccacagagtctgcttaacagcatcgctgaccgaagcagcgtagatggatagcggtgtcagggactcatgagctgatagagtcctgaaccccatatcccctgcatccatcaccctgacgtgaatgcgagtgatgtagtagcaagcccgaggaggctcgcacactcgccttgtctcatacaagggtcggacgtaggttcccaacgcatgtagaacgtctgcagca

SEQ ID NO: 90208 - DNA, 513 bp, Zea Mays
attatatctcggtggagcccacagtacaagagcaaatagtcagggcacagattgaagacaagggtgttcaggttatcaaagaaatgatcaaacagaaggcagagaaatacaagtgcttccatcaggacagcaagggaattctatggtttggagatcgattggttgttcccaaggaccctgagctcagaaagaagatattggatgaagcccacctttcaaaattctccatgcaccccggcagcaacaagatgtatcacgatctcaaatccttatactggtggaccagaatgaagatggaaattgccaagtacatatccgagtgtgatacctgccagaggatcaaagccagtcatttgaaggcagcaggccctttgcaaccccttcccataccatcttggaaatgggaggacatttgcatggactttatcgtgggattgcctaatacctcccagcaccatgattcaatttgggttattgtggacagattgaccaagaccgctcatttcttaccag

SEQ ID NO: 90209 - DNA, 536 bp, Zea Mays
ttggcagtttcggcaaccttctttatggaagaagggcatttggaatctgttgtttctactgcagcttcagtttcggacggctctgtctcagcttcggcttgcatctttgaagcctcgggaactttccctgaaggagtagagcttaaagcctttactgtctctagcacgtccagtacatttaccatcctttttctttttggggttgccgcaagacttttttgtcccttcggcactgttatttccgctgaaggacttaaaatttctaacttttttgcttcttcagtttttggctcttcggccttatctctatcagcctttggttcagttatcccggttgaggacgcctttggcatggtagccggttcttcagccttctgtgtaggaggaatgggctcctttggatcagcagctgaagaagtctccccgccaaactcaggcaccacgaccggctcaatacagcgtggccgatgggtaagaaccttcaacttcttgctcttcggtgcaggctcatctaaagtagctgaagtagcagtctt

SEQ ID NO: 90210 - DNA, 506 bp, Zea Mays
aaccatggacctggcgcagggagtaggaatgatgggatggaccgatggaaggagatcactagagggctgctgctggcgcttaggcgccgtgttcataggtggcagacatgagctgcagggggttttctatctcccagagggaagccaacaacggattgattgctaattgcttaatcccaataggcttgtgtacaaggtacttatagtcccttaaggggatctaatctaatcctattcccttatcaaataagggaatcttatccatataactaatacgaagatctcatctatagatccaatctaatctgaaatactaatctaatccgaagtagtactatagactaggcttacgaccttcgtctttgatattgtacttcggtcattacacctcacctctcccccattgctgggtagtcgcggtcgctgcctccctttcagcccctcccgcgagtgtggccgcctgggctagcgtatgcccttcagccgtcggcgctacctccctcccg

SEQ ID NO: 90211 - DNA, 342 bp, Zea Mays
tagagcttattcttggaactgcccctatttctaaaagagcctacatggtatctggaccagaattggtggagctcaagaagaagatggatgagctgtcagagaagggttacatcagaccaagtacctcatcttgggccgcccctgtcctatttgtggaaaaggaagatggtaccaagaggatgtgcatcgactatagagctctaaacgagatcaccatcaagaacatgtaccccctgcccagaatagaatatttgttcgaccagctaagaggagttagtgtgttctcgaagataggtctgaggtcaggttgtgtcacacctgtttccaaagggcagagccggg

SEQ ID NO: 90212 - DNA, 397 bp, Zea Mays
tggggagaggttgtaaggtacctgctaccttcaaatgactagctttgattctttggcaagtgtcgcactcagatacatacttagcaatttctctcttcatcctggtccaccaatataaggatctgaggtcgtgatacatcttgttacttccggggtgcatggaaaattttgagagatgagcttcgtccaagattttcttcctgagttctagatttttgggaacgaccaatcgatcttcaaaccataggatacccctgctgtcctaacaaaaacatttgtacttatccaccttttggttgagcatttccttaatgacttgaacacccttgtcaccaatctgtgccatgattacctgctcttgtaaagttggctcagctgagatataatccaaggtact

SEQ ID NO: 90213 - DNA, 473 bp, Zea Mays
ggtgtcttagacaaaaaaattctcagattgtctacatttcacgagtgctcaaggtcttcgtcggattgtggtttgagtctgtaggcgtttggggacgttttcttcttgaccataatggcacttcccatttaggctcgagtttgccccgggactctgttctggtggttctgatgaggacgaggtccccttcatcgaactctttaggaatgacagtgttgccgtgccatgccttcgtttgcgcttggtatctattcaatgcttcgagggcgagaacacagtctccatcgataaggtccttggtggttgactcgtcgacatctgaagtagtcgtggcatttgctcgtggagatccatgctttagttcttgcggggtcattgcttcggatctgtacatcaagcagaaaggagtgaacccagtagctctagattctgttgtgttcaacgcccatatgactttgggaagttggtctgcc

SEQ ID NO: 90214 - DNA, 665 bp, Zea Mays
gagtattttccccatcctaattgcacgaatggtcaagaagtgtgctttggccacggtggccgtgaacattacgacaataccgtcgtgttcccggcgaccagaggatctcttactaaattaaatggattgtcgagcatcaccgagctatgagaagacttaaacaagggagagaagaagatgagctgaccgggagggggctggccgcggtgaggttgagttctacggtggcggaaagagaattgggggaaaactcgaattcgagctcactggtggatgattgctaacgattagcgggggctggctagctgatgactttgcagaactggtggggggctcaatttatagattccagaggcggcggccgtgaattatgagcaagacgcgcggcggtcggaggtggagaagaacactggcgcgcgtggattggtgtcccatgccgtggcaattgctccggcgatcaacggagagcgggggtaagtcgtggcgatgcggtggcgcggttaggacacgcagtggacaacggagatggcacgacgacggtgaccaactttacccgcgggcggtgagccaggggagaggcacagcggctagccggagtggtgtccagctcaccggcggcgaagatttttaaccccacgacgttatccaactatccagagcacaaa

SEQ ID NO: 90215 - DNA, 1101 bp, Zea Mays
tatatatagctgagtaaaatgcacgaagcgatatagcaattgagtatggcatatatattatcacgtgcaaataatcatccacacgatgctctctctatctcggattttccaatcgagtatggcatcgcatcataattgtcacgccttgtcatcatcctcaactcgtgttttcatcatccttcgcaccaaataaagtccaagacatcatcgatatatgcattataaatagggttgaaaacggacgggtaaaatcccgtcccgactcgtaccgttttttatatttgacccgacattttccgtatttaaggaaaaatatacaaacgagacggaaacgggagagggtttattccgtccgtttttgcgtgatcccgttttttgtccagattgaacccgtatttattccgtatttgataaatatgagacgagcctaatatgcattagtatataaactaaaacatcgtgtctttaggtgataaattatagcacaagtggccattgtaaccaccggctcttttcaatgacatgtggtctaaagtcttaaataacatcagatttaggatgtagctaaatgtacactattagcaaccaaacaataatagaatgttgtctctctatatctatctattttatgttattatcctaccaattaatcactagtcaaacatcaatactttttcgttaatatttccgtttccattcgtttttgcaattccgtttatcccgctcccatttcccttccgactattccgtatctaatcccgtttccgatgaaaaaaatgtggatacgaaaacgggagaggggtttttccgtccgtttccgtccgttttcatccctaattataaatccctgcctcgagccctcgatcaaggatgaaggtttttggatcatgatacatcgagcaaatcatgtctagtacatgggacttaataagtaacaaactatgactactttagaggcctaaattaatatataacacactaatacgatatgattatgatgtatagagtgtaattataagctaagtatcgggacctaaatatatggatagaaagcacgggcgacagcaagatcaaatgctccaccacggcctgcccagtacg

SEQ ID NO: 90216 - DNA, 455 bp, Zea Mays
actacactagcctcaataaggcctatcccaaggacccatatccacttccacgaatagatcaaatcgtggattctaccaccgggtgcgacctcttgtccttcctagatgcttactctggttttcatcagatccagatgtctagacaagataggaagcataccgcttttgtaactgtggatgggctttactgttatgtcgtaatgccttgcagtctgaaaaacgccttgccaacatttgtacgggcgatgagtaagactttcggggacctgattagggacagagtagaggtatacgtcaatgacatcatggtcaagactaatatagggtcgaccttagtggaagacttaaccctggtcttcgacaagctgtgcgcaacacgcacgaagctgaacccggacaagtgcgtctttggtgtctccgcagggaagttgctaggattcctggtttcacatcgg

SEQ ID NO: 90217 - DNA, 462 bp, Zea Mays
ccaatgtttttccagactctgggatgagtgctacagctagtgtttcagcaggagccgaatcagaggaatcctcagccaacatatccagcatgacacttatttctgcgtcgctcgggctagtaggcatctcaaagtgaacctgcctcccgtcattggggattccaccaagcgaatcaaccaaagccccaacctcctcgagagaggaccgcactctaaggcccaaaccactatccccagcaggaggatttgacacaaaactgatgaacgtcttgggaggaggtagattccaggctgaatacgcaacaggagcaccaacattcgacaccttgcctctaagaatcatctcaagccggcttactaggtccacagcaggaatccttctattggtaaaccgggtcgaatcagtaacgccacgatacagataagctgggtacgctctatccttcagcggctgaatgttct

SEQ ID NO: 90218 - DNA, 700 bp, Zea Mays
tcttgttcctcattcaattgcctgcaatctctctgctagggttttgcctgctcggttccctatccgcactgccgccgtcgttcatggtccggcacacgctatggcggttggtcgcggtgcactgcctgggccacgtccctgtcggtgaggctagcgtgtttgtggtcgcggtgcactgctagagggaatatgggggtctaggaggtcgacgttgatggacggcggcacctgggtcttctcttgctccatcatggtcgcgatccatgggattgccccagtgagggtttcatgaaatcctctatgctactcgatctcctcatgatatagtaaacaacaacctctgctatttccttctccctcgcacatcacccactatacgtagaagaacctcgattcgatcttgcctcacccatgtcaggccgaccgacgacggccgcaacctctctctccttcccagtcctcctgctcgcctctaccaacacctttctcttataggagggggtggagcccttacatgaggaatttattgataaagaaagtgttatagggagttccggtctgtttgtgggtgatgtttgtgctaatgtagctgattcaagtttcattttttgtgcagtctctatggtttttagggagagattttgtgttccttggtattacggtttgatgatagacagtagtactatttctccaagaaagc

SEQ ID NO: 90219 - DNA, 438 bp, Zea Mays
gtttctggccgcccgatctcctatcgaccgctaggattagatgtatcccagaccgaaacggtacgcaatcatatccgtccgatcgacgaccgacgacgcggatttaaaataccccaactcgccccagattcgcccgatcgagatcaaacggcccaggttcacccagcgaatcggtacgcgcaccatttaatcatggccgcccacagcgaatccaacgacgcacgaaccatgccgtcttctctacttccccggccagccgcgcgaacgccggcgtctcagccacggcggagccatagccggtcacatccctgagcggcaaccagagcacgaaacccaacacgaaatggtgccaaacgtgaaggaaggcaacgcgaactacatggatggggtctcaccttcgattatgccgcttggagcctggcccgcgagttcttgcgg

SEQ ID NO: 90220 - DNA, 468 bp, Zea Mays
ggatattttaaatctttggtataatgccgaacttcagcaatctgctctttagttaatttcccgcccgaagcgtgaagaataatgtatttgtgacttgtgagtggcacttcttcgggtgttggtaaactgtccttccctgattaatcttcaaacttggaagatttaactttatcttgtgtctcttctctaacaacttctgttattaaatcagttctcaaagagctggctttgttcacatcataagaaacctctacatcggtagccaccttcggtttagtgatcacatcctcagtaacccttggtgttataggcgaagccatctttgcaggcctcagaacagccttcagcacattggccattctttttccctcgcgaggagtccatgttatggcagatgttaccttctgttgctcctgcaccttcagcatcgtatcgactactgatacttcatctcgaactagagtttta

SEQ ID NO: 90221 - DNA, 499 bp, Zea Mays
catcaactttgcaagcacagaaatagagatcaagctagaaaatctttcatcggctcgcacattatcaataaaaaaagttaagctcacgatgaagatccttcatttgtgttgaatcaaaatcatgaaggtatgacttagccaactctaccaaactctcaactttgaaagcctcaaaagaattcttggggttgaaagcagcaatctgagtaagcaactgagagtttacctcattgaaacgaccattaaactctgtaagctgcaagtcaataattgggttcaagcaatcatatctataatgctggtagtttgtgcagttagtcttttttcttggcttatggcgatcaatatagtcatcatccatatccaacttaggaattccatgttcttcacaaaaggtgtgtacaacttgcaacaaagaatcccaaccatcatccctaatttgctgaaatttctgctttattaatttcacctctaacttggcctccaagatgtctttatc

SEQ ID NO: 90222 - DNA, 543 bp, Zea Mays
gggtttctcgtcccttcttttatagtccaaggagggggtagttacatgaaggttatctggtctcctaccacataagaatacatattagcctaaccgagcctaatcgagactcttctctatctttatgtccatgtttctcttatcatcaggactctaccacattacatggatattgaccttctctacttatttgataagatcatgcatctttacctttctcacatgagttggatatctctctaacatgtgggttgagtccctagataacgtagccgagctctaggacctacctatcatagtattgttggttgaagtgctctcgagtaccttggtatatatccttaacacataactctttatggtagagatagcaacacttagtcaaaaatgtagttgcacataatatagcttggttaaaatgcatagtgaaaggaaaatagacttttatgccatttgtatattagttttgatgtttggtgaccatcacaatattatcgactaactagtttcctaagtgaatggttacatgttcataagaacaaa

SEQ ID NO: 90223 - DNA, 577 bp, Zea Mays
ggcgaatccagagttctgtctgttaagggggtcacgaattcttcgccggagttcatcgtgaccgtggtaccaccattcgtcgtcgcgaagcacctgcatcatccgaccgccgatgagtagcccttgattgagttcgttggttacttctcttcatatagcacctatcgaacttcgcaatggggcattaggacttgaaagcactgggctctagcgatgatccgttgcggcctatgggccacgccaccgccaccgccgatgcgtgagggagatgggttcctggtcgtagattcgctagtgaacggtagggattacaaaccagggtatcggttcaggatcgtgatagcggttgttgatcgtgaaatcaagggacatggttgtatctcgcgaacataaaatccaaaccgtatatgtaggatccaagagccatagaaccttattgtttcggcctaggtaagatctaatctgggccatcaggtcctaatcgcacgtctcatatgtggtgatacctcttcgccacgacaaacttactaaagagacactgctctttggcataatcaacctaccgtccgcaacaatt

SEQ ID NO: 90224 - DNA, 875 bp, Zea Mays
gttaagtaagcgcgagcatattgcaccgtcttaagtcgttgccgacttaagccgattgctctgttggcagggcatagtggtcaccccgagttaagtaagcgcgagcatgttgcaccgtcttaagtcgttgccaacttaagccgattgctctgttggcagggcatagtggtcaccctgagttaagtaagcgcgagcatgttgcaccgtcttaagtcgttgccgacttaagccgattgctctgttggcagggcatagtagtcacaccgagttaagtaagaatgccggtcaatcatgaacaaactgaatattcttgaagccttttttattgatgacatatttcccattttacagagtacattatcgtcccgatagcttttgaaatatagctaggggtaaaacttcctgaggtgttctatattccaggagttcccaatttctgttccgtccatttgagtgagacgatatgatcccggccgagtgacttctgctactatgaatggtccttcccataagggtgacaacttgtgtcgtccctcccccgttagaattcggcggaggatgagatctcccactgaaaaggatcgtcgtcgtacggccttgtcgtgatagcgtcttagagtctgttggtatcgtgctgattgaattactgcgttcaaccgttcttcttcgagtacgtcaatgtcctccagcctagtagcttcggcttctgctatgctttcgaaggccaaccttggcgccccgaacttgagattggcgggtaatactgcctctgacccataaaccatgaagaaaggagtgtttccatgcagagctctgctaggttgggttcttaggctccaaacgacgtagggcaattcccttatccactttcctgt

SEQ ID NO: 90225 - DNA, 411 bp, Zea Mays
attatttgtgattaaacatgctgtgcagggctacggattgcttgcattgcaagcgtacgttccatcgctccatccaccaatttgcaacattgaagccgaaccaagtaactgcaaagaggcccatggttggaacgctacactgttttacgcagccctgtatatctgtgcgtttggtgaaggttgcatccgtgcttgcttgccgtctctcggagcagaccagtttgaccatgaagatccctctgagtcccaccaacagtccagcttcttcaactggttcacctttgggatctcctttggaggttttgtggggctgattttcatcgtgtggcttgagaactacaaggggtgggacattggactcggactgtctgctatcctaattctgcttgggttgcttgtgtttgcggctgg

SEQ ID NO: 90226 - DNA, 444 bp, Zea Mays
ataccgaagcggtacacgatggtggccgatggatcccgaaccagctgcagagattttaaacggccgcgatcagtcggatccatccgatcaacatctaaggactcctattagttctatccgaagcggtacacagtatctaatctgagccatccgaaagggattggacgacactagacacatcttcctcatccgaccgcgaccgacggcagcgccgccccggcggtcgaaatcgcgccggcggactctccctgcccggtgattccgagcaccattccccaattctactagcgctaagtgaagaggagggtcgcgcgaacacagaggacaaatacttatcgacggttatggcaccgagtctcctagcgacgatgcggtgcggtttgagcgacaaccgaaacttcggtgaggaattctcggcgacgcagggaccaatcccgatggcta

SEQ ID NO: 90227 - DNA, 907 bp, Zea Mays
ccatctacaacaatgttaaaataaggcccaatcatatccttagtcttaatggcaacttaaccatccttgacagttctcataacccaatcacaccaggtgttaacaaagacttttttgtccatcatgttatataaaaatgccagttaactttataatacgctttttaaaaatccactttgaaatttaacccattctgtttttttaacctcatgcaaaatttctttcatggctaccaccccatccataataaatctgccttgaatgaatctgtattggaattcattggtcactttggtgacgcactgagccatcctattattaagcaccttagtaatgattttgtaacaaacatttagaaggcaaataggtctaaaaaattttatttcatgtgcattatccatcttaggcaacaaagtcaccatcccaaaatcgagtctctcaatggccacggaaccagaatggaaatccttgaaaaggttccaaagatccaacttgataccctctcaaaagttgtgaaagaattcggctgggaggccattaggaccaggagcactgttgtgcttcaaagagaagactactttcttgatttcctctaaacagaaggggttgtgagacaagttgtctccctcttccattcttgtcattgtcagattattcattaaaatattagacccttaagatggcccaaagaggtttttataaaaggaagtcgtgcgcctgattgataccagcctcatcagcaacgttcaaaccctcgtgcacgagggattggattttcagccttctttttttaccctttgcaataagctaaaaatactttgtttttcatcccattcagcaatgtaattgtccctcgcagtttgttttcttttaatcccttcttcaaccacaataattcttaaattcc

SEQ ID NO: 90228 - DNA, 462 bp, Zea Mays
caagttttctacagatgtattggcaagttgttgcacaaaaattcgagatctaggcattgcaattcggcctgtcaggcactctgaatcagggcttcgatggtacagtgtaaagatccgatcgccagttctgataactcaccgctggcgacagtgcacccggatttgtgctcgccacagtgattcgtgctcggcgcagttggataacgcagaggggtaagaaatatcacgccgtggatgaattccggccactattctactcctgccgtcgtacccgctgagtcacagccgctttggataggctcgccggagttagccgcctcacaaccttgcgccacgtgcctcgatgctttaaccacgccgccgtgagtcatcttagcccatccgatgatcgtcggtgagcttgccacggtaaatgccaccaatcgcttgcgccattgcacccccttctctccgaccgccacc

SEQ ID NO: 90229 - DNA, 413 bp, Zea Mays
attaacacttattaccatgaaatatgttgtggcaatagagtttttggcaactatcgtaaatgttgcaatataacttattgcaacagaatagtccattgtaacaacgaactgctgcaacacttgaatacgttgcaaaagatgtagtaattgcaacagaacgtaaaattgttgctatagcctattgccactctgttttctgcaacagcaggcaacgacagttgttctatcgcaattggtgcctatcgcaacgatttatggtctatcgcaacgatttttgcccattgcaagaaggtgattttttagtagtgcacccaacccaacaatggagcagttcattgccgtacagatgcaacttctccaaggcctcactacttcagtacaacaaacttcttgattaatcaagacatcttctt

SEQ ID NO: 90230 - DNA, 499 bp, Zea Mays
gtacctttttgtaattgaatgtgtagtccaatttgctctatctatttataatatttgtacaacttccattagatacttgtggtgatctcaatgggttaagatattgtatatatctttgactccatgagaaagccaaccacagagttacaaaaagtggaccttcttaaagtggaattcttagcattcgaagttaactctctaaacctctaaatgattgaatcatgcatacaacaaggattgattactttaattgtgcatggcatggaggtggctacgcagaaagcatctcgtactgaaggaaattcttaagcttaggccaaatttttctgtatgtatgaatcttgcacatctcgcaagttatttgccaataataatccataacttttccatattttactgtttaacacaggcaatggggaacaactttcttggatacaatgtttgtgaatttattcaaacctttgtaggtaacaagttagtggcaaaagatatcaataat

SEQ ID NO: 90231 - DNA, 804 bp, Zea Mays
gttgtacaaaaattaatgaaacaacatcccaaagttgctctgtcagaactgtgttgagctactgaaactgaattctagaataggaatggtcacagtggaatggggccgaattggaagcgccatatctttgattccattcggttttggcccaaggatcctatagtaagtttgaagactgatgttcagtaaacaatctttattaatggagatcaccttgttcttaacacaaatcaaaagaaaaggagggtgaaagggggtctgttcagaaaagtgctgaagatcaggacaccgaaatatctgaaaaagcgaggataaagatcagggacactgtagaatcggatgtgtttgagtgatttggggtaagaatcgaccgcagggagatgtcttcggacgtgtcgctatcccgcggacctagcccgagcctagccggagataattcaccgacggtcaccgtggctcggtcatttccaccgccgtgtcacccatgcctcgctcctccctcactatgtctcttctttacatggtaaccatgcacgaacgatttaatccacggctgtggatcactagccggaccaccgcgcctataaatagcctcgccacccacggcgaggtattcgcctcttcaccagcgagctcggttgaagcacaaattcacgaaattctctccatctctcccaaaattggtgttgcgcagtgcatccgtagttctttgcgaccgtgtagccccaacctcacctcctaattccaccagaacccgacgcaacaccgtttccccccttctcagtcactggcgagtgaaaatcc

SEQ ID NO: 90232 - DNA, 298 bp, Zea Mays
ataaactctaacatcagttatgattggttacaacaggatattttgttcagatattcacgtcagcacataactaagcagatgaaattaatgtatacaacagttagctatggaaacacgattcagatgcaaaatcgaacacacctgcagttatcgagttgcatcctcatatacacacctccaatgcacagcaacaaccttagtacctgacgtccagcacaatcgatgcagcacgaagcaacaaacaccagcatcttcccaaccctgttaacgcgatgccgatcatatcatggcccgagag

SEQ ID NO: 90233 - DNA, 398 bp, Zea Mays
gaaaaaaagaagggtaaaccaattgcttctatgtccgaggagtgccaccaatcactgtgttcgatgtgaacatagagaagatacatcttggctggatgcttcaatgagtccctctaggctccttttcctggcaagtctcgacgcttcaagcagacatgcacaccgtcgccaaacacctcgctagctcgctctgctctcgtctcctgacgagcaaggcgggtcaaaaaactgaaacgtagcgcacccgctcaatggtcctctccgatctctctgcctttcattcccgatttctcgtacgtcgtcgagactcgaggccacgccacacgcgatcgcgctagcctccgaagtccgacccactcctctctgcgacattgactgccacgacgacgaacgacgcg

SEQ ID NO: 90234 - DNA, 1023 bp, Zea Mays
cgtgggcgggtttaggtatacttcacaggtgtgattgtagaagatttttgctgcacccgacttgaatccgacccactgccatccgatctgacgttgtccaactcatgtttatgaggtcatggagttcggggttcaccagggcacgacagtggctcttgccattgcacagctacacttcggtggtaacctccgtggtgccatcatcctgcttgatggttcgacaacgtcagatctagacattttaacaggtggttttatgccactgcgaacgttgtactcggggtagtgtccgtagaggaaataatccacgaccttttgtagttctgtttatggactgaccgtttcgatattgcgaagtgcatgtgtttcgggtcctcgagatcctggctggtcttaggatttttcttggtcaggggctcttttcgtgcgatttttactcatccaccatactcgtgcgggtcgagcccccgagcctctactcgaagcagatatccatctaggggggtcatcccgtatttttaattttactctcccttatgtatccccttcacgggaatgagaggaggtgagctataccacgcttttctcgatgggttagcaatggcgctcgctgagttacaaattgggaatccaagtgagaccctggttcatttcacaggatccaagcatgtggtccgatggggaccgtcctcatactcctgagcactgactcatatagttgctagttccgtttgactagaaccgacggctcactgcctatctccgcgataaaccatgagtcagaccttcctaggacttcaacacgagctggtgactccctcgacgcttcacatgtcatggtcctggatgctagtgtgcccatcaccagatgtccctcgttcagctttttgttggtgcggtcgcgagccctccacgaactagtcttcgaactcctgaattcacgactgacttgtcgtgggtttttggtccctgccaaaggaattgaacaagttcgggatcttaaccgggaagggagccctcaac

SEQ ID NO: 90235 - DNA, 500 bp, Zea Mays
tggagagataggactggtttgataagacaccttatttattggactactacacattttcaacttgcccctagataattaaagccaaaccacttaaccctagaggtattatggtcgaactcaaaatatgtagatttgacagttataagctcttcacatcaacagaagctttgtgatgacaccgtgtgttgcctctagttctcaatagaacttcaccttttgcgtagtgggtttgaatcctaaaccactaaacccccttgtgagtagcatatctgatatgctccttccattttctctacacatgctactactagtccttgatagcctaatcaccaagtcttccaacacctcaacttgacttggtcaacacattctactcgtccatgtactcttgcatagtcgatgtgcctaggtggttgtcaccaccgatcctagtctatctgaatgaactcacttcaccttcacctttgccatcgaccaccacctttgttctttatatccat

SEQ ID NO: 90236 - DNA, 546 bp, Zea Mays
aaactctctcagactgtgtttatgcctggtcgaaacattcttgaaggggtgattgttttgcatgagtctatacatgagatacacaggaaaaatttagatggaattattctcaagttagatttcgagaaagcatatgataaggtgaagtggaagttccttcagcaagctatgtgcatgaagggtttctcgccgaaatggtgtacatggatccaaagtattgtctccaaaggtcatgtgggggttagagttaatgacggcataggcccctttttctcaacacacaagggactacgtcaaggggatcctttatcaccaattctatttaacattgtagctgatatgttggcagtgctttttgctagagcgaaagaggaacatcaattcaatggaattgtaccgcactcgattgacggaggtttatctatccttcaatatgcagatgatacggtggtgtttctggatcataacctcaaacatgccaggaatgtaaaactgcttctaactgcttttgaacaaatgaccgaccttaagataaactttcacaaa

SEQ ID NO: 90237 - DNA, 440 bp, Zea Mays
ggaggaggaagtggatgctgagaacgggtgcatcggagcttgggtttgtgatttatagggacgaggggagaggaagagttgttggaagggatagaaaatcacggctagagatttgacggtcattgaagttgagaaattgaacaatttagaacgccattaatggctgggagaaacagctggcacacaatatagtggggaggaaggggaagtggtagggccgggctgcagtgcggttgacgacgtccaccatagaactaaaactgcggcaggcgaggcggtgggagtaggagctaggtgccatcggctgaaacagctgcatggtcgaatggaagaagcggagaaaacaaccgccggaggaagaagataattccctgacaagtagggtccacgtgcaagaggaaatagaggagggaatgcgacatgatggtcccacacataag

SEQ ID NO: 90238 - DNA, 316 bp, Zea Mays
gcatgattgggatttgagagtggttcaggtgatgagtcactcttaactctgtcggggtagagcaattaaagtagtcaattgatgacaaagcaaaattgagcagcatcgccattcggaaacgtgattcaggaggaaactaggatatgacgacaagggatcaggggttggttgcacaggtacttccaggagtctagatttcttaatcgcctcattaatcgtgctttcacacgatgaatcaatcaatggtctcgttccgaacaattacaactcgggtcctatatacttatctcagacatatagtttgtgtatgaagatt

SEQ ID NO: 90239 - DNA, 897 bp, Zea Mays
aggagcaggcgctgagggaatctttggaaggctctattccgcaagaattttaggtacagcttccgaaggtcccaactcagcatgagcagaggtactggcagtaatcatctacgagacatcttcaattttgctgcaacaactttgagcagaaaagggaggcggtgttttcatagattctagaatagcttccaagacactagccatcctcctcttacttggagttcgtgtgatagctggtagcttcggcagtgctgtcacaatcatcattggctgctctggcactttttctgctaccttttctggctcttggctgggtctgcaatagctctaacaggcatagcaggaacagtctctatggctagcggcgttgtttccaccctttcacttaactttggcacatcggccgtctcgatgcgcctaagtctacgtgtcaaaaccatgattttctttgacttcgacacactagtatatgtcgaggtagcgatttttcttttccacccttgcttctggacgggatagcagtagtctgggtaaacgaacccaataacatcaaacactctattcaacctcttcttgccgggagcgccaaaggcaaccatcatagcttcatcttctgccttcgagtacgctccaagtatctcatcacttcttgcttcaatagcatccaaccaatcatcatttggctcatcaaactgatttctgaaacgaaaagtatacttcagataaaccaggccaccctggctggagccagtggcggcctccttcaacatttcccattcgctcgcaagaggccatactttgtaaataatatgctcttaaactaagtctcttgtgccaatataggtgcacacggtgttgaaagcagcttggcatgcttgcacatcattcccaagtgca

SEQ ID NO: 90240 - DNA, 1438 bp, Zea Mays
gagacactatcacggactagtgggcatcatgtcgcttcctctgttttctgctacctgttggtggtgagtggcctcatctcaactagtattgactattgactatatataaatgcatggtgggtgtaactgccatacgagcactagtgtttgtgtgttcaatatgtctgtctgttcgtagagaaatccgttccaaagcagaacgtcttgtagctaagaacggatatgacggtccacatgcacatgtagtgatgtagggacagtgccaaccgtacctgttgtacagttgttgtcaacctgttgtacatgttttggtgcttgaaaacaacataaccatttaggcaaacaatgtttgtcaatgtttacagatatagttcaaagtatgcatcacgaatttagatgaaggcaacgaggaaatcaaggaaaccaaaatatcaaagaagaacattagatgactcaactaaggtctatcaggatcgtacaagagtccaaagcacaagacgaaagaagctcgagcgaataaacgtgaagacacaaagaaacgagctacaaagcgcaatggacgtgtccggactcatatcgtgtacctgataggacgcaggaggtgcaatgtgcccgtgctaaagatggggctgaaaaacaagtacaccggatgcgtatgtgtccaaaagacaagagcaccgagtacatccaataagccatgcagcttgtacgcgagaggttacgtacaagtatcggatcccgcatcgaacaacatgctcagagaggttgcacatgcaaccgagatggatataacccatccaatatattcgatgtcacaccaaaaccaacctaaggaacaacatcatcatttactaaaagacaaaccagacacaggcaaaccttaaaccgagtctcataactctaccgatgccttgggggctattgatgtgtccctataccaggggttacctaagattgtccaaaaagataattgtgccacctaacatagccttggcctagttacccctaccaagtcgaccccaaccagagctcccccccccactcttgacctagttcctccaactaggtcgtcccaatctcggccaccttaagtaatcctgaccaggttggttccgacctctatcactctaagctaggtcagcccacaccatgaaacatgataagactttgatgccactgttcaaaagtattgtagaactctacgtagggctaatacatttatggttctctgactgctcacacatgctcctgactaggtgcgcgctggatggaggtagctacaatacaaagtactccacccatgtataaccacccgacctttgaaaggatagaaaatacctatttgcaacaatggccctcgccacaggtgccaggcaatcaaacatccctaaacaagatgtaagaaggagggaactcctaggccaatccccatacggtt

SEQ ID NO: 90241 - DNA, 343 bp, Zea Mays
gtaaaagtgcagttagtcctatagtaaattaaggactaataggtggcttagcttgaggtattaaccactaaccacaacttaggctggaatagaatcttctgcaggtacactgacaaaaccttagaagactacgactagttaattacggagtgagtaggattgccaccgtcataaagcgtgatagccaaatatgttggcagtagttgagaggcgaataggaaacaaagcatgcatcataacattcaattcgttgataaaagtttccccctaaagctaaatggttactagaatgtatgtgggtttaaaaattattctcacaatccgactaatcctttgatctttt

SEQ ID NO: 90242 - DNA, 594 bp, Zea Mays
ttccaagaccgaggacaatgccttgtccatagccttcgggggtcggaataagaaaaggttgaactgggtatttgatgctattggcttcatataccctgactattgttacccgctgtgagggaaaggggtaaaaagaaagattgctacttctggaaaggttgctacttcggccatcacagttgagccgaagggcaagaagatgaaggttctgactcaccggccacgttacattgaaccggctgtgatacctgaaattggggaaggggcctcttcagctgccgaaacaaaagaaactgttccgtctgtgtagagcatttaagaggcggctgtaatgccgaagttactttcagtcaagctagttgagacgaaggctaataaggctgaagggccaaaaattgaagaaataacgaaaatgccagagattttgagccctccaacagaggtaacagtgccgaaggtacaaaagggttctgtcgcaactcctaagaggaggaggatggtgaatgtgctggatgttgtgttagaaatgacaaaaaccttgagtcctgctcctacaaggaaagttgccaaagctgctgaagcgcaacccaaagc

SEQ ID NO: 90243 - DNA, 396 bp, Zea Mays
tttttgttttcctgactctttgcatgatgtgcagttttgtcaaactgtcagaagaaatccaaacagccatgacatttgcacatccagccgtactctgtgatctacacatccagctcttcttcggtcaggtatccaccagatctgtaatcaacaaacaggagttactatgcattgcatgagctgattactactaatcacctgcaggaagccatataattaattaactaacaagataagatgggtataagttgccttaaatgagacatgaaacagtaagctaggtttaccctatgtcaggactagggagatcagggttgttcaggaaaaataagaggcccattgtcagatttctatatataaccacccaactaagacaattcaaagtgcttggtaact

SEQ ID NO: 90244 - DNA, 333 bp, Zea Mays
tgcaggcaggctctcagacagtcagactccggtgtttggaggctagagctaagcagttgagcaggtgacgccatgaaatgcgccgatgcggttctagtgtttgatgcacttggagaggacgtgattacatgtgcccatggtgacggttgcgatggccacctccatcaatgtgtgtttcccgatgccgacgttgctccttccggcgacctaccccatagatgtgcaccttgtagcgcaccccttgcccattccaaggcacgtggaggcgcgcgccgatgcccatgaggtcgtgacgatctactgtttgtgaagtcgcatcgctgcctgcggcag

SEQ ID NO: 90245 - DNA, 393 bp, Zea Mays
aattcctgttagtgtctcatttccagccacatcttcctctcctttaacctcctccaacatcacaaacacccatacttcatatccattcacccacttctccaactacaacacaaacacctgctgcacctccctctttgggtctgcatccccctgtagtctgacctccaccccctgatcacaaaaggttagcaccttgttgatccagtcataatgcattggtctatgttgtttcaaccagtcataccctaatatcacatcataagcctccaatgccaacactctcatggcagttctatagacatgccccctagccttccacttcacctccctgacattttttcacacaccatgatctccccattagctaccttcaccttcacaggaggacagtct

SEQ ID NO: 90246 - DNA, 449 bp, Zea Mays
gcctcgatgatcttctcaaggcatttggggacaccttagacaaggaactcgctagtacctcgaagaacgctctcgtgtagtctccccctgtagtagtcttatgcttgtaatgtgatggtgtaatgaataaaataacttggttgaaaacaatttgcatgtgcataatagtgactctcttccctggcagatggcatcggataaaaccacgcctaccgcctcagggattggagcaggtttcccccgaagagctgaaggggaagtcattagagaagaaagtgaaacccacttccccgcacctccacccctacccttagacttagcccaagttctagccaatcagacccgactcatcgaggtcctcactcgaaatctagaaaatcaacggccgaatggtggaagaccgcaagacagaatgagggacttcctgagactcaaacctcccacgtttg

SEQ ID NO: 90247 - DNA, 782 bp, Zea Mays
tcggcttcatatacctcgattatcactacccgctgcgagggcaagagaaaaagaggaagattgctgcttcggtcatcctagctgagcctgtgccgaagagcataaaggtgaaagttctgacccactggccgtgttatattgaactggtcgtagtgcctgaattcgacgcagggtcctcctcagcagccgaagcaacacaaactgctccgattgcacagagcactgaagaggcgatcgtagtgccgaaggtacccatagccgagccagtcgaggctaaggctgataaggctgaagagtcaaagattaaagaaataataaaagtgccaaaaattctgagccctccgacaaagacaaaactgtcgaaggtgcaaaaggcttctgtcgcaactcccaagaggagaaggatggctaacatgctggatgttgtgctggagagtacaaagtccttgagccctgctcctacaaagaaaattgctgaagctgccatagcgcaagccgaagctgaaactaggcaagcagaagccgaagctacaaaaactcaggctgaggccgaagctgggccttcagcgcccgccgcggtgaagcctgccgcgcctaaggaaaagatggcagagcggattgcacctgaaaagatcgagactcctgctcccgatgctctaattgaaaatgttgactacatcattcggcacgcttcgggaaagaaattgtctgaagaagaaactctagaagccagacactatgcacaaaagttgaaatatccgaagggagctttagtgtttaat

SEQ ID NO: 90248 - DNA, 294 bp, Zea Mays
aacgatcttctttggtacaccgtgtagagacataatccgagccatatataactctgccaattgagacaccttataagtagtcttgaccagaatgaaatgagccactttggtcagtctatccataataactcatatcgaatcatatcctttcgaggtgcgaggcaatccagtaatgaaaccaatctcttcccacttccattcgggtatcttcagtggatgcagtagtccagctggcctctggtgttcagccttaactctttgacacacatcgcacatagccacatgtgcagccac

SEQ ID NO: 90249 - DNA, 487 bp, Zea Mays
gatattctcagcattgtggaagaacaaatcaatacatgctagatctgaaagggagaaagtttgtactcaagcctatgacccctcaacaaatcatggctgaacatttacaaaagaaaactgaaattagtgcagcaagtagaggaggagaagagcaaaagaaattgagtgccatccacaattcggtgagcgagtgctacaagccaaattcaagagataaaagtaaggaagagggagaacaactagttatgctagccacaaaatctgagctgagagaagtgaggaacaacccatatcaagtgctctttgtacttgtgaacaaagatgttttgatttctcctaacgacataacatctcttcctagtgttgtggctgatcttttgcaggactttaaagacgtgtttccacgagaaacactggctggactacctccaattcgagggattgagcatcaaatcgagcttattccaggggctgcacttcataaccg

SEQ ID NO: 90250 - DNA, 444 bp, Zea Mays
tttatttcttcattagaaatcatattctagaattttcctatttaaatataattcactagacgacgtctaagattttctaaaagtccagggaccaatttgtaaaaccgaggaccaaaatgatgtttcttgaactaggatggacgacaagtttcttattaataaccctgtggactctttagtgaaactagcatggcgaagaggtattggcgcatctgggcggctggatccaaaatcaactgttcagattagcctcaccattcaagttgagatattatttgtgtcgtcggattacacatctagggttgagatcatccaagcgaaagggtatacaggtgccctaatcatggcgttgctccatggatctacgacttaaacctcatcttctcccctccgaccataatgggcggcgctccctcaccgagcggcatgaccacactagagtca

SEQ ID NO: 90251 - DNA, 356 bp, Zea Mays
ataaaaccatattaatattataattgataaatttgatcaaaatgtgtaacttagaacagctagatctaaagtaaactgtggtttggatggactgagtgcgacccatcaattttattgggcacacctaatgaaagaaaggaagattttggagacttgtactagttgcgtggcatatgcatgcaagtatacaaacgctgctccctgtcctgctcgagccactgagcaatatgccaacaccacacgcatagcgttcaccacaaaaactgcaatttcgaacctccccaaccaaccgaaacgacgtcacaggcttcagtacgccggtagttgaacgaactacggcaacccatgcatcgaaa

SEQ ID NO: 90252 - DNA, 824 bp, Zea Mays
tattcacgataacggcgaaaaccgagaagaagctacggtgttcagggcaatctagtacggtctagtttaatcgatcgagcctataagcaacaggagacctaagagatgctagaacattcaacagagggacatgaatcgacttgagacaggctgaccacggtgagagaccttcacgacgggattccgactgatttgggaaatggtcgattgggcggctctggtggacaatttgaggcatgggctggtgcgttggatgcgtaaatacctagcagagttcaccggggtggcaatttataggttccatcgatgatggtggctaattttgagaagacgcgtggcggccggagagagggactgagtcaccacggtgttttaccgtggcagtcactagttgaggagcaacggcggtcactagtgagttgttgcggttagcagcggcatggttaaagggtcatggcgtggcgcgatcacggcgaacgacatataccacgacgacggccacttggccacatcgccggcgtaagtggatgggcgatagagcgaccatagtgttctgagttcatctgcgacgagatctttttactgtcgagcgtaattcactcatccgaggcacgaatcgtgatggtcagcgcgaatccgggcgtgggatcgccggcggcgaggttcagcgcactagggatatttttcagatactgtaccatcagactttcatcagagcgtctgacagaccgatttgcagggcccagatctcagatttttatatgacaacttgttaatcctcctgtaacaaagttgttgatctataatccaactttgatcttgct

SEQ ID NO: 90253 - DNA, 318 bp, Zea Mays
gtgcccttcagcatggtagtagttggaacaagagtctaccttatgctgagttctcatataatagttaccaggccagtctcaaagatgtcaccgttcgagactctatatgacaggaaatacaggactcctctattttgaaccagactagaggaagacagttctttggacgtgaacttattcaagaggcagaagaacaagtctgtataatttgggagaatttgaggatagctcagaccagacaaaagaactatgctgataatagagggagaccactggaatttgagaatggaggttatgtgtacctcaagatgtcaccac

SEQ ID NO: 90254 - DNA, 886 bp, Zea Mays
gccttaccagggtgatctggccacggaacacggagttttgtgcttgccggagccagaaaagggggaaactagggtcgcagcggctcggggcgaaattgggagatgggatcggggctataggaccgtaagagactgtgctttcaccgtgcgcaatcaatttgggcgaaggtggagagggcagtgcgaatttgacttcgatttggttcactggtgtgcgtgatgaccgagccttgccgtgatccagggggctatttatagccgcggatgtccggcgatcacctcgtggcccgaataccatcacaaacgcatgccaagcacgtagagaagtgatacagtgagaaagaatcacggtgcagaggacaccgcggcgaaaagggctgacgcgatggccgccggtgaatcactccggccgagctcgggagatggcgccacgtatgagtcaccctttccccggcgttatccatcctataccgtgcacgaatccggacggcgatcaacgacggcgagctgagctggcgttctgatccatccgaacactgtaccatggcacatcttcgtcagtcgcctgaaccgacccccttccatcgactagctctcatgattcttgtgaataaccgggcaaaattccttaataaggtttgttcttgattcaacagtcttcaatccttacacaggacatttgggtcaaaaccgaggggattcgaagatatggcgcatcaaacttgacctcacctcactggaaccttgttttaaccttaggttcagtttcagttttctagaactgttctgacagagcaacttggaataggtttttctctaatttttgtgtcacaactcaaaaggatatctgcatcaaagttgttcctctttaataactctagaactt

SEQ ID NO: 90255 - DNA, 384 bp, Zea Mays
tatataatggtagaaacatctattgaattgttgtcaggatctaagcgatcaaggtcagaaaatatgtgccaaaaccttagtggtttgtgtctacatcaaaatgatggcagtggtagaggttctggtgcagcagcaacaaatgatggctgtggtagtggttgtggtgcagctgatgtaggtagggatactttgccaagtggaggtggcagaggtagtgctgctgctgcagcggatggaggcagcaatagtgaacaagccatcaatattgaggatgatgtccctactggaaaaaggcagaagaaatgcacatctgatgtatggcagtactttaccaagaagaagttggtcattgaggataatgggaagacatatgttcagttgtgg

SEQ ID NO: 90256 - DNA, 381 bp, Zea Mays
aaggaatgaatagtgacgggctcaaactagcccgagctggcccatgaacagagaaatgcacccgcgcgcgccctcgttggacaatttgcgtagagaccctcggggatttgaataaccggtaaagaacccttagcactattcatctgtgtgtcttacgtttgcaccgaggcccctcccttttcttttcttcgcaagatcacgtccccgaccacggacgacggagcagctgctccggcgagcttgtaccgaccataatacccaataatccgcactctactttggtctatacctaattctacccctggcgctccactaggaatccccaatttggtcggaacgccattctagagctcggttcacgcacaccgtggaacttgagac

SEQ ID NO: 90257 - DNA, 958 bp, Zea Mays
cgcgatggtacagtgaactgaacaagaatccaggttcagcgcatcttgctgctggtgaactcacgccgcgatccacgccggcgttgcgattcgtacctagtggtgcgtggatatctacgtgaggtgaaagatctcgcgcggaggatgaacttggggcactgttactgctcagtcgctgtacccacttcaccgacaacgtggtcgcgcgaccgccatcgccatgcccgccgttcacctcggtcacgacacgccataggccgtttcatcacattgtcgtgagtcatgaagactaagccgtgaccgccgtaaaccctttgcccagtaaatgccacaataagcgactctggtgactcaccttgctctggccgccaacttgcctttcccaaattcggagccaccgcttgcagacgctataaattgagtgtgcggcctgcttcattagcctgttacaaagccaggacaccaactctcgcccccgattagccaccgtagaccgcaaatttcgttttcccccccaaatcggccaaaatcgccgccgtgaggcatctcgccgtggccagccgatttcaggtccgttcatccccttccgtgccatgttttagcatccttgatagttaacgttgctcatcggcccaaccgattgagcgctaccacgttctggtatgaggaacatcatctcttcgccgcggaacacccccgagagcacgctcacgtcgactcactcttccacccccactcggtccaaattagtgtgtgtacgtagggattctttaccgatttttcaaatagatgagggtctctacacaaagttgccaatgcgggcgcgagcgcgtgcattttacctggtcatgggccggttcgggctggaatgagcccagtcctgttcactgtttttccttttctttttgatgacagattaagaaattaatagaaaatagtagaaaatgataaaaatatg

SEQ ID NO: 90258 - DNA, 386 bp, Zea Mays
aagcagtgttacctgtggaaataagtttgaatgctgtcaggtttgccagacaaaatgatctaactactactgattattataattcaatgatggataatattgatgaggtgaccgacaagaggatgatagctttgggagcaatagaaaaggacaagatcatggtagctagggcctacaacaagaaggtcaaagcaaaatcattccaagtaggagacttggtgtggaagaccattctgcctctaaggaataaagaccgaaagttcgggaaatggtcgccaagctgggagggtccttataaagtgaaacaggtgatgtttggtaacgcttatttactacaaacattgcaaggcaaggatttatctaaggctttgaatgggcgtttcctc

SEQ ID NO: 90259 - DNA, 393 bp, Zea Mays
attcctcttcccgaaaaagacgaagtgtttatctatcgaagctttttgaaagctgggctacattttcctcttcataaaatgctggtcaaggtctaaagagattcaaagcatacctccatcagcctactcccgaagccctagttaaggttgggatcttcatttgggtagtgaggagccaaggcttagaaccagatgttgactgcttttgcaatattaatgagcacttgtatcaatcaaaggctactagaaaagagcagtatcataataactttggttgttatacctttgtgtaccgatcagatgttaggcgccctgtcccaacttttcgatagaaatggctaggctcatgactgaagcaatggttctatgttaaaactgacttggataagaggt

SEQ ID NO: 90260 - DNA, 859 bp, Zea Mays
caagagttgggatattcgaggatccaacattcagttgaatcaggtcttcaagttgaactgattattgtgtggtctatacccggaggatgcctccaaggaggccaaagaacaaaccgagggcaataaaaaatgtgacagcaagggtgcggtggtgagtgaagggacctccaagaggaatgatgagtcccgagaaccgtagacgaaaaaagaaaaagaggatggtgcagatgttgggatctcatatctctgtcggcgctctgggggtgagtggtctagtgtgggtgcatcgactgacttctgcgaagacctggttgtgacatgcatgaagctaggggaggtcgtggtcgagcaagtccttaaggaggcattatcatgaatgttgaaggtcactcagggtgagtggcttagaggtgtgcctattccatggaccgttggcgaagactttcttacgtctaggctagtacaatcatttaaagtgttcctttatgggcgtaacattgatggtgttgtgtcagcttcgatggaaagttcccagaaggagtcaaagaagatggggcctgcatggttggggaccctcaaagagttgtgcgagacttgctagggtctagaatatcccccgcgaaggctatgatgcctttgagtgttgcggctatgacctcgttcacgaagggtgtctcgacagggccactgacaggcagcaccgcgggtgccttcgttcgtagtggatgttgaaatacccgttgacgattacctcattgacaccatcatcagtgtggcgaagaaagggactacgacaaccggtagacctggcgagcttgtccttacgtgcttttgtttatgtcacggccgtgcctagggg

SEQ ID NO: 90261 - DNA, 1171 bp, Zea Mays
aagtaatcttttgcggatcaggacaactttctcttctgcctctttaacaaaggcaggtccttctagtgtcttttcccctatgttggaccacattagaggggtctggcacttccatccatacaatgcttcgaatggtgacaccttgatactggcctggtagatgttgttatacgagaactctgcatacgacaaactggactcccaatttctgtcaaacgtcaacacacaggctcttaataaatccttgaggaccttgttgaccctttctgtctgaccatctgactgggggtgataggcggtgctgaagtctagcttggtgcccatagcttgctgaaggctcatccaaaattttgaggtgaactgtgttcccctgtctgacactatcttccgtggaataccatggagtctgactatctctttaagatatatccgggcaagggtggtggctcctccgaaggtagttttcactgggatgaagtgggccactttggtaagacggtctattatcacccatatagagtcgttccctttttgggtccggggcagtccggttacaaaatccatgcctatttcttcccacttccattcgggcactagaaggggttgcaataggcctgcaggcttctgatgctcggccttagttcattggcaagtgtcgcaccgggccacatactgtgctatctctttcttcattcctctccactagtatctagttttgaggtctaggtacatcttggtggtccctgggtggatggagtaggctgagttgtgagctttgtcaagcaggacttctcgtgcctccccttttggtacacacagacgatttttgaaccaaaggactccttcctcatatgtcctgaagtccggaagtggttccttgcgagctttttccataagacctgctgtctcagtgtccaggcgttgggccttgcgtatgaggtcttctagcattggcttgacttctaggctgccattgtctcccagacatgcattcagctgagctgattccttcttccaatcttctaagaagttggttccttcttcccgaaaggttttcggctgagggcgtctgctaccacgttggccttcccggggtggtagtggatctcaaggtcataatctttgatcaattctagccatcttcgttgacggaggttgaggtctggttgag

SEQ ID NO: 90262 - DNA, 931 bp, Zea Mays
tccgaatcagaaggtggtggcagtgacgaggatacatacagccaccggatacgtccgtacaatagacatggatgggaacgattacgcactcagtttatattcagagcgcttgaacgatacctcatcaccccatgcgagcacacaatagataaagcatgacgtctaccggcggcgcggccgggccgaagcccagaaagtgaagttgcggtgacccttttggcgctagggacccgtcatctcctatcatagggaaaaagggcaaaaaaaaaaaaatctaaccatcctgtggaaaggtaggcagctgtggcgtcatcatcgtcaatctcatccaccagatccggtatacgaaagaagattggattgggaagaaccaatgctgctgcgagtgcaaggatcggaagaattgtacgtgatgacgccaagaacttttaatgacagatggatcatcggtggtcggtccaggcacgcaatggcaacgcatccatcccgctccagtctcaggaaattaaactacatagcagttctctcaactcaacttgttgttgcttggtgacatactacatgatgcaatgcaggattgcagggtgaagcctggagctgatctaacgagtgattagctatcgcaaaaccaaaccaaaaggcaggcccatggatagattcgatgcgatcgttatcgtgttcgagtcctaaaagttcatcgctatcatttgtattattcctaaagcacttactattcctatattgttttcggcaggaattgtttttaatcaaatactccctttgttccaaattaaaattggttttagataatgagtggatccatataatacttaacgtatatgtttcatatgtgtctagattcgtcatcatctatctctaaatgtagacattaaaatcaaatgctaaaacgaatactattttgggacgttgg

SEQ ID NO: 90263 - DNA, 1814 bp, Zea Mays
gtcgtgtttggtttgaggagttggcctagatgaaatgatccatcatgagaatttatgtgggatgactctgtccttgatgtttatatagaaatgcttatgaggaatgaagtagtgatggatcaatgcatataagctgacgtttcgtctttgttttgtacatttacctaggttaggaagctggaacttttggtcggcctattggtgttcgttatggcagcatgcttcttcatagagatgagcatagtgaagcctcctgcagaagaggtcatccacgggctattcatccccagtctgagtgggccgggcgccactggagacactatagcccttcttggggctcttgtgatgccgtaagaaatcgagcattcaaaatatttgcgtgtatgttttttactttctatgagattttgttttgggtagaagcagcttgaaatctttttacagctacatgcggtcataagtttatgttctaaaactccattactttatgattgtagttcttatcatgtcgctattttttagtctaggtattttgtcagatactgtatctccttctcagtatgaataatcttttccctaatttaattacaggcacaatctattcttgcactctgccctggtactgtcaaggaacactccgtcatcagtaagaggaatcaatgtgagtatatataatcaaacggattcagaattcagaaacaattcagcttacattctcgcattccacagctgagaaaaaatggctacaaatcaatcagggcacatctgttcgctcgtttgcatttcaggatgcttgcaggttcttccttcttgaaagtggtgtagcgatgttcgtggcactaatcatcaacatatgcatcatctctgtctctggaactgtctgtaactccagcaacgtctcaccagatgactctgcaaaatgcagtgacatcaccttggactcctcgtccttcctcctgagggtattactgattttactgcctggtcactactcactagctctggggctctgtttactaccagagagttttaattaattgccagcttatttttcatttcagaatgtgctaggcaacagcagtgcggttgtgtatggtgtggctctcttggcttgtggaataagctcttccatcactggtacttacgctgggcaatacatcatgcaggtagcgcttcttggcctgttgaagatgcatagaggatctgtatttgtcctagccagcaatcatcgttaaactaacagattataatatcatattctttccaacatttacatacttgtacacagattgttatacttgaagcacggtttgcatgtgtttggctccttgctcagggtttcttggacatcaagatgagacagtggctgaggaacctgatgactcgcagcattgccattataccaagcttaatcgtcgccatcatcggcggatccagcggtgcgggccgcctcgtcatcattgcatcggtacagttgttccaccttctggtgcatcgattattgtctgttcaattacataagcatcatttacaggatctgtaaatacaacttatcggtagtttaattgtatgaactaatagcaaattcattggcttaaactcgtgattgtatatagaaaatccttctggcgattggtctggctgacttgctgtaaattttgtgcagatgatactgtcttttgagctgccatttgctctcatccctctcctcaagtttagcagtagtagcagcacgatgggccaacataaaaactctatatttgtaagtgcaaaagtcggttgcaactaacagttcttttttgttttaaaagcac

SEQ ID NO: 90264 - DNA, 977 bp, Zea Mays
gtcgtcttggctagctccatctttaggtgatgcaacaggaggtgtctagaagccctacaacacatatttggatattaaacactaagttattcatttgtaacacgcacacatgtaaatatgaacgaatacctgatttggacaaaccaaagggacatgtggcagaagtggaggtggcggtgcaagtgctagaggtagcatccggaaggctcgcatctggactcccgtttgttgtgccaatttctacaaattagatgcaagtaactgttgacgaagtaacaaacaaaacaagtttatagttatgaataacatctataggaaaggatagatcctaaaaccacccaagagtgactgatagagcccgtagttataataaggcatgagctcaagtaaagtttcagtagcataaccctgtaattccctatttgcatgcctgaaaatggtacattggagaacatctgggttatgctgccaaaatttcactcaatcttatgacctgccataaatatgagctctatcgatcgctccaaggatgtacaatagtgggacagtgcgggaccaacacacctcacatgagtcgcatctgaggtatgccagtatgaatgagtgacacataggttccctttgttaacattatgatacatacgtttatgcgtttatgctaggagagagagagagagaagggaacgacatgggcgcaccgttccatatacccggtaacttccgacgacctagccctgacagccgtcagacataaccttatgttcgacggctgcccagaccatcggagattaacttacatccgatgtcattaaggacaagcatcacacataagggtggccatcggactttcgttcatttcatattgtgctaggtttaggcctagtttttagtgaggtttgcatacctcatgatatcaggtacttgtgcacaccatgtttgtacttgcacagtgcaagatcacaccaactgtatttgtg

SEQ ID NO: 90265 - DNA, 568 bp, Zea Mays
ctgtgttgaaagctattaaacacgcctgcacttcgttaccaattgcaatggacagcctcctgatgccaaacggtgaccatatgggaccctaaatagtgcccctcacatcttctctctcactcagatcattcttcacatagaaccgttgtttcatccaagagcccggccatttcttttgaaatgttggcacttgataacttgcctcagagtggggcacgaagctgtaacacccgaagttattatggtactgctccttcccagttgcctttgtctggtaagataattcatgaatattacagaagcacctagcatctggctctagcccttggctcctcatagcccaaatgaaaatgcccactttaattaaagcttcgggagtaagctgatgaaggtatatttcaaacgtctccagtacttcaaccagcatcttgtgcattggaaaacgaagctcagcctttatgaagcttttaaaaaccactacatcatctacttcgggaagaggaacagtgctttctcccccagtcctcactatagatatatcatgaaaatatttgcccttcatcgcttt

SEQ ID NO: 90266 - DNA, 558 bp, Zea Mays
aagagtttgatcaaagttcgccagagataattcttgcagactaatgagggcagacaaggtaggagaaggaacaccactactttccccactagctacgtaacaccagttgttcttccgaatcaaagggatttcgtcctcttcttcatcatccccatcaacaacacggacagcacacccattggggtcagcgtcagacgggtcacacccattgggatcagcgtcagtaaattcaggcacgggcacttcctcagcagcaggagcagaaggaccagcatcccgatccaagctagacactcgccgaagacgtctcttcttctttttctgcccatcagcaggagaaacgggctgattggatcggcaagggcgcttcgagcgaacattgtcaggcctctgaatatccaaggctttaccagtttccgggagaggcgccaccaccaatgttccagcaggagcggcatcagaagaatcctcggctaacatatcaagcatgacacttatctctgcatcactgggatccaaaggcacctcaaagtgaacctaccgttcatcatcaggaat

SEQ ID NO: 90267 - DNA, 625 bp, Zea Mays
gtttcagagtcttactctctcaatacttgtgcgcgtaaggattcaaatgaggagaacttggccaacaacagaactgaagaaaatgaatgatgataggatgaaacttttatcttcgagccagaagaaccgagtgggcgtgggagaaccgagcgggcgcaggagatcaagagacgggaaattacttctgtcatcatatgagaaactctcgtaacttccggagttacaaacgaagatttctagaaattcctttcgtcatcatacgtgaaactcccgaaactccgagagccacgaacgaaaattcctctgcatacagtaactctctgagtggcaaaacatcgccacgccgcatgcccgcgccatgcctcgacttggctcaacgacgacaacacgtatgtgtcatgccttcatccttttctcaacctctccatggagacaaatgaagtccaacactccaaccgtacaagttgagttaacattcaatgagaataccaaatggtactaaaccataacacaaactttatttaatacaggctttaggattatgtacttatttatatgggccaagcccacattataacttacattcaccaccaaaatctaggatacatattaaaaactatatttt

SEQ ID NO: 90268 - DNA, 584 bp, Zea Mays
gcaatctccatcttctctgcatcaagcactgcaactgtcctttctaaagaatgtggcttcagcctacgagtcaaaaccttagctctcttcggcttaggcgcgatggaagaagatgaagttgccattttcctttttaacccttgttttcgggcaggaaaatagtaatcaggataaaaaaactcatcacatcaaaaactctattcagtctcctcttgccacgagggccgaaggcagtggtcatggcttcgtcctctgcctttgtataagctcccaacagctcatcactggtagcttcaacagcctcaagcaagtcatcattcgactcgtcaaattgacttgtatagtgataggtgtatcttagataaaccagcccaccttcgctggagccagcagtagtctccttcggcatctcccagtcactaacaagtggccacaccttataagcaatgtgctcttgaaccaaatccctgtgccaatgtaagtacacaccgtgttgaaggccatcaaacatgcttgcactttgttcccacttgcgatcgatggtctcctgatgccgaaacgtgaccgtatggggcgctggatta

SEQ ID NO: 90269 - DNA, 305 bp, Zea Mays
aagaggcatgtgttgcagtcagtctcaccgctgcgcgaggaagggggagactgtagcccctaaacgatgaacagttttagtgtaggagaggtgaagaggcatgcgttgcagttagtcttacgataacacatatacacccaaacaatcacatagtgcacacatgcaccttatgtgcaactaaccttagaatatatataattattgtaagtaatcaaaacataagtcaggatggccgaggggtctaaggcgtcagactcaagttctgatcctcttacgagggcgtgggttcaaatcccacttctgac

SEQ ID NO: 90270 - DNA, 529 bp, Zea Mays
ttcgtaggtcatgagtgggaggcataccggtgccttcactatggctcggtgccaagcgcagttaatgcggtcagtcatttatgacgggttggtcttgggctagatgcaggatccacacgagtagtttccctctggcatgtctggccctcctatcaggttctaccaagcctgacccttggcttggtgttgcggggttcgtccggggcgggttctttcagggtagacgttatctatctcctccagccgaccaatgggccccgggtgccagggccctttccccagtgtgctcactgaccgatgggccctagggactaaggatagtatccctaacagtagcccctcgagctcctgggggagagtatttcccctcgggggctgttcttgggttgagcgatgtttgtccttccacctttcaagcccctgtgatggttgtctcttcatgaggcgtgccatctttaggcatggtctattcctccgtaaggtggggatgggtgcttttccttcctttcaaaagcttaagcgagcgttc

SEQ ID NO: 90271 - DNA, 819 bp, Zea Mays
ctaggggaagccctagcctaatgttgtcatcatgtctagctataccaggtcccggatgtccataaaaggagcctaggacatttttgactccctcaccccaatgcacgggtgagttgcgctcacccacgcgcgcgatggctgcggttccacgagagtgttagcctctcccatcctacgcacgacgacgcttctcaagagcatcgcaggcccccctcttctcatgggctcgctttttctcctcgtccttcttcttctactactgctttgtagccaaccgacgctgccccggttagccgcatcttgtaggatcagaggtagggtggttcggtaccctcataacccctatagatggatagaaggacagattgagacaaagaaataagggcgaatgtagaagcaaaaggtccaggactcaccggggatacatagccctgctcggggcgcattacgacagggatggtataatccgccttccccatcgccccccttgattcgcttgaggagctcgttggtggaaagggcggccaacgccatacgggaactctccatggaggcctcgggcgtcatctcgtccaggcgcaagcaccgctccaccagcggcagcaccctcctatggtggaaggcaacgatgaccctgatcgtgttaagcccccagtcacggagcctctgtagggcatccaggaggggatatagctaggcctggtgctcccacggtgtgcctcaccaccagtcctcacccacagtagtcatgacccgcttagtgtacgtaggtagcctctcgtcatcgttgcgaaggtagaaccagtgactctgccatcc

SEQ ID NO: 90272 - DNA, 449 bp, Zea Mays
caccaaattcaaccctaaacgaccatttcccctcacttaattgctagatttgtgctctaaatcaccctgcccacggagacagcgcgatcaatggataacgagaagtgtcaccggcgatcttatgggtcctagcttaattggatgggtcagggagtatcaagagcacctaaggatactaaaatgaggaaccagaggacatgaacggacttgtagcatgctggccacggtgaggtcacttcacgcggtgctctagaccgatttgggggaagtgagcaattcgggggctctggtgaacaattgaaggcacgagttgatggattgggcgcttgactaccttgcggaaccgacgacatgctcaatttataggatcccggagcggtggcccgtgaatttgagatggcgcgatggcggtcggagagagaggagcactgtcgcaagagattggtggc

SEQ ID NO: 90273 - DNA, 371 bp, Zea Mays
gtgttccttaatagtctagttttagaagctacatccaactggtaaacagaaattgcagaaaccttttatgtggaagcctctgtcattgagtctgccccctttagctgtaagctgttttctaaatattgttagtcaggcttagttgtttgagactttgtttccattcgtgaccaagggaactgtgaaatgtgtagaagatgctcatgcatatgcatcaaattgttccgtaaagtcatcttaatgctcaaacagtttttttatctgccccaattgtacactgctttatgaattatgtcatttaggcttagctgtccgagataatttcatttgtgatgatggtaaccggagcatctgtccttttgttttaaaca

SEQ ID NO: 90274 - DNA, 559 bp, Zea Mays
ccaaaagacatcacagtgaactcgtacaacccatacttggtaatgaatgtcgtcttcggaatatctgaaggtcgaatcctgagctggtgataacccgacctcagatctatctttgagaacacgctggctcctctcaactagtcgaacagatcttctatcctgggcaaggggtacttgttcttgattgtgacctcattcagagctcgataatcgatacacatccttctagtgccatctttcttctccacgaataggacaggagcggcccaaggcgaggtgcttggccggatgtaacctttctctgacaactcatcaatctgcttcttaagctcaaccaactctggtccagatactctgtaagctctcttaaagatgggggcagttccaaaaagaagatctatggcaaactcaacttttcgctcagggggcatacttggtaagtcctttggaaacacatctgggaactcggacacaaccttgataatctcaagtggatctgtttcactgctatcaacagccatctaataacaacttcctttctttggctcaggcgggacta

SEQ ID NO: 90275 - DNA, 581 bp, Zea Mays
agccgacgagattgctgaaccaaagccggaaaaaatgaccagttttcggtaaaaaataggttgcacttgtcagccgaaatctatgagcggttagatttaatatgagtttaacgtctattttatttaattaaaattagatagattttaggcttatattaaatactatgatgcatcgtaattttatagttgttgactcggtgccgaatgcggaggtgaggcgagctatgcatgatggaattttgccgcttcgtacaggctgatgggcgtatgtctatcttcgacaaactctagctattagctcttcagaggagcctcacataacatgaatatttgtctctacttactgtggtccgctatcttaagcaacacaccatgtcgacttctctgcatggtacaatctctctctaaatttatgtcgacttcttctatgatcagtgtgttttcatctgtgtgtgctgctattgcgagaaccgtaccgtagcgtggcttcggcttgttcttctataggagctactactatagcatgagtgcacgacaaatctttcatactcatttcaaacaaaatttatgtacttcctttt

SEQ ID NO: 90276 - DNA, 614 bp, Zea Mays
agctgatgtaacctcgcagctcaatcatcaaggatcagacgaaacagtccgatactcatatgcacctccccagggccaactctcatgtgaagtggagtttgcttggcgccaccatttggatatatatataaactaacaatgtattaggtggaacacgaagagaagaaaactgggacctccgaaagctaccgctaattatactgtaatatgtggcttcgtgccgccgtattcacgaatcttcattcctcaaatgtttgtttgttttcctttttacgatacatacttggtcttattggatggctgcgtggaagcaaccaggatcaagcgagcttggtcatacgtccatttcgcgtgtatatgtagatgccgacaaataagcctaaaatgcaccggtgtgtgcaagtacctctctgcagaggtcctgggtcggacggttcgcgacctcggcgtagaagctgatcctcctctacacgctttcggacggtctgcgcgtggggcaggatagtccacgatggcacagaaagacttcttctccacgaagaaccctagaacttgccccgggagagatcccatcgaaggtgagagttccaaggcgttgctccagggtcgacaga

SEQ ID NO: 90277 - DNA, 751 bp, Zea Mays
atttgagagaaaatcgagctcaaagattgactgtcagttgatctgaatggaactcgccatggtacagtgcctgaacagatcagaccgccagcgcggcaatctcaccgccgacgaccaatctccgccgcgattcgcgccgccgccgttgtgatttacgccaccggtgaccagataagcctgccagatagtagcttttcgcctaaggataactccggtgactcaccgccgtgcctccccccttgctcaccgaacccgtggataaggttctcaccgtcgttaagccatcaccggcatccgccgcgtgtctctacctttccaccgcatcgccgtagcctactctcactcttcgttgatcaccggagtaatcgccacggcgtaggacaccaagacactgcgctagtaactttctattttctccggccgccgcgtgtcgtcatccaaattcccagccaccgctgtcgcatcctataaattgaagctaccgtaagctctgttggatcatcacgaacccagtcgccaagaatcatccccattcgatcaccaatgtgcccgaattttgggttttccccaattcggtttccgccgccgtgaaacacacttcgccgtggtcagcgcaaatcaggtccgatcatgttgtctttagtcttgttctagcatcctcatgtgtctatgatgctcaccgacccgcccaattgaactagactgccaccgtttgccgtgaacgcgttgttctttggttcatccgcgcggt

SEQ ID NO: 90278 - DNA, 427 bp, Zea Mays
atgtgtttttgtgagtgcatcaaaaactcatagtttatgtactaatgaggtagaggagggatagagagtatgagtaccatacatttagggctaaggtggatgacggtcatgattgtggtggcagtcagataattaagcgcctctgtcttggttcgtctctcctcctcgcgtattaaacccttgggcgaagcgttggtggccaacgacgtaggacgttaggatctacatgaaccatcaacatgttgagcattttgcgatcattagtgtgctagagggagatcgagttcataccgaattgtggcggctagagttctttagaagcacgaaaagcattgggttctgtggtggccttaatatagcgtctatgatgggggggcacaaccattggaaggtttatacccccccatcaaggcgagtgttagtttcg

SEQ ID NO: 90279 - DNA, 527 bp, Zea Mays
atctacctttccaaccagcaagtcttttatccattttttccaacattggacaccaaagagacttactgacttttttattatcaatggggactccaaggtatttcatcggaaggcttccaacaggacaagtgaaaatgtcagcatacaaattagtgcactctttagcttcccctaagcagaaaatttcacttttgtgaaaattaattttcagccccgacatatgctcgaaaaggcagaggataaatttaagatttctagcaccttccaaacaatcttgaattaaaaagatagtatcatcagcatattggagacaacaacaaccatttggaataatgtgtgaaataagaccacgaatcaaacctttttcttgagctttttgaataatgcaagccaaaccattagcaacaaggttaaacaggaggggtgaaaaaggatcaccctgtctaacacctttatgagttgcaaaataaggaccgatcaaatcattagttttaatagccactttacctcctctgacagtcttcata

SEQ ID NO: 90280 - DNA, 681 bp, Zea Mays
ttgaggtgggggtggctactgctgcacctgctgcattgctgctaaagtctgacaaattgcttggactgcttgagtctacatcaggaacatctgctcaatagtcatcggggatggcgatggcaactgctgctgagctacctcctcctaaggtgcctactgctcctgctgagcacgccttccacctctatgcctattatcagacatctgtagaaagcacacacatatcagatctgactctgtagtctttcagcacaagaaaagatatatggaaatcttcatggcactgaacaattgatgatcttcactaactctcaaacacagctctttagataaatataaaagtggaattaaaaggattgcccaactaaataactgactttattaataactacacaaagatccaacttcattaaaagttcatcacgacaagcatcaagacatatgacaagcaaactaactctaactaagactaactgagactaagacactgaattaagaattattacagactccgactctatcgatctatggatccaaatctatttgggtcctgcagtcaagggtgtcataatcaaagtgaccacggggcggcgagcggtaagagtgctgaatcccgacaggggtgggagaaccaccatccaaatagtggcgcgctgagcgctcagcatgcaattctgcaac

SEQ ID NO: 90281 - DNA, 362 bp, Zea Mays
cttctctaaaattgccgcgacccctcgggcatcggcgaaagcacaaaaatccccacggtcgctaagtatttcatcaaaagcttcggcctcttcgcctatccactgaataacccctttaggatcgccgtgaataaatttctgttccgaatagtatgctcccacccttgcgaagctatttttcagcttcttcgcgcattccaaggatgtttcgtagcatctcaccttggaatcccgaagatcttcaacatccttttgcacccttgatctttccatttcacttatctcctgctttgcctttgcaacttctaaattttcattcatttctgcaagctttttcttcaaacctttggcttcagctttgc

SEQ ID NO: 90282 - DNA, 349 bp, Zea Mays
gtgcactttaatgtgttgcactgacatggcttcgtagacactctcggtcgatagagtagtggtctctaacaccgactctagcagtggttgaccatgcaccgcatcatggacattgtgcggtcttgcgtagtccatccctccgctacctcaagcagggctagggtcggatcagactcattgtcctcttctggcattgcctagacaactctctcgaacggtctagtctgacaaccttagtggggtcatatgtgatgtcaccactggctccactcctattcatggtcctttcaactcacatgacaccttgggagctttacgatgagcacctctttgagtgctaggaaaccac

SEQ ID NO: 90283 - DNA, 397 bp, Zea Mays
tctggttcctctggcgattcactccttctccgccggcgatctcctgccaccggcggccaccatctccggcggtgctccggtgatcttgcgcacccctcctgctccccctcggtgagcagccctcagtcctccccctctgactctcttttctctgtcagttaggcagtgaacaccccttttgcaaatctcttccaaatctgtgaattcctgtgaatccaattgatggaatgagttcatgtacctccattgtgtatccctgcaaacttttagctccttcgggagggcattcccacctcaaatggccatttccctaaaaccctagctccccgcacgccacgtgctcggtgaaatgcccaaaccagccaaacttgctccaattgaacccaaatttttcagg

SEQ ID NO: 90284 - DNA, 588 bp, Zea Mays
gggcgagagagggaggagctcccaagtctcttatacttggttagacctaatgactatgaatgtggtgctctctaccaagccttggctgtcgtggtggttcgctccttgatttcggtctctatggtcctctgggtctggtcgttcggacgtctgttggccgacctccccctttatataggctaaggtgggggtcggctaccagtagcttctcaaggaaggagctatggtgcgatggtaaaatagggcgttctaccttagtaaagtcgtgcttgtttgtatgtgtctcggtcgtataggcttccctagtcacgctctttatggctggtggtgtgggcgacgaagagctctagcatcatcattgtcgtttctgtgccataccgacccctggcctccatagcctaggtctcgacgcagctcgtcgtgttgcgggccctgtagacggccagtgcactcaggcctagggttgataggtcatgagtgggtcgtaggcctagggctcgtaggttgagtggaaggaagaccaactcccccattgtggcttgatgctagatgaagttaatgtggccggtcacttatggcagattaatc

SEQ ID NO: 90285 - DNA, 486 bp, Zea Mays
acaaccctaaacttccatatgactactatatagcatgtgttacacacgatctcgaggagatgatcgatgatggcggtggcgcaagtgaggagagggggaagggaagggaagggatgatggacgattcaaataaagtagttcatggggaagggagttcagttgtccaactatctagactgttgattttgatactgtgttaagtttgagtacaatatgtttggtgaatttagtgggataatgagtatggggtgatttggttgtgtgacttttgcaaagtttaaactgatggattatatagtggtaagtgtgggggacagatattccccgggtccacttgaaggcaagaaggcctcgcgaagggccccaggcccattattccgcaaggccatcccttcgtgggccaggggaggaactttcggcagatcggatcaactcaagcccatgcggttcgctgaattcaagcgctatccgcagtagtgatccgat

SEQ ID NO: 90286 - DNA, 837 bp, Zea Mays
gagagggttgctggacccgtggagctctggcgcagactactggacttcatcagccgaacctcggtgcgcatcggtgaccaacatcgtcaactaccgcatctaggggagctctccatcgccgcgaagccttcgaccaccgtggaccgacctattcgtcttgtcaattgccggtgagaacatctcctccagttccgccatggtctagtagtgcgatagcacgggttcaattagtgaatgggagcgagaattgcagaaccgggcaacgctggcgatggcaccgccgcttggcaaccctgtgcaccgccgtggtccgatcagagttgggggaaaggtttatggccgttggattgtgcatcggtgggtctccgggtgtgatgatagtttgtaggtctataaccgttgatctatgtggcaacagtttagattagatctgagtaaacgtttcgcgttaagtcgatctggagcgttgatcagggatcgggtggatctgggttggtgtccgctgttctaaatctgaaccatagatttcctatcgggcggatctaagctgatctccggggatcgaagatctcaaccgttaatattagatcaggtggatgctgagtggtccacgctatttaaaaccttggccgttggatctagatccgagggtcggtgtaacgtaccggttcggatggagaccgatttaatctgtgttgtccattttaaatccgacgaccgagaattagagataccccttcgcgggtctgatttgctaaagagaccttggaaaattaggaattagaacccacagtccacctcgggttacactgtgtctagggaattcttgtagaacag

SEQ ID NO: 90287 - DNA, 1216 bp, Zea Mays
gagccatgccaaggagggcttttctaacaagcttttatgagagtatggtgtagagataatcttattatcatgagaactacatataaagaaagattaaggagtctaaaagggtttaggatatagagagtgactgaatctgctttcacaataactcgatcgattatatgttcacgctgattttggatgatttttatcaaggtgattctcataaaaacggcctgaaagttatatgtttaatagtacgcaatagcttatgatgactggaagtcaaaaataaaccaaaacaaacaccctcacaggactcagctactcacattgcattaagtcgccacaaggccacgagcctaccatgcctctcctagtccttggctatactactagtaaactaatgttaggtgcaaatgcaccatcttatatcatctctgacacatcagctctcgactccactctcgtctctgttgctccacacagcctgcaataggctatagactcaaccaacaactactccgctgtggcctctcttagatgttctccactatcttcactatcgattttctagctaaaatgttgttggtctcgttccctttagtatatagtagcggctacaccacaaacacagttggtaccatattgtaaaactacaagcccctccagtatatatattgtgcatgagtatcaaactcaattggtatcttcctcgactcccacacaacttaaatgtccggttggggtagtatatagcatccaagtctaaaactactaattggggtgacatataggatttctatgcactcaccaaacactatggtgtgatcattgaatgtgtcggtgcatgtccacatcaactagtcacactgagctatttgaattagggcatcctatgatttgttcatgttataccagatatgtacgttatattatagcccccctctattgtgttttaaccctctctaactatcccattagtggcatatccggtgctacatccgacgtgtccagtgtattatggaattctccaaacaaagctagagtcttctttgagtgtcgtatctatgacccgtttgatgtggtgtgtcgttcacattcacattgtcctatatactttgaagcagcaacccttcttcagtacaatatcacttatatctggtggatcactagacatgtatgtgctattcagcagactatttttctttgtttcttagtgtgtctttatccg

SEQ ID NO: 90288 - DNA, 447 bp, Zea Mays
ctctgagtcttcacgaccacactaatctccatgatagggtcttgcactatttattggatgttataatggcacaaggtgctgtcgagcctgctctgaatggtgactctttgattggaccggttgttccgaggatgaagaggaagacaccatctgaactgagagtatttgatgcttctcttcccttcacattttaggttcagagaatgattaccatgttgtcactaggaaaatgcagtaggataaaatgcttggtcaaatgtaggtatagcctcagcatactttgtaggctcgtgtggtacttcagatattcactgtatatctggttggttgtgagttcttgttgttcaaccttggaacagggaactgattttgtttcattcagtttggctgctttgaggtgtgattagtttgttctgttctgacatattggaatctttcctatttttt

SEQ ID NO: 90289 - DNA, 942 bp, Zea Mays
gtctatgtgaggtgctcctatcatttcaagtgtatgcacatgatgagatgatctaagggtggagttgagggagaaaataaaataagagagggggggggttaggaggttagggtttcaaaccttgggttgggatttttggatgttacaaacctaccccacttaaaggaatctcgccctcgagatttagactagatttgagaaaagataagggtattccctcctcaaggagtcctcactctcccaggtagcttcctcttctccttctctgctccactgaactttacagagcttcacttctgaggtgcgggtctttcggacagctgaatcaagaatcttgactggcttctctcggtactgaagatctttctgaatctgcactgcctcttcttcgatgtgactttctggtgcttgtaggcatttgcggagctgggatacgtgaaacacattgtggatgtcagacatggattctggtagttcaaggcggtatgctgcgggtcctactctgccaatgatgggatagggaccgacgaatcgcggtgctagttttcctattacttggaacctcctgacaccacgcatcggggagaccttgaggtagacgaaatctccttcttcaaatctgagctccctccgcctattgtccgcataactcttctgccgattctgagcttcaagtagtctcctgcggattagggcaactttctcttctgcctctttgacaaaggcagatccttctaatgctttttcccctacgttggaccacatgagaggtgtctggcattttcgtccatacaacgcttcgaatggtgacatcttgatgctggcctgatagctgttgttgtatgagaattctgcgtagggtagactggattcccaacttctatcaaatgctagcacacacgctcttaatagatcttcgaggactttgttgaccctttctgt

SEQ ID NO: 90290 - DNA, 1319 bp, Zea Mays
aggacaagttctatagcaaactccaccttctgctcatggcatttctggtagttcctcaaggaacacatctagaaacctcgatacaacatgtatggtctcgaggggggtggtctctttgttatcaagggtcaactggtagcaaacttctttttttggctcaggcatacttagttcagctgttatatcctctctggatggggacaccaatttcatagtcctcttgtcacaactgattacctcttggtactttctcagtcatttcatctctaggatgacatctattccattccatgtgtaccattactattaagtcagtggggaatcctatcccccttatttccacccttatatccgaacatattttatctgcttgcactctcccaccaccgaactaactctcattagcgaggcattggttctactggaatgttatgtgtctctacccatgatgtagtaacaaaggaatgtgtagcccatgtatcaaacaacatagttgctggatgagattggacttggaacatacctagagccacgttcggcctttcctgaactgtcttggcctctgggtggttcacctttccgtactgggtacaaggctagccacggttgcctgctccctcctgccgtgtgttctgcctttattgtgcattaggtgcttgttgtggttgttgtaccattttctttgggcactgcattgcctagtgaccttattctccatagtgaaagcatccttggcctcctccttgaactggtgctggttggttaccccgattggttacaggggtagggagtcggggtgcttgactgctctgccactgattctgatagtttccctatgggttgttctgacagtagagctgctgctaaggatactgcctctgaaactgctggtggtgttgacacatgctgaggttgattacctaagaagcggggtggttgctactcactaattgaggtccactcagtttgtgctttcggacctccatatcattacgcttactttcaatcatgatcaccctgtcaatcagatactggaaggtgggtaaggtgtggttcatgagttggtagtgtaggggatcaactaagcccctcatgaacatgtactgtttcttagcatcattgttgacatcctcatgtgtatagtgggacaactgcatgaatctgtctctacattcactcacaaacatgggtccttgcttcagggctagtaattcctccttcttcgcaagcattaatccctctgtcatgccctaaggagaagggtctagggcggcagggatagtgggccaatgactacacccgcagctagagcgcccccg

SEQ ID NO: 90291 - DNA, 480 bp, Zea Mays
atgcccagttaagatttcattaacacgagatgctcctgtaagtttggatgtgtgcatcggtgtctttgtagacggctgcgatgaactaccttctaatgttgggagaacaaaaagcatgaactcatcttcattttgtgatcttctacgatagtttggatccatgcaagtgatgatgaaaaatgacacgagtatgacactttgagtatgctgctagcttcttttgtcaattgctattgcctggagtgagttaagcacgagaaatggattggtatcacaaactgttatatatatacaagaaaatatgtaagcacatatgaaaagttgtgtgactcacctaatgaagtggcgcatctgcttatttgtgttgcaacacataagcgagtggtttataaagacatgtagcagcaagttcgtacttagctaacgtctagcaagacaacggttggcttgctgccactatgcaacgactaccttgtttca

SEQ ID NO: 90292 - DNA, 437 bp, Zea Mays
aatgagctcaatgtatgctaggagtggccaagagagccctcacacatgagatgcacttctatttatagccctcaacccaaacatatctgttatgtgcaactagcacatgttatgcgcacacgcggacggtctgcaccccatggccggacggtccgtcgtactagtaacggctataaagactgtttgaaacctatcaacgctgttagaaaaagtcaaccccagatggtccgcctacctaggtcagacggtccaagacctgacaatatggaatactagagcactgagccatttaaacaacccgggcggactctccgccaaccatggtcggacggtccacaccaggaccacatactatgcggctaaaaaccttggacagtctgtagtgcaatgactcaaaaacacattgtccctgcccaaactcaatttggctcatgcgg

SEQ ID NO: 90293 - DNA, 623 bp, Zea Mays
atggaattgcggtccaggggacctgtaatttctcgccgaagcttcttcctcaccgctgggtcgccctgcatgtggtcagtacttccacagccttaatcgtcggtgagtcttgcctcctgtggttcgccttgtcctgctatatgtgacgcaccgatgggtggcgagtttaggcgctgggagcactgagttgtcgcgctttggccatggccaccgtcgtgcgggttttgtgcgtggtcgtggttgggcgccagggggaaagatggagcgaccaccgtggatcctccaatcgacggccagaaattgatgtgcgcttaccccttcacggggttgatctgtgccatgggatcgataatggagggtgtagattggtgcaatgtgtggttgctaatcggtcgtcgatcgacaatctggcagtcaaggtggctgaccggttttgtgatttgtgtgatctagtctgatccgtggaagcagatcggacggctggggtcagacgataccccttcgcatgcaccattttgcatatgaacccctaaggaaatgttgaatcaacctgcaatcctctcctagtgttaaactaatttcagtcgagtcctgagttttataaaacaacccctggccttctg

SEQ ID NO: 90294 - DNA, 524 bp, Zea Mays
ccagagccggatcactactagcaacaccctcgggggctgggtaactgccagcaccacccttgagggctgggttttctgcaacagccacctctaaggctgaaggatcctcagtcacctccatgggagtcaggcaatcctgaccaacttcttgacattgaagactgccttccaaagtcgacgatgcatgagacactgctcgggatacctctaatcccacgtctggaatttcagagcaaacatccatcatgtcgccagcagtcggctccgacagcatatcctcaggaacgacatcctcaaaggcctgatcaaaatccgttatggacaattcttgaaggctgacaagagcagacagagctggagaaggaatatcactatcccccctactacctatataacaccggttgttcttacgaatcagcaaagcttcttcttcctcttcttcgtcctcatcaaaaatacgaacaatagtcggtgcacggtcacacccattgggatcagcttctgcacggtcacacccattgggg

SEQ ID NO: 90295 - DNA, 441 bp, Zea Mays
aaagatgcagtggtgaccaaagcctgaggatgcttagaatacatcctgtcctttgtcatacggtgaagctcaactgatcaggtcgttaccccttctgcatagcaatatgccatttatgacccgcacgtggcaagtgatgactatggttaaatatatatgatttcagaatgacaaatcatgaatcagttccctaaacaaatggtgtcccttaaaaagatggcctctctagacaagcatcaaaatctaaattccttgtgtgcattatttcaatatctgcaaaggctcatcgatggtgaaattctagtataaccatatccacccagctatgtgtacagtgacttattaccctggaaataacattttgctatcagattctaatgctggttcatactaaacatgtgaacttattcctgttgagtgaaaaaagagaaatcaccattt

SEQ ID NO: 90296 - DNA, 376 bp, Zea Mays
cattagtacatgaggtgtcgttggatgaaggtgcattagtataggaagtgccattggatgaaggtgcagttcaaaatattaccaacacgatttctttgacaaaggaatggatgtctgaatcatattcctccatcaataccttctctcaactattgatggtagtatttcgaaattatgaatgttccattgatgatacatacagagagtttaattattattattttaaattttatagagtggagttactaatgatcttgatgctgaattctaataacaaagcttggtggggagaatagcttttggttttataattcaagtgtatgtatgtttagttctctgttgccacctgaatgcttagcttcatcgagcagtaaat

SEQ ID NO: 90297 - DNA, 379 bp, Zea Mays
ctgttaaatgttgtctgcatacagacataaaataaataatgttctttgtagttgactgatgtctaaaaatgatgcaggtcaaaatgtgcatatggctgtttaaccagtttggtactgagaatgtaataactcgcctcattcacctctaaaaatgattacatggttatatatgttccaaataaaattaatgtacatgtaggttcgctatcctgaactgttgtttacgactgactaactggttttaaaaaatgatgtttaaaaataatgcatatataaatgtgcacacacgcgttgtttaactacctttctactaatcaaataatagttcacctcattcacctccaaggattactacgtgaatgcatatgcttcaaaatca

SEQ ID NO: 90298 - DNA, 481 bp, Zea Mays
agaattacaaaggcgcttgggccttggatcttaaataaagaatttacgtaggttatctatattccatgaatgctctaagtcttcgccagatgatgtggctagcatgtaagcatttagcgacgcttttgccttgactatgtatggcccttcccactttggctctagtttgccctacgactctgttctcataatccttgtgagtactaagtccccttcgttgaattctcttggaacgacattgttgtcacgccatgccttagtctgagcttgatacttgttcagggcctgcaaggcgaggacacggtctccgtcgataagatctttggaagtttattcatcgacgtcagggatggcaaagtggtttgttcgtggggattcgtgctttaactcttgcggtgtcattgcctcggatctgtacatcaggtggaagtgtgtgaacccggttgctcggcattcttttgtgttcaacgcccatatgact

SEQ ID NO: 90299 - DNA, 363 bp, Zea Mays
gaaattgaaagcatgctgttgagcaccatatttggcatctgggtacggtcgaatggtccggccttatggtccggacggtccgtgcccttgcgaccagataagcatgagtgagagtacttatcccatgtgtcgttatcctaacctatcagtgaggacctgttggatcacacctaggaacaagtccagacatcatcccctataaatataaaggggtgcgactaattgagaaccccgaacacattccaatcgaaccaatctattactttctttatcattcctttatgattcctgcctttggagtagattaacgtagttttagttgtaccttttcgcatatccaccctcatcgctattcgactctac

SEQ ID NO: 90300 - DNA, 450 bp, Zea Mays
ggtgcagccacatctccgtggccaaagaggagcagatgcgatgacaagcggatgatggcggcggatggtgctatggctggcccaaagtcgtcaactaccacgacacggaagtctccgagtgacgcgggagcgaggggcggacgcagatagcggacggaaggtcggccgctagatttaggtctttgtgttgtgatgtggtggggagaaagtcctgaataaccgctgctcgcacaccacgacccccgtcccacgcgccttgctcgggcttcaagtgaaggccttggacctccagcgcccccgctccacatttgcactatccctgtccgttttccccaccctaagcaccagcagcgccgccaccgtcggaaggccattccgctatcgtcgttgagcctctaatgtcgcctttgtcatggtgagctccgcctgagtgcgatgcaccgggaagcc

SEQ ID NO: 90301 - DNA, 520 bp, Zea Mays
ggttgccctaagatgagtagacgtgagcatgtcgcaccgtcttaagtcgttgccgacttaagccgattgctccgttagtagggtatagtggtcaccctatgtctagtaagcgcgagcatgttgcaccgtcttaagtccttgctgacttaagccaattattccgttagtagggtatagtggtcaccctaagtcgagtaagcgcgagcatgtcacaacgtcttaagtcattgccgatttaagtcgattgctccgttagtagggtgtagtggtcaccctaagtcaagtaagcgcgagcatgtcgcaccgtcttaagtcattgccgacttaagtcgattgctccgttagtagggtatagtggtcaccctaagtcaagtaagcacgagcatgttgcaccgtcttaagtcattgtcgacttaagccgattgctccgttagtagggtataatggtcaccctaagtcgagtaagcacgagcatgttgcaccgtcttaagtcattgccgacttaagccgattgctccgt

SEQ ID NO: 90302 - DNA, 809 bp, Zea Mays
cgggagcgacgataactctttaatgaagcgacacgatcggttgatgaacccagccggcggccgtccgtcaccggcttgtcaactcctggagttacgccatcatgatcagtcgtcgttgttgtgtgaggccaagccatccagttggaaataggctcgacccgtcggtgtcttgtggattccaacgcctcttcctgcacaagagccagagcgcaggcaacatcgaggttggggggacgctgaaccataattacagccttattgtcatgcctaagaccatcaatgaaacgcatagtgtaatacaatggatcggtgcgagattcatatgctgctaactcatccactagtgacgcaaattgttctatatactcggacacaggacctagctgcctaatatgaaacagctgtctaatcagtgattcatgttgctccctaccaaatctctcatgaatgagctcacaaaattcttcccatgacatgaaacgtaaacgacgctctacggactgcaaccagcgatgagcctttccctcaaagtgcattgacgctaccttgacccacatgtggtattcagtttcgtacatctcaaagtaattcttagcctaaactcgccacagttgctggtgtgaaccgtcaaagcgaggaaaaactaatctgaggcaaacgaccaggcgtcgagcgtcctatgtcgcgtcccgattcatacggataatactgctcaggcatgaatccagagaggcgattaggatggggaggatgtgtacccttgaccgggccgtgagatggggtaaattcatacccatactcacactccc

SEQ ID NO: 90303 - DNA, 1079 bp, Zea Mays
cgcggtgtctactttgcacaggggtccctggttgtttgaaaaacccataaagactcctctctacagtttctctgtctcactgacatctcgactaaagcccctcccctttctatttcttcgcaaggtgaggtccccaaccatggacggcggagcagtggctccggcgagcctgtaccaacaaagatacgcaatgaccgatgctctagagcagttgacacctattttgaccccaaataaccatttcccctccatcaattgtgctaatccgggtcggaatctctctatccacgatgacggcggaaagcgagaaaaattcgatgtgttcttggcgatccagggcagtctagttcaattaaacaggtctacgagtagaaggggacttaatggaggctagaacatcaagcaaggatgcttgaactaacctgtaggcgtctggccacgacaaggtgttcacaggtgcggaaaactgatttgggggaagaaagaaattggagctctctggtggctaatcggaggcagtaacggatgctttggcttcgtgatgacttaacggagctaggggtgtgctcaatttatagtatcccagagcggtggctcccaatttggtcatggcgtgctggcggccggagagagggaagagcactggcgcaatagctgcgtgtctttcaccgtggcaggcttaccggcgacgagctagcaatataaagcggcttactgcgacatggtgaagcttcaaggcacgtggcacccgatcagcaggcggccaactctggtgagcttatctgagccggtcgtaaagcaagggggtacgatggcccgcctctagcgtcatccgtggcgaagatctttttaccctgaagcgttatccgggcaccagtgtgcacgaatcacctcgccggcgtgaatccaggcgcggggtcgccggcggcaaggtgtactgcaccagggatcttcttcagtttactgtactattagaacaccattcagatcatctgacagagaggtttgcagcgcccagatgtccaacttttttgtgagaacttgctaatccacctgtaacaaatttctagccctataat

SEQ ID NO: 90304 - DNA, 394 bp, Zea Mays
tggttgtggtggtgtttctcttgccacagacgtctcaacttgttctgctacattagcatcacttgttggatcatgtgacactggctcatcctgaacttcttcaatatacaccttttgtttacttttctctcttttgagaaattatttctctaagaacacaccattccgggcaacaaacactttgccctctgaccggtggtaaaagtaatatcccaaagtttcctttggatatcccacaaacatgcacttgtccgattttggagtgagtttatccgactaaagtcgcttgacgtaaacctcacaaccccaaatcttcagaaaagacaaactgggagtcttcccagtccacatctcatctggtgtcttaactatgtacttagacggtaccctattt

SEQ ID NO: 90305 - DNA, 711 bp, Zea Mays
gtcatcgttttcaacatcgtcttcaacatcgtcgttggggaggttttccacttcggatccctctcttgcgtcatcggccaaaggggtgctctacaccgcgtagcggacgcgggaaaagacgcttcgaggtctcgcctagctagtctcatggagaagaagcccccgccgaggtctgagacaacaccagttgatcatggcttgacccacgctggcacgttctcggacccataggccccaactcaaccatgtgttgcgccaggatgcctttatgccaacaaagtgcttggtcatgtcaacacctccgcttcatcagaccgttacgacggtcctgacgcgtcggactccactatccaccttgccgacctgggtctagacctagatcactcggaagaaggatggagccaaggttcccgctgcccctaaggccggaagggtgcggtcgactgaagtcacgatcgcccggcccagggagcgactgctacacccatagcaccaagatcctcgctctactaccccaacatactctccatcgacatggtggtggaggtcgacattatcttcgacccgggtctagacctagatcactcggaagaaggatggagccaaggttcccgctgcccctaaggccggaagggtgcggtcgactgaagtcacgatcgcccggcccagggagcgactgctacacccatagcaccaagatcctcgctctac

SEQ ID NO: 90306 - DNA, 1773 bp, Zea Mays
ttactgttactaaaacttgatcataacatcataagcatcagcatttcatatgtttgacacacctaggatgcattcactaggtaaaaattttcaagcaagttgtattgttatggcattttgcagataagaccctagtgtaggatacttaaccctgaatagggatctaaagggtaaaacaggacccaaatagagaaaaccccaaagattaagtgaaataatcataaaaagttaccaaggatggacctacattacatttacatctgtgggataccaaaaaccctaattggaaccctagaaaaccctaaacctaaaccctagggggctaagtgcaaaatcagtgcacttttggattaaagtgcaaaaaactataaagttaaagcatcttaaatcatatggttcacaatcatgaagatttgcaatccaaaacttgagatttggacttatttgcaaaagagccacacttgtgctcttttgattaagtctgatttttagtgttttgagctcatctttgtgaccttgtaacttccaaacaagaaggattttgccctagatcgccacatcaacattgtagacctatcaaagtagaataacttggcttaagagagtaagcatggttgttatgaagaaattagagaaaaatgcacccaaagttgggctgtcaggttgtttggggtctgaatttcagactaacagtgcaactgcaggaactttgggcacaaattcaaacatgatttagtaggaatttggctatagttattatggcaagattgtagctgaattattggtctacaactttgctgcagaactttggacgagttgccatagaaatttgagagaaatttggccctaaactttgactgtcatgtgcactgaatgggattcaccatggtacagttctctgaaatagatcaagtcaccagctcagctcactgccgacgatctccgccgcgattcgtgccgtcgccgtctcgattcgtgcttggggtaagtggataacgtctcgggtagaaagatcctcaccgccgttgagctggacaccaatccggctagccgccgtacctaccccttgttcaccgatcgctcgggtaggatctcaccaccgttgatccctcactgccgtccgccgcgtgtccaaacactttaccacatcgcggctaactgtgctacgcacgtccggtgatcgccggaggagcagccacggtaatagccacgttgcgcggccaccagtgactcgcccagttcatacctatcacaatccaccgctcaaattcgctgtactcgtgatcgatctctataaattaaagccgccataagctccgcaaggtcatcacacacccagccaccaagaatcactagcatcgttcgtcagagagcttgaattttggttttcccctaaccaagtttccgccaccgcgaagaacacctcaccgtggccagccacttccaggtttgttcatgccctctgctaccttgtttcagcattagtatgcttccctgatgctcatccatccacccaattgagctagaccgccaccaatcaccgggaacgcattgttctgtgggttatccacactgtcaccgtggccagaggcaattaggtagccattcatgcaattgacttaggggaaacgctggttagggcatgaattcagtttcggccaaagtagggtactagtctttgccccgtttggccggtccaggagctcgccggagctctgccgcgccgctcaccgtcggggacctcggtctgcgaagggatagaactagaggggc

SEQ ID NO: 90307 - DNA, 554 bp, Zea Mays
ctgggcctcatttaaacaggaacacagggggctcggggtaaaatttctaagacacagtgaaaagcactctctggacggcgggttcaattgtggcaaaggacaggggcgtttttgtaagattgcgcagccgaggaggtatggttggatgccgacccatggattttgatccaacgcaccatattaaacaacccccaatcgaagcggtatgcgatcctggccaccggatttcctatcaataatagagattttaaaccagcgcgatctaatctcagcccctcatcaaactaccaacggctcggagccatcaatccccagatctaatctcatccctacatcctgaatccaatggacacaccgtttccttccccaaagctggatgtggcggcgcatatgccctaaagtgacaccatcacctgcgagcagtgatctaggattccagtggatcttctttaatcttagctagggctacacgaagctaagtgaacaccgaggatggggtcaggtacataccggtggttagaccacgtagaagcttgtacacaaaggcgcggcgg

SEQ ID NO: 90308 - DNA, 600 bp, Zea Mays
ccgagttagagagcaaaccaaagtgcttaaaacattctaataggtgcatgcaacatattcaaaggttcaaacctcacgatttaccctttttcaaaatgttgcacttcctagccatgtttgagctcatttggacttgaatccttcagtttgcacttgagtgaacacacactcatacacttagcaaaccagttagtcaaagatgttgtgttggtcattcaatctccaaaaattatagaaatggcttacttgcctatttccctttcaagttgttcaagaatacaaggacaacatgctaggtatccccagtcccgaggggattgataaacttggatagactatcaagaatttcatcctttggcaatgatgggatgtctagttgagtgagccaccaccacgctctcaatccttgccactcactcaagagtcatcacctgctaatcctattcctaccccaaaatctacatctgcccagtctcttcttaacatacaatcatcaccaatcgtgcctcctcttgacccaccaccatcccataacccactagcccctccattggcatcaccgtccaattatccaccttcttcaccacccaaagatcttga

SEQ ID NO: 90309 - DNA, 379 bp, Zea Mays
ggataagataagcgaggttccaacagaagagttgaagtaaaaattcattaccgaaggaagttacgaggaattaacgagatcaccaaggatgtgcgaaataagatgaatgctcatggatcattgagaaacaagggtggtcaagggcatgtaagctaaaatgttttgaacagtcattggggtatgaaaataatcatacataagaatataagagtatgcaagattccaaggatacatgcatactaaggtaaaggaatagaaagagccaaaggataacgacttagcaacagaatgggaagggatctcagaagacaagaagttcatggacatataaactaaagtgttcaagtaggcaatacaaattatgatgtaagcatttgaa

SEQ ID NO: 90310 - DNA, 519 bp, Zea Mays
gtttcatatggagcactccctctggaacataatgctcccggaacgctagcttgaattactcccaggtaatctgatgcccagccggttggattgctgaaaaatttgcccacctggtactggcaagccctcttagccgttgtacggcgaacaggggcttttgcgtctctgagcatcgaattaacccaaacttctgttccatcactctcacccattcgtcggcttctaaagcttcttctgctctgatgaagagcggtgaccgagtctcagagaattccaaataggtagtatcacgcggtccttgaggaggagctcttcctccatgctgttggaattggttgcccgccatttcgcgcaagaagcgcatattatcagcggtggcattgaccagggcagcgatagcttcggccaaagtcggtggtactagtggcgggttaggagtatcctccctaccgtgggatgtccccgcacgatcatgtgcatgagtccgtgatggcatctgaggcaaagaaacatttgaaa

SEQ ID NO: 90311 - DNA, 941 bp, Zea Mays
attttgagtgtgatttagtgagaattgaagtatggtggctatagcaagattaaagctggattataggaccacaactttgttaaaggtggattagcaagttatcacatgaaaattggagatctaggcactgcaaaccgctctatcaggtgctctgaatgtcgttctgatggtacagtgcccgcagaaagatctcaggttcaatccccctcgccaccggtgacctctgcataaggattcgcgctgatcacggcgattcgtgctagactcaggcaggatagtaccgggcgggtgaaaagattggagggggagcggatttggtcgcggggtgaagcttatcaacctgtagtcgtgcgacgtggccggaccaccggtgtcgtcgtggaaactccggtgacctcaattatgccacgccatggctatttactgcgcaattgtaactgtggcacacctagacttaccatctcagaaccgctgcaccggtgaacgccacgactgagccaccagtgaccttcttcctctccggccgccagcacgccatgcccaaattaggagacaccgcccttggatactataaattggtgccccagccggctccgctaagtagttgtgcacccagtgaaccaaccctcaccttcaatcgtcccccacagctccccaatttgagatttcctccaaatcaatcaagaattccaccatgtgtgagctcgtcgtggccagctctccacaggtccgatcacgccctcctcgctcttgtttctacactcttatgtgctcttgatgcttctcgacccagccaattgagctagaacacgtaggatcaccgggaatgcctcggttcatccgtagtttgcgctatcaccgtgggcagagcgattagaagctagaaccatgcaattgcttgaggggttatggtcgttataggtggaattaggtatcagctg

SEQ ID NO: 90312 - DNA, 488 bp, Zea Mays
aattatcagttgtgataagaggataattaaattgatgtccccactaagagaagaagtggtagccgagttaatatcacctgagccaaggaaaggaagttgtcatcagatggctattgatagcatggagccagattcactcaatattatcaaggttgtgtcagaatttccagatgtgtttctggaagacttaccaggtatgccacctgagcggaaagttgagtttgctatagagcttgttcctggcaccgcccccatttctaaaagagcctacagagtttctagaccaaagttagttgaactcaagaagcagattgatgagctgtcagagaaagcttatataaggccaagcacctcgccttgggtcgcccctgtcccgttcgtggagaagaaggatggcacaagaaggatgtgtatcgattatcaagctctgaatgaggtcacgattaagaacaagtaccccttgcctagaatagaagatctgttcgacc

SEQ ID NO: 90313 - DNA, 295 bp, Zea Mays
ttattttctaaactacatgattcaaggtataactgttggagctcaatttgtttggaccaaaggtgcagcatcaacccgaggctgctggagatagtctaacgtgaccatgcttctctacacctgtttctaaaggaacggcgggtcgttgttgctgtggatcgtcttcaccacgaccacaccgccgctggaccaatgagatcgaggcctcatatcgtaccgatcgagcttatggcggaggagacgccagccactgctacctcatatattatcctcctccacgatctccgggcccttt

SEQ ID NO: 90314 - DNA, 538 bp, Zea Mays
gagagcttggtcatcttgctcatcaatgcaacaagcccaagaagaacaagttcaagggcaagaaagaagatgacagtgatgacgagagaaaggaaaatagattcttcaagaggaaggatgggaagcacaagaggttccacaaaaaaaatggaaaggcatacattgttggtgactggctcactaacattgagccatcaagtgggtcttcttcaagtgaagaagaaaatgatgaaaagttgtcgccattgctggggacttatcttcaccaccaccatcaccttcatcgacttctcacctatgcctcatggctagaggtgaatggaaggtacaaaatgatagtgatattattgatgatagtgatagtgatgatgaatttgcttcaccttcctatgatgaactagctgacttgcttaaggaatacactcaaatcattaggaagtcaaaggctaaatgtgataagttgaaagatgaaattgaatttttaactgccaaatatgacatagttgtaaaagttagtgatgagatgaaagaagaaaac

SEQ ID NO: 90315 - DNA, 732 bp, Zea Mays
caacagctttttcatagccacagcccaaccaaatagaccctaagagttctactaaccttggtagataggtgaggttggtgcatatctacactcctctagataccacaatgttctctagaggacatacactatatgggtgtagagtgttcccgctgcgtgtcatggtaaatgggtatcctcgtgcatcacagtgtagagctctatgagactttaagatccctctcaaccggaaaccaatgctctaaagtataaacatgcatgagctcctataccctcgaggcactagtagttaaggtctagggtataaccagtgagtgttctagtcctgctacccttgagtgcggcgatgatatgaatcatccatgccttgttccctcgacactgagtgttacctatgctctagcatgagaaatcgatgaacaatggatggttgatacttctcttactgaactgactgtatctgagtaactcccatatcacatctatgatcctaatagagcctggcctatcacctctctcatctacctctatggaccatgccacctctagggctctttaggcctctctatccataatccttcgcttgtgagagctcttagtttgtaccagactagttcgatatatatcagtcaagcccccatgggcacaaagaactagtttgaagtgagtggagtatttataccccctcaaacctccacctttggaggctactaattttggtgcttctcatat

SEQ ID NO: 90316 - DNA, 593 bp, Zea Mays
gttcagattcctgttcagtttagattcctgttcagttcagaatacaacatacagacatatttgagtagacttctttttcatttgagtagagttatttgtcacagagttgtagttgagattattatactacataacagaattacatttcagttgataatatttgccatcacagaattatagttcagctgagattattatgtagcagacttacatttcagttgataatatttgccatcacaaaattacatttcagttgataattctgtttatggaggtgacactattatgtgcagactactatgaagcacagactactagcagatcttattatgctagtagcggatcttttttgtccacaaatttaaatactgggtagttaacactattatgctagcagctaaagtagaatggagtaagctaaaccatagtttaaattttcaaatcgatctgctattagtctactgcttgtctgtgcacatgtcaggaccaaagggggcggcatctgaactgagagcattcacaactctgaactttagcctcctggacagaggaaagttgatgattaaatacaaatgcgctcgattactaatgaa

SEQ ID NO: 90317 - DNA, 436 bp, Zea Mays
agagaaggagcatatttttcctagtatacttaagtgatgagaaacctaggaaaaatacagagaaccctagtccaaagctaatccagggttaaatatttattaggtactaagaaaccaaggaaaaccatgattaaaaatgcaaggaccactgtaaaaagggtagagaaaattcagtagactcctaactactagaacaccactacaaaaataataaacaccccaacccctcacaataagtgagctaaacaattcaaatatggttttggtccatgttctaattaaatcataagaaagtctaaaattgtgcaacagtaggcaaatgaatttttacccaactattgatgaagtagaccaccagagaaaaatacaaaacctattcaaaatataagataacagccattagccctaccccatgaaaaaggccatataatccaag

SEQ ID NO: 90318 - DNA, 318 bp, Zea Mays
tcctaccgcttccatacagtctaccctcgtgtcatgacggaggtagacctattgcaacctggtcttttagtatactattgcaaaatggtcctcccgactcaatggcctcttcggtacagtactcctctatcatggatgcctcgggacgagcatgggttgatacataaccattcaatattgacatgaaacgctcgtacgtccacatttcgtgcaagtacataggacccaatgcctctatttgtggtaccaagtgcaccacaaggtgcaccataatatcaaagaacgatggagggaaacacatctcaaactgtgatattg

SEQ ID NO: 90319 - DNA, 335 bp, Zea Mays
ggtggtggctcagctcgggaagatgcgtggcgtcgagggcagctcaagcccctttttataggcgatcgcggcaagggcagccatggtgttcacagcaaccccgtgaactgtgcgagcacgcgcccacgacaggtaggattttgcacgagctttcctcttcggcatggtagactgataatggtgatacgctgaggcaggtcatcactctggtgtcgcgacgtgggtggagtcaagtgggaaagaatcacgatattgagtcgtgtccgatggtcaagtcgcgtgtggcgtggtgtcagcggaggtgctggcattgaccacggcgaggtgcacggaat

SEQ ID NO: 90320 - DNA, 473 bp, Zea Mays
cgtaaaactaaaatgagaggggtagagagattacagcttcgtatagtgagaaatgaattctacccttgaacaaaaagtctgaacaatgcatggcactgttcctctatttataggcgtgggatacattttcgatgaattttcaattatgcccttaagcctacacatttagactattatacatgccaagggtacagtggtcttttccttctatcttcgacgaaatgagcctcgaagactccttatggtctagtccagcttcattagtagggtatgcacgtcgactacccgaagttctaccttcctgtatgtgtttgttaacagcatcggctgtggatcatcttcggcactagtcttgcaaaacatgaaacaagatagaaaacagacgttgaattagtgttttgaggaccttcggagggagaaggccccaatagtagccccttcgcgatgctagttcgtttttcattacaagttcg

SEQ ID NO: 90321 - DNA, 368 bp, Zea Mays
ccaaccatgataccttttaccatttgtccatagcatgaagttccttcaccatcatcatcaagccacttgatcaatagcccagaccaacacatggcatgataattctataatgatatgatccactccatgttatcccatggccttcttggttcatcaatctcaacatagcttgctcttcaccattgctttatgtccatcggtgctaagtccttgctctagcttcaccgccatgtggtccatcacacatgagactttgacttgcccttcacactagccactcagtccatcgaaatcaagccatattcttgatcttctccatatagccacatgacaccatgtcatgtcttcatatgcaatgagctccttta

SEQ ID NO: 90322 - DNA, 935 bp, Zea Mays
atacatgtccccataaccgtccttcggcgaagggggccaagggcagcattatcacttaaaatcaccaaagaacggtgatggcgacacacattttttacattggctcttgcttcgagataagaccggcttcacggaaaatgaatagcatcattctcaactctcaccgtaaaaaagagctcgtagatccccctcctcgaaacatgacccaaccgtcggcgccagtatgacacgacgggtcccttgatccaactgcggtctccgaaggcgagacctctccattcacatttgacgttgtattcgagagactccaataccttgcgaagactctcctaccattctaacactttgttttgacacccccattttctccgaccctgcggttcaccgagggctaccccggtcgaagtccccaccgccctagggtggcgaccctcgacggagactccgctacagataaatctagagccacaaaataatctaaatcatctttcgaagacttgtcatctatcccaacaaacgggttccccaacccgtcaccttccgaagaccaagactcaacatcagattcatcagatgcgtcactactaagaatcactacacttccacataccaacgattcatcattctcgttatcatcaaggtttgcttgcgcaggcccagacgccggaacctgcataacaaccgatcttaagtatcatgtacaaagcgaacactgtcaaaccactcctattacattctttcaacccgcacagaagcactcgtcgctgcaggaccctcagcgtcgccttccttaaacaaggtttgctcctccgctcccgcttccactgcatcatccttctgggccaccgagctctcaaggccagcgaggtcttccacctcttcatccctcattgcctgcgaagacagcacaacaacgtttcagacaacgaacacac

SEQ ID NO: 90323 - DNA, 357 bp, Zea Mays
attggagaactagtcagtaagtactaagtagtgcggacgtgcttatatcacatctctgattacttgccacttgctccgatccattccggccggatgctcgcatcgcatggatgaggccaaaaggaacgcgagacgggatcgaccggacagaggctttgggatcgtacggacggtggtctcgaggatctaataatcgccatggcccgccacattcacgtcagcgatgaggaggaagcctcgactggatcgtcatcgtacatagatgccgactctgattctgccagatcaagccctcagctagcctccaaagccgcgagtgcctccttgtcatgagaagcgagtgcgtgcctgatcgac

SEQ ID NO: 90324 - DNA, 273 bp, Zea Mays
gagaatctttactggcttttcccggtactggagatccttttgaatctgaattgtctctgcctcgatgtggttctctggtacttgtaggcatttacggagctgagacacatgaaacacattgtgaatatctgatatggattctggtagctccaggcgatatgttgtgggtcccactctgctaatgacggggtaggggccgatgaaacgcggtgctagctttcctttcatttggaaccttttgacaccacgcatcggggagaccttgagatatac

SEQ ID NO: 90325 - DNA, 693 bp, Zea Mays
acggtatcgtccaattgaccatgactgggagcttcactagcagtaaggaatgctaaaacatgaacccgggaggcatgaactgacctgagaatggctgggcacggcgcgatgcctcacggcggcgatggtgatgagatttgggggaaattccgaattctcgggccacggtggatggattgatgtgaggagttgtgaactgggcacataacaagagggcagaacagggagggcactcaatttatagaggccggctatgactgctccgaattttggatggagatgagctcacgacgatgaagtggtgagtcaccagagctcgtctaccgtggcgctcaatggggtaaggactgatggcagtaactagccgtcgaccatgacttactacgacatggtacgatggagtatggcgtggcatgaccggagtaaacgatggtcataacggcggtggtcgcgcggccacgctgccgggcaagtggatacagcgagactggctcaatccactccccctcagatcttttcatacttgcattaacatctcaactgaatcaagcacgaatcgctgtggccaacccgaatgaccacacggatatcgccggtggcaagtttccctaaacctgcgatctttttcagtctactgtaccatgctgactccattaagtgcacctgatagagcaacttgaggggcatttttct

SEQ ID NO: 90326 - DNA, 526 bp, Zea Mays
cgagagggttcatgcaaaaccgaatacgtgcctattgtccgcaacggtgagcagaaagaaggtaatactcgggttacggcggtccacggataacggacctccggcgagcaattaccggccgacacgcgacgctcacgccctaccgcaaggtcctacatgttctaggggttaaaaggagtcagtacgaggaccacatacccaatgtcggggtgttggtgaagctgaccatgtctcgcagcggccgcacggtggaggagcacaacgacgaggaattcactagagcgcaggtcgtacactgccccaaaatttcactcggtgacgcccgccaactcaagccaaactccccccgagtgcacgattcgcctaggatcgacggcaatcgccggtgcacaacaacggcggccgagctccgattttctctctctctctattaccgcctaatcggtcgtggtggtgtacaacattcgcggagtcgttgcgcacgaaggaaggagcggcggccctccttatctagccaggatgcgtg

SEQ ID NO: 90327 - DNA, 367 bp, Zea Mays
ctcagaagagggtcgcactctaagacccaggctatcatcgcgagcaggaggattggacacaaacttggaaaatgacctatgtggtggcagattctaggcagaataggcaacaagagcactaacatttgacactctgtccctcaggaccatatccagtcggctcaccagatcttcagtggggattctcttgtttgtaacccgggtagagtcattgatgccactatacagataaactgggtacgccctatccttcaaagactggatattcttgaagatgaaattagcgaccatagcctcagcagtcagacctctgtctttcaacaagcagacctcgacaagcagtacttttgcctccgttatctctgaa

SEQ ID NO: 90328 - DNA, 544 bp, Zea Mays
actaaaaaatcaaattggctagcagccttttggttcacaaccaactttttcgagcacctatccatgcacagtaatcttctctagttgaaagaattctaccgaagacctctacctatccattgatccattttacaactctggtggcatcaccatctacgtagttcttctcaccggagctggccccaattgaagcgaaggtggcctttaacctctggcagtactaggcggctatagagaagcattcttcattcgagcttcgtagctcgtcgacaatcttttgaagatggacttctcatcactaaaaatttcactctttgccttttccacttcaaaattttcaatcacatctgccagctcattttttagttttgcatctttagcttggtagattttggcattccacttcatctcagcatcgagctcttggaagtgtttcaccggttgcaaaattatattttcaagctccaaaattttgttatttttggttttttgatttccaacacaacattcttctccttaatagtcatctggagcttgctttggc

SEQ ID NO: 90329 - DNA, 688 bp, Zea Mays
gcggagcgtgggtgccaccatagagccacgcgtcgccatggtcatacgtcatcacgactccaatcactggtgaaatctttctcaaactcggagctggaccctttggtgatcatgtgaattacaactctgaagggtggatcatcaaattcttatttcttgggtggttggggaagtggttggtggtgttggtttgcttgctgtggtggaggggtggcggggctaacctctcctagtgttgaaggtgtggttactgtggggaagctggattgtggttatgttcatgctgggggtaatatgagtgttcattttggtagtggtggtggttgtacggatgtggttggtacgtatgagcaatggatctttggttgtctgctggagcgactctggccattcggtccttggttgccttagtctctggacaatctctagttggatgttctgagtcctcgccatggaagaccgagtaaaatcttcttggctgctgagggcctcggcctctgcccctagtcgtggtgtcattatggccttgttgcggagggtagttttgaggtcggggtggacctctcctggttgttgctggtttgcaatgttgtggacttgtagttggccatgcttttgatgggctaggtcttgctggagaggcctggtcaatgtcctgctggtctatggagtctcttttggctttcgt

SEQ ID NO: 90330 - DNA, 937 bp, Zea Mays
caattttggcccaaaccggcccgcgacaggagaaacgtgtgcgcgcccgcgcctgcgtgaaacttttgcacgacgccccctgggtattcgaataatctgagaccaaccgagggcattgttttctgagtcactaacaattttcacttaaaccctccccttctttctccttcacccgatgaagtccccaaccatggacggcggagcgactacacctacgaacttgtaccggccgttatacctataatacgtgctcaaatttgttctacacctaattccacccttggcgctccactggggaccacaattaagcacgaacaccatcctagagttcggtctacgggcacccgcggatttagagccttcccaggcccgttcccaataacacagcgtggtagtgttcaatcggctgagccgatgagcatcacaagcatacgagggtgttgaaacacggacaagaaggacgaggacggagctgtggctggctacccacgacacggtgtctcacggcggcgcggcaaaccaatgtgggggaaaaaccaaattcgggcgctacggtgcacgagaggtgttagctagaggtgggttggacgcataacaaggaggcggagcagggggtgcctccaatttatagatcccgactgagcttatcacgaattttggattgggatcaagttcatcgtggccgggatatttttatagtagtctgctcaccgtggcgcgtgagaggggaatggttcagggatggcaatcggttgcttgccacgaccacgaccatacggggaagcaggcgactacgttcctttcaatgtgatcatggcgagcaccggcggcgatatttcactgaccgcgcggcaagtgggcccggcggtgatccagctcaagcctaagttctcctcacccaagatcttttcacccgccacggttatccacttcacac

SEQ ID NO: 90331 - DNA, 528 bp, Zea Mays
ccgcgcaaaagtcacctaagggtgcagccggaatagcacaccaagcgcgttaatcgaagtctctcattaaaaagacactccgcgcaaattcgcccacgggcgcagccggaccaacacaggcgtacgaatacggcaaacaggccacattaccatacaaattacaattacatacacacggcgagggcatcacatattacatcggctcaaccttcaagatgatacccatctccctgtaattaaacaacattatcctcaattcctcaccctaaaaaagcttccgaagatcccccttgcttatgctcgccccagtcggcgaggacaataattctcgtttaccaacccggtctactcggagatggccacgttccatccccatacgacggcgcctgtcacttcgcgaaaattcacccacactatgttttcccaccacccttcgccgcctacacccagtactcgcactaggaagatccccgacaccctccacacgtggcgaagtctctgccgcagccacatccaacgcaacaaaat

SEQ ID NO: 90332 - DNA, 460 bp, Zea Mays
cacgtgaacccggatctcagatatatctcgccggcacgcaaaggtcccagccgctcatcaccttgccttgcaaagcccgtgaatgcgtcgagcggcagcgatcaatcatgaatgccaggtcccaggtgcgcatccgttgccccgacgctggaaaaatctacgagactttcaccgcgctacaatccaatctacgagacaagcaaggagtaggacagctaaaatcagagaatctagcacgtcgtaatactattattcttcaatcacgtcaacgtgatctcagtaaataaacgcgatttacatatataatttacattggacccatttttaccatatgaagttaaccgtccgtgatcaaatttgttgcctcgcttattaggatatgatccttccgtccgccccaaaatagtagcggttttagctcttgttttttatatctatattcaatttgatgatgataaat

SEQ ID NO: 90333 - DNA, 432 bp, Zea Mays
attaatagagtgagttagttgggcctggtctattggacagggttgagaaggtaaatgcacggggtaaaccctaaacgagtactctaacagcctggtcaatcattgacaataaattttgctagggagaatcagggttgcttttggaatattttagtatgaaacatattttcagatatgtttgatagattcatcgtggctagttctttttatcatgtattgatatatttgctagatctagtcaaatctttatatctttgataccgttgctcatttaggggtagagtgatacatatttcacctaaattgtaaagtggcagtctgaaaatgcggttgccccttgtggagggttgtacagcatcagcacttgttgatttatgtcatgagggcatggaaacttgagtcttttcttttaaaatgattgcacaaagttcc

SEQ ID NO: 90334 - DNA, 548 bp, Zea Mays
ccctttatggtctcaagctggctcctcgggcttggtttcagcgtttcgcttctatggtcactattgctggtttttctgttagtagtcttgatcctgctttgcttgtgcacacatcatctcgtggtaggactcttctcctttgtgttgatgccatgcttattacaggaaatgatccttaatacattgcctttgtgaaggcatgtctaagtgagcagtttcttatgtctagtctgggtcctcttcgttattttcttgggattgaggttttctctactccagagggcttctatctctctcagttgaaatatattccggggcttcttgatcgggttatcttactgatcaccacactgttgagactcccatggagctcaacatttgtcttcgtgccactaatgatgtgcctcttttggatcctactcgataccatcacgttgttggtagcctggtctaccttggtgttactctcctagatattttatatcatgtgcatattctgagtcattttgtatctactccaactcaatttcattacggtcatcttcttc

SEQ ID NO: 90335 - DNA, 370 bp, Zea Mays
ctgttggtggcctagagctgaagctgtgttttcggtgtcatgggtctagactgtttcgtgttgtcagtcggagtactgttcgtcgtttaagtgtgtccaaaattgttcgttgttttagttttgcagaattgttcatcgtttcagttttatgtcgttggagtactatttccattttttggtttaggttagttttccaataactcgtgtatgcgtcagcactgcttattgttgtcaaacatgttggacttatgatgataaaacatttgtaatctttgtgttcctgctttggtatactgatgattgtttgtactggttattgttgttgcttattattgttggtatacttgcgtgtttgtgtgcaaacgttgca

SEQ ID NO: 90336 - DNA, 593 bp, Zea Mays
tgggtgtgtgggtttgttctaactttacaacaaagtacatataccctaaaaattacaagaggctaagaacttaggaaaatgtttttctaagaaatcttcagactcctaggtagcttcttcttctgtgtgttggttccactgtaccttgtaaaacttgagagtcctttttcgagtaactcggtctttctgatccaaaactcagatgggatattccgaataggttagttctggttccaaactaacatcagacacatccatagtttgattagggacccaaaggcacttcttcaattgggacacatggaacagcagatagtgattctggcagccgaattctgtacgcaacctgcccacatcgttcaagaatagggaatgggccaatatatcagggtgctaactttcctttaaccccaaatcgactaacacccttcatcgatgatactttcaagtacacatgatctccgacttgaaaaattaatggtcgacgtcgtttatctgcataattcttctgccgtgtttgagcttctctcaagttatgtcttatgaggtggaccttttcttccatttctttaactaaatcaagcctaaaaaac

SEQ ID NO: 90337 - DNA, 284 bp, Zea Mays
ttcgtcccccccgagtcctactatatacgcgcggccgtgcgctcgatccatacctccttccaccgctgacgccttcctcgagcgttccatcccatcccctcacccgaatcccactcggctactccccacttccctttaagaacgcgcccctccccaccggaggttaccgcccacccatcaatccatcatccatcgctcggtaatcgatcgacccgaacaacgccggggtgctggtgtgagggtcaggatggtggtcggattccgccgcacgatctcgttcccgg

SEQ ID NO: 90338 - DNA, 337 bp, Zea Mays
ttttgctgttgaggataaaagtgttcattttggaattgatgttggttgtattggtagggatggtaggtgtgggcgacgactctttggttgtcggccgacagggccctggccattcgatcctttgttgctttagtctctaggcagtccctggttgggtgtgttgagtccttgccatggaagggacaatataatcttcattgttgttgaggtccccgacccctacctctgcctctggctacattgcccctgcggccttgctgcggagggtagtcgtgacgacgaggggtgttatctcctgtttgatgttgatttgcgatattatgtacttgggactggg

SEQ ID NO: 90339 - DNA, 509 bp, Zea Mays
aaattccgtaggtccccctcaccaatactcatcccaatcaacgaagacagcaagtcgcgttgattaccccgatctacacgaagatgagttcgctccaaccccatcgacgacgcttaccacttcgcgagctctcaccaacactatgcttcgccaccactctttgctgatggcgttcgatcctcgccccagcaggggatgcaacccttcgcccatctccagccgcatcgaagactccactgcgggcacatctaacgcagcaaaataatccaaatcttcatccgaagactcctcagtccaggaaagcgggctctcaaacccgccaccatcagacaaaaaagacccagattcagaaccagaaaaactatcattagcaggcactacgtttgcttccgccacaaaattaataccatcagtaggggttgcttgcgcaggcccagacgtcggaacctgcgcagcaaccgagtttcagtattacaaaaacaaaaccctacacccaacaccgctaagtc

SEQ ID NO: 90340 - DNA, 401 bp, Zea Mays
gagatttccaagttttgtggagaaacttggagtaaattgcaaaagttcacaagcacctccattcttgaaccctgaaaaacagtgcaattgagccaattttgggctcttgcatctcttaatccataagggatttgctataagtcattatggcaaagttgtagagctactatagtagtacaaatttaattaagtgacctagcccaaggactgcatggaacttggagtaaaaagccctagaagtagggttgtcagtcgaggggatgttctgaacctggactaacagtgactttggttcaactttggagccaaattgtgactaatccagtgaagttaagacctagataattgtgacaaaatgaaagaccatatataggagaacaactttgctaaagtcagatggg

SEQ ID NO: 90341 - DNA, 826 bp, Zea Mays
cccatgcagtaagtatggtaattgcctacagaaatgaagtctctaacactatgtcatgactaggggcatgggccctgatatgactctaggaacaagataagaacaaggtagttagatcttagctagtggaatatgagtttcatgtaacctctctcctcccttggactataaagggatgggacgagcaatgtttaaggggattcaatttgatgggacctagagtgaacccttgtcaatagagtttccttacaccaagggtaggcataaaggtggattaggaccattagcctaaaactctcatcatagccatgaggtgagggggaactataagatcttgatgctcaatagtatttgagcttataatctcttcctcctttgtgttcatcaatcaatgagtagcaagtggacatagagtattatacacattatagcacctaactctctaactgctcgtgtgctgactcccacttatgcacatgttcaacacaaccaccaacttatgtcatgctccctcctaactctttttatttctagtacctttggtactatagtgttgttacacattgatatttggcatgacaggtgggggacattgatgcatttttcttttgagattgttgtgttttgatgtccaacatgactatatggcgacatcaacatgtttgttggtttgagtagatatcttagacacctactcaagcaactcatactttgcaacatgcatgtcataggaggcataggaatctcatgcagtcctcaatattacaatctctgttggatgaattttggctccatgggtctgcataacgcgatcctcgtaggccaa

SEQ ID NO: 90342 - DNA, 394 bp, Zea Mays
gaaaactatgcaaatgaccatttcatgacttaaaccttataccaaagttgaagtacatttatatatctacaagaaatagtaaaggaattattccaaaaaggtcctacgaaacccccaaattcagcccccaagtggagagtaatatagagtaacccacattttctctaagtaaaaaatcagcccacttccaaagattagagatgttcacctagttgctggcgccaaatccataaggtccaattgacaaaaaggagccaaattacccaatgcacacccctgaaaaatttgaaaccaaaccagaatagtgccgacacccctgacttggcgccaccatatctcccaaaccagacccaatcttcccttggaactcacatgaactaggtagccctaggta

SEQ ID NO: 90343 - DNA, 630 bp, Zea Mays
gtggcgtaaatacacagcagcaagcggtgggtgcagcagaactgcaggtgcattatttcatcgccattgaaacaacggaagagacggctgctatgagctcatcgatttatctatcgcgcgcctcagcctcactaatgcaactgtgaaagcatctagtatgaacacacgtactatgtatacggatcggaagggaagtgttctgatgaatttatataggtgcgtcgtcgaacggctcgtcgaaagtgaaacaggcatttggtttggtgtgggtgcagccgtgcatgtgacatgcaactgagctactggtgtttagggttgttgctttgcagatcttttgccgcccgggcgacgacgagatgggctagagagcacgcagcatggagactggagaggcgatctggtgggtgatgaactgatgatgcataatgcatgcaatgcaagcggacagcaaaccggctgcggcggctgttgctggtagggaagatgcatccagcagcagcaagcctggtcatatcggtggttagctcatcagggttgaggccggggagactattgccgattaactcgccttgaaacccagaataaatgcccgagtaattggagacagcggagggcatgcaatgcaacggg

SEQ ID NO: 90344 - DNA, 388 bp, Zea Mays
cgggtttagaagaatgttgatgagcttcgggagtcaaaagaacaatgcttctccattgccgcacaatgttgtgagaggttgaaaaatatgtttgctggcatcggcgctttttctagtgaccaaaagttagttcgcggcgatgccgaaggagcagttagatggatagaagatgaagttgaagcctttgacgaagtgcttactggtcgaggagacttttgtgcttgtatgggtgcacggggagcagtctcgctgcttgagaaagctggttgcgagcacgtgaagtctgtgattcgaccggagtttacggttttggctagtgatattaaagacccttcggccgaagctgttgaactgggagggaaattctattctgacatctggcttgctg

SEQ ID NO: 90345 - DNA, 662 bp, Zea Mays
ttttgccagcaaccttcttctgccaatggaagcactaattaagggcgaagacttcaaccgagggctctccgccatacgtagtcgttgcccacataaactttgtcagcgccaccatggcgttcggcgtgagccggtgaatttgaacttcgaagcgctgcagcacttcgatgacaaaccgatgcacaggcaagcgaaggccagcagtgaagaacgcctcaataacaaccaactcaccctccggctctaggacctcttcggctcctggagcacacccaacaccatccccaaaattccccaaacactgcatctcatgcacgtggcccgaataaatccttgacgtcccaatctccacagtgtgtcccggtaacaactccactaccgcctctgaaacgctaatcatcttctccgacgacacgctcgacggtgtagtcgtggtagacaacgacgaggaagaagataacataacgtactgtctgcaacggcgggcggtttgcttcacgcgggctagttcaccggcggcgagaaatggaaagcacgtagaaattttctcagatgaagaagtcaaagtttctttgtgccagcgcgtaaaaggtttcccactgtggccaagaccggcctttataggccctaaaaagcaccagcggccccatagtaaaacgtca

SEQ ID NO: 90346 - DNA, 1085 bp, Zea Mays
ctcaaatggtctaatcacaaaatagaaaaaatatgatacgattaagactgtttttcttgccaatcaggctagacaaggtaggagatggaagtaaagcacccatttttcgcagccgcagctccccctaacaaccaaatcgaaaatatgaggaagcaaacacctcttgccacatatttagtgatgaagcagccaacatgtttagtgatgaactaaatcgtatcgtccttcaattcgataatggctcatatttgaactacatggcccacagtgcctacaaccagggaccttttttcaaaacatggtgttgatgaggtaagtcctggtagacgtagttgtaagggtcatcggcatcagcatcacctatacatggtatgatttgaattcttcatatgcatggaagttaaagactggttctgaatacacatgccaaaactaaaaaacatgctgatttagtactatatatatatactctaacccaacactcaacattaatacaataattaagatgaaaaacattcatcaaaactgactcatgcaattaactgttgatgaaaagaattagggggaaaccccaaaaatagaagcatacgtgtcactgactgctgacacacttggatcatgaactgaccgcttaaatgtactgtctccatacacttgaatacttgagatggatggttgttaaagggtgtttttcaatatgcttctagctcagttaacattgtctattaagcttcaaccaatctaattttgtcaatctattgtgggcgtccgaaggacggctgatggtctagtgaaagcaaagcatctgtgtaccttaaacacgaaaaatcccaacccggtttcctagaagctgcaagcgcctaaagaagagaaaacagatttgttgagcgcgtcaagattgcataaacagaaaccatccctcctgcatcaaatatgcaagaaaacatggactactcctagagactgctaaaaacttgttgccaaaaacctcacattgggggctgttgtaaaaaaaactccctaaaatattccaccgccacagcagactgctaaaacattcaccttaaaatttttgaaacagccaa

SEQ ID NO: 90347 - DNA, 391 bp, Zea Mays
cgacattttagaaataacggccgagtgatgactggcgacgtcagcgttttagaagtaacaaccgagtcgtattaggccacgtcggcgttttagaaataaccatcgagtgatgactaagcacttttttagaaatggtgtctgacccgagaaaaccccatttgtatcacatcgccacacgcctctgcattctaagccctagcctcactttttgcctccgaacttcctctgttttcctttgatttcgcttccgctcagtccgccgacgagattgtgatggcgcccaagcggaagagtcagaattctgctgctgcggttattcctcctatcgatcccaacagccaattgcctttcgcaggtaatcatatgtctgttgtttccgagtcagatcttc

SEQ ID NO: 90348 - DNA, 801 bp, Zea Mays
aaatattatagcaacacttattttgagatggaaggagtatttgatagagctgcttccagaatctttgaatgaagtgattttgtaaggtcatgtggcttaaaagtgttttttctgagtctctgccattgtcgtttctcttgttccgcgagtggtgttactatacggcgttgtgacattttatctccacgtttgtggatgttgtcgatatgttgctattgttattgcggtaatgattgacaatgaatatgagtggcatggttgaacgtgtcatgattgttggcatatgaggacgtatagttgtttctattatatcattgtactctttttttattgtgttatacaactagtggtaatgatcaattattctttactcgtgtgttatcttggttgaacctattagatatgctagtgcgtagcgtatccattttcctacagtggtactcatgcatagtttttatctcgatatttgcacataggtgatttgccttatgaattggatctatttttgcttatgttgaagcacatattaggacgaatgagatagttgttggtatagtcacacaacttatttatccctaccgaataaaatcactattgaggcataagatcggtttgcttttcctcctaaccacttgcacaacttgttcttgttggattcaccatcagggctaaccgtgcgtgtaccttttaggttgagaaaggcaacagatccaagtaaggttgggtgcattgttatcgttctacctcgtacaattgtcaatatgattgatgatgaaaatagagacatttgaaatgtctcag

SEQ ID NO: 90349 - DNA, 643 bp, Zea Mays
ggttaatgcgcgaaaagtcccaagacacagatctaccctgcggtggatggcgggttgatttctaaataagccgagggctcttctgtgaaactggctcagcgaaggggtaccaagcatccagagccgcccgatcataaatcagtggctatgattaaatctacattaatcgaacggatacgcgacgtggaccgcccgatccaacatcaacgtcatggattttattaggcgcgatctgatctactccctccgatccgattacaacggtccagatcccatcaagtgaagaggtatcgcgatttaatcgtgaccacccattcacgatccgatggcccacactgcctggtatcgtcttctccctcataaccctcagacggcggcgcggaccaggtgaccaagcaggccacggcggcggcattgacggaaagcgcccatcgaagtccgagctccccatcggtcaccactaggcgaaaaaggaagcggaggtaatacataactcgagagaggcattattaccgaaggttaaagcagccgggaaactctccgaccatgcgacagcaaggaattccagggacctgagctacaaattcccctgtacgagtttacggaagcctccactgcatccaggcgaagctccccgaacaat

SEQ ID NO: 90350 - DNA, 276 bp, Zea Mays
ctagagcagaaggcaagaactagagactgcagaatgcactggtgctgtgatggtaagaaccaagaaggcaagaactagagatgatgccggtgatgatagaaaagggggaggaggtaggatgggagcaggggcaaccttcagatgacgagctcatctcgtcaatcgtcagttcgtcttcgtcactggtgctggtcaggagacgacgctggtgacctggagtcctggagacgccagaagtggatgtggagccggcgcaggtggactggaggatccgcc

SEQ ID NO: 90351 - DNA, 293 bp, Zea Mays
ggcccgggctatggttttaacatgatcgcatccggccttctccaagatggatgagatcccccgcgcaccggaaaacgcgcagacatccccgcgatcactcaaaatttcttcgaaggtttctgcttctccacttaaccattcaatgacgccttcagggtcgccttgtacaaagttttcttcggcagagtaggcacccactttggcgaagctagtcttcaatttcttcacacaatccaaggatttgtcgaagcacctttctttggattggcgaagttcttcaacatttttctcta

SEQ ID NO: 90352 - DNA, 534 bp, Zea Mays
taccatagcattcattgccattgcactgttgtgctgctgaaaagtttaaccatagctgaagctttctcatcgtattctcaagcaaagcatcattttgatctagcttcggcataagagggagcttcgtcacaactgtaaaaatcatcaacattcgtaagaactgcaagaaattcaacacctgatggccagagtacgttcaactgctagggtgacccgtgacggagaggaggccgaagccaccgaaacaaccccgatttccgaagttatgaagcaatctggattggttgtgacagaggggactgttgacgaagatgcacatactgctgaagctgaagaagctgatattgaggaagaaattgctgatgaagaggaagactacaacactctagtcccatcaaagcccatccacttagattttgaaaaatctactgtctctgaggccgatgtgccaatgatgatgaagctcggttacttcggggagacagagaagaagcttcttcgttttgccggcgaagaaaccatcccagagccaaa

SEQ ID NO: 90353 - DNA, 383 bp, Zea Mays
cttcagatggtgctcgatcacctccctagggatcccaggcatctgcgacggttcccatgcgaatacgtcggcatttgcctggaggaaggcgacgagcgtgagttcctatttttcctccagatcacccacgatacgagtggtctgggggagcccgcgctgagctggatggtcttggtggggacgccgtctgtccctgatggctgcaccttaggcaccttggcaagcgtcttggtacagggagtcgaggggtcccttcccccatcatccaggcgagcagcttttgccgccagggcgtgcaacttcttgacggcggcgagcgcagcagggcggtcgcctcgcacggtaaggaccccaacaggggacgacatcttgaggatcaaata

SEQ ID NO: 90354 - DNA, 648 bp, Zea Mays
ctgagtttgacgttgtggacttcctgatttgtgagatcgaggacaccgttttggatgggattcgtgctcgtcggcagttgccctatgctcactacttgtgccacatctttgcgcagctgattcagcctcctcgatttcagggcacccttgaggcctcacgcctcgtttttggatcctaccgtcctgcgcctgagattcctgtgccagcttctgctcctgtttttgactcttaggccgaggatgcagctcttcgacagtttgccactcagggtacagcagctgatgatgatgatgattttggggttcctcctccgcctccgcctcctctgcctccatgctcacatgatcatgaggctgggagttctagtgttgcccctgctcctcctcaggctatggaccctgctcttgcttcgattctggctcacctggcggccgagcaggcccggttatccgagaggatgctctcgatgtttcagaacatgcaggacaggcaggatgcacttcagcagcagctacttcaggatcgggctgagagtagggcattcatggctcttatgcttcagaagtctggtgtctcagtacctccggttcagtccgctcctcctcctccgcttcacgctccagttgtgccatcgattttgtcaggac

SEQ ID NO: 90355 - DNA, 684 bp, Zea Mays
gaattgccttacgtcgtttggagcctaagaactcaacctagtcgagccctgcatggaaacactcctttcttcatggtctacgggtcagaggcagtactgcctgctgatctcaagtttggggcgccaaagttgatctttgaaagcatagcagtggccgaagcgaccaggctggaagatgtcgatgtacttgaagaagagcggctgaatgcagtaattcaagcggcacggtacaagcagactctgagacgctatcacgacaaggccgtgcgacaacgatccttttcagtaggagatctcgtcctccgccgaattctaacgggggagggacgacacaagttatcgcccttattgaagggccattcatagtagcagaagtcactcggccgggatcatatcgtctcactcaaatggacggcaccaaaattgggaactcctggaatatagaacacctcaggaagttttatccttagccgtatttcaaaagctatcgggacgacgatgtactctgtaaaacaggaaacgtgtcatcaataaaaaaggcttcaaagatactcagtttgttcatgattgacttgcattcttaattaactcggggtgaccactatgccctgctaacggagcaattggcttaagtcggcaacgacttaagacggtgcaacatgctcgcgcttacttaactcgggg

SEQ ID NO: 90356 - DNA, 1053 bp, Zea Mays
ccggcggtgagatttttttggcgctggcggtctgatccatttcgggacactgtaccatggcgagctccattcagttggcctgaccgtgcgatttgaaaccagattttctcccaattccatatggtaccaagcccaaacgcttataacaaagttgttcctctacaatggttctacaactttgctatattgacttggggcaaattctttgaatctctcaatctacagggctccaaagttgactcagtaccactgttagtctgaattttcagactccactaacctgacagctcgactttgagtgtgtttttctcctaattcttcataacgacatggcttacactcttaagcaaagttgttcccctatcatagagctacagagttgatgtggtgccctaaggtgaattctcactatcttgaaagttacacagctcaaaagttgagcctataaccctgatttcagactttgcatagaactcaaatgaggtccattttgcaaataagtccaaaatccaagatttagcttacaaatccacacatttgtgaaccaaatgacttaggatacacatttatcatggtttttgcactttagtccaaaattggactaattttgcacataaccccatagggtttggatttagggttttccagggtttcaattagggtttctggtatcttagggtgtaaatgtaacttaaacccatccttagtaatattttatgactattttacttagtctttggggttttctccatttagtccctgttttgctcttctaatccccatttagggttaagtaccctacactagggtcttatttgcaaaatgctataacaatacaacttgtttgaaatttttacctagtgaatgcatcctaggtgtatcaaacatatgaaatgctgatgctcatgatgttatgctcaaattttagtaacagtaacaccacaggtgttacatccttccccccataaaagaatctcgtcccgagattaaaagtcttagggtaattaagtaatggaaaaggaaacgcgacatacttttatttccttatttttg

SEQ ID NO: 90357 - DNA, 487 bp, Zea Mays
agttgagtcgaagggcaaaaagatgaaggttctgacccatcggccatgttacattgaaccgaccatggtgcctaaatttggcgtggggacctcttcagttgccgaatcaaagcaagttgctccgattgtgcagagcgctgaagagccgactatagcaccgaaggtgcctacagttgggccagctgaagttaaagatgataaggccgtagagccacaggtggaaaaagtaacaaaagtgccagaaaacgtaagcccaccggcagaggcaaatttgccaaagatgcaaagaattcctaccgcaactcccaagaagaggaggatggccagcgtactagacgctgtcatagagactacgaaggccttaagccctgcccctaagaaaattgccgaagctacgaaagttcaggccgaaaccaaagctgggccttcagtgtccaccgagacgaagcctgtcgcgcctgaggaaaaaacagcagggcagattgta

SEQ ID NO: 90358 - DNA, 967 bp, Zea Mays
gttcccctcttgaactgactgaccatcatgcccaactgggactcactgcatgacacccaactcaagacaaatcgaaggtatgtgttttcttccttgaatcttgtcttgtcgtgtttgcaggactcaaggatagactgtaaaccctcacaaagtgcacactgtgcaggtgtactggcactcactgagctagccttctcaagcaaagctatcctagtttctctctctgctagctcagactgcaagctaggacaaacggtacacgccccaacaggatagacctagatctcaactcgtcgcgcttatctagcaaggtggagtacttggtctacaaagtggtgatgttcgacatgtgtagagcgcactcatcacattcaatctcgtcggacaccacaactgaagctctagcagactcaagttccctaagcgtgaattcgtacttggatctaaactctctcctctcatgagcagcctgcctaagcaacttatcctgactagccaaagcagtgtttagctcttctatctcagcggcgagatcatcggcggaaggtagtacctcagaagtactgtcatcatcgatgtctttgtcgtcgtcgatgctaaccgcgtcctcaccaagtgccatggtgcaaaatcctcctgcggtgttggcgatgaagcatagcctgttcaacttgtcctcgaccctcctctcagtctcctcgtcactcgaggaagatacaacatcgtcggagtcgtggtcgaggtcgctaagggaggcaaggaaggcacgctccttgatctttgccttctgaaggtacttcttcttgagcgcctccttgtcaaatcctcccttggacttgtacttgttggaggagtacttgcccttgcgccgaccagagtgatggtcgcgcaggctagactccgattttcccttcttggggcagctggcaacgaagtggtcgggatcgccacagttgtagcatccgtc

SEQ ID NO: 90359 - DNA, 388 bp, Zea Mays
cagatttcaacattctttctattcttgggtccgggttcagtaattttgtttttaatcctgcccatgggtccagaggaggtattttagtcgcttggcgtgatggttcgtttgtctcagctgcctcagttatcaagaacaattctgtttcagttcagttgcaaagtgcagatggtcctctttggtggttctctggggtgtatggacctcatcaagacagtttgaaatctgcttttctccaagaattaagagatattagaaatacatgtgtgggtccgtggatagttgctggtgattttaatcaaatttacaagtcagaagacaagaataattctaatattaacaggtcttcattgggcaatttcagaggccttattggctccttggattt

SEQ ID NO: 90360 - DNA, 384 bp, Zea Mays
cttaatgttggagatatcctgttggccagatattcttgcactagatccctggtgctgatttattcagccaccactctggattctgctatggccagcggacatgctgaccctggcttcatgttgcacaagggtctggtcatcccgaagcttaaagccagtgggctcatcaccaccgtcatcagtttccctcttttcttctcatcggccttaatataaaaccactcactcttccagccagttggccacttggtgcgatagctgaggaccagagccttcgtatccttgtgatacacgaagttataacaaccaaaattttcatgtagcccgtcttctctggccttcgtttggtaatgcaactcatgcactcggcagaaagcttcaaca

SEQ ID NO: 90361 - DNA, 533 bp, Zea Mays
cattagaggcattgggtctatttttatggatctgcggtgctcctcagtcacttcggcaggcagaagatcgattttgtaggtcactagaaacatgtagtagaaaatttgacaaagtttcaaatagtgtaaacaaactagcagcagacatcattaggccagtagatcttgagtttgcatgtgttcatccaaggttgcagtcacctagatttagccctttctttgacaattgcattggagccattgatggctcacatatcccagttgtggttcctactaccaaagtagttcaatatactggaagacatgggtacacttcacagaatgtcatggccgtttgtgattttgatataaggtttacttttgttgtggctggatggccaggatcagttcatgacatgagagttttcaaagatgcaattggaaaatatggagataggtttccacatcctccggaaattccatcttgtggactcggggtatccaaactgtattggctatcttgctccatacaaaggtacaaaataccatcttcc

SEQ ID NO: 90362 - DNA, 726 bp, Zea Mays
ctatacgtgtccccacattttggacacatcctgttggttctcaactgtgtcgacaacacaattcactatgtcctcacactcgataatgtcccccaagtatcaaccatcatagctagtcgtccggtttctctagtctctcggtcaagtccaacactcgttcttgattgctctcattccattaaaatgaacccgcatgagcttcacatttgccatcaactacagtctctggacttcacaccacctgcacaccataagctatgagacatgtcgcacaaactcactttttggtaagttcacaaagcggaatctctattatatgttccacccaagacaccactccgttaacaattattcattataaacatgaaccacaagatacatgtcaaccttgtgctcgcaattatgtatttttaaatttgaaaatagtgtttgcaactttggcacaccttcaaggcaatggcgacagtcaaagctacatccccatcactattactcacacctaccaagaatctccaaagcggaatctctattatatgttctattcctatagtattctcatatctaaaatagtgactaaagatccaatacccatgaacttccaagcggcaacaacagtgggagtagaagatgatcggagtgatgagccaaaaaagaaggccaacagttccaccatttttttgctttgctttggggtgggtagaggaggttgcatgattaagattgggc

SEQ ID NO: 90363 - DNA, 407 bp, Zea Mays
gtcgtctagtactcaaaacattagtagtagtaggtacttaggtagtaccagtctggtgtgggctatggctcagtcgcttagtggctgtgtcgctgtgaagtgtggatatgtgattctagtgtctggctggaaactgtatattttttaatatgtgattctagtgttcttgtatgtgcttttatatatttcgggtaaattgggtatacccgaacccgaacccgaaattatgggtacccgaaattacgggtcgtgggttttaacagctgtgatcgggtatcagtttctattacccgaatttaccaaaacccgaactacccgacccgaactaatcgggtaacccgaacgcccagtcctagggtgaccctccacttgattttttggatcatgtcgccaccacaaaattcttc

SEQ ID NO: 90364 - DNA, 545 bp, Zea Mays
cccaggtcttggtgcccccgaaacccaggtgtgacacatacaccactccagttcgtagtagtaacactaacaggtagaatcaatcttctggtattgggactcaggcgccacctagcaatcaaggccaaaggggatataatatcgccatagtaaatcagagcaacgcggaagctacaactgatggttctgacattgtcattagtacgttccttattaattccattccagcatcaatattgtttgattcaggggattcactatcattcaactctgctcgttattaattcgtatgatctgccttgtaaatatgcgaaaacccatggtagttatcacacctaagggacctattgaagcgaattttatatgccaccattagacatcacaattttggggagaaatttttgggacacacctattgtactagagtagcatagatttaatccttggtatgacatggttaaagaagtacaaagcaattatacattgtgccagaggaactatatagctcactaatccaaatggagatagatttgaatcataattac

SEQ ID NO: 90365 - DNA, 884 bp, Zea Mays
aatcgagtttggggcgccggtccgagtgttggctatgggtggcaattgtgccgttgcggtcgactgtgcctgggcgccgtgaggtagaagaaggccatttgccgtgcgatccgttttaaacgatcaggattagatctaggcgtcgggaaatgtggcgcgtgggtaatcgatcgaacggtgctggaagcgtaccgtttcactctgtataacagttaatcttaagcgcttagatcggatcagacgaccgacgtcaattcgtacccccttcagtgaggcgtttttctaaaagaacccctgtagaatccattaaccaacccgccgtccacattgaaggtagtctgagtctgtggggtttttgcgccgaagtccctgcactctttagatatccggtgtgcagtccagagccgggtgaaaatgggataaatgaatataggaaattatttttaatataaaaataattccagaacagtgtttaatctctagaaaattcatattagcttctttttaatccattccggttcccataattttgtattaatattgcctactacttggtaacactgttttaacatgaaatctatactagaattgattactcaattaattttatagcaagtacacacgaatttcggaaattcataactcacaactcgtaactccgaggtgatccattcaagttgcgttagtcttatacaattatttgctatgcagtagcaacatcaattataccatgtcacatactttcatatttatttagtctatgtatactagattagcttttctaaatcaaatttaacatgtccataatcctaacttgaataaagtatgatctatagttaagttataattaagattaaagtcgaattaattattaatggaatatc

SEQ ID NO: 90366 - DNA, 482 bp, Zea Mays
cgacttccttgaccgacgatccggaagcaattgcgacaacaaggataacgtgaactttggagaacttcccaagaatatcacctccctacccgacgatgcctacaataacactgtcttccaaaaaaggatataactgcgcgatactgagataaccaatccatatccaagataacatcgaatgcccccaaggaaatcacaacaagattggccaaaaagacctcatcagcaagaatgacggaacacccctgacaaactgaacaactactaatggagccattagcagaactaaccaaaattgggtgacccaacctctgcaccgaaagaccagtctgcgacacaaaattctccgaaacaaatgaatagctagcgccagagtcaaaaagagcatgggccacaaacgaatcaactgagatcgtacctgtcaccatgtctccttgctctctgccatctgcagagggtagcacataagctccggaaatacc

SEQ ID NO: 90367 - DNA, 367 bp, Zea Mays
cttgcccatggtcggatggagaagaagacaaagggagaagagagtagcagatgatcaaaggatgagcgaagagaacaatggtgcaagcaggctatttatagagggcgggggtgaccctccacttcctaccacgctcaccgaatagtcgtaagtattcaataagcaattcaagcccctgaaaatgagtcaagcaacagacgccgcttcacgtaacacgacaccatttcgactaaggtcaactgctcaggcgatatgattactgtaacaccccaggtgttacttagggttttcactcaagactacacaagttaagcccatcatcacatgtgacttaaatttagtaaaggacaccaaacttggaaataaa

SEQ ID NO: 90368 - DNA, 597 bp, Zea Mays
tttttcttttttgcatgaattttttgatatttttctcagcacaaggagcaacaaaataggagcaaaaccaagtttcacctaaaacagagatcagatgtggtctacagaaaatgagcaagttctctaaaaagcgtgtaagagctttgacatttttttctttattttcctgattttttttgacaattttatcaaaaccaaacaggctgaaggtacctcagaatggtgtcaacaagctcctataaaaatttcagattttttggacacccgagcgaaaagttatgcccggtttaaggaaggtacctcaagttatgtttttggaggcacgactagaaaacgacggttagggcaaacattccctatctgcaatcacagtgattaattggtcggatcgacttgtgatctgtgtaatggtggatgggatagcggcgtatttgcaatggatcgacttgtaatggatagcggcgtatctgcaatggatgggatagtggcgtatctgcaatggatcgacttgtaatggatagcggcgtatctgcaatggatgggatagtggcgtatctggcgcggcggcggctagcgagggcagttgatctacgacga

SEQ ID NO: 90369 - DNA, 428 bp, Zea Mays
aaaaatcaacgacacggaaccattggtcgaaccggtatcatacgctctaatcacgaccgtcctctacgcgatcgacgacacatgttctttctcagtcgaacggatgtaccaaactactcccagccgtctatttcatgatctatggacatcctgctgtcttcaacctcacgacgttcagacccagccgactgcgccattctcaattctctctcatctaccaaccaatcggcgctcgccactatcccccaaaggtacaccgacgattctacggctccaggaccgccccaacctcgccattctcgcccgcacacgacaacccgaagcatcaaaggtcaccgcagaggggagaacggatctcgatgtgaagaggagggtgaaccgtaccgaagataactgggataatggccaccggtggacttgcggcggcg

SEQ ID NO: 90370 - DNA, 476 bp, Zea Mays
gtggtggcgagcgcgccgccgcctggctcagtctcgcgggaaggggcgatcaggtgaccgctgatttcgatttggacgcgtgagatctgaacgcgtagtaatgaacacaggggccgtggatctgcttctgaacggctcggattagatcatgccataccgtttcgccatgattcgttcgggtccgttgatctggttcgggcggtcgatcgacgaccgacgatgtatctggatctcatagaaacctagccgtcgatctcagatcctgcgatcctggttgtgtaccgatttacagcagcgctgggttaatctggttcgcccgcgtctaatccaacgacccgcagtgcacggtaccccttcgccgagccataattgcaaaagagaccctagaaaacccttttatcaacccgcggtccactaggatgttctctgtgtcttaagaattattacaccagagcccttgacctttctgattattg

SEQ ID NO: 90371 - DNA, 1212 bp, Zea Mays
tcccatatttttagcatttttctacaattttataggaattctctaatcctggcagaaaagaaaaagagaaactaatgaacagtgttgggctcaaatcagcccaagtcggcctgcagaagggagaacacgcccgcgcccacgtggttaattttgcgcagaggaccttggcgatttgaataacttgaaaaggggtcgcgacactattcctgcatttcactgacagctacaaaaaccccctggatttcaatttcttcacagctcttggtccacgacgcagcacggcggcagaccgagctccggtgagcctgtactggccaagacacgcaatggttgatacctaatttaacatgtaacaaacgtttcccctcgatcaattgcacggttcgagctcccaacctctctgctcatgatgaccgtgtgaataacggacaatccgacgcgttcccggggatctaatgggttctagctcaatcggtcgggtcgagaagcatcaagggcacataagggtactgaaacaagagagcagcggacatgaacgaacatgtagcacgctagccacggcgaggtcactccgcgctatgctctagactgatttgggggtaatttcaaattggcgagctctggtggatgatttgaggcacgagttgatggattgggtgcttgactacttagcggagccgacggcacgctcaatttataggatccctgagcggtggcccgtgaatttgagatggcgcggtgggggtcggagagagaggagagcactgtcgcaagaaattggtggctttcaccgtggcgagctcaccggcgatcacgggatatgtgtaatacgagctactgcgacgtggtaaggcaccaaggcatgtgatgtatggtcgataggtggctaactccggtgagttcatccgaatcggccgtgagtcaggcggacacggcggccggagtgaaacagtggctcaagttcatccacaaggcgatatttactaccccgagcaactatcaatactccgttgagcacgaatcgtagtgtcgggcgtgaatccgagcgcgtggtcgccgacgacgagatgaactgaacctgagatatttcaatattgtaccatcagtttctcattcagtcatcctgacagtccactttgcagagcctagatctcaaattttcatgtgaatacttactaatccgtctttaacaaagttgtagctcaaccaacc

SEQ ID NO: 90372 - DNA, 284 bp, Zea Mays
gtgggggaggtacgatttgtacctcctggtggtgttggtaagcgtggtgcggtggatgcggagcgggggcgtgaatgtatggcaggggggttgctgatatgtgtgcgcgacaactctagggttgtcggctggttgtgcccgtgccatcctgtctctggtggccttcgtctctgggcagtctctggtttggtgggcgcagtcttcgccgtggaacaggcagtaaaatcggcgcggctgctgcgcacgtccccggccccgaccgcgagttccgttcccgtggccct

SEQ ID NO: 90373 - DNA, 572 bp, Zea Mays
caaagatggtgcatcatcaagcggaacaagcatgcgcgagcatacaagtgcataacagggcatatgagcttcatggagatcatcaaaatcagcacgtgtagcaagtaaaacaggagagtgcaacttgatttcagatttaataggtgcggttgatgttgatttgacttgatgtgcagttttagcagccctagtaagatcatctttcaaaatttggtcaggggtcattggatgtataattattttttggcctttaaacatgaaagaataatgatttgaatgaccatgatgtaaactatcagtatcatattgccgaggtcgacccaataacaaagagcatgcttccataggaataacatcgcaatcagcataatcagaacaagaacctagcgaaaaggggacacgtaccgaatgtgttacctttattttaccatcatcattaagccattgaatgtgatacggatgtgggtgtgtgcgagtggtcaaggataatttctctaccaaagctgtacttgccaaattgttgcagctgccactatcgatgatgatgcgaatcgaccgttcgtgcacaacgc

SEQ ID NO: 90374 - DNA, 1281 bp, Zea Mays
aacaaacctttttttggggtgttgatggaggtgtaccatgatgttttgtgccggtgcaatttttagaactagtttaactattaatgtaagtatttgttattttactaaagaataagtgctaaaaaaccttaggtagctagaaaaatctagaaacttgcatgtacacttcattttggtgtacaatgttgacaaaaaaaatgcaatttattctgacaaagtggtgacatacatcctacaaaaatgcatacatccctcatataaggctaattactaagtgagagatgttcatgcttgtgatggatctatactaccactttctccaaatcattttaaactttaatggcatgtttattgaaccaacctatgatgttgtgtgcatttatgcatttttcagacctagtttactaattactgtaattatttgttgtatttcgtaaagatatttgttacaataccataacctagctagaaaaatctaaaaacttgcatgtacacttcattttggtgtacaatgttgacaaaaaaatgcaatttattctaacaaagtggtgacatacatcctacaaaaatgcatacatccctcatataaggctaattattaagtgagagatgttcatgcttgtgatggatctatactaccactttctccaaatcattttaaactttaatggcatgtttattgaaccaacctatgatgttgtgtgcagttatgcatttttcagacctagtttaccaattactgtacttaattgatgcatttcgtaaagatatttgttacaataccataacctagctagaaaaatctaaaaacttgcatggaccattcattttggtgtacaattttgacaaaatagtttcaactcattcggacaaagtggtgacacacatcctaagaaaggcatacaactctcatataaggctaattactaagtgagagatgctattgcaagtgagagatgtatattactactatgtccaaaatatttcaaaatattataacatgatcataaaccaaactaatgtgtccatgaatagataattgcaaaaaaaacatagagataaataaaaaacaaagaattaatataaaatggtaggcaaaacacaaaaaatgtcttcttgcaagtgcttgaacctaggagctcgatcttatagttagcaggtcaaaccattgagctatgcacgtgttttcgatatatacccaacgctagtatacttaaacgcattagcctccgcattgccaaacacattgggcgccaaaaaacatgtttcgccgtcgtcact

SEQ ID NO: 90375 - DNA, 532 bp, Zea Mays
gtcagaatgacgtgcttttccgatcgtggacatcacaggtggtgatagaatggtaaatggggagcatggagcacaaggaagcccaatgtacacctgggaggtcacctgtaaggctcgccagacaaatgtcggggcggacctaggctccccaggaggagcaagacgatgtgtggaggcggtgaatgaatttaaggtggaggcaggtgttgaacaacttgagatctcgaacgcccatgccaccgacaggtttgcttcgaagcaccatttcccagggaacaagacatcgtgatccatgggcaacatccttgcccgaccagaggaagccacgacgacgttgatcaaagtttttgatagcaccttttgggagctggacatcactcatgatgtagttcaggtgaatgtccaggacaaagttaatgaggattaggcatctcgttggatttaggagagacgcatgccaccttgcaaggtatttatcagttttggctatggtggcagcaaaaagatggaggcagagtttggtaggggaaag

SEQ ID NO: 90376 - DNA, 592 bp, Zea Mays
atccctggcacgtccctccctggtcgtcggtaggactccctctgctcacctggccgtcctcgatccagtgcgcccctcctccctattcggccatcctcaaaccctcgctgtgaacgcccgctccgtcgtggcggatttgagatccaactggggcacccgccattgatggcgctcggggaattgggagtgaaggaatcgcgcagcatcgcatgaactctggtctgtgtcatggtccatcactggagctttgccattacataggagggaccgtccgcaggataacctggtgaagagcagcgatcggggtcttctctggcgtcacgaaatcaccgtgcgccatggccggccgggttagctcctccaaatgctggtaaggcctcacccactccgctcgccttgatgtcatctaatcttagtattaagtgccatcgactgccgcggatcgcgtggccgtggatttcctcgttggaggtttagtctagccgcggatccgcctgcgcgtaatgtgtcgtcttcatgcttgctatcggtgcgccgttccccggattgggttcgctatgatcttagacctataccatcgctaccagtttag

SEQ ID NO: 90377 - DNA, 500 bp, Zea Mays
gtcatgattcggatgtagcaataagaaagcaggcacagatttatgacatgatttagccttaccggtttgcatatgacaccacaaaaaataactgatgacagataactataagaaaacagactactacaggagaacaacccacatttttcttactttgcagaaactagggcaactcaatatagatacacaaactgtccgttcttaattcacaaaactgcttgttcttcacaaaaacttcttgttcttacatcacagaaacaacaacatggttgttatgtacatcacacagatagataataagctaactcacacatacagagaaacaacaacttcttgttctttaccttattcagttgggcatttatgttgttacatgttaatatatttatttggcttcaaaacgttctgcaaggagcccacaatctttttaaatcacatgtttactttgccctttaccttatttagttggtcatttatactgtggtttttgcagcgtttgg

SEQ ID NO: 90378 - DNA, 392 bp, Zea Mays
gcaggactctgttttgccaggctttttggttgtttctgctctagcgaatttgtttaactgtcatggtgtcgaactttatggtttctagctatttttctttgtcctgttttaacagatacttgtttgcccacccagtaattgggcttgggtttactatcgccaacgaacctaattatgtccctgatgaatagtcacaatgcggttattttctctgagtggtctgttttaagctttaatgtccgtgggatcaattctgctgttaaagggaatgatattcgttgtgcgattcgggagtctaggtgtgatgttatctgcttgcaggaaaccaagaaggaatacttcgatagggttgacctcagaaatttttgccccaattcctttgactattttgc

SEQ ID NO: 90379 - DNA, 587 bp, Zea Mays
gcgcgctaatgggcagtgtgtgggcagtcagtcgttggcagttttaaagtcggactcagctcaatgtcagtatggcccgggtcaagaatttgagtctatcaagtggaggagatgaccatgaccatcctcgccctcctaggaaggataagggcaaggcaatttagagcagtagagaggcaagaagaagcgcaaaatggatagatctactcgagcagcgattgcagcagtagtaacaactgagagagcagggtagagagggcaattacatattggtgttgatcatcttcctttctagatccagtgttggtcatcttgtctatgcactccctcggctatccttgatccctcccctgctccactagtttttgctccaccagcctcaactctgcttgccctaccaccccctaccacttccactactctagagcctttctccaccacacctactcccactacctccaccactcctaccactgctaccaccactccctcaatcactccacctataccacccctcacttctaggagcatgacgaggttgatggtgcactattggagggtgatctgaggccgttcgacctttgtcg

SEQ ID NO: 90380 - DNA, 665 bp, Zea Mays
atttggtaaaacgacaggggttctttagcacttttaccatgaccgaaggggtatgagccaaccagagtcgcccgatccacatccaacggccgcgaaagaaaacagagcgaggggggtatgcctacatctatttctggacgcccatccgagatcgacggtcacgatttgattaaaccctaccttcaaccctggccacctgatttcggatccacggtcgagatataaaaacgcaaagggtatgagatcgatctaatcccaaccgtccagagcaagatctatggtggacgcgttatcttcctcacctatgagggtcaccgagcgatggggcgcatccaacccacgacgacgaccatggctggcatgcccaatccgccgcattagtgcccccgaactccgatccgaatagtaataatcgtagcaggggccatgacaaacgcgacatggaaaacttaccgacagtttgagcaacatggagacctgaccacgacatggtgtggtccagtgatgcccaccgagctctggtgagcaattggggttgacacgatgggcgctcctccctgtctcgggccacgggcgcatcccaagtgatgatgagatgaagcatcctaagtcaacactgaggcctcgtcgacgacgatgttgggggccttcgtcttccaaaggtc

SEQ ID NO: 90381 - DNA, 333 bp, Zea Mays
cttgggtactggggtacttaacatttttaaacagtgtaactactggtcaagtatctccataaattttctcaagcctagtctaaaagttttcctaccagtttccttattttcaaggtttaagttgttttctcctttagttcaaaactctaaaaagtaatataggaaatatgggttctacaatttttgcttggtagattatattatgcagagtccagtaaaattggtttgatctcatttggatgaataatacccaagttatgttttttctaagtctgttgtttattaaaaaggaattaaatgtcaaaatggaaaaggaaatccactttgtgcttg

SEQ ID NO: 90382 - DNA, 657 bp, Zea Mays
tccacagatgcaaataattccagcagctcaaacgccggcttccaccgagggtacgaccatcccaagctctatcgcgtcaacgggaaataaggtccgctatccagttgatgacatcacaaggcctatggcatgcacactagttataagatatggtattaacaatcagcgtacaaagaaagtagcacaggccttgcgatcccaggacacaagttccatggaaacaacattctagaagaatattgcagggtagaagtgacgacagtcgtccaacgatccgaggatgacatgctagacatccctaggcccgaaggtatcgagacacttggacaagctatcaagatttttatcctttggcctcgaagggatgtcgaattggttgatccaccacgacagccgtcgtcgcaggcccaaccgtctccaccttctcaaattgttgttcctattgtaaatccatcatcacctcctcaaacttcacatgctgctcctcatcctctttctgaccctccttctcctcatcctcatggtggcccaccgtctccgccacgtacattgcccttcagggatccaccttctccacagccatcaagggatctacgaccatcaaagaaatctaaagtttctataccaaaattagtgtccccgttcgagaagaaaaag

SEQ ID NO: 90383 - DNA, 513 bp, Zea Mays
catgttccaatcctatcgctaccctagcaagctaaattaggaaaataagcacataacataagtaagcaaaaaataaaatgtgaaatcttaattgagataaagataaaactcccatcgatgattttagtattttaccaaggtatcaagaaacgtgcaagcttctgtctagtctttgttagagctcctcacaaggatgcccatgcaagggccaaactcccaatcgagtaactctgtggatagccctaggacatctccacgtgcaagtggttctgtagtgtggtctctcacatgttttgtctgtgtcttcactatcgagtttccggatgaaacattataagcctcgttccctctagtacatggtagcgttgacatcgtaaatgttgttaatgtgatctcgcatgacttgcaagacccattggtacaactaatacaatggcatgtgtaagcatgcaccaaggggtaagaggtgttttaacctcactcaaacactaggcctaaatctagatgaagtgc

SEQ ID NO: 90384 - DNA, 318 bp, Zea Mays
gtagatcccaaacttcttcagcacatcagcaatcatcttgttcaaaggaaatcttaaacccgctttaaagaagcttttaaagaccactacttcatcctttcctggcttcggagtaatctcttccccaccaaaacgaaccagctctttcttcgcttcattaaaatagcctaaattcaacagcttaggcaaatcatcttcggagatggtggatttctcgaagtccaaatggctgggtttacttggcactgtgctataatcatcttcagactcagtttcctcaacatcagcttgctctgtttcagtggcaggtgcttcctc

SEQ ID NO: 90385 - DNA, 373 bp, Zea Mays
ggttctaaaaataccttcctgaagctcattatgagtcgtcacttctggcccactttggtcggtgaggccaaacgtcagtgagtgtaacgtttaaactttaaaaagtggcccatataaaaggaacgttctccgccggcattggcacaacatttgatgtttgcacttattgctattagagcatgctctaccttcgaagcttgctttgaacgccttcttgtttttaaaacaagtcttagccagtgacaagcaaatttgctttttcagagatggtcggagagcatgcagcccctgatctagctttggtgctttctttggatgtcccagagtcgaaggctaaaaacttagctgtggcaacagaaaccactacttccca

SEQ ID NO: 90386 - DNA, 643 bp, Zea Mays
tcgaggatctccttggttcgcgtgcaagacatgcagcagttggggtattttggggatggagttggacgagttctgggggcggaagagatttctgagccggagggtgagatagttgtgttcgaggcattttttactgccggccttcggttacctgcgcatcattttgtggcggaggtgttgcagagatatgaagtacagatccatcagtttacacctaacgccgtggtggccctggcgaagtatgtttgggcagtgacttcgtatggatgtcggccctccgtagaggtctttgccatgaattattgtttgcactagcagaagagaaaagttggaaacaagattgcatagtttgggtcatgcacctttacgccgaggactgggaagacttcagaggaagttgtggagctagttccctgcacccgcaacaagtggggcaactggtatgattactagttctatgtggcgggaggcgaagtcgaagacctccctggactcctggcagccgtgatgtgctcccactgctatgtgacgtttccgtcgtttgaggtggcagaggatgatagtgacgaaggggcccttcgtagtgctgcacgcatgagtagcgggcgcgatttagttgaggaattcatcgtttatggagtgt

SEQ ID NO: 90387 - DNA, 334 bp, Zea Mays
gcggcagccagctagcggtggagatggaggagtcggatacggtcggtggtcggccacgtcttcttcctgctggatcctgagatggaggcagccaaggagctcctcggtaggatcacgacgtttgtcgaagtgaacaagctgcgagcaggagaatgaagatgcatgcatggcaatggtatgcacattgtgttggtctgcctgccggagtgccacgtgtagccgccgccagcccgccatgcaacattgcatgtacgtaacattataaagacggtcacgtataatatgtatgtgactgtgtgccagtgctccggtaccttttttcccatgcgcgagg

SEQ ID NO: 90388 - DNA, 493 bp, Zea Mays
aacatcgccataccttaccctcttaccattgacgatgtgggtcagttcatcaaagtcgttccacactttagatctgggaggatgcttactagaacttgtggtagcagtgcttgtgccggtcggtgtcctgtggttgtctgaccaccgacacaaggaagaggggggcatcatcgatgttgatggcagcactgccaccaaacaaggccagagcatcctcttattcgttatggtctttgagccggtactcctcctccacaacggccggatcaatatcatcgtccatgccatagaaagctagaccagcgaaacccccactgtctgtccagctcctcttcagcgactttggtccctcgacgtctaagcggcaccttcacaagaatgatacctacaaagaacaagaagatctggaaaagaacaacaatgcgaggaggaggaggagcacgatacaaagagtaagaactcacctatgtagcaggagcacttgagacgcccg

SEQ ID NO: 90389 - DNA, 631 bp, Zea Mays
ccaaaattcagggtttagcttgcaaatcttcatgattgtgaaccatatgacttaagataccttactttcatagtttttgcactttagtccaaaagtgcattgattttgcacttagccccctagggtttaggtttagggttttccagggttcctttttagggtttttggtatttcaggggtgtgaatgtaatgtaggtccattcttagtaacattttatgactatttcacttaagctttatggttttctctttttggattttgttttacccttctaaaccccatttagggttaagtaccctactctagggttttatttgcaaaatatcatctcaatacaacttgtttgaaatttttgcctagtgaatgcactctaggtgtgtcaaacatatgaaatgccaatgcttatgatgttatgcttaagttttagtgacagtaactctaggggtgttacaggacacatccgccgtcgacgacctgccccctcgaccaggtacctcaccgccgccccctcacctctcatcgtgtcgatgagctacgtcgtcgccgacttcactcgccgcatcccgctctatctcattgccatccgcatttctctcgcaccttccacctaacacgccccatccacatttc

SEQ ID NO: 90390 - DNA, 604 bp, Zea Mays
ctccgatggcactaattgtggaggaaagcttgccctacctaacctcagcaagaactactcctacaaactccaaggcgcgaagacctcaaccaacctctgccccacgcaggattgtgcccacgtaaatttaaatgctatgaatctgtaaggttagttctggatcactcggggtgtcatattactcatattatttctggtcaatcaaattatgcattacatacatcgttaagttgaaatgttctctactctttgcatactttctcgaattactttttggcacatggtatgccccgacactattttctgtcgcatctcatgtttcgctgaggcaaatcttctctgttgcatctcatgttttgccgagttatattttctgtcgcgtctccatgaatgacacctcactcattgtcgattcgctgatacaatccccctaaaccctaaacttaccatttgctccacaaaatacgcgttagtcacaaataatcctatgttgtcattaatccctaaaacaccctaggggcttagatgctttcatatttgaaagtatttcattaagtcataacattactcaggcattttattacatatgagagataaccagtgt

SEQ ID NO: 90391 - DNA, 636 bp, Zea Mays
ctcaactcatattactggagttctaggtggagactgcagcttgaaagtccgaggctacgacacagccgtcctgttctggtggtgctaactttaagttatacacaaactgcatatatacggccgggaaagcgagttgtgtggactcgtctgaatcctgacatcgaacatgagttcatctgtctattgccatacacacacctttagctgacgtagattttgtttttagataaatcttgtgggcagcacagctagaataatgcgaccgtttgatgcactgcgccctcttcaagaagctgtgcagtaacttcagacacttggatgcctcacggcctgcaacacacaacgaccacgggaacaggaagacaacgcaacaagtcagatggaagaagcaaagtgccacccgatctgggccatgggagcttcaaggcgcgatcgtacacagtacgtactgaggttggcctgttgctgcatcttcttcatctcttcaggcgagaccagctgcgccacagttctctctggatcagttgacattctggtcaaagcggtaggatatgagcagctttctttgctcctctccaacaaattaaccacacgattccatcaacggctgcttccttctgctgtacaaacaatgcg

SEQ ID NO: 90392 - DNA, 484 bp, Zea Mays
aaaaagaaaagattagaccctactcctataaacatgtttaacctaaattggtaccttaagaacaactcgatcattcacaactacctaacctacctgatatattgctttatctacctatcccaccctaaaagcacatgtaaaccccgttggacccatcttataattctcgaccatctacctgtctaaaccgtctaaatcctagtggagacaccaagatcgaagatgatcgacctcatcaaatcgaggaaggataagattcaagccagatcttcaaaaggaatcaagatccacaatcttggatagaacctttcctcaccctaccctttcttaaccaaacctatctatgctctaaagacatcttctaccctacataataaagtggacatacatatatatacccatgctctcctaatcactcactaatgaaaaaagagagactcttgatttttgaactaattagaaactaaaatctaaattttaaatc

SEQ ID NO: 90393 - DNA, 710 bp, Zea Mays
ctgaagctgaaaacgaacttcgaagctaaaccttagtaaaagtacctataaaccttgagcgctcactagcttcttcagctcgcttagcttcttcttgagcgtagtgggattctttttcattttttctaattgcttcatcagccatctcacgaccgcccttcatccacacatcggagtaaaatctcccgcccagtgtagaagcttcagccgaagggtctttggtgtcatccgccgagaaaacaaatcctggctgagctgcaaccttaacatgttcacaaccggatttctctaaggtcgccacgacccctggtgcgccagcgaatgcgcagaagtctccccagtcacttaaaattttgtcaaaggcttcgacttctccgttgatccactggacgtcaccatcggggtcaccacagatgaacttctgctcagaagagtatgctcccacctttggaaaactgtcctttagagttttggcgcatgctaaggatattttgtagcatctctctttggagtcgtgaagctcttcgacattttttgtacccttaatctttcaatttcgcttatctcgtgcttccccaatgaaacttcaattttttcgctcgtttctgcaagattttttaaatcttcaacttcagctttgtgagcttcggcttgtgcactaagtttggcttccctagttttcaacctgtccactaaggaaaacaatatct

SEQ ID NO: 90394 - DNA, 1122 bp, Zea Mays
ttggcatggtacttgcaataatgtaaggtctcacaatcttcttcccttatctgaaactcttccattgtctaagctctcagctgcataagaaggtttagttttggtctttctttatttccattgaaacatagtatatatatagcacttctctatatttcttgtggaaattatttcatcaatgggttcagttatgagtttgtttatgaaacagaaggaaatcccaaggggggtaagcaaagggataaatcagtttgtgcatgtgcgtgttatatatgctatttctattctatatattaaacgtcgtttacgatcgcatgcacaaagtgactaaggtagatcatatcaatatgcacatatttagttgtctgagtatagctagctattcgaagtgtatatagatgagtttatactttaccaaagttcgtagctatatatggcgactgaatgatgaggaaatcattcaccaaagtgttcagagtacacaagaggtgccatgcgtgaaatatttattgttcacttatattttcaccgctataggtaatttggactggcaattatatgtacggacatacttagtttaccacatcaggacccattttattactaaataaaagtcatgaaaagatcatttcctgatctactttgtagcttttatttgtcctccgtctggtattcctttgtagcacagttttatatctatctatatatatattgggacagagaggtttatgtgaaagtacttaccctgactctacatgtgtttaaattgttcttatatttgaaacttatttatgtgaattcagcgaagaaaatggcgaaggcatacaccattcttgtagcccttagcatggtagctctgttatcctgcaatgatgtggagggtgaagcatacatgatgcatgaagcgctttctcgcaaaggtctaagggaagacatcaagctaggcactaatggtgccgtgaatccttctgctatcagtttgtctggacaggcatctagcatcaccactggcgtgaacagcaacactgaaagcagcacaagcattgagatctcaggcgctgctgcagcctctacctcgatgaccgctactaccgcagatacccaccgtgggtaccctatcac

SEQ ID NO: 90395 - DNA, 728 bp, Zea Mays
tgggtgtatcgggtggccgagcggcgcctcatgatggcgttgcttagacacctgagataaacgcctcggttactcgcactatcttgatctcgcattaaatgtgtgtggcgtaggcatgacgttgagcgtcttggaaacgcgtggggcagtcttgtcgctctgtatagcatgtcactccccatcatcatgtagagcacgcttcagataccctgcaataaatgcgggtagtgtggttgcagacaaaaagctttcttctaagtgaagggtcgtgccatgcaccctggagccacgtagtgattctgtacccttgctagcgcagagcgtacgggccaagggcacacttataatataagcctcgggctcacactgtcagcacttgagcccaggctgtcggtaccctaaatatggggtacccactcctgctaggtcaaggcgagaccactttggccacccatatcaataagactactggatggacaaccctactcaggactaaggcccaccatatgtagccatggaccagctaggcccatctcctaggatgggctacgatcgccacaggccccaaaataatcagcaaactcgactggtctgaaccctcatagctaggacccagaccttcgcatgggcccatcaggtccccagggagggagttccgaaagtgctccaagacccaggaataaaggtactctttggctaaaagatcagcgatggacttcacgtatgca

SEQ ID NO: 90396 - DNA, 1095 bp, Zea Mays
cgacaacaagagttgttcccaactaacttgtcgccatatttaaggagattctatgctaccttcttagaggatttagctccctctgctatctacccctctgaaccaaactgctttcctcgtctgcttctactttgctcttcatcttcagagtgaactttggtccaaagattcagaagcgaaagctgctagtcggagttgcacaactgagagaacagttccagaggtaagatggtggctgtgctttgatttgttttttctgtttgtgatccattcattctactgtacgcataggcctctaacagtctattttggaacatgaacatccaggacacatgtgtatccttgtcattcatgcaaattgcatccttgtttgctgtctctctcttttttgtgtgtttcttccttgtcatgttttagtgtatattttgtagcatgaaagctaaaatcttctctttgtactacaaggacattttgatcttattctacattcttacaggagctctctctctcttcctgtcgaagggtttcaccagtaatggcgataaagatgaaggggatattcaaaggactgaagataatctctcaaatgttcggtaatactctcatccagattgtttctgcatttttttcattacctgacttgagtttctgtggattggctactacatccagattctaaaaactataaaggtaaaatgcataaaaagcagcaccaaccaactcaaaagcatacggtgaaagcacaagtgtacctaaccagatacctactcttttgcagtgcacaaggtgcatgagatggtgaccgggtaccctatagatgtgaagcatgtggcccacataggtctgggcaccagtgacacatccccaagctgggtaagaatgtgtgtgcgtttttcatacagttcttcaactgatggcgatgtgtgtgtgtctttatttttagacggctgaattcaaggggacagatgattcatcagcaggctctgtgaggagcacggctgcgcagtcacggaagacttcttggacctctgcaggtgattcttttcagctctccgctcataatcatacaggcagcacgagtaatcgtctgcgctt

SEQ ID NO: 90397 - DNA, 1812 bp, Zea Mays
gagtttttcatgtagaagataatcccggtatgtcgccctccagtcgttcaaatggtctgattcactacgctcatcagtgtccttgacaacaaagactacgggggcatgctgggggccagcccctatggaggtagggtgggtcgatattgctagtagggaaacgaggatcattgtcgacctaccccgtctcctcatagtagacaaagggttcaataaggtcgttggtgaaaaccctatctaggattgtttcacatccgtataccacctttgccagcatgccgatcacctcgttgtcccatcagtagtcagagtggttagtagtctcttctacagggatcatttggccttggggcggcagcgataaccagagtgtcatcatgttgctgcttgtttttctcttctacttgctgacacggtcaatagtggccttatcgatatccatgtcttgcttggcctttttttagagcggtcgaagatcaccacaatagcatcctcgtgcggacgcatgactgattgcgatgtcgagaagctcctttgtgatgcgggggactttgccgcccagcttgtgcgaaagggtctcactggtggtcccaaagatgaatgcactaacgacatcagcatcagcgatgttgggaagctcgttgcattatcatgaaaaatgttagatgtagtcccagatggattatccacgcttctcgcgacaattcttgatgcgccaagggtttctcgggtcgcacacacatgaccaagatgttgacagtattagcccaactttggatgcatccgggtcttaggtgttctagccaagaacaggccaattcggctaggtagggggaggttacagataacgaaatagccattatccacccccagtctaacactaactagtaatcttcaagccacaaactggagttcgattcctgagtacttgatgacattagcaagtgcatggtatgattggggtaccaatgcctagaggatgtggtgctcaaaagcttggggacgtggcaacggtgggctcagacttcgatcctcattagggatgaaatgccccccatggcgtcaaggatagccatggctaatgatgagcctcgtgggctctcgctcacggctacgaacatcaagaatgtttcgagcgagaggtggatggtacccctgacattgtgctttggttgtcggaccaatagagcatgctcctctagtcgccccgtggtcttgtgctgggtggcgatgtgcccacatcgacaagacatgcatctctcgcactattattttgtgatggggcagagcaacccctagatttcctgctaggtcttgcattcatgtggggttactagttctagaagcctatcgaagaacgcccccatgacaggtatgttttggctagcatggaggaagcgcaaagagtcgtcatcgccctataggatctgcttatgagtgtcgcatgccatggcgtgtgcgtgtctaccattgcctcgaagctgtgcaagttgttgttttggtgggccacgatccccctctagctggtgctgatcatcccagacccagccctatcgggcacgtggttgtccctcctacgactagtcaaagcacgggggaccagaaactgctaagagcatcaaaatttcctccgagattttccccgagttgtccgtactcgaattgtgacctttaggggtgtcatccataaggcatttgcatgcaaggttatggctcactccacttgagggggggtgcgagagtcgaaacctgaattgattaaaggatattgtagatcaaatctttgacatggttggccattccctcgaactc

SEQ ID NO: 90398 - DNA, 316 bp, Zea Mays
ctaacagcaagaaaaaggaccaatccacagtattaactgtattagggtggactgcgggttgattctctagaaatccaggggctctttagcaaacttgcagcgccgaaggggtacgggcgcaagagatccattgggtcttgatctaacgactaaagatagattatgaagaagtacgcgctctcatccctctgaacgagatctgacggccataatacaatcgagccaaaacgttatcctcacaccgatctccatcactcgccctaggatcaacggtcacgaagcgacgaggtgaagggtatggctggatctaatatgg

SEQ ID NO: 90399 - DNA, 567 bp, Zea Mays
atgacctcattcagagctcgataatcgatgcacatcctcctagtgccatctttcttttctacgaacaggacaggggtggcccaaggtgaggtgcttggtctgatataacctttctctaatagctcatctatttgcttcttgagctcaaccaactctagtccagataccctgtaagctcttttagaaatgggggcggttccaggaagaagctctatggcaaacacaacttttcgctcatgtggcatacctagtaagtctttcgggaacacatccggaaactctgacacaaccttgatagtctcgagtgaatctgcctccttgctatcaatagttatctgatgacaacctcctttccttggcttacgtgagactaactctgccactacttcttctcctagtggggacaccaacttaattgtcctcttatcacaactgataaatgcttggtacttatctagccaattcatccctaggatgacatatattccctgagtacccattactatgaggttagcaggaaactctatccctcttatttccacacttacatccaagcaaacactatcg

SEQ ID NO: 90400 - DNA, 1032 bp, Zea Mays
gacccccacaatcagtctaagggccactcctcccacactagtgtgcgatgaacgcctaaagaagggtagacccaagagggacacaacaacatctctaggatttgacaactagcttgaggctttggcaagtggtgtcaaagaaacttttagtgttgttggccactgccatgaccatggaggagcagatgatactagacgctcccaacgactccaatattaggaacacaaaacactagagctccctagcccataaggaagctatggaaccttactccttgtactcctctcaaccctccagcataaaatggggtataggctcatttagaagggggataagtttgatccaacccaagaacaaacccaagattagaactagatagcgatctcctaccgtcagtctctcaatttaagaactcgcttgatcattctaacatgaagaacttgttgcaagatgtaggtctctagagcctaaacaaaggtaaacccttcatgcattgagtgttaaccaccaaagtcccacacattgaccaatcgatcgatcaactaattactcatcatggttacaatctcataacaccgagcaatgaaaaaccttgatgcctaggtgaggcaccttaggtcaggctaacaaccatgtccctcactcggaaacctagaaaattaccgagcagtcgagcccaagctctaacactgatgcttgcgatcgatcaaggatgactcaagggaagtggacccatagcaacgttgggaatctttttggcaagctctaatgagcgtcagatgcctgacatgtgggtagagccacatcgcccatggccctagtagagctatatcccctcaccttagtgaggacttatcgatcactctagacaaggggtcacacagtgggcatgatgcaacatgacagaatgattgtgtggcctctccatgttgaagaggagatgagactgtgggatctatctcccatagggaaacttctccatcattgacataggttggttgctaagaggaggaaaaaccagatagagacaa

SEQ ID NO: 90401 - DNA, 972 bp, Zea Mays
gttagagttggtctagctcgccacaacaatatcgtcttgtaggtggtcttggagtctcctggtgctggagtttgtaatccgtgcatcatctgcttatatcaatacatgatcagtaaaagaacgtagggtagggtactatgaacactatggcatgatcctctataaacaaattcgtgaatattcggctctttatgtatttacggtctagacgatatgccagcttggcaggttaaatcagtgtatttacggtctaaacaatcatgctagtactaaaggtccaaagtgacaagattgggggcacacacatgtgactgtactacctggaaagttgtgtgaaaaaaaggctacgaggcagcaggctatgccctacgatagagatgagatcgttttattgctgggtagttgttttatcgatcgatctgtgttgtttttgtcatgcacctgaaccgaactggacgctctcgtggaattaccgagagctagcctcactacctccacggtcacacgcacaaacacagagatctcaagcgaaaattttgattttctgcaccggaccggaccagtcgaattcggttcatatacaacaggcctcacgtctttaggacgaaatggttttctgaatgaagcatccaggcagaagctcgcaatgcaaggcacctgtggctccgaactgtgaagctgtctgcagtagctttattatcccctcctttatcttatctcttattttaaacttcaccctataaatattgtaatctacagtgtaaatcttctattttacacgatttgctacgaatagtctaaggttgtatcaagacagaaaaaaacaatgtatccattgacaaaacaaactggtcactcacccgaggtccaattctagccaaggctaagacatacggcgagttggcaaccactatcgctgcactttttccgctggctgttggttggtacgcacctaccaaggctatctctaat

SEQ ID NO: 90402 - DNA, 530 bp, Zea Mays
tactgcagaatcagctgctaatgcttcttcagtagtggcctgaatgatgtgccacgcattagtctgccagtagtttgtttgcaatgtgtgcacacgccaacctgcatcttttttctgctcagccagcagcgcttagcagtttagtgcccgaattactacttttgtttagtactcctatattcgcttaattgagcactgaggtatacgtactgttgagtgagattagatttggctgaagacttcatcagtcaacattattcggtctctacctagaatattaatattgtcggtgctaggtaccaacagcgcactacgaggtgtttcatgaagtggttttgggggacggcgacgttgatcgcacctcgatggttctacccggaggggatgacgcctgggagctgcgcccgggagtccggaaaccatcgataggaccgatgacgtcggacctagacctacgcaacgtccgggtccgccacgtgtcctagaggggaagacgctcgggagctgcgcctacgagtccggaccccatc

SEQ ID NO: 90403 - DNA, 272 bp, Zea Mays
gttcgagacatgtttcagactaacgggcgatggctagacatggtatggtgggcgcaggcgccgtctcccgcttgaagaatgaggcccccatagtgtgtgttatgttggggctcatgggcttcaaaattggacctccagtagtctataccagcgctcccacttcacctagttttgtttgtgacctcgtgacaagtgtgtcagtttatatttctgtcatctttagagcatcttcaaccgctcttaatatctgccaatacctttaaattaggatt

SEQ ID NO: 90404 - DNA, 406 bp, Zea Mays
ttcttgtacttgcctttgtatttccttaatttcttcgggattggttcgatatggtggatggttaggaagtgcagcccctggaataagatcgatttgatgctcaatccctcgaattggaggtagtccagccggtgtttcttgtggaaatacgtcttcatagtcctgcaaaagatcagccacaacactaggaagagatgttatgtcgttaggagaaatcaaaacatctttgttcacaagtacaaagagcacttgatatgggttgttcctcacttctctcagctcggattttgtggctagcataactagatgttctcccccttccttctttttatctttggaatttggcttgtagcactcactcaccgaattgtggatggcactcaatttcttttgctcttctcctcct

SEQ ID NO: 90405 - DNA, 397 bp, Zea Mays
cgataaatataatcagcatcctcgatagcggctttggggcaggagattttgccctttctcccgcgtttggtccttctgccatgccagcgtctgaagcctgtggatcaactttatcttcaggcacgatggacttcgtctcaataggtgctgaaggcccaacttcgacttcgacctgaactttcgtagcttaggcaaatttcttaggggcagggctcagggccttcgtagtctctataacagtgtctaatacgctggtcatcctcctcctcttgggagttgcggcaggagttttttgcatttttagcaaatctgcctctgtgggtgggctcaggatttctggcgtttttatcaccttttccaccggtggctcttcagccttatcatctctagcttcgac

SEQ ID NO: 90406 - DNA, 648 bp, Zea Mays
ccacgatgtagggcttggtgaagtccagaagtgctagtaccgacgccgatgtcactgcccctttgagggcgaggaaagctgtggcggtgtcatcgttccatgagaatccttccttcttcaaaagcgcagtgaggggagccgcgatggagccgaagttgtggacgaacttcttgtagtagcctgcgaggccaggaagccacgcactgcgtgcgctgagcatggtagtggccactcatggatggcttggaccttggcgggatccatggccactccggatgccaagataatgtggcctaggtagccgacagatgcgacgtcgaacgaacaattggacctcttgacaaagaggcggtgttggcataggagggacaggacgacacagatatggcacaggtggtcggccagacctgctgtaaatcaggatgtcgtcgaagaaaacaaggacgatcccggcggaggtggggccacatcacatcattcatgagcgcctagaaagtcaccggggcattgcacagcccgaatagcattaccaggaactcgtacaggtcgtcatgggtgaggaatgccgttttgtgaacgtcatccagccgcatccgcacttgatggtaccccgaccgtaggtcgagcttggtgaagaagcgcgccccg

SEQ ID NO: 90407 - DNA, 511 bp, Zea Mays
gtttgatagtttgttttggttgagtggctaattgtttttaaacacatttgaattttgaattcaaaatcaagtgaccaaaattataaaagaaaaaaggaaaataattcccctcccttcccttcctagcttttagctcagctcagcagtcggtcagctcatgagcacgcgcgcgtcgtctgacctgccatgcgttagcttttgatgcgcctcgcatcgcaacctacatcgccccatcgatacactggatcgttcaaagctgcactagatccccccttgctgacgccctgggtccacgcatcagaactttctctttccttcagctatcattcctacgcagagcccgcgcacgacgtcgcaacgcttcccacctcacatgagcggttcagtacccttgcacccatgacaccctcccctctacaagaactcgccaccctgcaccactacccgaacccaccttctcaagttgatactgtcaggccatttccttgtcctctacccacacacatagtcg

SEQ ID NO: 90408 - DNA, 640 bp, Zea Mays
ctggcccggccctgtcgaaatcgtccctatcggcggcggagggtcttgctcctctcatacaagtatacaacactcagcaacggcatccattatccttccacgccttttgctttggtggtggtgctagcagcagtacgagctaaagctaaagacacggataggtttattcttcgtcggctgtgaggtcgatcggatgacactacactgtggagtggagtggagtgtattataagcgtcattatgagcctctgtgcttgtggtttaaacctgatgacatactgtatagtacaataatgtccggtggcatgtcaccgtccggatctgcacccatctcattttttttctactactcctcctaagtgcatacgcctaaaaaacatgtaactataggatcacaaatcacatgtcagtcaaatttgtccatatttaactaaatttctaacaaataatatttatactcgtagctctaaattaattattataaaaaatgtatattgtgtttgtaactaatctaacataacaatatgatactgcagtagaataatatcttttgtgaggtggtttatgagtcacgcatgcactcgtctctctctctctctctctgcacgaggtgagattcaggttcagtgcaggtgcagcg

SEQ ID NO: 90409 - DNA, 548 bp, Zea Mays
cttggatgtagggtctttgtgcgcttgctcacggaaccggagcaagaactttgtcgaggttgcagtcctgtcagtcatccttcccctttgtgcgcttctggctccggatcttgggcctacatggtgacaagccgacgaagggatactgaagtcaccgaactggaggaggggatgcccgttgtggcctcgacatgcggtggagcgtgctgctgagcttgcatggcaagccattggagttatggaccgtggacgcctagctggggatggatggtgctatggagggctggcggcgatggtggactgtcgagtggtgactgcagcatgaccagtgaccgcatgagctttagtgacggcgttagcataagtagtctaggttttcgatttaggactgggagttgccgaacccgagttggcccttggcggcttgaccaacgtctggtgactagtcatatggtgccctggtggagactccacccgtacgggagttgggctgggcttgtggcctaggcacctgtcgcctggacatttggtttgggtcgcaacgattt

SEQ ID NO: 90410 - DNA, 494 bp, Zea Mays
caaaaacttgagctaaggggtacgtgccaacctcatttctattattttcataacccgaacagaccaggccgaacaaaaggttcataaggaacaatcttcttcctagccattttgtcaatgactcccaagcttacaaagattaacagaaagagagtacctccctgattcagagactacccccaaccggcatgcacccaagtttgcaagaaaccacttcaaccacggaggcagccaaaaagtccaggacaacagaaatttggaattttgtcatcattaaaactgagtttcgctatattgtcatcgttttgaatggcttattcctaatgtcattatgaaacatgtcgcacccgctggaatgccatctaggtgtttaataaaacaaaaaagaaatacatatatctgtaggtcaattttgcccctgccataaaacatgcgctgctcatcagcccacgcgccatcgtcccgcacccgttccacgtcgccgacccgccccc

SEQ ID NO: 90411 - DNA, 535 bp, Zea Mays
tgacaaaggtgttcaagtcattaaggaaatgctcgaacagaaggtagataagtacaaatgctttcgtcaagacagcaagggagttctatggtttgaagactgattggttgttcctaagaatcctgaactcagaaagaaaatattggacgaagctcacctttccaaattctccatgcaccctggcagtaacaagatgtatcatgatctcatatctttgtactggtggaccagaatgaagagggaaattgctaagtatatatctgaatgcgacacttgccaaagagtcaaggccagtcatttgaaggtagcaggtaccttacagccccttcccataccatcttggaaatgggaggatatttgcatggactttattgtgggattgcccaacacctcccggcaccacaattctatttgggtcattgtggatagattaaccaagacaactcatttcttgccagtgcataccacccacaagacagagaaatatgtagagatctatattgatcaaatagtgcgtttgcatgaaattccgaag

SEQ ID NO: 90412 - DNA, 306 bp, Zea Mays
ccccttccctcttccttctcacacatgagcagcccacgcattttcctctctatgcattgtgccttcgtggtctaaggggccgcctcgtcgtcttcctcgcgtcgtcagaggagcagccccatcgtcttcctcgcgtcgtcttcctcttcattgcgtgcctgctcggctgttcttcatgtgtaggtgacaaatcctctccttctccctcttctttgcctccttcttcctcgtcactacgcaaacatcatggtggccaaggagctcgcaccaaactccctactcacctagcgacgtagctggcctagc

SEQ ID NO: 90413 - DNA, 860 bp, Zea Mays
gttcggtttcgatctgtgcggtcgtgattgttttgtttcgaatagctagccagctactatcttgtgactatttcagaaagaaatggaccaggggactaaacagatctggtataagaactgggccaacaacgtgtgccaggaagacctgctagaaaaaagaaacggaacatctgccagatcttgaactctgccatgtccatcttataaagaaacatgctgataaaggacggacagagcgtaatttccaagttggcgactgcgtgttgctgaaacttcaaccttactgtcagtcttatgtgactgagcgagtgaatcataaattggcgtttcggttctttagaccctttgctggcaaggttgtttctcaggtactaatacacgctggaccgggtggcctaaggagttagctacttaggagggatggagctgtgatcgggcaaaagacttaccgtttgctattgcttgctagaagggggtaatgtcagtgctcctatctctctactacgaccacatcggaggaaaaggccaacactgacaggctagggagcagcccaggaggagtacgtacgtaacagagtcatcaagcctgttttgttatgttgcaggatcgggctgctaaggagacgtatgagtaacgatctctggtacgtaacaacctgatcgtgcaacataatacaagaacaggctggcagtagagaacgaaagaatggcctgacgttcgtcgccgctcctgaccctgagcaaattccctgttcttcgcctcttctcaaccccgccaccaccaattcccactctgcgagggcgctaacaaatttacctgtgggttgtcactagctagttgctggttcaggagataaggt

SEQ ID NO: 90414 - DNA, 473 bp, Zea Mays
gtgctctactgctagagttgagcgcgaaggagacgaagccgaagctatggaaaccgttcctatctcggaagcaatgaagcgatctgggttgatgacatcggaagacatccctgctactgaagcagaacaagcagattttgaagagactgattctgaaggtgatcacagtatcgcagtatcgagcaagcccagccacctggacttcggaaagtcaaccatctccaaggctgatttttctaagatggtgaagtcgggctactttagcgaagaagagaaaaagctgattcgcttcgatggagaagaaactaccccgaagccacagaaagatgaaatagtgattttcaagagtttcatcaaagctggtttgagatttcctttgaataggatgattgctgatgtgctaaagaaatttgggatctaccttcatcaactaactcctaacgctattgttaggcttagtatttatatttggg

SEQ ID NO: 90415 - DNA, 514 bp, Zea Mays
gagcaacgcccgttggctcgtgtcaatcggacaggacatgcagcctgcaggcggcagttcatgcgacggggcacgacgacccataggctatccgttgcgatgcgtgtgcgcgtagaattcgaagagactaagcccattcctgggtttgactcgggggagctcggcctaggcctcggtgaatccgtcagtccctatatattggcccaggaggggatccttcctggttcttacattgcatctgccttcagccctagccacctctgcttccctcagccgcagccaagagtgtgtgcgtagagagaggaaaatagcccacgtgcccttcttcgtcgccctcctccgctgctatggctgaaaaacttagcgtccttcatacctacgacccgtggcccatctcctccgttgccgatgaggatctacaggccctggtggatggtgggctgctttgcccccacttccatggggcgcaccctgattggctcgcgctgggggatgagcaggagccagcccgcgg

SEQ ID NO: 90416 - DNA, 577 bp, Zea Mays
ggctgggcaagtgtcaacaccatccttgaggaccaagttctccgcagtagccgcctctaaggctgagggtccctcaattacttccatgggagcaagacgatccaagtcagtttccttaccctcgagaccgcgctctaaggtcgacgaggcgcgggacgctgctcgggatgatcccaacccggcgtcgagcacatcagcacaaacctccatcacaccatcatccgctggctctgacagcaggtcttctggaaccatatcttcaagagtctgatcaaagtttgctagggacaactcttgtagaccaatgagggcagatagagcaggagaaggaactccactactttccccactggcgacatactactgactgttcttccgagtcaaagggacctcatcttcctcctccccgtcattttcatcagcaacacagacaacacacccattggggtcagcagcagaaggagcacccccattggggtcagcagcaggtggagcacccccattgggttcagcagcaggtggagcactcccattggggtcagcagcaggtggagcacccccattgggttcggtgtca

SEQ ID NO: 90417 - DNA, 743 bp, Zea Mays
gtcaatataaatttcggcatacttttccgtcctgtgggtggtgtgtaccggcaagaaatgtgctgtcttggtcaatctgtccacagtgacccaaatggaatcatggtgccgggaggtattgggcaatcccacgataaaatccatacaaatatcctcccatttccaagatggtatgggaaggggttgcaaagtgcctgctaccttcaaatgactggccttgactctctggcaggtgtcacatttggatatatacttagcaatctccctcttcattctggtccaccagtataaggatcagagatcatgatacatcttgttactgccggggtgcatggagaattttgaaaggtgagcttcatccaatatcttctttctgagctcagggttcttgggaacaaccaatcggtcttcaaaccataggattcctttgcatcaagacacatcccaaactagtgccggaagcatcgcaataaaccccaaagggcttggtgttgtcaggttgagctagcactagtgctgttgacaagtgccgcctcagtgtatgaaaggcatcctcacacttctggctccattcatacttgactcccttcttcaacagttcagtcattggcttggcaattctggagaaatccggaataaatcgtcgataataccctgccaatcccagaaaactctgaatctgtcgcactgtggtaggaggtttccaatccattacttcttgtacgttttcaggatcaactgat

SEQ ID NO: 90418 - DNA, 799 bp, Zea Mays
gacaaacttatgttccatgtgataactttgtaaagttcagtagtatttaactttgatttgctttgctgcactttctcaaactaaacaaatgtgtgtagtgtgctctcattgtctcattttatgtgttcagtatataatcttatgtaatctcgatagaaaattgtcacgttcgatgccatggtacacatatgcttttgatgcagaaaaagatatcaaagcttgatcttcagtggatctttcgactttagctgcttcgccttctcaaactctattatgagttttgacatattttccttgactggtttcagattttggagagaagtgactacaccactatcagtgggaacccgtacataaagaagtcaggtgctcacttgacattgtgtcactgtgagttgttgatagaatcttcatggagctcacttctatcgtccttttcagggtggagaaaaatatcttgcttcttcaatgtctcgtttgaaatcaaggatcactccattgagtttgatgaaaaccgcaatgtcaaccgtgctgaatttcttgttcgagcgtcaatgacgtatgctgttttctatgcatttacgagtcatttttctgtcactttcacctgctattttacttctattcatgtttttttatcaggcattattaactctattttttaacttttttatttaaagaggtgggagattctcagacggttggggctcctgcgatcgacgagagaaaaaattcaacaaacctaaccatgacattcccagcacagctgaaaccagagctaagaacaaggcttgccagg

SEQ ID NO: 90419 - DNA, 1446 bp, Zea Mays
caattggcttaagtcggagacgtcttaagtcggtgcgacatgctcactcttacataatttagggtgattactataccctactaacagagtaatcgacttaagtcggagacgtcttaagtcggtgtgacatgctcacacttacacaatttagggtgactactataccataccagcagagcaattggcttaagtcggaaacgctttaagtcggtacgatatgctcacaatcgcatactcgagggtgatcacaacaccctattaacggaataatcgacttaagtcggcatagcgtgctcgtgcatacatgaactctatgatgcaccacctcgacgagaaatgccaactcgatgaaaagtattttctgttcgaacgaatcaaaatttgtcttcattacacaatcactgtgcaggagcattctcgcaggggaccttgccagcaggatcaccagagggagaaggcttactcacaccagcggacgcggcaagaacgtcagcaacaatgttgtcaggcaccacaacacgaggtcttttcatcaggattcaaccagcacgaacagctttggccatcgctttatcacacatcggtttcatgataccatggtcatgctctaagaccttaatgtggcgacgagcaatttccaactcctgcgaaacaagtttcttcgaggcgcgcaactatttgatgatggaatcttttgaagacagtaacttactaagacgcgacacttcagtctagaaagccctcagctcaaccctatgatggtcaagctctgacatagtaaagcgatgactcctctccaaagtagtaagggaactgctggcatcacgatatagtttatccaaactgtcacgggaatcaagaagtcttcgcatctcctcctacaggcaagaagagcactaaacatcgaattaaaggcgcgaaacaaaggcatcaggaacagttagaaaaatctacctcataggctctcttatctgaatcaagctgagcgttcaaggaagagttcagggtttgggcgccatccaagaaagcagaaacctggttcagatcggcttgactctgagcatacctctcctcagcatcagagcatcgtcgagtcatagctggtaaagaaataaggaaagagtacaggaggtaaaatgagagaagcaatgagcagcaaagaaagctatcaatccactaaccgatgttcgaggcttttagatcatctatttgcctctaaagtaggagaggattccactgcagcaaggataaaccggatcgggaataggggcatcgcaagacctcaactgggccgacacacagctcataacattctgcgaacacaagaattagcaaaggagcctatttgtcaacacaagtaaagcagggcaaaggtcagctcacctgaaggttagaaaggaaaaagggaaatcccagagccggaggcatcgacatgctatcggacgg

SEQ ID NO: 90420 - DNA, 1202 bp, Zea Mays
tgcccgcctgcgcttctcctgtcctgcctgattcctctctctcgagttcccaggtagctattgcactctattcaagccttacctactgctctactactttcgcttatcttttctccatatcttgaagtgtgtcagtagtcggttcaggatggtgcggacaaagaatgtcacaccgttagggggaggagatgaccaggaccctcctcgccccttcaaacaggacaaggggcagactatctaccttgagcagcaaggggacgagaagagatggttggacagagccactcgtgcagcgattgccacaatagcagtagtagatcacgcagagcagggaggttagttgaggatttctgatcagattgccttccgagtccatcgcctctcatctcggactcactcctccactgctcggtccactccctcagaccaagtctccactccacctaccacttcgccagctcctaccgctctcgagccttccaccacacccgctgctaccaccacctcaaccactctagcttccactgctcccgctcctgcttccgctccacctatttctccacctcgcttccgggagcgtgatgagaccgaggtgcgaccacttgctgctgatccttgactgctcaaccttccaagggccacaactactagggtatgtcagtacagacatgtacccgtggactcgtggttgccagctcagagagacctagtggctgtgcctcttttcagcaccagggcccaggagtccttcttcagggcatagttgtctgctcagattgccctgagagctcactggcaattggatctcactgccttccattcagcagccggtgcagagtcagagggtcacatcacatatctgtcaggtttatactctctcttgatcttcgatggtagatatgttgaggagtgggtcagagttttctatgccacagtgtggatagaaccggatcatcagtgaatgaggttcatatttgagtgagaggatgtgaccttgcatgctacttagatcagagagatctttggatttcctaagtcgtcgatgaggatccacagcctgtgctatggcacttcagatcctcctcatcgccctcacgtcggagtagcccctgccactgctcacatcgtcgccctgtttcgacctccattcacagatgggtagtggtgttctctagcagatttcactccagcagcgaagtttc

SEQ ID NO: 90421 - DNA, 767 bp, Zea Mays
gagccaatacacctatgggcccccacgccacgtgctcctatcacgcgtccgacaggagcacgcacgtacccgattgacgtggaggcaaggtaggcatcattaccccacgccagccatggtgagggatgtctccacacacacacacacatctcggataatgcaaccgtacgcaagtgggatgatggagagtctagcaactagacgaggcgtcgccacgtacaaccctcagtgtcctccgactctgcccatgggtcccaccatgcattgctacagggaacctgagcactggagtcgctataatgacctacgtatcgagtagatgaagcgatccaccttaccgggtgtacgaccacgcacgaaccagaagacgatgccaggagaactatgtcagcacgactatcatagaaaataggtcatgccctccttcgaatgacaagtccccatgtaagaacctccccttgagctataaaagggaatgggtcaagcaactaagggcattcgggtaggagcattcgacctgagttctccaccccctcattctcacactggcacccattgtaacacgttcctcaaagaacacttcaataaacactacactggataagggcacaatcctgaactagtataaaccctctatctgaatcccttgattcatcggctcctcggtcacttcaataaatctttgtcagcagtggcataatgagaatctttttctttgtgaggcatgaaaagaagggaatgtgtttttttcgccaatagctcaaaaa

SEQ ID NO: 90422 - DNA, 795 bp, Zea Mays
gccgaggtacaagagctaaagaggaaagttgccgaagcaaccgagaactttgaagttgaagtggtgaagcacgaaatatgtgaaattgaaagatcaagagcgcaaaagaatgttgatgagcttcgtgccgctaaggaaaaatgtcatgaaatatccatggaatgcgcaaaaaatttatagaacaacttttctaaggttggagcctattcctccgagcagagattaattcatggaaatcctgatgaagtcattcaatggataaagggcgaagtcgaagctttcaaagaagttcttagcgacaggggaaattttgtgccttcgctggtgcccgtggggctacgtccatcttggagaaggttggctgcgatcatgctaaggttgtagctcagccaaacttcactttctcagctaatgatattagaaacccttcaaccgaagctactaccctaggtgggaaattttattccaaagtatggctgaagggtggacaagaaatcgctgatgaagccatcaaacgaaacgagaaggaatctcatgatgcttcagaagaagcaaaaagagatgaagaagctgtcgagcaggctagacttataggtatacactcttttaactcattttcgtaagttttccagcttcgacactaacagatatttgtgtctcaatgcagctgagctttctccacctcctgaaccatataaccccgaagctaacccatccgtcaaagaggtgctcgacataattaaaaattgccaatgacgctactgatgaagctatcgacaggcttatgaatgaagc

SEQ ID NO: 90423 - DNA, 485 bp, Zea Mays
ctagaagcataatggaaggaatacattatgtgaataattaatgctgacagtacacaaagatctttgttggacgctgtgttgcttctccgactggctactgccacgtcttgccgtgtctgcgggtgggtgatggcttgttgcagtagaatacggagcagcctggtacggctattgtgcgtagaggcgtataggcggagccgtccagattccctccgccttagtaacgcataagtaatcagcgggagtcatgatgaatgcagtccatgcagcattgataggcagtgacccttttcttggaaacgcacgagtaatggtgagtcattgcccttgctatggtaacgtgtgagtaacagcacggcccacgcagcgtggactgggcacgccgcctgtcactagaatggacaggcgcacgtcttatccgtaatgaatgcaaagacgcgcgtagctcagaggcctcatgccaggttccgcccattggcttacgc

SEQ ID NO: 90424 - DNA, 710 bp, Zea Mays
agaaaggagtgtttccatgcagagctcagctaggttgggttcttaggctccagacgacatagggcaattcccttatccattttcctgcgaacttttcattcttatcgaagacctttttcttgagtgcttccagtatcatcccgttggctcgctcaacttgcccgttggctcttggatgtgctacagaagcatacttgatctgaatgcttttttgctcgcagaagtcgaagaactctgaacttgtgaagttggatcctaggtcagttatgatgctgtttggtatcccgaatctgaatattatgtcttgtatgaatttcacggccttagctgaggtcaatgaggcaataggtttgaattctatccatttagtgaatttgtcgattgctactagtacatgagtgtatcctccttaagccttcttgaaaggtccaatcatatccagtccccagcacgcgaagggccaagtcactggtatggtctgcagttgctgtgctggtagatgttgttgttttgacaagtattggcaagcttcgcacctctgaactaactcagctgcatcactcttcgctgttggccaatagaatcctgacctgaagaccttcccaactagtgtcctggacgcagcatgtattccacattgcccagcatggacctcctccagaagtcgcttcccagtagatgagagaatgcacttcatgaggacgcctgat

SEQ ID NO: 90425 - DNA, 536 bp, Zea Mays
tcggtcgctgttgtgctctcaacaactggtgccttcggagccgaagcttgtggtggtgtcccttcaataacttctgtcacagtgacaattcttcgcctttttggcccagttaccttctttgttagcaagggcttcttttccttctgaaaaagcttcgtcagatgcggccccagtggacttagcttgataggcaaagatttaatcattacctttaagatttcctccacgtcggttacagaaggtgttgcagcagtttcttcttctatatcagttgccttctgcttcggagccgcagcctttcttttcttcgaagcatctgtcttcggctcaggcctcagcttcttctttttcagtttttcttcatcatctttcactaatttagcgtcttctttattcaagacgctggcaactctctttctcttctgtccttcggcccctcggtccagccgctcatagtcaggatactcaacgttcagagcatccattacccggtttaaccttcgcttcggacgagtgccgaaagctacagtcatcag

SEQ ID NO: 90426 - DNA, 299 bp, Zea Mays
cctagaaatgtctttacaagactagcaagcctcctcatgctaatgctaggagtcaagtgggatccttctggtggagagagatatcatgaatctctctgagaaatacttcatgcgcttgcaacatgtaatgttcataaggggggcactgcagttcttttctggcaagacttatgaacttgggtgttctgcagtgcatggactcatcctcgcttttctcctttgcaagaaaccaaaccctgccagtcaaggctttcctggcaaatacacaaaataggaaattcatttttcctctttcagtg

SEQ ID NO: 90427 - DNA, 502 bp, Zea Mays
aaccacgggaattccctccccccacggttagggagacagctagatgttcgcactctgagttggaccgaatcccccatagacctggaggtggctgaggcaggggctctgcttgctgaggttggattgttgaaagagaggggtctgactacagaagctgtggtcgccgatttcattttcaagaacattcagccattaaaggacagagcatacccggcttatctgtaccgaggcctcgctgattcgacccgggttaccaacagaagaattcctgctgtggatttggtcagccggctcgagatgatactcagaggcaaggtgtcgaacatcggtgctcctgttgcatactcagcctggaatatgcctcctttcaaggcttttaccagttttgtgtcaaatcctcctgctggtgatagcggtttgggccttagagtgcgaccctctcccgaagaggttagtgctttggtcgcctcacttggtgaaatccctgacgacgagagtgttg

SEQ ID NO: 90428 - DNA, 717 bp, Zea Mays
atttaagtcattttaggctatattaggtcactcagaaacattaagtcaatttaggcgaggtggctggctcacggtggctcagcttgactcttgcgcggggggtggctcggtcggccggatgggcaagcgctcggtaggtcaggtgggtggtccaggtgatgaccgtttagtccatcatcctaggtgatgaatagatctaacctataaatattctatatttatcacaaagggtgaccaaatgatccatcacctagcccgtgcgtccccgtgtggctccctccgtgacacgtgcgacttcctctgtgtttgatccttcctcgcacgaacgtgttggcactatggggcatgcatctgttaagtcattttcccttctaattcagatattccagcgttcatgcaacattaagtcattcttcatgtttctcaaccatttctttgctcttgcttcaatcattctaggccatattaagtcattttaatgtctaaacaacattaagtcattccaaagtgtagacaaagtcattcaagcatccagtaggtaacattaaatcattctagtaaacattaagttattttaggaaacattaagtaattttttgttttcagtcagatggttaataccaggaggggaggtgctgatctaccagcacaaattcgtcgaagaagggttctaactaatccggaaccaacaatgaatccccttcgaatcctccgcca

SEQ ID NO: 90429 - DNA, 1330 bp, Zea Mays
cccgaatagaccgaaccgaattaccctaatagaccgaatgcccagccctaccttctccattcgttcactctagaagctctgtttccgtacacatatgttcctctcttttatggcaatcgaccttctatgatgctctttcttctttcaatgaggcaatgatggttctactatcgacgtttctcttttcattaaagcccctccaccggcgtttctccttttttttcactgaaactcacaccaccatcgacatttctccttttttcacaaaagcccccatcctcctctaccaataaaagccttgaaaagttaacaaaacaacgttaattagaggtggaggaaaagcatcaaaataggtggaagaggaacatgaaaacgaatagtagtagtttattaggtatatttatggattatgtaaattttattctttatgtttaaactatgttattttcaattatttatgaactatacaattttatttgtttaattacgtaattgaacggcatttaactaaaaatctatatgaagaagttgatatgacgttgcggtaaccgtaagctgagtataaatgttgtgtattagagtaatgggcatagactagaatataaccggtgttagcgctacgatctctgagagggaagagaaggggtagacacaggagaggaggggtaggcgatgaccatagcagcaacgcgagttagggggaggaggcagcgagatgatgggatggggaggctggggtcgcactaaggaagatgaataatctaaataatattgtccattgaaattgaaaaaaaggagataaagttattcagcgatttaaaacgttgattttgatgatgtgttaagcatgcatgtaatttgtttggtggatttagtggatgctataggtgtgagagtgattttttgatttgattgagtgtgttttgcaataattaaattgctagattatatagtggtataaataagagttgacgaaggagtcgatagttgtactgaggaaggacgtaacagatcgctagtaaagtgacaagtgcaggtcatgaatttactcggagcatgtgaggttagttcgatagtgtcgatgttgcccttcccgagtgatgcactgtataatactgtagtcatattgtataaacaataaaagttagtatgaatgaaagccaaacgaaaaggctaacaagcattacccttacacacattgttttcagctcgattcccatgcgatctaacttgatcgcactgaaagatgatgcaagatgatacaatactgaaagatgatacaagactttaagttatgtaattttagttgttttgtatgaattgtataatt

SEQ ID NO: 90430 - DNA, 629 bp, Zea Mays
acacctaattcgacccctaataaccattacccctcaaccaatttcatggttctagctcctaatctctctacccacggtgacagtgcgatcaacgaacaacccaaagcgttcccggtgatccttcgtgttctagctcaattggccacgtcgagaatcgtcaaacgcacacagggatgctaaaacaagagcgaggagggcgtgatcggacctgtgaagggctgaccgcggcgagctcacacacgcggtgttcttggccgatttggtggaaatctcaaattggggcgttctggtggacgatccgaggcacgggctggtgtattgggtgcgtgactacctagagaagccgatggcacgctcaatttatagggctcgagggcggtggcgcctgaatttagcatggcgcggtggcggccagagagaggggagagtactcgtggcataatcgtggcgttcaccggtgcaacggctcaaggattgtaattctaagtgtaccacggttactaccgcacagtagcgagccacggcgtggcataaccgaggtcaccggagtttccacggcaacaccggcggtccggccacgtcgcacggctataagcgcggtgataagcttttgccacgaccaaatccgc

SEQ ID NO: 90431 - DNA, 503 bp, Zea Mays
gtttgcaaagaattgacatccttcacatgtgcacacgatttcgtttgcatcatttattgttgttggctagaagactccctgtcggtacgcctttcccaccattgtcatagctcctgcatggtcgtcgcaaatgttagagtggatgtcttcaagtaatacttttccttcattagcatcgaaggcatgatataggttcgggatctcggagtaagataataccctacatattgtttgtggtgtctattgctatgtaatatgatctgctgatctaccatctaggggttacatgactcttcttttagattccaaggagggacaatatttacatgatatgtatctaggtcggttataagatatggattgcaaccgagtctaagatgaaattataattgagcctatctcgaattattgggtagttgaactctatcggtacatgtgttttacccttaccaaacgaattttatgacatgtgctcaggtaacgatctcatcccctgatctgat

SEQ ID NO: 90432 - DNA, 585 bp, Zea Mays
gccgggggaagaaaagattaaacagagtatttgatgccatcagctttgtataccctgattaccgctacccgctgcgagggcaaggaacaaagagaaagactgccgcttcgaccaccacagttgttccgaagggcaaaaaggtgaaggttctgacccaccggccttgttatattgaatcggccgtggtgcctgcgtttggcgaagaagcgtcttcagttgccgaagcaagacaaggtactccaattatgcatggcgttgaagagccaactgtagtgccaaagatgcctacagtcgggccaatcgaagctaaggatgataaggccgaagagccaaaggtggaggaaacaatgaaaatgccagaaattctgagtccatcagcaggagcagaattgccaaaggtacaaaaaattgttgccgcaactccgaaaaggaggaggatggccagcgtactagacgctgtcatagagaccacgaaggccttaactcctgcttctaccaagaaaactgtcgaagctgccaaaaatcaagtcaaagccaaaactgggccttcagcgcctaataagacgaaggccatcgtgcctgaag

SEQ ID NO: 90433 - DNA, 992 bp, Zea Mays
gtggtacgacaccacgtaccataagtatctaaaacaggaacacttgataaagcatgagaggtaggctgaagctacgctaatcctggatgtagcctgccagtacacgaatcatttatagaagtttagggtcacaagacgtgtaataaactacgttctctttatgtatgggaaattatttgtcaccgagatgaatgcaattacaaactcatatgtgtattgagcaccttgaccatctagctctctctttcccttttgttttcatgagaattttagactaatgctctctagatgacctatgtgtattggctagaacaagagaagagcctaagtaaaggcaaagtcattgaaccagttgaccccctttacgtttctccacccctttcttttgttacttatgggaggagagagtgacaacagactattggtgtgaaggatatataacaggggtaccgaagacgcgtcaacaacgaagacactgactgatgggactgagtaactcggacttggattgagtaacttggacttggtcgagggattccgaatcggacaccaggagactcaaccgacatatcagaataggatcaacacgtatgaacatataaggaaagaagatgattcatgataggggtaatatttttgttgtaactacatgtcgagagtaagtaatatgggcataacatggaccaggaatagtagcaagtggcggagtggtgggatgaaaaatcacgtctggaccaagcgaaaacaacacgttttgtttgaccctcacaagtaggacccactttgatcaatcgttgacccaaaaggccctagaaggtataccaaggatagtctgactcctcgcttcgttcaatccttgatacactttataatgcttgctagtacaccggtgcgttcaaggatactggtatcgagtacactttctatctatgctagggcagcaatggccccttgaccacaatgttgtccaatagattttatgggagccttat

SEQ ID NO: 90434 - DNA, 639 bp, Zea Mays
gcacaatcctaagagtacttgactctcgagtggtcaggcgcagctagaggtcgagcaagacatggtgtggtttcgttccctgatctcttgggcagttagaggtcgggcaagatagagagtaacggtcaatctatcctatccttaatcctcgagggttggggtcatgttgaggcggagacatgactattttagggagtcaggtaagacatgatattgagggtttgtgtcgtacctaggttatttatcccccaataacgtgaatgtagaatccactcaatcgtcacaacgggaggaatatgctgcttcctaaaccctaaaccatgcagacccctttatcttcctccatacgcaagccccacgatattcaaatcctcgtgatagctagattatctagaagtccagattctcagaacaactatttagaaaaaagatgtccaaaacatgcccttaaaacccaatgtggggctagcttagggtatggccacgcaaacaaacatacgtcctgcatggttggacctgactaacttcttcactagacaaacaaatatgtcatatgtacccttatttctctataaaatatatgtacccttctttctcaataaaaaaactaataaggctatgtttggttagtaggaattc

SEQ ID NO: 90435 - DNA, 1223 bp, Zea Mays
aaaccgagcgttctaccatggggtgaagccacgcgctcctatgggccccggggttgcctagttgtcttgtattctttatagcagacatcacatgcagcatggggcccgagcgccatcattcgagctacaccgacccatggcctctgtagcctagggctcgacgtggcttgtcttgttgtgccctgcaaacagtttatgcactcacaccatgagccagggggaggcatgggccataaatgcgctgcagtcttagggttcataggttatgagtgcgctgcagcccgaggggctcataggccatgagtgggaggcggaccgatgcctttgtcgtggctcagcattaggcgtagttaatggggtcgatcacttatgacgggtcgatctcgggccaggcgagggatccactcgagtggtttccctttggtttgcttggccctccttgtctggcttcgccacgcttgaccccgggctcagtgccacggggttcgtctgtgggtgcttctagggtagacgtttcctttctcctcatgctgaatgatggcccccggttgccagaggattcctcccagcgccctcgctgactgacaggccctacggggcggtgatcttatcctcgacaagcttaaagaaggggatcgctctctcagccagcctcgatatgaaacgactaagggcgaccaatgatcccgtcagcttctgtatgtccttgatgtgggcgggaggccccattgcctcgattgccctgatcttgttcgtgttcgcctcgatgccctagtgtgaaacttagaatcctagaagcttcccagcagagatgtcaaacacacacttctaagggttcaacttcatgagcgtggcgcgcaacctatcaaagataagggaagtcttccacaagggtcgacccccttctagtcttgactacgatgtcatcgacatacacctctactatgtccctaatcaggtcgctgaatgtcttacacatggctcgcgcaaatgttagcaaggcattttcaaaccgtagggcatgaaaacacaacaataaagaccatccactattacaaaagtggtatgcttcctatcctccctagatctggcggaacccaaaataagcatataagaaagacaacaagtcgcactgagaggtggagtccacgatttgatttattcgtggaattggatacaggtccttggacatgccttatttaggctagtgtagtcgatacaca

SEQ ID NO: 90436 - DNA, 585 bp, Zea Mays
caaggcctatataaacccccaaaggcagcctcttggaagccacactccaacacaactaatcaacacataagcacacacccaaatgcccccttgagagcgagcgcacacacactctctctctcttcttcaacctcctccctctctctctctctcttccctgcattcttaggcttacatacatggcatacatggctcagcagctcgtcggccggatcacaatggaggtggcgccatcgaagctgccgtcgacgatggccaggtgtgctaggctcccgaggaacctcgacacgatcgcggaggacgacgacgacaaggaggcagcagccatggagtcgacaagggagctgcctctccgcaatgcgagccgcggcgcgcaggtcgtcgtcgtcgacgcccctgtgcactgcgccgacaagctggcctgctacctcgcccccatggcgaagacgaccgagtgcctcaagatcaaagcctaagtttgtcaggacatagagagagacgagggtgaggcactcgtctcatggagctggatttcttgctctcttgttttattgtgagcatatggcaatccgtttcgttttacgt

SEQ ID NO: 90437 - DNA, 867 bp, Zea Mays
gtctagttcaatcgaacgggtctgtgagcaataggggacatgagggaagctagaacatcacatggaagggcatgaactaacccgtagacatctggccacggcgagatgtctcatagtggcgttctgaccgatttgggggaaatgagaaattggtagactctggtggacgatcgagagcaatttatagagtcctactgcagtggcgcccaatttgaaggaagtgtgctggcggccggagagaggggaagtcactggcataagcgctatcgtggcttttaccgggccagtgtcttaggcaatgtacaagctacctaaggcgatctactgtgacgtggtaaggctttgaggcacgtagcctagctcgataatagcgaactccggtgatgccagcgcgattgaccgcggctaggacacgacggtcggtctggccagcgaccagattcatgccacactagatattttcaccccgccctgacgttatctactcttcccgtggcacgaatctcccagacgggcacgaattgtggcggcagatcaccgacgtcgaactcacggcaccagagatctttacggtcactgtaccatcgcgatcttcatcagacattctgacagcgcaatttggagagcttcgttctctctttttcatggagcaactcggccacttgtctgcatcaatattgacttccagagaacaaactacaaatttcagttactcactcaattcctcacaatttgatctccaagttcttccaagttcactggtggccataattcagtcttctgactcgactgacagccaaactttctgcccatttttctccaatttttgtatagcatcaaggctcagccacttaagcaaagttattc

SEQ ID NO: 90438 - DNA, 506 bp, Zea Mays
gcactcacacagaggtttggttttgaggatgatgtgatcgacctacgtcgcgtcgcgccgaattcctttcccagtgatgatctagctaatcgagtcttcaatggaggtcagacgctctatatccccctttcaggatgctcttcaacaggtggtctcggcagtccctagcctctgttggcggtgttctgcctcttctggtcaacattgagatccgggcaatacctgcccatctttgggggatcgagatggcggaacacctgctcaacggccattgcttaattcaaggtcttcttcccggccatgaggttcctgtcgacctgtccgtgctcaaattgactgcatggtgtgccaagccagatgatattcctgcttctattggtcttcatgtggaagaaccgccggtcgctgttgttgatgcctcctcatctcctcagacgttagtttatcccatctcagtgaccgtttctcgcggtggatccgccgatgttgggcccgcctatgtcacc

SEQ ID NO: 90439 - DNA, 633 bp, Zea Mays
acgtagagataagtgtcatgctggacatgttggctgaagattcctctgatgcagcccctgctgaaacactggctacagcacccatcctagagtctggcaaaactttagatactcagaggtctgatagtgttcgcccgaagcgtcctcgccgagccaatcatccaacttctcctgctgaagggaagaaaaagaaaaagagacgtctccgccgagtgtcatgcttggatcaagatgccggtccttctgctcctgctgctgaggaagtgccagtgccggtttttgctgaagctgatcccaatgggtgtgacccgactgatgctgaccccaatgggtgtactgtccgcattttttatgaagatgaggaagaggaggatgaaatccctctaattcggaagaacagccgacgctacgtagccagcggggaaagtagtggtgttccttctccagctttgtctaccctcgttggtctgcaagaattgtctctagcaaattttgatcagactctcgaagatatggtctcagagtatctattgtcggagccagcatatggtgggatgatggatatttgtgctgatgtgcctgatgccgggttggagttatcccgagcagcgtcccatgcctcatcgaccttgg

SEQ ID NO: 90440 - DNA, 1067 bp, Zea Mays
ctttttcttaaccattttctcaacttaaactggacaacacacaagtcacataaaacaccatattttaggagacctcacatgtcgagcatcaatttataacctaagtgactcaacctcaatcatggttgacaactaccacatcacctgatttatctatttggaataccgcctgcctagcgtactactagtaccccgcattttgactcaacttaaaaacatagaggaagcgatgactacttcggcatgtcaccacctcactacacaagccaaaattattattatttaaccacacgcctagataagcatgatttcaatttaacttgcctatattttaaatttcggcataagcttggctattggctaacaaagtgaccattttctaattaccaacatacaccacctttcaccatttgtggatacttgcacgacacacagctattgtaatacatcacaagtacatacaaccccatcagtaaagcaccagcacatttccgaaaattccccgagactacgacgacaaggcatcgatccgccatacaacaaaactcatgacgaagccgatagatactatccactaaccgtttgaaaaactatacttatttctcgtttgccactacatcactcctcaatcacacgaccatcatgtgtccttcacacgattatataatagcgacctaagtgtcgtgttacacaatgcatacatctttcctcgttgcgagtataaccatattacggcatatacccgcacacctcaatcaaatatcttacgccaccaccactataatacaccacagcacaaacacacctacgtgtccccatgttacgcacaaggcatcaatagcatagtgactctaacaggattaatcatactcctcattcgcctcgactatcccaatcatcgatcacatgcataaaacaatacacctttcacgtagacacctatcgatgcattccccaacacacaatccgcattttaaaaaattatcctcacagcaaaccacacatcaaatacattattactgaaacttaaaaacatctgagccctctttctaacatgttttctttcg

SEQ ID NO: 90441 - DNA, 1037 bp, Zea Mays
caaaaatcccgtgtaatatctcttctctgtaccatatcctatcttttccatgtgagttccaagcaaagatatggtcgggtttgagagatattgtggtgtgaagttggctctgtctgagttgtccagcccgagacaaaaaccgtgtcaagtcgtgtcaaacgacttagggttgggttcaaatttttccagagtgttctaggggtctttaggcgccattttgttaattgggccctatggttttgaggtttggaaaaatgtgaacatgtttgatctttgaaagagggctggttttgaaattgagaaaaatctgatttttcttttatgcccttctctttggtgacctttttggggtttttctaaagccttttttgggtcactctcttactattttttgtaggatattatgtgtactacaacttttataattaggccaagtcatgataatgtggtttacatagcctttttgctatactcccctctagggctctattttcctaaagggatttgaattagggtttgagccattctctcctctttaggtgtatgataaggccaaagcatgacttctaagatgggttacacctacttaggatcttgacccccaagtttggtgtcttttgctcaaactaaaccacatgtgatgatgggttcaatagtgtaggcttgagtgaaaaccctaagtaacacctggggtgttacaaacctcgggcatcgtcctgggtacatataaagagcaccgagatctcttgccctatcgaatcaaagttctcgccaccattgtcgatcattcatagagagagagagagcagccgcggggcaaaacccgaagcatcgatgtattactcactgcggtgggtttggttgttgctcagggtctcacggaaggcgctcgtgtcttcgccaggcgaagatgaagccggggaccccgtgaactgctcgccgatgagctggggtgccgtggagctgccccacaccataggcatccgcctaggtcaacgtccagggcacattacctggcccggtgacttcaagtcgtc

SEQ ID NO: 90442 - DNA, 410 bp, Zea Mays
ggacagcagtgcagtattttcccatggaatcgttcgaacaatcccattctttatttatctgacttatgaccaccagagaatctccatataccatcagttttttgatgcccagtgatatgacaatgttcagtccatgaatcagagcttcgtattctgctgcattgttagaggctggaaataacaactaaagggcatatctgaggtgttcacctccaggtgcagtaaagaggatccctgcgcctgctccctgcagctttaatgagccatcgaaatacattcgccatacttctgcggtttctgggttatccgatacctgttgttcggtccactctgatacaaaatcaaccagtgcttgagttttgatggcagtgcgaggtcgaaattcaatgtcatgagatcccagctcgcag

SEQ ID NO: 90443 - DNA, 462 bp, Zea Mays
gccctaccacgaccatcgtgagccaacaacgtggacctaggttccttccttgcaggtccgcttgtcatgatcttggtcgtacaccccgcctcacaggcttgctcaatggggacttggtcgtatgccctgcctcataggtttgctcgcgcggggacttggtcgttcgccccgcctcacagacttgctcggtggagacttggtcgtgcgcccggccttgtaggttttcttgatgaatgggctagaaagaggtttatgggccttgtcgtgggtactccgttcctgggtactcgacattatgtcacccacaatatgatcaaccgggtgatcttttacaatagaatgatggattcttaatacaatttgagaatgactagttgaagcttgagaagggatcgagtgacttcaagtatcttgattaggagcatcctcaacttcgttattttgttgactttgatgaatttt

SEQ ID NO: 90444 - DNA, 342 bp, Zea Mays
cagacatcattgtaaaatttcccacccatcaaggttgcttcagctgaaggatccttcgtatcatctacagcgaaggcaactttggcctgggctacgactttaatgtgatcacatcccaccttctccaagatggctgaaattccccgcgcaccggaaaacgcacaaacatccccgcgatcactcaaaatttcttcgaaggtttcggcttctccacttatccattcaacaacgccttcggggtcacctagtataaaattttcttcagcagagtaggcacccactttggcgaagctagcttttattttcttcacgcaatccaaggatttctcaaaacacctttcc

SEQ ID NO: 90445 - DNA, 445 bp, Zea Mays
ggttgctgctgcacctgctgtattgctgctaaggtctgaccaattgcttggactgcttgggtctgcatcaagaacatctgctcaatggtcatcgggggtggcggtggcaactgctgctgagctgcatcttcctagggtgcctgctactcctgttgagcacgccttgcaccttggcgcctgttctcaaacatctgtagaaagcacacacaaatgagctccaactctgcagtcttttagcataagaaaagatatggaaatcttcatagcactgaacaattgatcatcttcactgacagcttcttagataaagaggaaagtggaaataaataggttgcccaacaaaataactgactttattaataactacaccaagttgcaggggatgcccacaccttgatgacaatcattacaaagattcaacttcattacaagttcatcacgacaa

SEQ ID NO: 90446 - DNA, 445 bp, Zea Mays
cgaaggatgtggataatgcattatcttcggctttggaatacgagccaagcaattcatcacttgtaacttcgatacatttcagccagtcgtcatttggttcatcaaatttatctccatatatgaatgtatacttcagtcgaaccaggtcaccttcgccagactcggtgacagtctccttcagcatctcccagttctctacaagcggccatactctgaatgctatatgttcttgaattaagtctcttgtaccaatgaagaagcatacagtaccaaaggccttctgcatgcttcggcgacttcatcgatttcaaccatcggctttcgaaggccgaagcaggaccatatgggacgcataataacatccttaacatcctccctcgctaccaagtcgttcttcacataaaaccattcctccatccaatttcccggccacctctttcgaaat

SEQ ID NO: 90447 - DNA, 478 bp, Zea Mays
caaggattatgatatggaagtacattcccatcttggcaaggaaaatgttgtggcagatgcattaagtcgaaaagcctagtgcaactgcgtaaccgtggactctaagatcgccactctgtgtgacgagttgcgcaagctgaacatggaagttgtttccccaggtaccttggattatatctcagtggagccaactttacaagagtagataatcatggcacagtttggtgacaagggtgttcaagtcattaaggatatgctcaaccaaaaggtggataagtacaaatgttttcgttaggacagcaagggtgttctatggtttgaagacagattggttattcccaaaaacccagaactcaggaagaaaatattacgaagctcatctttccaagttttccatgcaccccgggagtaacaggatgtatcatgacctcagatccttgtattggtggaccaggatgaagagggagatagctaagta

SEQ ID NO: 90448 - DNA, 543 bp, Zea Mays
tcacttccctagcttcgtgcacgtctcagccatgtcctcggcaaaactggccaacaccttcgctttctgcatcgaaccgctacccccaacatcaccaccagctgatccatgtctagctctcttcttcttcatcggcagagccacaaccttcccccatcgaggacacctaattccctatggcaccatgcaataatgtggtgacaccatgcactctttctctattttttgtcattaggtttattgaagttttaatgaggtgcgagttagtcgtagtattcgtccaataaagggtattaagaaactgtatagaaggttatggtggtgtttgttttagctttttcgagcttctggccaccaggagctgcttcagaccggtaaacacttagcttttttatcctggttttgtgagattggttttgatgaaaattatccaaaacaaacgtgaacatagaatcggtcgagtcattacgatagtagaaatccgtcacttttaaaattctaaatcctatggacacattcatctttcttcgcgcgtaatcttca

SEQ ID NO: 90449 - DNA, 404 bp, Zea Mays
ctggtttggtttcaaattttttagggatgtgccttgggtagtttggctactttttgttatttggaccaaatggttttggtgccagcaaatgggtgaacacttctgatctttaggttagggctgattttggacttagagaaaaatggattgccctagtgcgctctccacttgggggcttgatttggggtttttgttgggcctttttgcaatactttccttactacattttgtaggtacattaatgtactccaaatttggtaaagggttcaattcatgaatgagtcatttgcataatttttcctttaatccaatgtttggggtttaatggctcaagaggggaaattagggttttagaacctttttcataggtgaagatacatgaaggctagggtatcccttatatc

SEQ ID NO: 90450 - DNA, 587 bp, Zea Mays
ggttttcacttaagcctacactgttgaacccatcatcacatgtggtttagtttgagcacaagacaccaaacttggggatcaggatcctgagtaggtgtaacccatcttggaagtcatgccttggccttatcatgcactaaagagaagagaatgactcaaaccctaattcaaatcccttataggcaaatggagccctagaggggattatggcaaaaagtctatgtaaatcacattgtcatgactaggactaattataaaagttgtagtacacttaataccctacaaaacatagaaagagagtgacccaaaaaagaattcagaaaaaccccaaaaaggtcaccaaagagaaggacataaaagaaaaatcaggtttttctcaagttcaaaaccgaccctttcaaagatcaaacatgttcacctttttccaaacctcaaaaccttatggcccaattgacaaaatggcgcctaaagacccctagaacaccctggaaaagtttgaacccaaccctaagtcgtttgacacgacttgacacggtttttgtctcgatgtggacagctcggacagagccaacttcccacccctatat

SEQ ID NO: 90451 - DNA, 303 bp, Zea Mays
agaatattaaagttgttggtaataacaaagatgggataaaattgaaaggacattgcttgcttgcgatgaaatctgatgttaatgatttatttgcttccacttctgttgcctacgctttggtatgcaaggatgctttgatttcaattcaagataaacaacattctttgcctcctgttattgctaacattttgcaggagtattctgatgtatttccaagtgagataccagaggggctaccacctatacgagggattgagcaccaaattgatcttattcctggtgcatctttgccaaacagtgcgc

SEQ ID NO: 90452 - DNA, 337 bp, Zea Mays
gtctcatgctcatggtcgattttggacgccaagagaatctaccctccaaccatggaagcgacaacaacgaccaaacgacaagaagacagaagatttaggatgaacagtgctgacatgaccgagatgcccatgaccagatctagatggtcgacttttagggccaagaagtttacgtttcactgacaaagaacacaatgacaaccaagcaccaattggataggatcactccactactaccacatgatgacgtgtaggcccatgaggacttggagaagatccataagatgctagtttacatagcgacatgcgcagatgctcctatggctctaggatcgat

SEQ ID NO: 90453 - DNA, 532 bp, Zea Mays
gaaagaattgagtatgacaataaaatacttcgtttccaacttcaaagttaacttttatacctttatgctattgtacgcgaggctatcagcaagttcatctttcgacagaatcgaaagaccttcttcaagtttcggaaatcccatactcttagctatctcccggcaaacggatatttctttgttgtccgggagacagtataggaagtcgtcatcgttagtgccgttaaacactaaagctcccttcgaatatttcaattttcacgcatagtatctggcttccagaacttcttcttcgaacaactttttccccgaagcatgacgataaatataatcagcatcctcgacagcggcttcggcgacaggagattttgccctttatgccgcgtcttgcccttctaccatgccagcatcagaagcctattgatcagttttatcttcaggcgcgacgaccttcgtctcaataggcgttgcaggctcagcttcggcctcggcttggactttagcagcttcagcaattttcttaataggacca

SEQ ID NO: 90454 - DNA, 442 bp, Zea Mays
tggaggtttgccagcattgattctatgatccctatgttgtgcaaggggtaaatcaacacgttcaagagaaggagcagtattacccattttaggtagaggcgaggagcttggtggagagagacctgaggagagatctaggactggagatgcaggtgattgaggctctggctgcatgaattgctccccctgatttttataccgccttctttgatacactattacttgtttctcattagtcttcatatcatctattctcacttctttatcttgattccctcctatgtagtctcttggacaaggaattgtcccgacgactaccacctcattgtcatcatgaacatcattcctttcctcgaaaccattagtctttgaaatagtctcatccacaagaggtactagtgttgttggaattcttccaacaactgtcttttcttgtgtacta

SEQ ID NO: 90455 - DNA, 498 bp, Zea Mays
tcctgcgaaaagaattccgaacgggtttggggtccttgctggaaagtaatcccttgtcatttctgaacgggttcaggcctttaccgaaaagctatcccttattgatcgtctagttccttaggtcggggcatttttcgaaggacgacctggtcggttttggctccctttcgaatttctaggaatcctgcatcagtcaaacagacaacaaagaaaatagaggtattagtgcggccttgctcaggcataaacattacacttactagaaggacaaagattcgtttatcaagaggggaggttagtagttttttaggtgctgctctgcctattactccccccctcccttcctggcacctgagctctcggttgagatcgggggcaagtaggtttggggagcgttggagtcttgttatgggtagaaccgttgtagttgctcgatgttccatacgttggtgattgtccttcccttctcgtccttcaaattgtaggtgcccggccaaa

SEQ ID NO: 90456 - DNA, 587 bp, Zea Mays
ttgtctgcccgtgacgacggcggagctaagacaccggtgagcccgttctaacctaaacaatgcggtagggttcaatcaatcgacttgggaaataccagtggctcactagagttatggttctcacacgaatctagacggaggaagcacgagagagccggtcgacgtgaagggtctcctcgacggcgttctgcgacagcgatgcggtgttctcggtgctttactgtggcagcgttcaattagctggtaccgtgagcaactataggataaaaggaattccaaacgaggactagggaggtgggaactaaccgtatatggcttggccacggtaaggcttctcacagtggtgatggtggccgattttagggaaatatgacgaactcgagctatggtggacgagaggggctagctgagggtgggttgggcacgtaacagagaggcggagcaagtggacaactcaatttaaagggatcgctcatggcttgagccaattttgtatgagcatgtacacggtagcatcgggatacttcatttgcgctcgctcactgtgatatcctgaccctagtggatggtgatatcctggcccaagg

SEQ ID NO: 90457 - DNA, 473 bp, Zea Mays
atgacttttctacagaaaacatgatttagttcatcaaacatacaacacgaggaaatcactgcgtgcagtccaaaacatcaattactaaatttcagctcttatataattcaagaattgccatgttttagagacttgaattattctaagacttaactatttgttagagttaaattaatcaaataaggactaacaagtacacttacaaattttactcaagtcatttagtgcactaaaattaccacatacatttaacaaatgcattcaccacatacatagcatcatcacacatgacctcgactcaaccgcaaaggaaacgatgactacttcggcatgtcaccacctctctaccgaccaaatcaaaattaactacatcgatcggacctcatatcgcacaacacttataatttactatctcaaatacaaccataccacgacatgtacttgggacacttcggttcaacttacgccatcac

SEQ ID NO: 90458 - DNA, 508 bp, Zea Mays
cgagcctattggagccaaaacatcatggagataagggtccatacacaatgaagtggattcctatcataatatagaacaatgtgtctatgcccaccagcgatagtatgaccccaggaaatggacacaaaatcttaggacctaaggataagtccatagaaatagcttacatgaatatgtcttaggtgtaaccctctataatgttctcaaacacctcaaagagatataagtttagcaactaaggtgtcgagctaggtagtgctcacctacataattctagttagcaaggtcacaataaacgatgaaactaatatactcaagcaaaaaggaagctcctacacatactagtgagcaaaatgcacaaagcctaagcacactagcattactcaactagtaaaggtatacaagctaaaatagatagaaacaactaatctacacaaagctaagaaacctactaagctacacaagtttactagcctaagatagcaactactttactatataagtaaac

SEQ ID NO: 90459 - DNA, 1004 bp, Zea Mays
ctcatagacccatcactaactataataaacttaacatcctcttgttttgtagttcccagaacagagcaatggtctctagcagcaatcacttattcctgaaatattttgaacacattgtgcgtgtacaatatgcttgcttgtttctccacagcccatggggtacataagacaggtgtgctatgtatgctaatatgatcagctttcaactcctcatgtcgttggcattccaaggccgtatcaaatctaagccaaaactcaacgaaacatagcttgcggtggataaagcgattgaagaatgaatttgcactttcagatctcgatgtagttctaagaactcctgcaagagatatatccataaagaatgctggaatccatgactcacgaattttaaatctattacccaaccattcgttgctatgaagaccataagcatctatgatagcagtccaccacatctcaaattcttctctagtttctgaactccatacacaattgtttaaagcagcccaaaatttgcctctttcttcctctccatttgtgccacaaataattgagcatcagcattctttattttctctctaagtccccgatagtagttctggaggtctcgcttcatacatccaatattgtcaaatttatcactaacctgtaggagtctatatgcttgagaggtaccaatacttgctttgtggcacatgaataaggtagtcttggctctttgactgattgttcggttcgatcggagaaaaggaattttatcaggcgagaccagaccatggttatgctcctcaacaaatgaagcgatatagtacctattgtcctgacccaatctcatatatatgcgtgcattgcatccacatcttgtttctaagtgcttcttttgcttgtttggttcagcacgtctctttgtaaaaccttccctcgaacacacgaacctcttatgctcaatcacatcgcttttcttgccttgagctcctatacgaactgaaaaaccacattcatgt

SEQ ID NO: 90460 - DNA, 281 bp, Zea Mays
attggacgaagctcatctttccaaattttccatgcaccccgggagtaacaagatgtatcatgacctcagatccttatattggtggaccaggatgaagagggaaatagctaagtatgtatctgagtgcgacacttgccaaagaatcaaagctagtcatttgaaggtagcaggagccttacagcctctccctatcccttcttggaaatgggaggccatttgcatggatttcgtggtgggattgccaaacacctcccggcaccatgattctatttgggtcattg

SEQ ID NO: 90461 - DNA, 676 bp, Zea Mays
ctctacagaataccttgatgtttctcttcatctcttgccaaaaaaattagtaatagccgaaaagcacatatatacatatactagatctttgagttttagagaattcttacaagagttgtgttgtgcaactttttgcgtaaattctctcgatgcaaaattgtctgttcagattcttcaaggcacgactgaaaaatagccagcaatttttcatgtccttatactcagttatgatttctgatgacgtcatattagacatctgtgcaggtaaaataaggttgaagatattaaacatttatgtaaaaaatttttacacaatgtgaacacatcatatgttaagaaacatacagataaacttatatttattgagatataacagatcatcattagttcattacatgtaatgactaataaaaaaataggtatgtacatacatttaatattttcacagttgtaagcttagtttccaatgttcttatgatctttctctaataccaacatgttttcgatgtcattgaaaacgtgttagccagtttaatttatctagataacgatcacttatctaaacatatagtcataccttaatggtagagacattttttatggcgcagtctaattcaatgacatatttttcagccattttttttgcatgttccaatataagacagtaaactgtcac

SEQ ID NO: 90462 - DNA, 485 bp, Zea Mays
cgaagcgagaccagatagggcgttggataatcccctttatgtcctccatttcaattagattattcttaacataaaaccattcctccatccaggacccgggctaccttttccgaaatgttggagccgagtagcttgcattagaacgagtgatgaatccataacaaccgaagttgttgtgatactgctctttgctagtggccttcatctcgtacaacagttcatgcatattgcaaaaacacttcgcgctcggttccagcccttagcttctcacagcctaaacaaacaaacaaacccattctaattatagcttcgggagtaatttgatgaagaaagatctgaaatatcttcaacacttcaaccaaaaatttgctcaatgggaaacaaagacccgccttcataaagcttatgtagacaacaacctcattttcttcaggagcaggggcggtgctgtcccctccaaccctcacaatagacatgtcatgaaa

SEQ ID NO: 90463 - DNA, 869 bp, Zea Mays
aaaatctgcttcaatacatcttagtccgcttcaatccttcaatcaatgtgaaaaagaaataatcgaacaaagcctgacacggacaggtatacacgccatgcatgccaagatgggcgcaaacagggacagacccagaacaaaacaaaaatgaaggcacacttctaaggatagacaccaaaatattagagcgaggacattttagttaggttcagcagaagatttaatggtaaaaaatctagacactaatacttacaataaagaaataagcgaggcctagaccctcacccccttatatgtaggtcgcgcagacagcggatcctagccatcacttatcgccaacgcaagggcaagactgtgaaacaaacttagaacggctcttgggtgcaggcaggagccgtctatttgatcaatcactcggccggcctttgtatctgtctctgtcgatgtatgcatgtgacttggaagccagggatcgtgagctcccctcaattattgggcctcttttatgtctgtccgaatctcgtggagcttggagccatatgcctggtcacttggcacgacagacagggaggccacctgtcgcgggcatggccacattgcttgcctgcgctcatcgccatttctccgagtcacagattattctatgcgattaatcgcgcatcaagctggagcactcctgtgatagctagtgacttggtacgtgatcgcctgatggggtgatccagatctggtcaacactagtactatcattcattcctcatgatcctgtctccattctcacccacctttctggtataactacccccgttctattgcaattgttattgttatattaatattggtgcttgtgagccatgccgtgaggcgag

SEQ ID NO: 90464 - DNA, 280 bp, Zea Mays
gatcgaacgaaactcaagacggatgtcattaagggtgactaaccttctttctcgcttgcaggcattgaggcatgtgcttgctgaagttgatttggaccggtttgaccacgttgagcgcatgccagaccctatgccaaagccagcttgctaattgtgttgctctctctcaccacagtctagaccatgactttgtagtttgcaagcatctgttcatcacatgtttgactagtaaccgaaaatgtcaacaacggctgctgaggccaagatattgctctggctc

SEQ ID NO: 90465 - DNA, 456 bp, Zea Mays
ggcaggttgaatagcaagttttccggggtctctttagcataattgccaaggcgaaggggtatcgcgtgtccacgaccgtccaatctaactaaacgcgctagattagatcttaagcgcagtgaaccggtacgccatccggccccttggatccggaatcgatggtagcgatttaaaatagcgatgactcgatttggatcgtggattcgaagatcaacgactaccaatccgtgggggcgaaagggtatgatgatccaatcctagccgttcattaggttttcaatcgttacccctcatcttctttcccttttaatgtggggcgttcatcaaaataggacggtcccccagtcatcgtcttcccagaccggcacccagccatcgtctaccttccgcccaagtctacgcgcctcccccagcggccagcctcccaacccaacagcgcacggatcgacgtcccgc

SEQ ID NO: 90466 - DNA, 390 bp, Zea Mays
atttcacgcacgcgtgtgtgcggatgggtggctgctttgagttgtgcgttcgagcagcatcgcatcgcttgcaggtgttagtttgacggctaggtcccgcatgctgtagctttttattgcccttttctcagacttatgtggataagagagatatgatgtggagaaggagagtggaattgtcgtcatgagttataagaaggatgtgaagtttgatgcggatgcatagcgcaatagggtggctggtagtagaaggtacgtattggttatgacttgccatccttgcttgcttggtgcatggttttctgcataagttttgttctttaattcaagcgattaagattagaaagactgtggtgggaaaccaaacgacatttggttgactgatgccct

SEQ ID NO: 90467 - DNA, 717 bp, Zea Mays
cctctattcaatgcaatcttctttggaatgccgtgcagacacacaatttgtgacatgtacaattctgccaatcgagatcccgaataggtggtcttcactaggataaagtgggctactttggctagtctatccacaattaatcaaatagagtcatatccagtaggagtgtggggtagaccaacgatgaaatccatactgatcccttcccacttcgatttgggtatcttcaacgagtgaagtaatatggctggtctctgatgttcagcttttacccgctggcaaacatcacatactgctacatgcgaggctacatcccatttcatgccaaaccaccaatacttttgttttaggtcttggtacatctttgtactgcctgggtggatagaatagggtgagtcatagacttattttagtatggtttcacggagactatttatttcaagaacatagatcctatttttgaaccagattgtgccttcctcatctttcgtgaaatttggacctctaccctctgccatcaggtctctgatttcttgaatcttggcatcaccaacctgacccttctgtatatcttgttccatcgcaggttccacttctatagtaacccctctgcatggacaactatccccaatctgagccaacttgccaggtagctagatagacatagttgtatgagcttggcccttctgactcaaggcatctgcaaccagattcgcc

SEQ ID NO: 90468 - DNA, 365 bp, Zea Mays
tattaggtcacactatctcttaggagggcatagctattgatccacataaagtgcaagaggtgatgaactggaagccgccaacaactgtccgtcaaattcgaagttctctaggatttgccagttattatcgaaggttcattccagacttctctcaaattgtgaagcccatgactgaattgttgaagaagggagcaaaatttgattggggtcagaagtgcgaagatgctttccacaccttgaggcagcatctgaccacaacaccagtgttagcgcaacccgacaacaacaagccattttatgtgtattatgatgcatctggcactggactgggttgtgttttgatgcaagacaaccgagtcattccc

SEQ ID NO: 90469 - DNA, 677 bp, Zea Mays
ggaggagaggctcccaagtctcttattcgtggtggacgtggttacagggtggagtcctagctaagtcttggcttggcggctgggctccggtctcatggtcttcatcatgttccccggtcttctgggtgtcgtctcgtctggggtccatccttgcatcgtccacccgagagaaggaacctctcgagtctggggactggtctcctccttttataggctaagaagaggggtcggtccatgatggcttcctcaagaaggagccaccgggtgatggtaaaactgggcgtcttaccatggcgtaaagccacgtgcacctgcggtcgcttagttgtcccgtattatttattatggacgacagcgtagtgtgggcctcggcgacatcatttgggctatgctgacccttggctttcatagccttaggctcggtgcggcttgtcgtgttgtgccctgccagtggcctactctctcgggcctagtcctgataggtcatgagtgtgccgctggccggggatgcgcaggccataaatgcgtcgcagtttgaggggctcgtaggtcatgagtgctgtgtcccgaggggttcgtaggtcatgagtgggaggtagaccgatgcctccgatgtggctcgacgtcaggcacacttaatgcgacctgtcatttatgacgggttggtctcaggccag

SEQ ID NO: 90470 - DNA, 286 bp, Zea Mays
gtccgtcttctccagccataaccatttcacttgatatgatgaacagggcagacaaaagggttttagttcaacattttctcactggtatgtcattttatactgctatggcaattgattttcctaaatgggccattgttgctattaacaagattaaagaggcttcttgtggagaggtaggaaggaagcaaaagggtgggcattgtgtggtcgcttggggaaaggtttgcaggccgttgaatttgggaggcttgggaatctctagtttcccagagctgtgctgggctct

SEQ ID NO: 90471 - DNA, 384 bp, Zea Mays
cttatatattaaaaaaattccttcttttaattttaggtatctgatactgataatgatccagcaaagagcagtgaggctaaaggtctagcaaataatgaacttggacagtataaatttatagtggcggtagtcatttggtatgaggtattgtatgctgttaatttggtaagcaaacaaatgcaagcaaaggatatgcttattgatgttgctattgagaaagtgcaagggcttatttctttctttgagggctatagggaaacatggtctcaaattttcctcggacggccctgctgtccctgaacgtacgtaacatatacgtgtgcatgcatgtgcacacgtcggtctgaaccctagcttgccgactatctctccactcgtcggtcg

SEQ ID NO: 90472 - DNA, 655 bp, Zea Mays
aaatgctaaaagagatagttgaatggttcagccctcccctcctatttatagagggttataactcttttctatttacccctagatacatagagcctatccacttagctaggggtgaaatggaccaactcttggaattttgatctgacaacaacatagtctttatgaagatgcttcgccttggtgcactctccgcaaatgacgctacgtgccgcctccagttccctctggaatcgcgacgccgaattttgaggcccaattccagcgaaacctataaattgttgggatgagtggttttgaggctcaaccaccgaaacccctgtgggtagcatacttacgcgtccctatttcctagacacgtgtcttgtcggttcgcaactgcatcgacgacacgatccactccgccatgtccttgcacatgtcggtgtccccaagtgtcaaccacaatggctactcacccgacttttctagtacctcggtcaagactcaacactcgtccttcggcactcccagtccatggatatgtgtgggaaatcctaaccctaatccaggattgggtgtgtattatatagaccagttaggtgggccaagcccattaattacacagaggtaattaggtaaatacaagagggcacaagcctaaccctaaactagagtc

SEQ ID NO: 90473 - DNA, 365 bp, Zea Mays
gtggtcataggtaatggagcgatcagactagtcgaggaaagtcggagatgcttgtcgaacttggaatgtttcgcaccgctctgactttcaatgcattctcagcgcataatagtctgaccctctgaagatcagcaaacacccggtctcgtctgggaaggtggttcccgccttctctcgcttgtcgccctgctggggttctactcctctctctctcgggcggcatttccctgcctaggaattttctcagtaatccacaattcttataggcgtgtcagaccgggtagcgatggttcggacacggggccttgagcagattctcaaaatggtcggtggattcctcggccagtggttcttccctttctgac

SEQ ID NO: 90474 - DNA, 579 bp, Zea Mays
cggactactgtggcctcgttgttcctcgaccacttgcaccggagaggaggccttgcggtcgtcaccggagtttgcgcccttcaccgcggttgtgccacgcctcaggccattaaccacgtctccgtgagttgtgattgttacccagtgaccgtcgtggctccttattccgcaattgccacgaatcactgcgacagtaacctctcctcctctccggccgcccgtgtgtctccttcaatttaactggccaccactcagaagacctataaattgagcacgccatgagctccgtagggtaattacccatccaaagcaccagtacttgcctccaattgttcaccagagaccacgaattgctcatctcccccaaatcgggtttccgccaccgtgaaaaggtcctcgccgtggctaactcgattcaggtccaatcttgtcctctgctctcttgtttcagcactcttgcatgccactgatgctcctcgacccattcgattaagctagactgccctagatcgccgggaacacccgtgctcatccgttgtttgcactgcctccgtggacagagtgatttagagctcgaac

SEQ ID NO: 90475 - DNA, 897 bp, Zea Mays
ctttgtgctggtcccatcttgcgaatctgtaatttataaccagtgcatctgcatggggtgcgctacgcaggtcgatgtctcttgcatcgaaggtaagtgggatgtgggaccacttcatctggaccactgggccggtgagggctacatgattgaatctttagtaatggtccttcatctgtcactttttttaaaactcggtgatagaccctccgatgatcatgtggatgactcctttgaagaatgggtcgacaaattcttcttgtttgggtggcgaagggggtagttggtgttgttgttggtttgcttgttgaggcggaggggtggtagggctagtctttcttggtgttttaggcgtggctgctgggggaaagtgtgattgtagtttggttgatgttgggggtagtatgggtgttcgttttgatagttagggtggaggtatggtgtggttggtaagtgtgagtaatggctctctggttgcttatcgtagcggttctggccatccagtctttgatttcttttgtttctgggcaatctttggttgggtgcccggagtatttgccatggaagatgcagtaaaactttcttggcagatgggggcctctacccccgcctctgcctcttgttgcgttgctattgggccttgttgcgaagggtagttttgcagctagggatggtcttcgcgttggctgttgttggtttgtgatattgtggacctagagttgttggccgcactcttggcagcagggggggtcttgctgtggaactctggtccatgtcgtgctggactgtggagtctctttcgactttcgctgcgactcgacctttctttggtggagctcttctgtatgggcatatttcttgaagagatgatatagctctttgaggttggacaagggg

SEQ ID NO: 90476 - DNA, 488 bp, Zea Mays
gccgttacctctaaaacaccgacgttgccgtcagtcactcggctgttacctctaaaacgccgacgttgccatcagtcactcggttgttacctctacaacgctgatatcaccagtaaccactcggtcgttaattctaaaaacaccgatgtggccccgccatcattcggacgctacttcaaaagcaccaatgttgtcaataataactcggccgtcacccctaaaagcgacaatgtgaccccgagtgactcggccactacttctgaggcaccgacgtcgcaggtaaagcgaacggaagaatgattcgagaactccaagttactacccaagcatagcagacatagaacatcatggacaataaatattgcaacaatcgtcaactgaccaggaggcaaagtaattaacacaggaggagacgaaatcattcttcataaagggaagctacaaaacttacaaatcaactcgttatgagttgatactttccctactac

SEQ ID NO: 90477 - DNA, 2089 bp, Zea Mays
gtttccatcctttgtcggtggtacaacaaccagagatcgtcaaagaataaatgccgcacatgatctatattatctttgctccaaaatgcatcttctggcacaacaaatgtgaagtcctcgagtttgtatttgttgctagccaccatgtaccactcatgcattctaatctccggagtcgacaacttagaaagtagcaccgtcgtcaagaacggcctcccattcacaaatttaggaggaacaacctccttcttgtatatcgggatattgattttaagacgtaatgattctcgagtatgaatcattccatcttcttcccatacttcgaaattgtctatttgggaccgtgtgcgtactccacgagatgctgattccgcttttgattgatttgtcataactctctgtaatttttgcaggtagcgtgccactgattctggcagtttcttgacatcatcagtggcgattcgctgatgaattttctttgaagtagttggcccttcaacattggtgtcaacctttgcttcctttttgatgtttgcgtcaacattctgaggaacaattttggctacgtccccctcgtcgagttccttcgcaagaggtgatatgattgtttcaatgatttttgtggaggtcggtgctatattttcctgcaccatggggtatggaatgatcgaactatctttctgttgcattggtgttgaattcggcgttggtgacttatgacgcgatacacggcttaagatcggctcatcacccaacttgatgtcgcgtcgatgccaaaggacgaactcgttcattgcctcctgcaaagttatgatcccctcaactggaaagtctatctcctaatcttcacaaccactgtctgtgatctctagaacttggaccacagcatagtgtggcgggacaggattatccttatagttaacaagtcctggttttaccaaaccagtagcagcttgttttgtttttttcccagatcgattgattggaatatgaagaaagcaaggcttgtcctcaacaatatcgtctacagggtacttggtgcccgatacgaattcttgcacagatcctacgctgctagggactataggtggactcatgtgggcctggcttgagttcaaatgatatgcattatgttttcttcattttgttcatcacgtcattaatagccttttgtaccttttcatcaatagtctgttcaagcgtccttttcgacttctcgtgtttcctatatgacgccgcatactctagaaacgcctctctccaggaaatcttagaagagattccccgagcccgtctagtgtgttcaggattgcctagtgctgcagttagtatgtcattatccctccgaggcttaaattcgcccttctttctcttatctgcatattcttgaatttttgttgaaacttcgcctaccaattctggatgcaaaagtttgccgtcctcactcaaacctacccgacctaagatccaacgaatagctcgctcatcgatatcttttaatattgggtccaaagtgccgttagctataacttcctcgattatactgttccactgcacaactttatggtgatatccggttgaccctaggcgatgggggtgtttgttcatcttcgctctctgagaattagtttcacccagttctttggccttcagttcggtcttctgacgaacaaattcctcccactgagcttgagtgattttccccattttcttgggcggaggaaccttattcttcttaacaaaatccctattcatctcggccttccacccacgaaacatcttggccatagcagagagcatcgacttccttactgcatcatctgtgccttttgggaccttaaatgactcagacaacttagcccatagcttattgcgggtgtcttcatctaaatccttccatttttgaagtgtgattggcactatatctctaacagtagacccgcaggaattttgaaactttgtaaccacgtcaagtggttcttcaggaaacccctctgcatttagtgtgttacgtacataactgcaccttctttcatctgattgggaccttgttgccctcgtttccgcgtatgtgaaacggatgattcag

SEQ ID NO: 90478 - DNA, 316 bp, Zea Mays
gtcaatgcttgaataatattcctatcaaaatatttgatgcgtggtgttccacatttattctgaggtgcagctgagtcatgaagatgatccagatagtacagctacaaaagcataacatgaatcgttgtgagacatagtaaagcataatctaatgttgatgatatttgcatacacaaatctggctacataaaacagacaaaaaaagtgatatgcttacaagaatgacgatggaacatccgtaaatggttgtagaaacattagtaacgcttctagtatgccacttcttggccgcttggcataaatcattgaatatgag

SEQ ID NO: 90479 - DNA, 466 bp, Zea Mays
gcatggtgttgcaatcttgtgtaggtatgacatgtgcaatgactgagcaggttatagcatgaacataatataatctagtgacacaagctttaactcaacttaactcgtcgggaacagcataatatagtgagtagttacaccagatacactgtctaaactataaacaagtgcataataaaatgaacagactacataagacagtacaacaacccataatgccccttagcattcgatccatgaatttagattatctcttgggtgaaacttctggattcaggggacatggattgacaatactagacataaaaaaataaatagtgaatttatgttcttttttaacacaatagtgaatttattttatgcaaacacatagtcttatggcccaaacagataagagagtaggatcaagcggtaccaaatagtgatattggctctgcatttctacattggaaaattcaaattacca

SEQ ID NO: 90480 - DNA, 568 bp, Zea Mays
cagagacttgcacgcaattacaacaataaggttaaggccttggttgtaaaaataaggttcctggacggtgggttaaggtttcaaagaatccagggttcattctgtaagcttatggactattatgcaatgatcttaacactactatggactgcgggttcttttttaggaaactcgaggggctcttaaagaattttgttggggctgtgtaacacgtgggttgtcctagccgttagacctgcgatcaacggttgtcgttcaatgcgtgaaggggtatgggctttctaatcctatctgtgcattgctagatcaacggtcagcgtccatcttctcagcgccgacagcccaggtagcagtgccctaagccagtgcggtggtggccattgccggaccacccaaccatcgtaccaaagccccaaactctgatccaaatgactctaaacaaagtattcgctaccgccaactcgatacctgcactcacaacgtcagttgttgcgctcaaatccccgaccacgacgaatagcaacccgtcgacgccattgaataccagtgagcaattacgctcgccctg

SEQ ID NO: 90481 - DNA, 352 bp, Zea Mays
accggagaccgtagttggttgatcctcgaccgcatcgtccatcgcagtcggaagcggtgcggggatgcgacgacctcggcgttcacccacgagtgtgtcggtcggtcgatccgtgtctccctccggatcaccgaccccctggtgtcccatttctacatccattagaccagcattccaaccattgaccgcatgacggagcctgtcaccatcgccgcccaccgcagctccattctcttccaggtgtctgtccccttcgacgatccttgttgctggagtaaaatagtctactttcctcacgactacgtctactcgtgctcctcgtcgtcgtcatcccttactcggcttccgcttg

SEQ ID NO: 90482 - DNA, 285 bp, Zea Mays
cttccttttgctacttctacttctagggctgagcaggcttttgaccttattcattgtgatctctggatatctcctgtattctgtctttctggttataaatactacttggtgattttggatgattactctcattttctctatatttttcctctgtgtttgaagtctaacacatttcacaccctcaggcacttcttcacctaggtctccacccagatcccatcgcccagtttgtgccctccagtgcgacaacaatcgcgagttcaacaactccaactctcgctctct

SEQ ID NO: 90483 - DNA, 399 bp, Zea Mays
ttccgcacttcgaatttattactaccttttctaacactaacctctggtgaagtttgtgttcaaagtttataatttacaagattcgtctattcaccctctttaagcgactttaggacacatcatatgctcttgacctattgccgcatgtcaaggccctcaactaggaaagccttgatgaggtgctcgaactccgcagatgggtggtgctgctggcgtccaacaacgttcacctagtgattaatatggtgtggattccaaggatgagatgaatgagtatatcatcttatagtcccacttgatggctcccattatccatgttcattgtccacatcgtcgacttctatggtctttaggttcagaatcttactccaaactccattctctccccgttgacctttg

SEQ ID NO: 90484 - DNA, 494 bp, Zea Mays
gcaccataatacaggagtggaggccttagcagtgtcaaagtggatgtggttgtcaagggcataacgttttagggtgaggaggacgaggtcgcgccattgagggtagttggtggagaggggttcaggacgacaacgacctcaaactttaggacaatagtggtagattgttccttctctagggctttggctatggcgaggatatagccatgggcgtcagcagaagatttggcaaccaagttgacgctctcgttctcagcggtggtggcttactccttggtacgctatacaacctcctcttgggcatgagcagcggcgagcttggcctcactagggactggcggtgtcggtgacatggtggaaatggggcatagatgtgagaggagaggagggtggagtgcatcagctagggctaatgactacggtatgattaggcaaaaccgagggtcatagtatcataaccatcttttaatatcatgatagaatggttatccaat

SEQ ID NO: 90485 - DNA, 589 bp, Zea Mays
aattggctcaactttgaagctttgtaacttccaaattaggaggagtttgccctagatcaacacatcaaacctatagagctatgaaaggagaacaattcttattaagtgaccaagcactgatgatgtgtaaaaattggagaaaagcaagcccaaagttgggctgtcagtcagccaaaaacctgaaactggatattcagtgacatgggatgaactttgggagtcttttcaaagatgatcaagtaagtgtttgagcatggttactatagcaagattgtagctggtttatcaggctatcactttgatacagagagttgattcagtccttatacaaaatctagagcaaatcggtaccaaaaatgctctgtcaggtcaactgaataggttgcgccatggtacagtgaatgggatggatcaggttcagagaacctcgccaccggcgacctgtgcgcccggattcgcgccctgtaacgtgcagataataattcccagagcaaagatctcgccgtggatatggtcggggtactgtggccggcctgtcactgtacccacttgcgccgcgacgtggccacatgaccgtcgccacgatgat

SEQ ID NO: 90486 - DNA, 1398 bp, Zea Mays
acccttgtgcttagttagccaatccattcctaggatcacatcaatcccttgggatggcaagacggttaagtctgccaggaacactaccccacttaaaaggattctgacatgggagcacttgagctggcatagaaggtctgaccccggggttcgggtgaccaaaggaatttctaggggtgtagaggggatgccatgtttttccacaaaactagtggctataaatgaatgggatgctcctgaatcaaaaagcacagtagcgggagtaaattcaacaaggaactcatcgagcactactcctggagcttgttgggcctcttgagcgtcgaggtggttgactcgtgctctgccttggtattgggtcctgctctgctgactgttggagggaggtgccgagggaatcttagggccattcaccgagttggagtaggtaggtccgggtgccttcaactgggggcagttattcttgaagtgactggggtctccgcagtgccaacaggcatttgctggcggttggttgcttgcaacagagggggcctgaagggagctctgactctgctgactatagcatgacgaagtgagtccggctggtctattgaagcttggtcccctaggtggaagcccaaaggatcgagctctccggtgacagtcttgctgctgagctcggagaacctggaatttcctcttgaggtgccctttttcttcctcttttgccctttccacttggatggctttgttggagaggtgagagaagttgaggaaatgttggctagcgaggatggtcttaagctcgggtcttagccctttcagaaaacaggccatcttcctagactcatgctgacatcgccaggcgcgtaacgggccaactctgtgaacttgtgcacatactcactgacagttcttccaccttgagttagttcctggaactcatcttccttgagttgaactatcccctgaggtacgtggtgctcacaaaaggcagtttcaaattctgcccaggtagcatccctaatggcctcgctgaaggtatcccaccatgctagggccatcctagaaagttgatgagcagccagttgaacacgcagatttttggggcatccaatggcttccagtttcctcttgatcgtgcgcagccagtcgtctgcatcgaggggattgctagaccccacgaacgtgggaggcttgagtcttagaaattctcccatcctgtcctgtggtctcccaccacctgggcgctggttttccagacttctagtgaggacttcaatgagtcgggtctgattggctagaacttgggccaaatctagtggtagttccggaggtgcggggaggtgggtctcacccccttctccgccagcttctccttcagctcttaggggaaaacctgctccaatcccggag

SEQ ID NO: 90487 - DNA, 405 bp, Zea Mays
tgtttctcgggtgcacgtgagcgcatgttctaggagtaatcctttagcccccgagtgatacacatggatcgcttgaaggtttatgtggtgtaaggggcggacccttttctgttgtgattcgtcacacaccgggtgcaagtccataggtcttttgggtgcatgtgatcgcatcggtcatacgtgcgcggggtatagatcttcctctgttcttcgtgtagatttcctggcctgccgcgcccctgactcgtctaatcaaggcacagtgcaagaataggttgcaacgtaggatgaagtacttctactcgtcgtacccttgcctcgtttaaccagggcagggcacatgatttggttgcggcgtaggctgacatgctaccgtgtgtagggatgctccggcgatgtcgtcat

SEQ ID NO: 90488 - DNA, 4845 bp, Zea Mays
ccgctccctatgatgcccatgacaataaggctggagccgaagcagtaccagatcacctgcttgaaacactctgtccactctgtgtttatcagcctgaagcttagtgcgattctgagcagtagccaatagctcccggagcatagcattatgactgagatgctgctggatccattgttgcactgaaggagggaccgaagaggcagactctggcatggctgttaacgggggttcgtaaccatacatctcattgaacggagactcggagagcagccaatagatgagtggaatgatgagttgtaccagaattgtgccatcggcaaccattgtcgccattgctttggcaattggtgaactgcacaccttaaatatgtttccaaacattgattaacgcgttcactttgaccatcggtatgaggatggtagcttgaactgaagagcagttagtgtcccagaaccgcagcaaatccttccaaaacaggctagtaaacactttatccctgtcggagacaatagagtatggaaggccatgttgtttaaccacatgttctaaaacagcacgcgccatgactgaagtagtaaaagggcgcttgagtgggatgaagtgggaatatttagtaaaacgatccaccactactagaatagaatcaaatccttcagaccgtggaaggccctcaatgaaattcatagtggtctccttccatgccccagctgggatgggcagggattgtaaaagccctgcaggtcggtgcctcttggttttagcttgttgacagatcaggcattgttggacaaagtcagccacatcttgtttcatgcccttctagacaaacatgtgcttaaccttttgatacgtcccttgaataccagaatggccccaaccgcactggcgtgaaatgcatcaataagtttgatgcgtaaagatgagttgttgccaatcgatacttgtgtgccacaccctgatggaccgaataccccctggcatcaggactactaatcgccaactgctgcagcaaggattgtgcctccggatcagtaacatatgagttgagaacctcctgtagccactgaggttgaatgatagacaaagcatgaagatgaagtggagagtgcagacgagatagagcgtcggcgacgacattatcgtgccccttatacacaatctggaattggagccccatgagcttggtcattgctttcttttgaagatcggactgcaggtgttgatcctccaagtaacagagactacagtgattagttttaatggtaatctggtgccgttgtaaatataaccgccaacgatcaaccgccataatcaaagccaagaattctttttcgtatatagaaaggtgttgatgtttattggccaaggccttgctcagaaaggcaataggttgatctcgctgcataagaacagctcctataccatgagcacagtcatgagtttccaccgtaaacggaatcgtgaaatcaggaagagataagaccagcgtaaaagccatggcatcttgcgcaattgaaaagcttcctgggcggcagcagaccactgaaaagctttcttccgaagtaactgagtgagtggcttcgcaatgatcccataattcatgataaatttatgatagtatctggtaagacccagaaaagcccgaagttctgtcactgtctgtggcaccggccattgtaccattgcatcagttttgagatgattggttgctaccccttagctgatataatatgtcccagatattccaacaaggtctgagcaaaggaacacttggagcccttcaagtaaactgatgggttctcaatgtggacagggcaggacctggcaaaggtgcacaacatgggtctccaaagaagggttgtagacgagtatatcgtccaaaaacaccatcacaaatttgcatagaaaatggctccaaaattgtattcatgatgcattgaaaagttgtcggagcgtttgtcagaccaaacggcatgacaaggaactgataatggccttggtgggtcttaaaggctgttttaaatttatcctccggtcgcatgcgaatctgatggtaaccttctcccatcaagtttagtgaaaaactttgtaccagccaactcatccaagatcttgtccacgacaggcatgggaaaacgattcttgattgtcaatgagttcacacgtcgataatcgccgcaaaacctccaagagccatctctttttttttgcacaagaacaggagacgcaaaaggattaaggatcggactgatcaaaccggctgtcaatagctccttgacctgatgctctatttcgtccttgtgatgaggcgagtaccaatagggacgcgagttcacatgcactgctcccagaacaagaggtatggtatgattgtaaacccaagcaggaggtagagtgtgaggctcgcccaaacacatcctggaactaagctaacaacattgtaatatgtggatccaacaaggaaggctgatgactgcatctgttccagcacagctagcgcccaaatctcattgcccttactccacttaacgaactttttagctggtagtttagaaacttgcaatggcgggggaaccacaccttgaagctgaatgggttgtccgtggtgcacacacattagtgtccgatgagtccaatgacactctaggactatgaggagaaagccagtcgtaaccgagaacggcatcgtatgcacccaattggactaatttcatatcagtgcgaaaggtatggccttaggtccaccattccaacatgtacaggtttggaatactgagatgaaagacccaactggttcacaaaagcagtactcacaaaactagtagagcttccagaatcaacaagaattaacgtcacttgattgtgcaccagagctcacagatgcaaacaaccatcacgttctgtaccggacagagcattcagggatagatgatggaactccttagtcaaagcatcctccacagccaattgatttaatgtctcctctgtcaactccaaatcaagatcattcaccacaatagcatttagttgtggcttactacgcttggtacacttgtcaggatgtgtgggatcaaatggctcgccacagaaaaaacatggtccattggctttacgataatcatgtagttgtcgttcacaccacaaaggagttgtggtaacggaacgctgctcaggtttaaccggtgctatagcagtcttatgaggccatatctttgaatgtttctgtcgactctggtcctgcacttgctcctgcaattgggccaaaagcattgctcggtcgagatcatgaggcacctgagcgagcactggcccttggatctcaaattttaggcccttgacaaattgtgaaacaaagaacatttcatcataaccagtgtgaaacatagaaacttcaaaccagaggtcttcgaaacgctgagcatattcattcactgtggcacgctgtttaagatccaataaactagccaaagcctttctgtaatcctcggccccaaatttcctttccactgcatcacaaaactgcaaccaactgcaacttgacacattgagcttaaacacttgccaccattttgccgcattcccttccatatgcagagcagctgtagtaacccacatggttggctggacatcatagatacgaaaataatcagtacacttatccaaccaaatcttgggctgagagccatcaaacttaggaaaactaagtttgggtaaagtatgactgttcaatgtggttctcatggtcggcaagtcctatcgtgggtggactggatacctggtcgaggagggcgaggtggagactattctaacaagctagaatcagaagactgactaataccatcctctgacagctgctcggccatctgttggagactaagctgagccacgactcttccagtttctgcaatctacttgcccatcaactgttgaccagtggttacctgtgtaatagcaccggaattaatatccaactgaaccatcatccgttgctgattggtgttgatctgaccgatctgatcgaacatgagatccatattctcgagaacacggtgccagttggccgcgttctggttagtgttcactgccatggcgtccaacagaaactgtgtctgcatggatggtcgagggggcgccgtgattgattacccacaagcttaccgtgcgggctggaattacagggaaaaacaggtccttgcgggtagcaaagcactcgatcacacaaacctaggccagtgctcagatcaaagccgacggaatcgtgtagtcaaggaagaggactggaacgaacagatggtgtgcataagggtgtagcaccgccaagattttgccgagatctgatcccctgacgccgaccgcgaaaccgaagcaatcgccgattgcaaacaaaggattcgatgcgccgatctaccaccgccaacaccacccactccgatccgcccccgccaacaccacccactccgatccgccaccactacttcgccactggaaacgagagacggcgcatgcaccgccgaggatcaccaagagtttgataccatatgtcacgacgagacggcacacacactgctgaggatcaccaagagtttgataccaactgtcacaacccgtggccgccgacgatcgcttgccgggatgtgagacgaccagatggtggtagagagccgaggagttcctcgtcccgtttctgatgtatttcttttttgatattgtttcttacacagttccaatgttttatccctcacacacaagctgacttcctggccacacatccatactcagcacttatgtcggacccacttacagacacagactttcacactcccaagtctactgcctataccttg

SEQ ID NO: 90489 - DNA, 442 bp, Zea Mays
gggcaacagaaacaggatggcaatagaaaagaaatttcccagcagctcagaaatgatcttgtacagtttcatttctttgtacagtttcatttcttatatgcagaggtgggacatgatgctcaagccaaaagaccagaagttggagaagatgctggatactttgaagaattggctgcaaaaatctggtaatggagtcggcaaaatctctgaagaaatgatctgactgtacgaggtccatcggctgctcctttcttggtatgatatcttggcgtgttcattggtttctttagcaagtcaagcaaactaaacttagatcacgcggcatcccgggcaagtaatgcatgcagctggcatcaaattataataagccccacgtctttgcacgcatgcgtgtggactggactccgcgacgaaagcattcatttgaaaaatctgcacctca

SEQ ID NO: 90490 - DNA, 627 bp, Zea Mays
gcgcctccccttcattgtcgttgccggatccgccctccctccgtcgtcctagccgaagtgaagtaggcggcgggctcggccgtcgactctacacaccgcgcgccagacaccaagacgtggatctaggtcaactgcttagttccttcattttactattgctatctgccctcatgcctccattttaatttattaaatcactcttctttttcggtgtagttcctgcataatgttgcccaatctggcacattcattcactgattcttgttccccggaccttgatgaaatggctaagctttccacagttgaaataggtattagacgggctaggtaaggctagaaaacgagtgacaagggaacctggttgagtggtttgggtaggggcagcagttggacaaatgaaaatcggctgcttaaaaggataagagggtgggcgtgaaaaagcacgattcagattaaaggaacgaatcactagccttgatcgcttctcggatccttgagaggatccctcacctccttcacgtccaaacctttttgtcttcccttgtctcgaattctttgcctccaccgatattgtcgtgcttacgaccctgttgaaggtaagattcaaacaggtcttccactgcagcc

SEQ ID NO: 90491 - DNA, 633 bp, Zea Mays
ccaacaccaacactcgtgaggcataccggaccctgaagatggagtatgccaggaagatgaagaggttcgcccccgtcaagaagatctagaagcgtttcaaaagccaaggatgccacactgacctgaaggaagaatccccgctagcactgccttccctagggatagagaacctttctgatgtcgaggaagtaccctggctagccctgattatcttctcagggagtttggggacactttagtaggaaacgctcatgcatagagtaatctgtggtggttgttatgcttgtaatgaactgatttgctgaataaaataacatgtttgcaaaaaaaaacatatgcatagtagtaatcctttctcccctctagcagatggccttggaaagaaccacacctaccacctcaagcattggagcaaggactcccctaggtatcgaaggcaaggacggaggggaaggaagtgagacccacctccccacaccctcggacatgccactacacctagcccaagttctagccaaccagactcgactcattgaggtcctcactagaagcctcgagaaccagcgcccgaatggaggaaggcctcaggacagaatgggagaattcctcaggctcaagcctcccacatttgct

SEQ ID NO: 90492 - DNA, 635 bp, Zea Mays
gctgaatctcctcgcgaaggacgcgacgaaaagacgacgaacttgccgccgcaagtacgggttgctaaaggctcgtgacgaacatgcagcgggcggagcgcctttagcccgccgtaggcttgtttatgtgtgcgaaggagctcttttcgtggttttaggcgtgggaaaagagctccttttaggatcctttagccactaccttccctccctccccccatgtacaagcgtggatctgtgtcgcttcattaccttttcttcttttttttttcccgttcagttttctctctttttttcggttcgacgctttgtacgagagacttgcaacaggacgtgtaattagtacgtactagtagctaggtgctcatccttatgcaaacttaacatgttgggttcgttgtgtcaaccttgcggtgcatgattttaaaatttttttccacaccaactcaacgctttcaattcgtcgccgtagagttttgtcctccatctctctcgtattctcgtgtgatggtgtcagcctgcctgcattatactacaggagaaagaacgaaccggtcaactggcgctgcaggtcactgtgcagcatgtataagaggtggcaggcatcacaaaacctgtagtcacatcatacctcgtct

SEQ ID NO: 90493 - DNA, 358 bp, Zea Mays
ttgcgggcccatccaggatgaaaccttccctggggacgccaaaggcggctgcaaggaagtcacaaacatcgctagcgaggatcccgccagcagtgtagagggtcttcgtcccacgcaagaccacgcctaggaacgctccgacacctacgggccagtcggtcatgacctctccttcagcacgacgaactctattgtccacctcacccacccaggtgtgaacacaaatcactcggtggagagaagcagacgctcctaggcctagcaagacctaggaagcaccaccagtgatcaccccgaccgctccgcgccctcaaaggagatggggggagaacataccaccgcatcgagctccttcttc

SEQ ID NO: 90494 - DNA, 599 bp, Zea Mays
atatcttcacgtgtgttttatccctctaaacacgtgagagttggaggatgcctaggaaccttcccatatatatttgaaagggtatgaccaattgaagcattaataatcgaaccaaaatcaatatatcatcctacttttgccctaggagtagacaataacgtagccttcttcaccccaatctttatctctcttcgactctacatcatatgggtcccttgggtggcttgccgatctaagacaaaccttaggatttttcctttttgacgggatctctcccgggagtgagatccaagtgttgttggaacgccaccgcccatgcacatgcttggaccgtctagccaccagacgcagactgtccaacttcaccgcagggaaggcccgtctttgtgccaggtcgtagaccgtcccccaaggccacgaaccgtccatgctatcacagagagcaccaccgccggtacacatcgtaatgattgatgactagattggtgccaacagattgatttcaggctccttcggatcaaagtaattttacatgaaaaacatagtattctgattttcataggaattgttatggtagcatcatttggatcgtaggattg

SEQ ID NO: 90495 - DNA, 456 bp, Zea Mays
gttgattgcttacgagaattccaagagacaaggtttgagccaaaatagacagcataacctccagtgctgcgtctgtcgtcttggtcaccagcccaatcagcatccaagaaagcactaagtaactcagaattgctcttggcaatatgaagacccatatgacgagtgtcccctaagtaccataatatcctttttaccgcactcaaatgaacatatgttggagaggccatatattgacacacacgattcacactgaaagcaatgtccggtcgagtcaataatatgtattgtagagcccccacaatgcttctgtatttcatagtatcctcagaagagagaggttccccatttgtcagtttgagccgatcagtgggcagcatcggcgtagcaactgctttagaagtcagcatgttggtttgtgtcaagagatcggatatgtacttgtgttgtgacagtaga

SEQ ID NO: 90496 - DNA, 308 bp, Zea Mays
cacatgccagagctctgcagcaatgctgcccacgccaccaatggttgaagctcgctcccttctatttataccccgtgcccctccctgctgctgccatggccgagcacttcccctctccacggcgccttctccctcctctctccctctttagcgcagtccctccctagcgcagggaagcttcttttttcccatggcgctcggcactggccttcctctgcttggtgcatggctcctctccacagcctcccatggaaatgcaggccccgctctccactgcatcttccatctccacgccatctccccaagca

SEQ ID NO: 90497 - DNA, 505 bp, Zea Mays
gtcgtagtatggttgtgttcatgattttgagttagatattggtggtttacgatttgtataaattggtcgatgtgtgaatatgttgtatgcggatcgaaattcatggaggagaaagtggtacgcgtaggtgtgtttgcgtttgaaaagccaacgagtgtatgtgtggatgtatagggagcttagagaaatggatgtgtcatgcttgtttaatgtgatgagtaagttgggaaatacaagtgatgtgaggactaaattagtgcacgcatgtatgtgtgtgtgagccatggtgcatcatatatatgattgcgctacatggatcaattgtctcgagtgcacgccacaatatggttgtatgcgagacggggttatgcgcatgatgagtttagtaaaaatccatcggtgtcatcatgatttctgttgtatggcggatcgatgccttgccttgtcaattattgcatcccattcccattggataaataaatatcttgttgattgattagaggcc

SEQ ID NO: 90498 - DNA, 502 bp, Zea Mays
ccacaattaaagcatccagtggaagaactaggaagggcggggaaacgtgtaccaggggcactcaactgatttgtagaagtgggggcagtggtaggacgaatgaagacatgttgtttgaacggataggagggtggacgaggtgaagaacgattctgattaaaaggtcggattaccaacctggttcacttctctggtccctaattagacatgtcacctccaaatccctttgattttccatggcctttattcttggcttctatggccaatgtcgtgctgatagctctgctgtaagtaagatccaggcaggtagccattttccgttggagcctatcgttaagtcccctcatgaagccattccttttgttcaaatcagtatttacttgatcgatggcatattgggacaaatgattgaacttgttgagatactgtattacagtatctcccccttgcttcagtagaatgaactcctcttgtttcatgtgaagcactccctctggaacat

SEQ ID NO: 90499 - DNA, 477 bp, Zea Mays
tgaatagaaggggtgcgacgggagtcctcatgaagtgcattcactcggctattgggaagcagctattggatgaaatccacgccgggcagtgcggagtacatgcagcatctaggactctggttgggaaggctttcagatctggtttctattggccaacagcgaagagtgatgctgccgagttagtccagagatgtgaagcttgccaattcttaacaaagcaacaacatttacctgcacagcagctgcagactattcctgtaacatggccatttgcatgctgggggctggatatgattggacctttcaaaaaagctcagggaggctatactcacgtgctggttgccattgacaagttcacaaaatggatagagtataagcccattgcctctttaacctcagccaaggcagtagaattcatacaagatataatatttgggtttgggataccaaatagcatcataaccgacctaggatcca

SEQ ID NO: 90500 - DNA, 532 bp, Zea Mays
ccaaaaaggagaggagagcactcaccaaccaccataagaactaggaccaccatatgaggtaggaggaggataagaagggaaaagctgcttagctagctcgtttgtaaacattgaatctcaaggagggtgatctgtagaatgagggattgaggaagatgggctctgataaggtggaggagaggcatgagaggatgaagagcgagggtcaccaggtgtaggagcggcaacagacggaccaaatacaccgccatcatcaacaacaaaatcttcctctttttgctcaggagtaataaatgggacaccatacttctgttagtgccactagttgatgtcatctagatactgattaagaggagcagcatgctaacgagcagttatctcataccccatggatgcaacaaactagtgtaggttgtcatttgtctcccttgcctcatgacgctgctcaacaatgtcggttgcatggctatgatagatagagaacacttcagcaatacctctagctaggcacaaccacagacttggccttctc

SEQ ID NO: 90501 - DNA, 474 bp, Zea Mays
tattatccgagattatttggtggggttcaggaatattcaaattcgagagatacaaagaacacacttggggcaagctttggcgagattcagatttgtctttgatagggataacttggtggctctggggcctcagcaggcttcagggttcactttcatagtcattaggcataaggaagcatggaatcaacatgctctaaagtttaatcatgatatttgctggctaatgcttcttggatttccccttgatttctagacccatgagcatattcaaaatgttgttggatcctttagtagagtgctcatgtgggagcttaaccatcaaatgtgaccaggttgctagtaagagctagggttacttcactacaagaagtcccccaagttattgtattctctatggttgagggttttcatggagtatcttggataatccaatgcgaaattgtgcaacaactcatgctagctctccctcaagat

SEQ ID NO: 90502 - DNA, 647 bp, Zea Mays
gtggcccctacatctaatcgtacagtgccccagctaaacgcttcagcgcagcatcttaaacctagaacacttctcggtcgaagtcctcattactctggtcgaaggtctcgaagtgcctatagccctcgtgggatagagcatttgcagctccttcacaggtaacaagggaggcataggacatgaggcccatcgcgataaacgggagagaatctagctcctcttgcagccagctaaagaagcgggtccccacctctcccccccagacttattgaatcgggttgtctccgcacccaagtcatgatgggcatccacaaaaagcgtgtgtgcccggtccacgtcggctcgcgtggtagcctccaccctttcatgatgagttcgtgtattcttcacctccagctccaattcggcaacacgcttctgggtgacttgggtctccattcgggcagcctgggcctccgactgctactgggctatgtcatcttttagttcgctcagcaaacggctgagcccctcattttatttctcaagagagctgaccttctccagaaggtttcgactcttgttttcagcagcagatttgtccctaatggcctatgtgttttgcgtcaagagacgctcaatcttgtcctccgaccgctttctctcgg

SEQ ID NO: 90503 - DNA, 439 bp, Zea Mays
cttccagcgggatcctgctgacgatgagtagccaggcctacatggagaaaaatgagggttccgctggggagcgggttgcaatatgtctttgattttgtaagataccctttaggtactacttgtcggtgacattacaacttatctgcatgccattttttctctgttgtgtgcattgttgtcggcttctcccctggtacttggcccccctgggatatggcctcgacatgtcggggtcggatgccaggattcttaaggtggtactggtgtcatgacccccaaggggcaatccctactgggacccaacctgcacacggcctaggctaggtatttttagcagcgcacccatatggtccgctagctggtaaaaacagctctgtggtatttttaccagctagggagggagactgcctgggtggtgagatagtaataatggttgtaa

SEQ ID NO: 90504 - DNA, 392 bp, Zea Mays
cagtagttgatcatccttacaggtgcaagcatgtgggatgtaaatggatgttcaagaaaagtattagggccagataccacgttggctagccattgaccagcgtgcacccgttggagacggcaggcgtgccaccagaccgtgaatagtgaaggtcaggtgaattattgaaaataatttctgagagctcactgatcagccatacaggcagtccggtgcacatcgatgtggtccggtgcgtcaggccgcccaacgcctatgtcctatgccacgtaagttctccagatcaatttggttgtccttgtgaacttccctatgacttagacaaacataattagaacataatccaattgactaagtgtagtgaacttaccttttactcagtctttcaccag

SEQ ID NO: 90505 - DNA, 653 bp, Zea Mays
gtgccaaggggctcatttgaggccatggcatactttagtttggttgtgaactaaatagaatttaaaagcatattcaaacatgtaatggaattacctggtggcataatgaggccatcagatctttccaatgcatccaatagaatcaaggcatcatgagctgaaccttcccaactagcaagaacataggtaaatctcaaatcaaaatcaacagctgctagaacattttgtgtcgttgtgtgctttgtacacatgaaggctactctcattgaactgggaaccctagccaatacatgtgtgccatcaatggcaccaacacaatcctaaatgtttaagttaaagtgattaaaacaaagacaatactaacatatttgaattaaatggttaatgtgcaatcctaaatggaatgaaaagtaccttgaagtacgggtaccatcttctactaacatgaattttaggatggacagaggtggaaggaggggtgatcatctcagtgtgtagctcaccaattgcacttaacacctcttggaaatatctacggatagtctcagtagatcttcgaaaggtgaatttgagaaccctaaacctttgattatgaccaacaacatgtagaaacattgcaacttgttcttctacagaactgtgaatactatctc

SEQ ID NO: 90506 - DNA, 1099 bp, Zea Mays
cagcaaacgaatatttctttattgtccgggagacagtacaagaaatcatcttcgttagtgctgttaaacactaagactcccttcggttattttaatttttgggcataatgtctggcttccaggatttcttgttcggataatttcttccccgaagcatgtcgataaatgtaatcaacagcttcaactggagcttcgagggcaagagattttgctttttctgctataccttgccctgctgtcatgccggtatctgaagtttgctgatcagccttgtcttcaggcgcgacagccttcgtctcaatgggcactgtaggatcagcttcggcttcagcctagcccttggcaacttcgacaactttcttttataggagcaggggtcaaggcctttgtactttccataacagcgtctagcacgctggccattctcctcttaggagttgcactaggagctttttgcatcttcggcaaatttgcctctgccagtgggctcaggacttctggcattttatcactttttccacctgtggctcttcggtcttatcatccttagcttcggttggcccgactgtaggcacctttggcactacaatcagctcttcaacgctctgcacaatcggagcagcttgtcttgcttcggcagatgaagaggcctcttcgccaaattcaggcactacggccgattcaatatattgcggccggtgggtcagaaccttcacttttttgcccttcggcacagctgtggtagctgaagcagtagtctttctcttttttccttgccctcgtagcgggtagcgataatcagggtatacaaagccaattgcgtcaaataccctgttcaatcttttcttgccccgacccccgaaggctgcggacaaagcatcatcttcggccttggactatgtgccaagcagctcgtcactggtcgcttcaatacatttcaaccagccatcatctggctcatcaaacttctccctaaacctgaaggtatacttcaatcggactagtccaccttcattggattcggcagtagtctccttcggcatatcccagctctccacaagtggccacaccctgaaggatatgtgttcttgaattaaat

SEQ ID NO: 90507 - DNA, 315 bp, Zea Mays
tgaagttcatgagctatttttggaaaacattatgggaaaagcttgggactaaacttttgttctccaccacatgccatccccaaactaatggacaaactgaagtggtgaatcgtatattgtcaatgctgctacgaacaatggtaaagaagaacttgaaggattgtgaggaatgtttgccacatgtggagtttgcttataacagggcagtacattctacaactaatttatgccccttcgaaattgtatatgggttcaaacctattgctccgatagatttgttgcctcttccattacaggaaagaaccaatatggaag

SEQ ID NO: 90508 - DNA, 532 bp, Zea Mays
ccaccctcgcccacttctagcacctagagccccactcactctcaccctccctcatttgcacgtccgtagagccctaccccagcctagcgtcgagcgcacgccagggaagaaatgccgccatttgccgttgacccaggttcgttccgccgccgacattgaggccccatcgtgcacgttgcctcgataagcttcacctcgacatccgcagttcgggacatgccctaatttgctccctccctatctgatttcccctaaacgaggaagggaaaagagatgtcatcttgcccttgtcgccgtccagaggtcccagaagttcccttgaagtaacaaacctcccctgccctctttttcccttcactgctctctgttgcacgtaattcctcactggagtgaggtagtgtcgccgccgagtcgtgggccaccaccctatgttgcccctgcatcgatgttgtcctcaccttcgtgtttgtcgtacttcacctgacctcaccgagccattcccatcgctctgggaccccccagcgtgttcgtg

SEQ ID NO: 90509 - DNA, 589 bp, Zea Mays
ccggcaccatcggtgatcaaaactcgtaactggggttacaagcgagcgagagatggaggagacactcccaagtctcttttctggggtggaagtggagcttagaagctataaggtggagtcctagctatgtcttagctcagcggcatggctcctgcctcctggtcctcgtcgacgtttctcttccttttgttcgtccttatgggtggtccatttgaaggtgtctagggtcatttggttgtcttctgaagtgtccaaaagaactcccccaacccccttgtctggaggccaacccctcacttttatagcctgggagaggagatggccagtggtggcttcgttgggaaggagctgtaaggaaagggtaataccagcgttctacctagggtaaagccacacatactcgtggggctcgggattgtctgtttcgtatttaccgtgacggatgatgcggggatgcgatggtcctaggcgccatcattttggttatgccgccccctggccttcgtagcctggggcttggcgcgacctattgtgtactcgtagattttagtgtttctttcttgattcttgtattatatttgcatctcat

SEQ ID NO: 90510 - DNA, 374 bp, Zea Mays
gaagcaggaaatgtagaagacactcataaaattgaggaacacactggatgtgaatttgagcatggtactactcttgtggttacacaaatcttgagtgttcaaatgaaagaagctaaaattggacaatgacataatctttttcaaacacgagcaaaagtgcaagacagagtagtaaaggtgatcattgatggagggagctgccataatcttgcaagtcgtgagatggttgaaaagcttggtttgaacttgcagcgacaccctcatccttatcatgttcaatggttgaatgaatcgggagatatcaagattggttataaagtgaaagttccgttcaagattggagagtatgttgacacagtggaatgcgatgttgc

SEQ ID NO: 90511 - DNA, 280 bp, Zea Mays
caggtgaaagaagttttttcaggccagatatggtaaaggaaacagaagagaaagttcaacgaataattcataatttcaaagaagcccaagctcgacagaagagttatgcagacaagcgatgtcaacccttacactttcaagttgaagattatgtctacctgaaagtttcaccaatgaagggtgtatcacgtttcgaggtaaaggggaagcttccaccccggtacattggtccttttcctatccttgaaagatatggaccagtggcatactgactctagtt

SEQ ID NO: 90512 - DNA, 489 bp, Zea Mays
cgcgagtatacgaatttcattttgcgcgtttttgtgggggcggattgatcgttgggcttgtggttgcgtgtctccggtgaggtgtcgctgtgcgctgcgcgtttcgccatcgcgtccggcctcagggaggaagaagtgacgcggaccgtggatccatacgtggtcggccgagattagaccaaggcatacatcctcagtcgatggaatcaggaccatagatctggcagcgtacgtgtaggattagatcgccattcataaaatctgggccgctgatcgagatctgacgacgaggattgtataccatttcacaagaattctgatctaatctagtctaccagatcaagatcaaacggtcgtggtcagcccataccccttcggccgtggaatattgttaaagaacccctgtattttcatttattcaacccgccgtcctggtgcagttataaaagatttaatttaagtccctagaatttgcagtttagcccttga

SEQ ID NO: 90513 - DNA, 587 bp, Zea Mays
atttgtttcaatcaaagttgaaatggctaaagataagagaagcaaagaccccgcactggctgggttttatgaagatatggagaggactaacacggaaaagataaccatcaaaattctggctggattatctgaagattctgagggcagcgatgactttgattttaatagtggtacagaagatgtcgaagatcggccatggagaccaagccatgttgtcttcgaaaaatccattgttaagaaagggcagattgaggcaatgaagggcaaataatttcatgatatattcatagtgagagctggaggagagagcactgttcctcttcctaaggcagacaaagtggtggtattccaaagtttcatgaaggctgggcttcgctttcccatgcataaaatgctagtcgaagtgctgaaaagattcgaaatataccttcatcagcttaccctcgaagctttgattaaagttggagttttcatttgggcgatgaggagccaagggctggacctagatgctgactgcttctacaatatacacgagttatcctactagacgaaggcagttgggaaggagcaatgtcataacaattttg

SEQ ID NO: 90514 - DNA, 583 bp, Zea Mays
agaaatcaaagcttgtgccgaggtgtcaagcgcggcctcattctcctgggccgatgaagcagacctttgtcgtctagagtagaccctcacaataggcccgacctggcccgactcaagagggtttggctgctgctgagcttggaaaattgagccaaaagcaaccgtcgcagcaacagcttcaataagtgaacgatcctccacccgcccgacaggggcattaatgtccccgtagccttcaagcacagagctgacggaaatcctgggatttaggttgatctcttcttcctttgtcacacgaacagttgaatccagcaccacattttccaagggctgctcaacctcaacacgctgtgtgccagccccgaggaaaggagaaactgaacgcattacaggcacaaggtctgaaacaatgcagctataattggcctcctccaaaggaacgtgtgccacatgtcctcccgacgaagccagggggccaaggcgctggtgcaccggccgtcgggaagggcctccgccactggcaccaccattgctggacagagccgagcgaggtgaagaagagcacagacttaatgcaaagaat

SEQ ID NO: 90515 - DNA, 726 bp, Zea Mays
tcacaatgttggttagtgaatgtggaagttttcatgtatttttgttatgagttcaaggtgcagtttctgtatctgaattaatttgtgtgccgtcgcaaagaaaatgtgctttgtatttgtgactaatagtagcgctaatatgtcggtcaacttgacgacaaatgtgccgatttgcatgtaaggtgaggtagatatataagtcttttgcttgatcaagatcaagacatctcagctgcacggaaatttgattttaattaaaaaacagagagctcttattataaacagcgaggatcatgattttaattaaaaaacagagagctcttgacgaccaatgtgccgatttgcatgtaaggtgagggaaatagataagtttatagtacatcgtagaattttccttatttttcacattttcaaattgttctattccctcgctggatctgaatcaatagttgaagacagtccttttatctatcattatgtatgctggtcttcaattaggctttttatacttctgattcatagcatgacctctttgagtattgatcagtcttaattcttatacatttttaattcttatacatttttgttcatatccggcttcaggacgacaactgacagcacacccctgcctaagcagtggagaggtaaagcatcacagtagtctggtgagtttacattttgcatgcgattcttttttgtattcagttataacatttgagaataaag

SEQ ID NO: 90516 - DNA, 1193 bp, Zea Mays
cagtttatagcctgaattttggggttattaatcttctacctaagaaatgtaatgcctcaaaaatccaagagtatcgacatatttgcttacttaacgttggttttaagattattactaaagtcctaataaacaaaataggggtggttgtagataagcttattaatcccttgcagattgcattcatgcctggtcgtaactcgtaatatccttgaaggtgtaataccctcttgtgcgaatagaatgccctcgacatcaaagaaacgccatttgtggtttaaaatgtgatctattgttttaaattatttacattccaactttttagcaactgtatggtggaaaaagatgacttactcctactacagtccatcaagttagaagctttcttggactagctggctattaccgtaggtttattccggatttctccaagatagtaaagcctatcacagagctactgaataacgatgttagttcaattagtcttccaaatgtaatgaggcttttgagcagctgaagaagttattaattactgcaccagtgttggcttaccagacgttgagaagtcgttgacgtatagtgtgacacgtcaggcattggccttgggtgtgtcttgatgcaagaaagacaatatatagcttatgcctcaagacagttacgccggcatgaggagcattacccgacgcatgatttggaattggcggcagtagttcatgcccttaaaatctggtgtcattatatgctagggaatgtatgtgatatatatggatcataagagtttgaagtacatttttacccagtcagagttgaatatgagacaaagaagatggctcgagctaataaaggattatgatctagagattcactatcatcttggaaaggctaatgtagtggctgatgctttaagtcacaaggcgtcttgtcacaaccttactgcgaggttgcatgacactaccatatgccaggaaatggaaagactaaatttgggtatagtgcaacaagaaactttgacgcatctaaagcttgagtatgtgcttcaatagaggattgatgatgctcaaatggttgataagggcatgaagcatattcaagagtaaacggaagccggtaaagccacttgttttagaaaggatgacccaggagtgttatggttcaaagatcgtataatggtgcctaaggatgctgagctctgccag

SEQ ID NO: 90517 - DNA, 528 bp, Zea Mays
gaaaaaggggtccaaaggagcacccatatacaaatctctccttacggaggccaaaaacaagcagacttaaaaatgtccataagggcaccagtaaaaactattgcatccctccagccctagcactaggagtagccaaataggagagacactttgctccagcatcttcccatttctccctctcctcattgacagaattcaagagcatggtgaggcttggagagacaccatcaaaaaccactttgttcctatgtttccatatcaaccatgcccctagaatgatcagagagtccaatcctttccttgacaagccaggcacaatggctaaaattcttttccaccaaaataggaagtgagtgtcgtcctgaagaggagctaaactatggaggccaaacattctgaaaaagttataccagcatacccttgagaaaacacaagaaaccaacaaatgattgatggtctctcgctcttgatcacaaagggggcatctaggagggtgattcaagcctctttttccgggtctatcagcag

SEQ ID NO: 90518 - DNA, 574 bp, Zea Mays
agcgaagattctattgtcttttccatggcaaagactcgacacacccaaccagggattgctctaaaaccaaagccacaaaagattgaatggccagaaaccaaccggctgacaaccaaagagttgtcgcccacacctaccatccccatcagtacaaccaacaccaattccatgatgaacatttccatcctcaccagcagaaccacaatatataccagcaacaccaagaaatcctagctctaccgcctccaccacaaccacagcatccaaatcaaccgttaccaccacccccagcactgaagcaagaggacttcaccgatcaacccttttgaggggtcattcacatgattaccggaggatccagctccgaattcaacacataacgacagaagaaagaccactatcgaagggtcaatcatgtagccctcaccgggccagtcattcaaataaagtggtctcatataccactcacctttgacacaagtgacgtcgatctccgcagtgcatcccatgccgatgcaatggtgataaactaacgagtagcaggatgggatctgcataaggtactcgttgataa

SEQ ID NO: 90519 - DNA, 389 bp, Zea Mays
gagattttgggatttctagtttcctctatctagggggggggattttgtctttcgggtttcctttcattcaagagggtgagatgtgttatttggagctattgctagttgagttgagccgtttgcctccttctggaggacctagctttgattttagcttttgtgctgatcttatgctctgaattggttttttatgctctaatgaagccttttgtgctccgatgagattttagcttctggctagttgtgttgaaccctgcttttgcctcttattgaggctagcctcttcttgcttggttgtgttgagccattgcccatttctttggggaccaagttttgcttactctaaatgacttgtctagcttttatctggcttatggtcatttgagtga

SEQ ID NO: 90520 - DNA, 912 bp, Zea Mays
gttttagagttgcgaatattcgagaacagatgtagtataaaaaaacttctcacgcatatcaggtgtgtttggtttagccgccaagcactaaaacaccatttaaagatcacgacaaatgaaagaaaaaaatataggatggacccaactaaacggctacagtatagagccctttctactttaaactatgtgtattttaaaatttaggagagactttagtggtattttataggttctagtaggggaggttcgagcctcgcccaccccattgatgccttcgtccatgtgtcaaacctatgctccaatgccttatacgtggccaatgggtcgtgccggacaggcacggtccgagcctatcatgggtcggactgatttaatcgggacatagcatgacaggataaatgacgaacccgtgtcgtgttggtccgtaggccgaagtctgaactcaagcacggaccgactagttttaaacgggtcgtgtcgagctatcgcattgtactagtagctgcattatgcgaccatgttgtgagttcactgctggctagtttactactggggtattttgaagctgttggtggtgtttggttcccacctcctaaactttagttagtcacttttagtttctaatataccaaacagggtaactaaaatatgtttttaaaataaaatttctagggactagagtttaagagagtgactaaagaaaccaaacactttaggggtatatgttttgccttttaaacttttaggagagatctaatatagagtattggaagtagaaatatctttggagattggagatgctcttatcatgtcctccgtacaggcccctatctttgacgtggccgtatcgtatgcacaaagggcaggcctatgcacatgtgcaatcctggcgcttcatcgatgatccgacag

SEQ ID NO: 90521 - DNA, 1005 bp, Zea Mays
ccacgttctatttcttcacagaccagggtccccgacgacgacgagcgcagaaccgggcttcagcgagctagactagccggagggagccaagaccggtgccctgcttcggcctaaaccaaattcaagacctagaaaatgttttccccaacttattttcaagaatgggtaactggttgactctagccacgacgaccgtagaccatgcggacagttgaacgtgttcccgacgatgggtgtcggtctagttcaatctggtgggtcgatgagcatcacgggttcatgagagtactcaaacaagaaagtagagaggatgaactgactggaattgtgctggccgcggtgaggtcgttttcacggtggcggaaaaccaaatagggggaaacgagaaatttgcgagctctaggggacgattcgaggtacgagttgcttcactggttgcgtaattacctaacggagcggacggtggcggcaatttatagcctctaacggcggtggcgcccaattttaccaggatgtgctggcggccggagagaaaaaggcactggtacgtggaacagatggctttcaccgtggcggctcctccggcgatcaccggacatgcataacacggttagccgcgacgtggtaaagcatttggacacgcggcggacggcagggatgactcaacggcagtgagatcttatctgatcgacgatgagcaaaggggaaaagtgcggcggctagccggattggtgtccagctcaacggcggcgatgatttttctaccccgcgacgttatccatttaccctaggcacgaatcgagacgccagcggcacgaatcgcggcggagagatcatcggcggcgaggttctgaaccttatcctccaggggcactgtaccatggcgaggatcattcagtgcacctgacagccaaagtttagggcgaattttctctcaattttatgtagtaacatgatcatcaccctttagcaaagttatagctctatgatccagctaaaatattg

SEQ ID NO: 90522 - DNA, 511 bp, Zea Mays
cggggacacttcactaaggccctgccaagctccctgggcatttccacgaaggtcaactgcaccaggccccccgattgaagctcgccgacgacctacacccgcctgcgcctgtggaccagcttgttcagctcgccgccggccaatcaccaacgcccccaagttcgtcgaacccacccgaagctccgcgacctagtccccaatgcactaccacaccaggtgagccacgatttctcgtcgttgttttgagtactgttccggcgagggaggaaggagcgtgggttggggaccttgaaaatccgagggtttttctgaattgtcagtgacccatagaaacggtgaactaaggacctatatgtgaggacgccaggtgaaagaagcctagggacccgagcgcaaaacagtgtttctttcctgttaattggaaatacctttttaaatctacaacatagattcaaaaattcataacttgatggatacttacccaaaattcatgaaatcaattttgttaaac

SEQ ID NO: 90523 - DNA, 420 bp, Zea Mays
gatgtcgtactccgctaaattggtctgaaccaggtgaaaggtacttcttcaggcctaatctggtgaaggagaccaaagaaaaagttcaaagaataattcataatttgaagaaagcccaagctcatcaaaagagttatgcagacaagcgacgacaacccttgtactttctcgtgggagattatgtctacttgaaagtttcaccaatgaagggtgtatcacgtttcagggttaaagggaagcttgcaccacgatatattggtccttttctcattcttgaaagatatgggccagtggcgtatcgacttcaactacccgaaaccttgtctgctgtacataatgtgttccacgtgtctcagttgaagaagtgtcttcgggttctagattgaaccattgaagtaacagatgttgtcctagagccag

SEQ ID NO: 90524 - DNA, 685 bp, Zea Mays
catgttttgaggcccaaatccaagaaactgtttgccatatggttttgtggcccaaccaccaaaccattcacgagaatggtatgctccctccatgatcttgatgcgtcaccaccattcctcaaccgctcaatcattaagtcctccagtgcccctgcttcaattgttcaaccaccaccttgacttggtcaacatggtctagtcctacatgtactcttgcacttgtctatgttccgatgtgttagccaccatgctaagtccatcgacttctctaattcctcgatccaagcctcggtgtccatccttcatcattcctagttgatcgatgcaaactcggttgacgttcaccgtcatcgttgactaccacctccatgctccatacctatgcaccacaagccaagtgacatgctgcacacaccacaactcactaagattagtcaacactaaacaaaatctgataatatcttttacaatcatttgtgtgaaaagtacccccttctttcacacacatgacatactatgatattcgagatgagcttatgtgcacttttgtgcttgattgtcctaagatttacaacaaaacatttatgccttgctatttttgagatatggcaaaggtctttttctgccttttcatctttaagatacgatgaaggtcttttctgacttgttgcctttacagtatgtt

SEQ ID NO: 90525 - DNA, 373 bp, Zea Mays
atggattgtttctggactacatatgtttgtgatatgccgatgttgaccagagttcatatgtctgttgtcttgcccgttacatgctctaatgcttggccttccccttcataggtgagtgttggtggggtctacgagaacacgctcatcgctttttcttctcagcaattcggttagttggcgcgtttcctcacacgtgcctcatgaattttaagggtgtttcattggttcagttctagttacgctcctatactaagtgtgaactgtgtagatctgtgaggtggtgttgtgcggagtctatatatgcttctagcaccttctgtgttagcctacgtcgcgcaccataaggtatggtcggccttcttttccactcttt

SEQ ID NO: 90526 - DNA, 670 bp, Zea Mays
gttgagtatctcatttggtccactagtaatattatgtgttcattgcttttttaggccagccttaaccatattttggggtcaaagctctttacaccgtgacctattccaaaacgctatcatctagcacaccccaccatgccctttatggcacccgaccagactactcgcacttatgtatcttttcatcattatgttgcataaactcggcccttgctccaccttatgtgtctttcttggatatctgaccacaaaggttgcaagtgcctggatctcatgtccatccacattattattccttgtcatcacatcttcgatgaaacacgcttcccctacttggtggttgcgacacctccttctaactttgatttccttttagtggaagattatgttatttcaccaattgatttgtaagctttgcctacatgtactataaacaatgttataggtcctattattgttctctctgctagttcaccaccatggatcattgccatcatgggcatggccccttacccacccatagtgctaaccatctgcgaggatatgctacctagattgactcttcatctatggtcactaccagcaacccccgaccacatctctatcgatcacctctatgccactagttgttgttagcaactcactcgtggcatgatcttcactcgaccat

SEQ ID NO: 90527 - DNA, 893 bp, Zea Mays
ctgattatcactacccactgtgaaggcaaggaaagaagagaaaagttgccgcttcggccaccactgttgtgccgaagggtaagaaaataaaggttctgacccatcagccgcgatatattgaaccagccgtagtgcctaaatttggcgaagggacctcttcaactgctgaagcaaaacaagcggcccccaccgtgcagagcgctaaagaatcgattgtagtatcgaaggtgcctatagtcgggccagccgaagccaaagatgatgcggccaaagaaccaaaattggaaaaaaaacagtgaaaatgccagaaattatgagcccaccagcaaaggtagaattgccgaaagtgcaaaaggctcctgcggcaactcccaagagaaggaggatggccagcgtgctagacgctgttatggataccacaaaggccttgagccctgctcctacaaagaaaattgctgaagctgttaaagtccaggccgaagccgaagctgggccttcagcgccccttgagatgaaggctgtcgcgcctgaagataaagctgatcaacaaacttcagatatcggcatggtagcagggcaagatatgacagaaaaagcaaaagctcctgcccccgaagcaccagccgaagatgttgactacattgttcgacatgcttcggggaaaaaattatccgaagaagaaatcctagaagccagacactacgcccagaaactaaaatatccgaaagggggcttagtgttcaatggcactaacgaagatgatttcctatactgtctcctggataacaaagaaatatccgtttgccgggagatagctaaaagtatgggatttccgaagcttgaggaaggcctttcggctatgtcgaaggatgatcatgctgatagccttgcgt

SEQ ID NO: 90528 - DNA, 626 bp, Zea Mays
gttgaactatcagttgcactgataactgaattaaggttaccagtaactttggcaggactttgaggtcgaattggagtgagatctagtgatcaattgagtatagttactatagcaagattgtagcttgattatacggctacaattgtgttacagagaggttaacacattctcacacaaaaatctgagattagggcactacaaaccgtgctgtcagatgctctgaatgaccccctgatggtacagtgctagaaatatctttggtgcagagcacctcactgccggcgaccttgcgtttagatttgcgccaacgccgcgattcacgctccgttaagcgcagataacaatccccgggtaaaaagatctcgttgtggatgaacttgaggcacagtgaacgctctgtcgcttatccggttaccgacgacgtgcccgcacgaccctcaccgtcgtatcgctgttcctcgcggtcatgacacgccttcagccatctcaccacgtcgcaattaatcacaatacatagcccattggtcgcccaagaactttccatggtaacatccacgaattgcttgcgccagtaacctcttccctctccggccgccaccacgccatctccaattcacgggccaccg

SEQ ID NO: 90529 - DNA, 802 bp, Zea Mays
tgttccgtaaacagtgagccacacacatatgcatgcatgctgcatgtgcatcagtagatatttcatgttatgttgcctgttcatctgaagagatgttcttgtgcgtgatatatatatatatgtgctagctatatatattaatttgcatgcaatatgcatgctcagatacattgaggcatgaagttcattcagatttcaaaattgatttgtgtgagcaactgttgcgatttcaaaaggttagttgctgcctgcacgcgcgtgctagttatacgtactgtgcagtggaattttagtaattgttgtatatattgtaaaactaaacttgtgtgtacatgttagtatctcaaaaggcaagctagtcaacttttacttttaatttgtgaataattataattggatcgagcaagtgtacatatatctggctgttacgtcgtatatatagtgatgtttgtgatcagaagctagctatacacatactgtagtgcgttgtgcaacattattggtatgtctcgcgcggtacttattcatcgttccccccaccccacaagctgacatttttccaataaggaaaatgatttaggccctttctggatgcaaagtattttttttgaaatagtagagaaatatatagtcggttttatcaaatactttggttttcaaaaattaatgaattttgtatacaacaaatcttgtagtcgatctatttggatttgtcaaaatcgtaccgttttaaatattttagaaactgtgcacacatatgagcacttttttctctaataacccacaattttgtatctctttg

SEQ ID NO: 90530 - DNA, 506 bp, Zea Mays
ctttgacaatgcatccgctgctacgttgtgatccctttccacgtgatggagttctaaaccctcaaatttgtcctccaacttttgtaccgttgcgcagtatctattcatttagccggttgagcagccccagtctttgtttacctagctgatgaccaccagtgaatcgatgtataccattaatcttttgatgtcgagtgagatggcgatgctcagcccatgaaccagggcctcgtctgcagcattgttggacgccggaaacaggagctgaagcacatacttgagttgatcacctccaagagcaatgaaaagaattcatgcccccactccctgcaatcttagcgagccatcgaagtacattttccagacttcagcagcttctgggttttccggaacctggtgctcagtccattctgatacgaaatcaaccagtgcttgagtctttattgcagtgcgaggtcggaattctatatcatgagccccgagttcgcatgcccacctggctattc

SEQ ID NO: 90531 - DNA, 670 bp, Zea Mays
gtgctgttcacctcctacatctcttgcgggttggcgctgccgatttcgcccttcttcctgctactgctggaggagttcgggcttcaacttcaacacctcacgccccactccatcctccaggcagcaatcttcatccacctctgcgagatgttcgtaggtgtggctccctgcacctccctctttcgctacttcttcgtgctggtcaggtccgggaagactagggaccacattggtgtgcctactactttcagatgaggccagatccggtcgtagtctacatccccacctttggtggtgcgagatgggaaaactggcgcaacgactgggtgattgccagcactgaggccaacgaccgcctcatcctgctgagcaatggaccagcactcgaccgcaagcaatggagggccaacccatccctctcgctagagttcctgtccatattggacaggatcaaggtcttggctacgggcggcctgacatcaatgcacgtggtcggcgatctcctgaagcgtcggatcgcaccgctgtagaggaggtcgcgtctgtcctgctggttcactagcccgaacgacatcggtaggatcctgtgcgggtcgggtaccgatctgtcctgggacgagctggaactcctgatgggggggattaccagggagacttttgtccccgaatc

SEQ ID NO: 90532 - DNA, 484 bp, Zea Mays
ctttaaaaatagaagaaaaaaagaacgctcgacccatttggccaccagcctaccctgtcgattctgctcctatatccatgaccagcagcctcacgctcccttcccttcccttccccattacgtacctatgacatgtgggtcctatttttatttgtttcctgcacctccgttcgaagcttggttcgctcaccgccgccgattcttctgtagttgccattactattttcagttcggagaatgtcgagcgcccacgagcccaagtgccgccctgcttcctcgccctctcatcttcagcagagcacgccgccataaatcgtgccacaccatgtcctcttcccctcccatcccactaacagctacaatttcctgtcctcgcgattaatggtgccaaccgcttgttcttcccctcctggcacccatttcctttcttccagcctataaaaaatcatcaccatgacctcgtcgatccgttcctgtccctcgc

SEQ ID NO: 90533 - DNA, 400 bp, Zea Mays
tttcttgccccgacccccgaaagctgcggacaaagcattatcttcggtcttgaattttgccccaagtagctcatcgctggtagcttcgatacatttcaaccagtcatcgtctagctcatcagacttctccctaaatctgaaggtatacttcaatcagaccataccaccctcactagaatcggtggtggtctccttcggcatatcccagctctccacaactggccatacccggaaggctatatgttcttgaatcaaatcccttgtgccaatgaaggcacacatagtgctaaaggccttctgacatgtttcaacgttgccatcaatttccacctttggccttcggaggtcgaagcgagactagatggggcgctgaatgatttctttgatgtctgcccttccc

SEQ ID NO: 90534 - DNA, 430 bp, Zea Mays
gtgatctaatgtgttttagcttaatcggtcgggtcgaggagcatcaagggcacataagggtactgaaacaagagagcggatgacatgaacagacctgtagcacgctgaccacagcgaggtcacttcgtgcggtgctcttgaccgattttggggaaatctcgaattggcgagctctggtggacgattgaggcacgagttggtgtattggttgcttgactaccgtgcggaaccgatggcatgctcaacttataggatccctgagaggtggcctgtgaatttgagatggcacggtggtggtcggagagagaggagagcacaatcgcaagctcaccgacgatcaccggatatgtgcaatacgagctacttcgacgtggtaagacaccaaggcatgtggcgcatggccgataggtggctaactccggtgagttca

SEQ ID NO: 90535 - DNA, 615 bp, Zea Mays
aacatctggcccagacggcccagcaacacagggaacaggggagcgcccgcgcccgtggtggaaatttctcagaaaggcccttggggttttaactaactggagatgggtttggttactgttccaccgggtcgctgacaacttgcagataagcccctcgatttctatctcttctccaaaaacaaccctgacgacgaacggcactgcgcagagctccggcgaactcgcgcactggccgattaaggcgacgaccggcgctcccgagcggcggacatcacattggacctaccccgagtattttccccaacctaattgcacgaatggtcaagaggtgtgctttggccacggtggccgtgaacattacgacaatactgtcgtgttcccggcgaccaaaggatctcttactaaattaaatgggttgtcgagcatcaccgagctatgagaagacttaaacaagggagagaagaagatgagctgaccgggagggggctggccgcgatgaggttgagttctacggtggcggaaaaagaattgggggaaaactcgaattcgagctcactggtggatgattgctaacgattagcgggggctggctagctgatgactttgcggaactgg

SEQ ID NO: 90536 - DNA, 1342 bp, Zea Mays
ggaagttgagctgtcactcatgtgttggcctgaaggttagactgacagtggcatcagatcaactttagagctgaattgtgcttgatcgagtggaggtatgaacaagaaccctataataaaattgaagctggtatgatggacaacaactttgctatagacggcttggtagtttgttgaatgaaaatcgaagataaatggctctcaaatcgctttgtcaggcgagctgaatgaacatcgccatggtacagtgcactgaagaagatccttggtgcagtgaacctcaccgccagtgatcgagcgccgcgattcgagctcaccgtgaagattcgtgcacggatcaacacagatattactggggaagtgaaaagatcgtgactgtggataaacttgtgagctggccaccgtaaccacttgctttgcgaccggccaggatgtcatcgtcggcgtccactgctcgccgcgaggatgccacggtcttggatacattagcacgtcacaataggtcgctgtggacaacccatttaccgcctggggccttacctcaccgagcaccacgacagttgccctccggtgactcacccccttccggccgtgagatcatctcatcccaaattcacgacacactcatgtagctacgataaattaaaggccctccctgctccgccttctggttatgcgcctagcgcacccttcctcgcctccaattacccaccagagctcacaaattccagtttcccccatcttggtcatttacgccaccgtgaggcacctggccacgaccaactgttcccaggttcgttcattcccctctgtgccatgttttagcatccttgaatgttaacatagctcgtcggcccaaccgattaaatattaccatgatagagcatcgagaacatgacctcaccgccgcatgacacgtctgagagcgtgctcccgtcgacccactttcccacacccgcttcattcaaattcacgcatgtacctgacctcttgtgaattagtgaaactcgccctagctccaatttaaactctaccgtgtttggttcttcccggaacacactcaccggagctctagcatcgccgaagccatgaacaagcgttaattagggttggaccagtccaattaagtgagggcatatgctcaggtaggctcacgcttggtgttcgagtgcttgttgcctcatggaagggtcgtcgttgccgagaaaccacgagtccggtcaggtgttcgatgcggctccgtcgaggacctagagccgtgaagaaacaaaagtccaggggtctttgcgcatatgtcagtgagacacataaatagtacatggggttctttactggttattcg

SEQ ID NO: 90537 - DNA, 330 bp, Zea Mays
ccggcgtggtgtcggtgttcccgaacaggggccgcaagctacacacgacgaggtcgtggcagttcatggggctcgagagggacggcgatgtcccgcagtggtcggcctgggagaaggccaggtacggcgaggacaccatcatcggcaacctcgactcaggtacatctcatctgtcgcatcgccgtcgcctgtggagtcttctctgtaatttgactcgctcacattgcgactgctcgtgaaggcgtgtggccggagtccgagagcttcgacgacggcgaaatggggcctatcccagactactggaaagggatctgccagaacgaccacgac

SEQ ID NO: 90538 - DNA, 495 bp, Zea Mays
aaatttttagtcataaccgaagcttgatcatcgtgctcagacgaaacctcgcttgtgaatctgcttcggcacaagagtaagagcttcggaaaagacaaaaaagccaacaccaaaaatttcaagtaagtcataatcaaatggccagagttcgctctactgcaagggtcgatcgtgagggagatgagaccgaagctactgttcctatttcggaagcaatgaagcgatctgggttggtaacaccggaagacgtccctgctgctgaagcagtgcaagttggtattgaagagaccgattctgaagatgattacaacagcgcagtgccgagcaagcctagccacctggacttcgaaaagtccaccatctccgaagctgattttcctaagatggtgaagttgggatattttagcgaagataagaaagagctgattcgcttcggtggagaagaaactactccgaagccagaaaaagatgaaatagtagttttcaagagtttcc

SEQ ID NO: 90539 - DNA, 903 bp, Zea Mays
catgcttgtgttggatggatcatagctctaaactctaaaccctaaaatctaaagccatatcataggataagcgatatcacaataaataataattattattatgttttttttttgctgaaaaggtaaaatccaaagcctgatggaacccaagggggatgttttggacggatttgaagatttttaacctgctgctttgctgatgctttcaggcttggttctttcttgctggcatgaatcattccttcatataatatagtacttgtgtaacgatgggggacctagctagggggggcgctcctgggactagctatagctaggcagcaaacaagcaggaacgacgtggctagaaatttgtaaggacactgtgagatttgttttacgcgtgcatatggtcccagaaacaaaatgtccccttcgttttgaaatgcgaacgtttctgcgcatgcgtgaccacaaggggcggccggatgcgcagtgatattctttcctagatttgtgatttggtttttatagctctactggcgaagacaacgagtcgttctttactatttaggcggttgggcatgcaggtcacgtcacatagggtacgtctgttttggtacagagctctaaattcaaataaaaacaaattcagatctagctttttagctaaacatttttacaattggtggagcagctggcactccacaaaatctaagattgatagtcgatgccactatatataattcattcacagtttaaactttataaaacccaaccaaccaaatcgctccgcatcataacctccactaaatccaccaaacaaattgctctatacttatcaaaccaacaaatcaaaaccaactgttcagatcgttgtataaccctttactccctcaaattcaatgggcaatattatttgga

SEQ ID NO: 90540 - DNA, 1067 bp, Zea Mays
caaaaatggtatgatccactttatatcatcacatgatcttattgtttcatgaatcaaaacttcgtgtgctcttcaccgttgcatttggtccatcagctccaagtccttgctctagcttcacctccacatagtccatcacacctaagtctccaacttgccctttatactagcaattggtctatggtagcgaagccatctctcttgattttcttcaccaagccatatgacatcatgtcatatcttatatgtattaagctcctataatcaacattgtttgagcattgtaacatcggcgccaagtccttgttgtatatttatcgccacacggtttcacattctagcctccacttgcggttcactatagcaacatgtttgtcacagccaagccatgtattttgatcttcttcaccttgccacatatgatcatgtcatgtctcatttgaaataaactccttcaatgaacaatagtttaagcattgcaacataaccaagccacatcactaccatgactcatattgctcacactagtgtacgtgtgaactaatcaactaaatacctacgcacctcaactcaaacatatattagcctatataggttgtcacttaattaccaaaaccaaactaggacttcacccaccttccctgccaactaattgattatgatttctgttttgtacatgggagggaccttatggatctgaatccaaacttgcaccttgctaggaatcgccatcgatgttgtcatcccaccatcgaacttttccaacatttatacattcccctgaaagatctagggtctttcctaaacaatggtcttcaaatctcgcaagcataatgcatggatcagaaaacaagtttttccctatcggtcagaaagagatgtgtcatgcggccatgttgtactccatgttgccatcatggttgaaatcaggaactgttcgttgaaccgctttgtcgttagtagcgatgccaccaccattcacttcactctaatagattgttcgtgttttcatttgccaagatgacacccttcctctctatgtcgcttgaacaacttccttgtgaatc

SEQ ID NO: 90541 - DNA, 417 bp, Zea Mays
aacatacgcgcgcaacagcgtcgcccacccgcacggcggccaccatggtcggagtaacccgacccgacgattcagggccccagactccaattggatgtaagctacacgaatgtagggttacgacgaggcatgaggggagttattaccggcgattgggaccgtgttgcggccggtcgacggtgttgagcggaaccgaggcggagctccgactccggtgagcaatcgatggcgtcagaggccgtaattccttgcggcaaccggtccgagagcacccccaaacactggcttcaatccccaatcccccaatttcttggagtgacggtgttaatggggcaatcgaggtggctgcgcgaatggctccctcgcggtggtaatggcggcgcaaattccttgcggagtggtgaagtacgaacacag

SEQ ID NO: 90542 - DNA, 470 bp, Zea Mays
aggactcttataacttttcccaaaatttggccacgaattgggctccttgatcggaaatgatggtcttgggtatttcgtgtagtcgtaccacttgatcgatgtagatttcagcatacttttctgcccgtagggtggggtgtactagtataaagttggctgtcttggttagcctgtccacagtcacccaaatcgagtcatggtgtcgggatgtgttgggaaatcccataatgaaatccatgctgatgtcatcccatttccatgaaggtatatggaggggttgcaaggcaccagccgactttaggtgacttgcctttattctccaactcgtatcacactcggacacatacttggctatttccctcttcatccttgtccaccaatacaggggttttaggtcgtggtacatcttgtcgcttcccggatgcatggagaatttggagaggtgagcctcatccaaaattttcttccgg

SEQ ID NO: 90543 - DNA, 603 bp, Zea Mays
gcgaaccgaaacacatactggttggacttcttgtaagtaccgtgagtaatcgcgtggatatctgtgccatgataataatgattagggatggattctggtcggatatggatggaaacatatgtgtattcgagatattcgttattattaagagcttaccatattttaattcgaaaacgaatacaaatgttatcgaacacaaatacaaaacaaatatctcgaatagatttggatccagatgtttatgtagttaaacccaatgcaaacatcaatctgaataaagaaaatatttgttctgagttcgttaacaataaaggcaaactaaaatcaattactacatatactccagaaatgatgaattaaaattccaggattacacgacattcaagggttcaactacaagtgcattaaaattgaaaaacacaattatggcgttgacaacaccatagcaggcattcaacatgtgggaaaatatatagcaagttccagctccaagtagtcaagcacgtctcacctaaggaaatgatgatttttaatgttagtttcctcaacaatatggtctgcaatattttgatactaattaaaaaaccctttaataatagagtg

SEQ ID NO: 90544 - DNA, 573 bp, Zea Mays
gcaaggattagccttcgttgtgaggtcaatcgcgtagcgcacgattgataaccagaggagaagtggtgctgcgattacagggttctagtcgtgttgattggaagccggatcgtttgtgtgacatctccaccaaatcgatagttatcttcacctgacggaagatcaggcacccccgttcctatcaagtggtatcaaagcctcaggtattaccgtcaggcttaccctagtttagtttaggtttttcatcctataactccagataattgacacacaaaaaaattccattgtcatgtaaccctgtttagccttgcaatttcgtttcagattgctttgttgaatttgtgtccgtgttcgagtcttgttgctggtttaggtcgtgtcgtaaccgtagttcaaccactccatcgttgttatttgtttccgccgctagcccgtccaccttacccagattacaagtcgagacaccacattactcgatttgccctcgctagccgccttgtgtgaattctcgccacgctagccctagattaggttgcaagccgcattgcattgcaacccctccttgtttcatca

SEQ ID NO: 90545 - DNA, 428 bp, Zea Mays
ggtggcttgagctgatcaaggattatgaattagagattcactatcacccaagcaaagctaatgtagtggcagatgcattaagtcgtaaggctttctgtcattgtcttaccatgaagacttctgacattacgttatgccaagaaatggagaagttgaacatgggaatgattcagcatggaacttcaaatcacttgaagcttgagtcagtcatcctgcaaagaataattgatgcacaaagaaatgatgagggaatgaaacacattcatgagaaaatagaggtcggtaaagccaactgcttcagaagagatgatcaatgtgttgtatggtttaacaactgcatagttgtgcctaagaatgaggagatccgccagcaaattctagatgacgcacatcttagtcgctattctattcatcccggaagcactaag

SEQ ID NO: 90546 - DNA, 443 bp, Zea Mays
gcctcggtgtaggttgcgacataatctgatacactatcgtgcgtaggggtgcaatgggtggtgtcgttcggtcttctccacttgtcttatcacttcctcgataaggcacaaggaatagttgaggttattatgaagtgcgcccaagctgcgtaccgagtcaacgccctcgtcttgggaaagtgcggggaatagtgaacgccatatgctacagattgtgcgtgtcgcgtgtatttaatgtgagggaagtgtgtcgcctgccactgacatgggtaagtaggcatcccatccattctttatattggtgggccccaagccggagccttacattgggctcttcccgacggcttacatcaggcgtgtttggcatcggatctctacccgggcagggagcaagtccggaatcatgtggcatacctggacttcccataacctgaccggagagg

SEQ ID NO: 90547 - DNA, 591 bp, Zea Mays
gagtttgacaactcccacgcacgagctttcttcctatcccacggtgtccaccttcgtatgtcgtgtccctatacctcccagcagaatggtagagcagaacgtgtcctccgcactgttaacaacatcgtccgttccttactctttcaagctcaccttcctgctccctattgggttgaggctcttcacaccgccacataccttctcaatctccaccccaccagcaccctcaattactccactccccatcttgcactctttggtcgccccccatcttatgaccatctccgtgtctttggctataagtgctatcccaacatctctgccactgccgcccataaacttgctccccgctccaccatgtgtgtcttccttggttactcgtctgaacacaaaggctatcgctgtcttgatatctccaccaatcgtatcatcatctcccgccacgttgtgttcgacgaatcctcctttccgttcgccgagacccctcccagctcggctcttcccactaaccttgattttttggatttcttttctgaacaggtcccggttccatcaattagcgcattgccctcgtccactgctgggcagcgc

SEQ ID NO: 90548 - DNA, 775 bp, Zea Mays
gttatgatgaagaaattgggctactttggggaggccgagagcaagcttgtccggtttgctggggaagaggtgattccagaaccaaaagatgatgaaatcgtagtctttaaaagcttcttcagggcaggacttcgtttccccctgcatgagatgattggagaggttttgaaaatttttgagatatactttcatcagttgacacccaatgcaatcgttagacttagtgtctacatatgggccctctgaagtcagggtatgagtcccaatgccgaagctttctgccgagtgcacgagctgcattatcaaacgaaggcaagagcagatggtcttcatgagaacttcggctgctacaactttgcatatcggaaggatacgaaggccccggttctcagctatcgtaccaagtggccgaccggttggaaaagcgaatggttttacataaaggcagacgagaagagaagggagaagctaatgactatggttatgagtccattgaaattgagcttcgggatgacaaggcctttatgccacatgcagcttggctccccatgacaggtagtcgaagtagaattcagagtggtagcagccgaaatcagcactagagatctagtgcaagagtacttggcaaatagaatatttccgacttctagtggctggggaatgcctaagaagaaggagggggtaaaaaacacgaactcgttcggctcccttatcgatttaaatttgagaaacaatttaagaagccatgcaaagaatggttagaaatgattgaaac

SEQ ID NO: 90549 - DNA, 425 bp, Zea Mays
gttgctgcctccatgaccctacactgcttctgtagggaagccagaagcggaatggctccggccgcggcggcaacgacgaccgtggtcgttcgccagacatggccgcctcggggtcgatggccttgacggaaacgaaataactggaggtctctgcattggattagatattctatgtactactgcttagtttcatagatttctatttcctcggttgctgattgcttgcagcaaggtgttgccttgagcatgtcaacaaaggtaaggaattggggcttttccttggcttgcagctttggagaaaggatgaaccggctgtttgtcagctggactaagcagggtatcagattgggccaggttcagtaattggtatcaggccacttaaccatctgtcattttcaccgaacttcagtagttcacatgttcgc

SEQ ID NO: 90550 - DNA, 718 bp, Zea Mays
cggttgcatagatgattggctgtagtgcaagtgaaatattattgaatatataagcaagaggcaaacatgatatatgagaacactagtggtagtgggaatttagagaaaaagcccgttagcataaggtctatatctacaaaggagttggcgtgctagagaaaagagagactcaacttagacgttattgttgtctgtctccctagtgtcacgacatccaagatgttgccaccgtttctctcaccgcactctcaccgcacgtgcgtcactttgttttatattcatatctgtagataccatagaaacattgttattagtattatggtattgattaacaacaaacatgaagagtaagaggataggcaaggacgtacaactatttacactacattgtcgctcgatatttcgtcgttgtatgcctggttgtctcgcaaagcaaagaccggtcggaaggcccttacaacacgatacgaccacacaaacctgaaacgccagattcggatacacaacaatccacggtatccgtaccgttccaacattcgacgcatcacccgacgacccggtccctttttaatttactcttctttttcactggacgactgacggcgctgtacacttgcacagggaagatcaagatatatacgggaagcacccacaggcacagaacagaacgcttcccgtgttttggactaggcgctcgattcttcggttcggttctttg

SEQ ID NO: 90551 - DNA, 777 bp, Zea Mays
ctttggataatgataattgaaatacaaggtcatccgaacctatgttgtgcacaaaatttgtaatatatagtaggaactcaataaataaaaaagtcattcaggaggtgtttttataaagcaggcatcaagcatcgacaatctataaacaatgtgagcatccataaaactgattggccaagtattgcttcatagattagagtcagagaaagagggatgtccataatcaagccaggtagtttctagtcacaccatgtatttgaaacaagatcagtagtatgggaatgttggggcgtgagtgtgtgtctggacgtctggtgtctgtggggttgtttgggctcttgccccttttttcttcttaatatagtaatcagctctcctgcgttttttgagaaaaaaaaatatatcagtagtatgcgcagaaacagaggctagtgaaattctgttttgcgatatctgttttgggactaggctctaggctgaagcttggaagtgtaagccctgagttctgcacctgtttgggaggattcttacttttcaaaggataacacaaattaacttatctatagcaccaatttggcttgtttttcagatatgttacaggggctgatgttttgaatctggacaagtcacatactgaatgtgtggagacagagtgaagtgctagggaaggtggcgcagattgcttgctaaccacaattcagtgaaaagaatgtcatggaccactttaaaactattagaatagtacgaacatgcaaatggtcacaactccaacaaaat

SEQ ID NO: 90552 - DNA, 767 bp, Zea Mays
ataaaaaattatagcttgtgccggtccagcgatagtcagtatgagaggctcagcggttcgccttcttcacctgcaggactatataaacagatgggttggtaagaagttaccacaacattcattgctattgcatcgttgtgctgctgaaattttttactaagccgaagtctatgctctgtgcatttgttaactggtcttcgaacaagcgtcaaaacaattgaaagttagcttcgtctcaggaactaaaatggctagaattaggtctactgctaggctaataaacgagggtagctccaatttcagaagttatgaaattggagagaggctactgagacaactccaatttcagaagttatgaagcggtctgagttggttgttgaacaggaaaatggatcttttcccgagaaggatagtattaatgccgaagctgaaaacgttattgccaaagctggtagtgatgacgaagaagatgatggcatcttgagtccaagcaagcctattcatgttgaatttgggaaatcccactttgaaagcagaagacttaattctaatgaaaaagcttgggtattttgggaaaaatgacgatgaactgataagatttgctagggacgaaatgattccagagccaaaggatgatgaagttgtagttttcaaaagcttcttctggcaaggcttcggttccctctatatgaaatgatcgatgaagttttgaagatatttgaaatttatcttcatcagctgactctaaacgctatagtcagactcag

SEQ ID NO: 90553 - DNA, 337 bp, Zea Mays
tgaagagctagtggtatgagtacaacaaagaatggagttacgtcaaggcttgcacgtggtaaggaagaggatatttccaagggtaggataagtaagacaccgctctcagattgagacaaaaaagagattcaagtaagcatcaaggcaagatttatatattacaagggtaaggcagataacggaccaaaagtacaacgaaggattgagttaggacaaggctcgcaagtggcaaaaaagaggataccactaagggttagataggtaaattaccactctcaaattgaggtggaaaagagtaggatttaaagggtaggttcaaaataagcaccaaggtaaa

SEQ ID NO: 90554 - DNA, 462 bp, Zea Mays
cctgaaacaacctcccacattctcttccactgtagcttcaccagagccttctgggcgacagttggtgtcgacattaccactgatatgcaatgctctcgtctccacagtatcggttgcccctcgaccttacacaatgggatcttcaatagtgtcggtgtttcaaacctatgctctgacaagtaaatttgtatgtgtgtgttccgtggtccggatggtgtgctcggtgggcgcaagatttatattggttttggtagaacgttcctacatccgatcttcagcgactcacgctaccagcacctttgttgatcaaggctcgtagtaggggttacaagcggatgagagagggaggagctcctaagtctcttatgcatgggtggacctaaagactatgggactagagttcttagctaagctttggacgtcgtggtggctcgcgccttagctctagcctctaggtcttct

SEQ ID NO: 90555 - DNA, 694 bp, Zea Mays
tttgttggttttggctaattttcatcggttcctcgccgacacccattaaataacgaaaacttccatcagcatgtcgagtcgacaaaatttgttaatttatgggggtcatcgatgatgacatacattaacttttgcacgtagtaacctctttttgccctggtcgacggaagttgaccatccaagataactttgggcatgggtgcagctaacaaaagttacttcttttagacgataaataataccttttaatttatttttcaacagaaataacatgtttatgcattcacagtatagatcaatacaatcacagctcatacatcattgtcatatatcaaaagttaaaatattcattccaaatatccattcacatatctcataattgtggtatcaaatatcgcacgtaagtatctatggggcaagtcaaattaacaatcatacccattatctaacataaaatattttgcgccacttggatggtcggagtttagccaccacctctagaagggccagcgaatcttgaatttataaattagtgctagcatcccctgatcccaactacataaacaaaaacatgtgattagctacaattagacattgatatggaaaatttgagaacttacgaagataacaaacactaaacacacctgctctttaggttctcgtatctgtgtatgtagagtatggtaactttgag

SEQ ID NO: 90556 - DNA, 1195 bp, Zea Mays
cagagggcgggtacatgtgtaaatttgaatggagcgggtatgggaaagtgggtcaacgggagcgcgctcgtagacgtgttttgcggccacgaggtaaggttctcgatgccctatcgtggtaatattcaattggctgggccgacaagctatgttaacattcaaggatgctagaacatgacatagaggggaaggaacgaacctgggaacggttggtcacagctgggtgcctcacagcggcgtaaatgaccacgatggggaaaaactggaattggtgagctccggtgggtaattggaagcgaggaagggtgcgctaagcgtgtaactagaaggcggatcagggagagcctttaatttgtagtagctacgtgagtgctttcgggaatttgggatgaaaggatctcacggacggaagggaggtgagtcaccggagggcaactgtcgtggcgctcggtgaggtaaggcccctggcggtaaatgggctgtccacagcgacctattgcgacgtggtaacttctccaagcatgtcgcatcctcgaggcgagcggaggatgccaacgaggacattccggccggtcgcaaaacaagtggttacggtggctagctcacaaacttatccgtagtcgcaatcttttcacttgatcggtaatattcgtgttgatccgtgcacgaattttcacggcaagctcgaatcgtggcgcccgttcaccggcggcgaggtacactgcaccagaatcttcttcagtgtactataccatggcaatgttaattcagcgcgcctgacagggccatttgagagtcatttctcttcgactttcgttcaacaacctaccaagccgaccatagcaaagttgttgtccatcatgtctgctttaaatttgttatagggttcttgttcatacctccactcgatcaagcacaattcagctctcaagttgatctaatgccactgtcagtctaaccttcaggccaaaccccgactgatagcccaacttccaggccattttgctccaatttttgtacaactctagggctcactcccttaatcaaacttggactactttaatagctctacaaatttgttgtagtgccccattgcaaaatccccacggatcaaaattcatcacaatatcactatttttcagagttaagcatttaggtgcctttgggacctttttgcaattttctccaatttgtt

SEQ ID NO: 90557 - DNA, 587 bp, Zea Mays
gttgtcgacgttggagactttgaagataggcagccattgaattgcccaaagtcgggtgaagggtcgagaccccgcacgtcccccagtcctcctggtgatattcttgggcatggtcgtgatgatggtccctgggaggtgagtgatctcgtgtgtcatgtcgcctctcccgggctgaccggcctagagccgggctattcgtataggctacttccaactcagctctggtggcacggctacatgccggtgcaccatgatctcgatcatactcttccccctgcctcatctccttttcgttccagtgaccgcgtgaagctttgatgttgcttcgtatgtatcgccaactattgatggcatggcgtaggtcatttgccggatggatgagggtaagaagatggttcgctgcctgggtgagtatctgccagtagccttccacgtctaggatgcgcggcaagccattggcgatctgagccaaggctccaccgacttcactcggcgtgttcaatgtttgagcaaaatcaggtggcagattccgagcaagaagcgggttctcgtgtcaaagcctgtcgtcctgctcagcttgttcccgc

SEQ ID NO: 90558 - DNA, 290 bp, Zea Mays
ttgcagatgctttgagcagaaaaagtcaagtcaacaagatggtagctcatccgatgccatatgaactagcaaaggaatttgacaggctatctcggatttctaaacagcacccaaggagtggcagttgagttggaacccactctagagcgagagatcaaggatgggcagaaagatgatgagaagatcaatgaaattcagcagctgatcttagatgggaaaggcaaggatttccgggaagacgtggaaggcgtagtatggttcaagataggctatgtgttatcgagatcaaa

SEQ ID NO: 90559 - DNA, 828 bp, Zea Mays
gctttgagctgtaaaggtcaagtgaacagcatcactactcatttgatgtcacaagaattgtgctgggagatggaacaactcaactttggaatgcttaataacatggaagcaacagttatggaagttgaatctactttggaagaagggattcgtaaaggacaagggtctgatgagaaattcaaggaaattaaggcacaaattagtttgggaaaagcccctgatttcacagaagatgatcaaggcacagtatgatttaaaaagagaatctgtgtaccagaaatcgagcacctacgccaacttattttaagggaagcccatgattcagcttattctattcaccctataagtactaagatgtaccaggatctaaaggaaaagtattggtggtatggtttaaaaagagatgtggctactcatgttgcactatgtgacgtgtgtcaatgagttaaagccgaatataaaaaaccagcaggattgctacaacctctcaaagtaccagaatggaaatgggaacaaatcagtatggatttcatagttggactaccccgtacttgggatggctatgattcaatatgggttatagtggaccggttgactaaagtggcacactttatacctatgaagacaacttactcaggagcccagttagcatagttatacatgtcaagaattgtttgtttgcacggagtagcaaagaagattgtatcggatcgaggaacccaatttacctcgcgcttttggaaaagactacatgagtccttggataccaagctaaactttagttcagcttatcatccgcaaacggatgggcaaactgaaagaacaaac

SEQ ID NO: 90560 - DNA, 391 bp, Zea Mays
gaaggatctggggtcgtcgatgcgtttatgctcggccaagatcagatcgggataggattgtcgtgcaccgtcggatccacggttgaccgctaggatttaaagctgcgtatcgttttgctcgggcagtctgagaccgtagatgtgagatcctgcggtagaaagcgattctgggttgcattaaacgcctaccgttagatcgggatcggagggggcctggtgacgtaccgattcataaggctcggttctaatcgtggccgttcatgcatgatctggcggccagattcagaccataccccttcgccatacacatttcatagaaaagaccccctgttactttagaataaacccgccatcctcattcactattcactgagtcttggtaagcttgcgc

SEQ ID NO: 90561 - DNA, 591 bp, Zea Mays
caaaaatacaaccctagagaagtaccttcaagttgttcaaaggatggaagcgtatttcaaaggcttcttggtaaaaaaacattctaataggcaaaagtgaacaagcaaatatactcaccaaatctatggcataggggcttccgctactagccaaagtattctatgaagtgttgatacactaaaggtcaatcctaaatatatcaccggttcacagcgatggttggaagtccaaaatgattgccttcttaacaagtacacacccaacagaaaaagcgtcctacccctatctggtttgctaaatgtcattacagaacaacaccggcttacataaagttctaaaaagataaagatttagagagagtggggcatagtgcggtagtgtggtacacctagacaatttagagaggtttagactgtattttgagtaatatcccatattctcttgctactcatcggttgatgaacatagagttgaagatattaccacttgagtaataccccataaaacattgaacatcatgacctcctaattccccttaccacttggttctagtgggagttctatccttggtcctaatccacatttatgct

SEQ ID NO: 90562 - DNA, 449 bp, Zea Mays
gggacagatatccctcgggtccactcggggggcgaaaactctgctcagggccacatgccagtcgcccctcagtgacgtctcatcgtgggatgggcaaagggaacagcggaaacgggccgacgcaggagtgcgatgggcccacgcccggattactcatggcttgggcgtgatcacattgaagttgttcgtttttccgcgcccgacatcctcaaacgctggagatagctcggggcggaggcgacgggttttcctcggaatagcgaagcttgttcgctattagctaggagataagcaggaaaagtgtgatcagtgtgtacgcgggaagcaccctacggtcgtgtatataaggccaaggggatccccatcaatttcatctcattagcacctcatacttggtagacaccacttgtaaacacttcccacatacaaagccatcccaggaagtaggg

SEQ ID NO: 90563 - DNA, 586 bp, Zea Mays
aggtactgtcgagctacaactcgatcgtgcataatatgtcttatgcacgatgcacgatcgagctgcaccaagaaggggaggacaaacacattctcagatttgcaactgatggcaaacactaagctaaagctacttatgaaagcattttcattagattagtccagtttgaactttgtgtgagactttggcactcatggctccatcgaactgtaagttttttatgtggttatctgaccagttacaaaaacaatggcttgaacacctggaacgatgttcgctttgatcaagaacatgggtccatagaccatctgttaattggatgtgtatttgcgaggaatttcatcaacctctaggtgtaaggtattgctgaaaagggacttaataccttaatcttccttggattttggaccctttggaaccatagaaatagttgagtctttgggaataacaccccaaatttagaggccgtcattagaagggctgaggaagaagagagtcgtgggagatggcaggggccaagcgtgtctctctcctaacacccttaattctagggttgtaggcttttggtaatttcttaggagttttt

SEQ ID NO: 90564 - DNA, 418 bp, Zea Mays
acgctccaaaaccccagcctgatgcacacaatctgtcccatgtgcatgcaccactcgtaacctagccttatttctgctctgtcccatctgctagctgcactagaatctagtgatcttccatggtacatctaaatctaaatgcaaccttttgcagctgccatttctactctcatgtcgtcactgctccaacatgatcaaagaggacatgttagcccttatatagggcgcgcgagggtggtgtgtgaggttcctgcctgttcctgtttgagattgctttgcttgtagatgtggcgatgcctagcctgtcctatgtggtctttcctgctttctgaggaacaagggctagactgtttgaacaggggcatatgctacttttcaagcatatttgaatcagaccacaacactctcgctccaagga

SEQ ID NO: 90565 - DNA, 407 bp, Zea Mays
aggagtgatccgtccactgtgggttcgaggttcgaggccgcccgtgtgcttgcttgcttgcgttgcgcactgcatcgtttgaccggggacaatctttctcttccttgttcgtcgccacatcttgtaactgaagcctactgcatgcccctagtatctactaccgtcgtcactcgtcgttactcgttccctagttaaacatggttcacaattaattaattgtagcaccatcttatcacataaatgctgctacacgtgcgacccgagtggtagatttaggatgtgtttagttgcaggatagctagagacggacaagataaagacgtcccctgtcgttctctctcgtcctaggacaactgaggacaacattgagatagttctgttccaatatctgatcctgaaccaaacaa

SEQ ID NO: 90566 - DNA, 359 bp, Zea Mays
cttaaccatattccccaactccgataaaatacactaaccttgaatcaatgagactaagacccgaaaaggacaagatcaacctcgtcaaggaaggagagaagtcaaactcaatcctcaaatacattaccacttaacacggaattctttcccatcataaacttgcttaccctaggctattcttgccctaacctatcttgcatcctacacaataaggtgactatacatatatatacccatgctttcataaccactttctaaataacatgaaacttattcataaactaattagaagttaaaggctaaactataaataaagctttttacatccctgtccttacaaatctcgaggacgagatttc

SEQ ID NO: 90567 - DNA, 364 bp, Zea Mays
aaaaagaggtagaaacctaaatgggcctggctcctcaattcagcccactagcgcttgcacacgtcaaaaccctaaccgcctgacctccgctcgccgccatgcgggcccacgtcgccagcctcactcctcaccgcacgcgcgcactgccgcgtgggtccacctggccagaatccctatcacacgtcgcagccgcgtatcgaccgaccgtatttccattccgcgttctctcgccttgtgtcactggtggtggggccggatggccaggtccgtctcctccctcgaatccgcgctagagcttcttccccgcgtgaaccggatcgcgctgaccagatcctccacgatcgcgcgactccctcgccagctg

SEQ ID NO: 90568 - DNA, 601 bp, Zea Mays
ccgaacaagagccaataagtacaaaaacgtggtgtgccaacctattcggtcaaaagcccttgcttaatttgaaggattcaaccctaattggagctcgttcacaatcacggcggcgaagcgaccctggtgatcacgttccgaacaaccaacgacatgcatgctaaaattgaagctcggggaagcttcaagggttcaccagaggttatgcacacgcttgaatttggactaagcaagaatagaagagcgggtcgacagagagggtgtctgcggcggcgttctatgggacgactgggtgttccggagggtgggctttggtaaagttcaattggccggctccgagaacaatagaaggccaaagacaagctagaacaggaatcaatttggtaggtactaacccgaggagtgctggccatggaggggtccttcacggcggtgctaagaacagggaggaggggatttgtggaatttgtgagttctccagtgagattgagtcgattgcacaagtgctcgtgtgtgtgatgtggtgaagaagcagtgctcgggctcaatttataggcagatggccggagatggatgaggttcacggagctgtaaacgcgct

SEQ ID NO: 90569 - DNA, 688 bp, Zea Mays
gttgttgtatgagaattcagcgtacggcaaactagactcccaatctctgtcgaaggctaatacgcaggctctgagtaaatcttcaaggaccttgttgactctctctgtttgaccatctgactgggggtgataagcagtgctgaaatctaacttggtgcccattgcttgctgaaggcccttccaaaatttcgaagtgaactgtgttcctctatctgatactatcttccgtggaatgccatgtagcctgactatctctttaaggtataaccgggcgagggctgctcctccaaaagtggtctttactggaatgaaatgggccaccttggtgagacgatcgattattacccatatggaatcatttcctctttgtgatctgggcagcccggtgacgaaatccatgcctatttcttcccacttccattcgggtattgggaggggttgaagcaggcctgcaggcttctgatgttcggcctttgttcgctggcaggtgtcacatcgggccacatactgtgctatttcccttttcatccctttccaccaatatctggtcttaaggtctaagtacatcttggtggtccctgggtggatagagtaagctgagttgtgggcttcatcgagcagggtttctcgtgtttctcccactggcacgcataggcgatccttgaaccagagggctccttgattatct

SEQ ID NO: 90570 - DNA, 588 bp, Zea Mays
gggagcccaagtcttccacaatcttttccatggctcaatgcgtactgatccattaagaaggctttataacaagacttggacgagaattgtctgaaggcagtgtgcatccaaacatgtatgtccgcatcctgtgaaagtgttaccccctcattgcatcccataaattcaaatattgatgtagcccaattggagagagagggttcacaatatcactaacccactgccaattatcaagcacctgagctacagttctggtggaaatggctcttcggccaaccatacagaccacagctggtgcaatttcctggatggcacttccatttaataattttttctcgaacaacgcaggagatctatgtgtcatttcattaagaagaaagagagaaagtaccacatacatcaaatgaccgaaaacaaccaaaaccacaagacctttacccctatagctagggactaggcaactaaaaactttggttgtaacaacggtgacacctagaccatttgaatacaaaaaccacagaggggtaggccatcaagacctacacattcgtagctcgtgcccagaccaggaagtcttgcagtttggag

SEQ ID NO: 90571 - DNA, 695 bp, Zea Mays
cagcatccagcacgctggccatcctcctccccttgggagttgcggcaggagcctttggcaccttcgacagttttgcctctgctggagggcttagaatttatggcattttttcttgtttttcccacctttggctcttcgaccttatcatccttagcttcgactggcccgactgtaggcaccttcggcactacaatcggctcttcagtgctctgcgtgatggaggcaacttgttttgcctcggtagttgaagaggtcccctcaccgaattcaggcactatggccggttcgatatatcgcagccggtgggtcagaaccttcacttttccccttcggtacagctgtggtgaccagagcggcaacctttctcttctttccctgccttcatagcgggtagtgataatcaggatacacgaagccaatcgcatcaaataccctgtttaatcttttcttgcctcggcccccaaaggctacggacaaggcatcatcttcggctttggaatatgttccaagcagctcgtcactggtagcttcaagacacttcaaccagtcatcgtttggcttgtcaaacttctctctaaacttgaaggtatatctcaatcgaaccaggccaccttcactggagtcggcagtagtttccttcggcatatcccagctctccacaagtggccacaccctgaaggatatgtgctcttgaa

SEQ ID NO: 90572 - DNA, 743 bp, Zea Mays
cagaaaaggaaaaaataagaatacttaccattcctaactatgtgggatgatgttggccgccgatgtcgctgaggcttgcatctttgtaatggataaggaggtcttggtgggaggggagggatggaagcagtcaccaatcgaagggaagggaggtgagttgttgttgttgagaggagaggaaagcaagtagttgcaagaggtagggaagatgagtgagttgtcgatggttggagagaatggtggggaggagagtgagttgctgaaagcaggaaaggaggaaggggaggagagtgagttgccagcggtgggagagaaggaaggggaggagagtgagttgccggcggcgagagagggggcaagcgactagtcatcgaaacaaattgtagatctggatggagatgagagagacgattagaggagggtgaggaatgggtgtccataacacaaaaggtgcaaatgaggacatctccttggggctttatgtaggacaagttataaacaaccattgtgggctctcaatcatttgtaggtggcccagttagcatagactaacgagatgctttatatggtgttaacttcatttttgtactcaccaaattacttaggatatatgcttgaattttactaaaccacaatagaatgaactaaaaagcttcataaactcaaccaaaccccaagagttgaactcatcactaccaagtaatagagcttcaatgatgtttttgtgagtctcaataaaaaac

SEQ ID NO: 90573 - DNA, 359 bp, Zea Mays
aatttataggatttgggggcggcgaccagtgaatttggagttggcgcggtggcggccggagaaggaagaggtcactggtggcgcaatcgtggcgttcaccggtgcagtggttcagagagggtaagctcaagtgtgccacaattactaccgcgtagtaaagagtcacggcgtggcataattgagatcgccggagtgtccacgacgacaccggcggtccggccacgtcgcaacgaccacatgcacagtgataagcttcccccgcgaccctatctgcctccccgcgagatctttcacctccccgtgaatatccacagcgtgcccgacacgaatcccggcgaccggcgcaaatccggacgcgc

SEQ ID NO: 90574 - DNA, 875 bp, Zea Mays
cgaatgcatttgtgaactatatgtgtgcgtgatcagagcgcttgggtactcggtggataggatattagaatgtgttcttggcgctgaaagctatgacattttgtatctgttgttagaattcaaccgtcgtcatgaacgattgcagaagtaagcgtggcgtgctggttttggagtcttttcctaatttatgccaattgatcagctggtaaggcatagaggttgccctatgacgagtagttgcgagcatgttacaccgtcttaagtcattgctgacttaggccgattgctctgttagtagggtatagtggtcaccctaagtcgagtaagcgcgagcatgttgcaccgtcttaagtcattgctgacttaagccgattgctccgttagtagggtatagtggtcaccctaagtcgagtaagcgcgagcatgttgcaccgtcttaagtcattactgacttaagccgattgctgcgttagtagggtatagtggtcaccctaagtcgagtaagcgcgagcatgttgcaccatcttaagtcattgccgacttaagccggttgctctgttagtagggtatagtggtcaccctaaattgagtaagcgcgagcatgttgcaccgtcttaagtcattaccgacttaagccagttgctccgttagtagggtatagtggtcaacctaagtcgagtaagcgcgagcatgttgcaccgtcttaagtcattgccgacttaagccaattgctccgttagtagggtatagtggtcaccctaagtctagtaagcatgagcatgttgcaccgtcttaagtcattgccgacttaagctgattgctgcgtttgtagggtatagtggtcaccctaggttgagtaagtgttttgattccaa

SEQ ID NO: 90575 - DNA, 670 bp, Zea Mays
ttcggaaatcgcatactcttagctatctcccggcaaacagatatttctttgttgtccgggagacaatataggaagtcgtcatcgttagtgccattaaacactaaagctcccttcagatatttcaattttcgctcatagtgtctggcttccagaacttcttcttcggacaacttcttccccgaagcatgacgataaatataatcagcatcctcgacagcggcttcgggggcaagatattttgccctttctgccgcgtcttgcccttctgtcataccagcatctgaagcctgttgatcagttttatcttcaggcgcgacggccttcgtctcaataggcgctgcaggctcagcttcggcctcggcttggactttagcagcttcagcaattttcttaataggaccagggctcaaggcctttgcggtctccaagacagcgtctagcacattggccatccttctcctcttgggagttgcagcaggagctttctgcacttctagcaattttgcctctgctggagtacttaaaatttctggcattttcactattttttccacctgtggctcttcggccttatcatcctcagcttcggctggcccgactataggcacctttggcactacaatggccccttcggcgctctgcacattcggagcagcttgttttacttcag

SEQ ID NO: 90576 - DNA, 433 bp, Zea Mays
tgaaggtgctggcaaaacatcaaagaagaatgccgatgccgaaacagaggatgataatgaatccgaacatgacgaagagacaccttcgggcctggcaaagaagaaagtcaaaatttctgtgaagaaaggtacaactgcgaagaaaactccagctacgaaaaaagctgcagctgcccaagagcaaggaaaggatagcaccacgactacctcgtcattcggttgcacccggattctcgaggtaatgactcgaccattaccattctccactctaagtccgttgggaccgacattaactcggtttatgccaactacgaagggtactgacgaaggtggccaatcatcgaaaagcaaggatattttgtctaaagaggaagtagagagcccgcgcattctgggtcttggaggtgctgccttcggcggttcatcatcctcc

SEQ ID NO: 90577 - DNA, 594 bp, Zea Mays
ctgcaatcgtgtgatttggcgacatattttgccagattatagtctttattgatagctatattagtatacttaatggattttgtcatttctcagtggtgcctttaactgcaattttggttgtttgtttcatttccatcacattttagtaataatctaaaacagtgtgcatcttagtaataatctaaactgatgtgcagggcctatcttagagtcgcggtaggagccttccaaaagcaaattctccatcaccaatagcatcatagaggtaccacacgcagggagatatagcaagggaatgaacatgcaaattcttaagcatgccctctaggcacccagacaaaccgtagatgaaggtgatgattgctcgctcgctcgcttttattttttggttcttctctctgccatcgaatgtcatgatagatttattgattaattaatgtttctcaatcttcaaggaggttcaatgcaaaattagatactctttgttttcactcaccttggaattatttgcactgttcgagtatgagttacaatattgtgctttcgattttggctgcaaacaaggtgtcttcagtctggaagagtagatgttta

SEQ ID NO: 90578 - DNA, 484 bp, Zea Mays
cacgaagacacttcttcagttgagatacgtggaacacattgtgcacatcagatagattatcaggtagctcgagttgataggccatctctccatcttgcctaaaaaactctaaagggtccaataaagcaaggggacaatttgcccttaactttgaatctcctcattccacgaagtggtgacaccttgaggtacacataatctccttcctcaaattccagtggtcttcttctattatctgcgtagctcttttgcctggtttgagctaccctcaaattctctcgaattatatgaacttgttcttctgcctcttgaataagtttgggtccaaagaactatcttcctctagcctggtccaaaaatagaggagccctgcacttcctgccatatagagtctcgaacgatgacatcttttagattggcctagtaactattattatatgagaactcagcataaggtagactcttgtcccaactactaccatac

SEQ ID NO: 90579 - DNA, 472 bp, Zea Mays
ctgatgaaccaggctgactttggagctctattgttctagaaatacaaaagatttgcctagggtcaacacatcaaaagtctagagctactatagaagtacaactttgcttaaggtattaagcattgttgttatgcaaagttgggagaaaactaggctcaaagatgtgctgtcagtcagccctatgtctgaattttcagaaactgtgaagttggatgaacttagagctcgatttgagtacaatcctgtgactatttgatggtggacattataacaaagttaaagctggtttgttaggctacaactttgatgcagagagttggtcaggtcgctacataaaatctggagcaaatcgacccaaacatgctctatcagaccgactgaagaagctgcgcgatggtacagtaaccagatcagatcaccagctcagtaaactcaccgtcggcgaccctcgcgcatggattcacgccgccac

SEQ ID NO: 90580 - DNA, 378 bp, Zea Mays
tcggccgggatcatatcgtctcactcagatggacggcacggaaattgggaactcatggaatatagaacacctcaggaagttttatccctagatgtatttcagaagctatcgggacgacaatgtactctgtaaaatgggaaatatgtcatcaataaaaaaggcttcaagaatacttagttcgttcatgatcgacctacattcttacttaactcggggtgaccactatgccctgctaacggagcaatcggcttaagtcggcaacgacttaagacggtgcaacatgctcgcgcttacttaactcggggtgaccactatgccctgctaacggagcaatcggtttaagtcggcaatgacttaagacggtgcaacatgctcgcg

SEQ ID NO: 90581 - DNA, 414 bp, Zea Mays
gtcataggtgacctcattcgtatacctttcactgtccctgacggctgggccgctacgtatacgcgtacgcgtatttccgggacgtgggcgccgaccaaaacggagaaccagatttccggcgctaccgccctgcgcgcccccataaatctcttggtcctggcagttgccgtctcggtcgccctggagaaaagcaccaggcgtgcgccgtcatattcacagccgctgagagaaacaaaggaagcagagagagaacgtgagtgttgttgtcgagagggtgttcgacaagtcacgcactggacgtccaggtattttctgtgcttgcggcgtggagcgttctgggcctcctcgccgggcattgaggacagcgcgggcaccgtcgtctggttgggtcgcagaccagggcgtgctcgaaag

SEQ ID NO: 90582 - DNA, 883 bp, Zea Mays
ccgagctcgaaacaagtgtcaagaaaatgaagaaaggacatgccaacatgcacgccactgttttgggagaaaagatcggtgatgccctagtaggatacgtagttacttgtataatgttcgaggtcatggttgtaacttcacacaaagttgtacgtcaagccatccatataaataggtgaatagttcccatgcaggggacgagctaagaaacacagagaacatgcctatgtaatctcgagtagcttaacatttgaagccttagagcactcgagcaccccatcatcctttgtaccctttgaaggtactcttgtaaatatttatttatctgaaatcaaatagataatagatgacgaagttgatttatggtgtaatgattcaaaaactttgttccctgtttcagtgcgaattcataaccattttaaccttcactctttaatatattttgtccttgtgaatagattaaagaagagaataccatattactctaattatgttgccctattttggtcctcttcatgaatcttaacatgtgaccaacacaatgtttcttagatcccacacatcttaaattacagttggggtggtatttgtatcccccatatccaaactagccattagaagcagtacataatttttgcatactcagcggatactccgtgcacccaccacacatgttcgatgcatgtccacattagctagccgctgggagggactatgtcattgccgaccattgagctcaagatattgagtgctatgtccggtgaggcaccatagactccagtgtgttgtaagctcgctcgggttgcgttacattctctaagtaccttgtctagtggcacatctgatatgtcaccgaatatgtctggtgccttatggatctccc

SEQ ID NO: 90583 - DNA, 464 bp, Zea Mays
aattggtgctatgatctcgatcccccccaatgatgagattgttcatgatgggaagaacaaaaagcctctggacttgcccgctaacacgactgatggcgtcaggaaaagttctaggttggagaagaatgatgatgtgaaggtggccgacaaagcgatatacagagcagaagccaaggatgccttcctcaataaaggtatgtgttctaactccttttccttgcttgattctaataatgatgatttgatagatttagctaataaacttggagtttctttgggtccctctgactctgatgttattgataatttggagttgatcaaagatctggaacgttccagaaaaattttggccttccaagcttgcaaaaataaaaatacctcaaatgtggaggtcccctcccttgttgatcacataaatatggatagtagtgtccatgatgattctgacctgaatattgatcagg

SEQ ID NO: 90584 - DNA, 665 bp, Zea Mays
atctgagtacttcactgtgttcatcgatcatcatcgagaatatcaaaccatttcttagcatttaagtatatcttttgatacttttggtgttttgtacgattgggtgaaactttgggatgcaaaccaagattgcctttgagaaaaaaaatttattggctcccattcacccaccccactagtcgcttgattaaatccttaacacatgaacacaatttacaatacatgaaaacatgacatcctagtcgctaccaccttcaaagagaaactccttgttctggtcgtagtcctcaccatcaggcaaaatcacattcttgtggctcaacttagcttccttggaccaatattcttttgcgtgaagtaagtggtctccacatcatcaatgacctaagaaattagacatgaatgtatcttcctcctattacgtcttttgcatgtattagtttatttcgctagattgatgaaatcacaaagtttagcagtgtcctcctcatattccccaccctcatcgacctccaaaatttgagttaacacgaggcgagtagctttgtttttcttctcttttgtctttcttttttcaaacctgtcctatgctgccttaggggcataatcacagctacatggttttcctgcatggatgcatacaaaaaagctagccaactcaaaaa

SEQ ID NO: 90585 - DNA, 1047 bp, Zea Mays
tcgatttttttttattgtagagcatatctaataagtacacacccaattcaggaaagcagggatcacagatagttatataatctctaaagatgcaggaaacaagtagaggtaccgaggtttagcgcgaacttcgaagcagccgccaccaccagcagcttcgtcgtcctcatctctgcaaatttttaatccagtgcacttaacaagattctcaacaattaaaagctatcgctccccctggtaatgttgcacttcgctattatgggcataaaagatgcactataaatctagcgcatgtatctttatctagacaagtagcgtagcatgcaaagatatacaatagacaaaaccacgtacacttaacataaagcaaacataccttccaggcgtacgtgtcaccatttatgatgatggtgtagacatgaacaagtaccctttcgaagcatatatacatcataactccaaaatagcagtagtgcgtggtgaccatgtaccgaaagcatttgctgcaactgtgtcagcgaaagacatgcattcctcccttctcactcctcacttttttttgtttggtttctcatattttttggctttttgtttagctgtatttgtgatagttggaacgggccttcactgtgttatcatgcattactaatcctatttgtttatctagattgcatatgaagggcatcgcattgatagatttagtgtgttgtcccatggctgtagcacacttaactcgataccttgtttccctctccactcctttcagtatatccacatcaaaggtgaacaatgtaatggtcctcattgtaggggtaaaacattctgccatgcttttttgtctaagtagtatttgttgtacacaaaatcagatatctgatgcaatgcttgagtcgtagtttaagtaagtcaatctagcagcttcctacatgttttgctattacacatccatgattagatgatatctcaattggtcataaaatggaattgctgataattttcaacgaaagcgaacaaaacagcgaacctgaacattgctttcctccatca

SEQ ID NO: 90586 - DNA, 644 bp, Zea Mays
cttacctcactgtgcggcccagcatgccttcacctgggcgcacaccgtgctctcaccggttggtgggcccgcgatgccagacccttgtgccgtcgcagccacgacgcttgcgcttgtcgctttcactggtctgtgggccccagtcgtcaggtccatccccaccccaagttctgttggccgctgcaacaaaccacgacggattcggcattgtccggttgtgcgccacctgcgcacccaacctccgtgatctacgcggacctcaggaccaggtcggccatgctcgtcctcgccctaggctataaatctggccccgcgacctattctcctcaccccatcccagtaggaagcgccccgccagaaatagagagagggagaacggagaacctccaccgtcgaaccaggggaagtgtagcgccgccgtgggtggaaccgtggagtaccatcgctcgggctcttgggcagagaacttcgccgaaccccagtgatttgctcctggacatctcggatggggaaactaccttggctcgcccggatttcttgacggggttggtgccccgccgttgacccgctgtgctgtgtgggcaacatcgctactgccaccctatccaagtaagcccaaaccgtaatcagttcaatatgctccg

SEQ ID NO: 90587 - DNA, 565 bp, Zea Mays
cccaacaagggggtcttactagcatttggagagatagcagaggtcaacgacgacgcacataggggcggggatagcggtaacccattggtccaccgaccagactccacggcaaaacgacgatgctgatgattttgtggtatggtggctctctctcaggtcggcaatggcggtgctcgtacttgttggtcatccttgttttgatgggagagaagtagtacatgtgcctcatataaatactcaagggtggagcctgagtcaaggaacgacagccgtatcctaacaaccccgccctggatcgtaacaaaccaagccgacatcttcatggcggcaacaataaagaagataaacagcgtaaaggggccccaccagccatcgactgtttctgacaatgctcggcaactagtctagtgaggcccacacgttagttggagaaacgaggagagcaaacgcatgaatcgaccatcccagcgtgcatggcacaggatcagttcccccctgcggcccacatgtcattgagggcagcagatgtcatcgctgacgtcaggatgacacagggtgatttttt

SEQ ID NO: 90588 - DNA, 312 bp, Zea Mays
ccccttgccgctcagatgccacgtgcctagatgcagtacttcatcgcggtgactcgctctagcatgtcaggtcatcgccggtggtcaggccatggtgaaagccaccaattgtttgcgccagtgctctcccctctctccggccgccagcgcgccattccaaattcacgagccaccgcccttgagccttataaattgagcgtgtcatcagctccgcttggtagtcaagcatccagcgtacccactcgtgtctcagattgtccaccagagagctctaatttgagatttcccccaaatcggtcaagaacaccgaac

SEQ ID NO: 90589 - DNA, 559 bp, Zea Mays
catgggatgtgccaagcacatcagcacatgtgccagtagcagtgggtgctgctgctactggggcagatgttgctgctcctgggttaggtgctgctgttgggttagggtctactactggggcaggtgctggtactggagcatgtaatattgctagagcaccaatggggacgccatagcacgtgtcagtgatacttctcagctaaaagtaaaaaaacaatgataaaatgataaatgaataacaaattgcaactattgtggagtatcatttgcaatacttaaacacaacatatttgcaacttaccctgaggtgtccaaactcggtggtgccaggaggaacatctcccctgagatccttatttgctatcgcatcaatcatcttcgagtccaagaaagcatatcgagggattgaaaagggacttgtgtcaaatccatgttgcaggttgtcgacataaagcatctgcatgttttttaacattaggtaaaagacacatgggtattttaggttgaattcatataatgaaaaaaagtaaaccaaattggcacaggtgcaataagccag

SEQ ID NO: 90590 - DNA, 1068 bp, Zea Mays
agaaggtttcatgacagctggtatcggagtgaagcccatttcttcggacattacataatgcttcagaagattttaaaatacgtaccttggaatattcattcactcttaccttgatcctttcttataacaagtcgggtgaaagagtgcaatatatatataccaggggtatggatcaacaagtagttgattccataatcgtaggtcatgcatggattatgtttaaacaatactaagtaatattcccctcttatagagacatggcacgcacaaagactacccttcggaaggtgaccgaacctcagggtgtacctcgtcactaggtggctcctcgacatgaggggagcagtagtgggagtaatgatcccctaggagatctggaggccagagttgaacgtctaacgatggaactacaccatggaggcagggagcgtgcgcgtgatagtcaccgcatcgctgagttatcaatagaggttgagcttttgcagcgagagattgtggagggggatagggctattgactaggctgtaaattcacgatctatagcctaggattgcgaggcgactggccgagcctgggtggaagagctaaatgtagccctggaaaatctgcaagtgtataataatgctctgcatgaggaagtgcacgtgttgtacgaccagttacatccaaacgtgccaccggaggttgcggcgatgggaggtggtgcagcaggagcggatgacagaggaccttatggggagttgtatccctttggagcccctccttgcatgaacatcgcggatgatcgtcctcccgaagctagcagtggagcgagagcagacaaggatgtagaggactagattagtatagtagtaggttgtttccttatgtagtctaaataaggaaaaatgagttgtataagttgagtatgtataattagaacaagtttggaataatgtaacaaaggttgtgtagttttgatgtgtaataatcaagtatgttttcttctccagatgccatcaagaactcatggtcatgatggggctagaacttctcgaggtggggaggaaactccgatcccactgcctg

SEQ ID NO: 90591 - DNA, 759 bp, Zea Mays
ataagtcgagtctatacgcgttaggcgttccttaaattgtgcttcacaaataagtgtatgattgtgtttatgacttgaatagttgtcttcgagtgaactaataggttcctaaggcaattatgtgtaaggtgtttatagtgacgctttatcccgaaaggtgttaagtctgcgcataaataagagataagtgtattttgtgtagtgtggattgattttaagtgcatgtgtcgcaagaaatgaattagtgcgcctaaaggcgatgaatgggtgtgatgaaatggtgacatgccttcttagtcatcatgtcgtctgttggtgacctaactgaaggtcgtagagaagggtcgattacctgtgtgttattattgtcaccttgcgggtctgtatgaattgcaatgtgaagtagtaggctctctatgtgatgctagatgtctaggtagactttcgtgaattgtggtgctcagaccgtcgagatgaaggttaagtcggtcgacgccgattaagtagttaaaatgattaatggaataatcatggggttaaaattagaaactagtgttcttgcacctgtttcggatgttgtagcccaattgcgcatggttatggtcgcggaagaaaagtattagtgctcatgtgatgtctaagttaaaatgcaaattattgggtgaaaagtgcttcgatattgattatcgtagaaaatgcgttgttaattaagtatggtacttctagtgctcgaaatgacacggataaaaatttagtaag

SEQ ID NO: 90592 - DNA, 447 bp, Zea Mays
tttggactaaatatggattttctatggaataaacaagtttctatcaattatttatacactaaaaatctatttctactttattttctctgattttacaatgctctggactgggcctcaataacagggaaatctggggttgcagggtaaaatttcctaagacctaggcaacagtcgccgaggacggcgggttgtttattaacatcgtcaggggctcatacgcaaaattcatatgtcgaagcggtatcgaccgatcgcggccgcacgatctatggtgggcggtatggattagatccgtagacatcagaacctgtaattctacgtgaaccctcggattaccgatcaagggccagaatccgcccacgacaacccccaatccgacccgttggatttgtgagtaacgacacttatctaaccgcgtgagaaggtacccggtcgtcaatcctaacc

SEQ ID NO: 90593 - DNA, 838 bp, Zea Mays
ctccggtattagctcaaccggacattgaaaagccttttcatgtgtattgtgatgcatcaagcagtggtttaggttgtgtcttgatgcaagagggctgagttatagcatatgcctcaagacagttgcaccggcatgaggaacattatccaactcatgacctggaattagatgttgtggttcatgccctgaaaatatggcatcattatctactagggaatatctgtcatatctatacagatcataaaagcttgaaatacatctttaccgagtcagagctgaatatgaggcagaggagatggcttgagctgattaaggactatgaattggaaattcactatcacccaagcaaggccaatgtggtggaagatgcactaagtcgcaaagctttctgtcattatcttacgatgaagacttctgaccttacattatgccaagaaatggagaagttgaacctaggaatgattcaacatggaaccttaaatcacttgaagcttgagtcggttcttctacaaggataattgatgcacaaagaagcgatgaggctatgaaacacattcatgagaaaatagaggctggtaaagcaaactgttttagaaaagatgatcaaggcattgtatggtttaataaccgcatagttgtgcccaagaatgatgaagtccgccagcaaattttaaatgaagcacatcttagtcactattctattcatcccggaagcactaagatgcatcatgatctaaagcaacattattggtggaccaagatgaagatcaagattgcacgctatgtggtgaaatgcgacacttgcagacgtgtcaaagccatacatatgaaaattgct

SEQ ID NO: 90594 - DNA, 960 bp, Zea Mays
ttgatatggtgctttgctagctaataagtgcatatgagggccaaattaatatgtaatgaatctatagcattcaaacatgatagacaaagatcaaaataggtatggcatttttaggtaaattttgtgtataggccacaaaaaacttttaattgtatagatttgatctaaatagcattgtcattaacataaacattgagtgggtaatatatattagatgatattgctacgacaagtaaaaactaaagatattatatctttatgtaaaatagcataaattgatttctcatggttaatttgttattgctcaagtatatataacagaaccccacaacaatagggacactcaattctatacgtgcaaaaaaaagaaagcacacaagcatcatcaaggcactaagtatcctctacttgaaaaaagccatccttacatggcgtgttctaagaagacgcttgtggttcttgttgttccaatattgttagctcttcttgcttcgaccatgccagcaagccaaggcggtcgtgccctcttaggaggggaacaatgctccacatctaacaattgcaatgagcaattgtgtggagcagcatgtgttgtcttgggggagaatgctattgggatatgcaaggttgttggagggatctcctcctgttgttgtgtcccaaaaccatccacatccttcaacatccaactctagctggttcacagattcatcattgttctcattcaatattgagattgtcacgttttattagaaaaaataatatgtattgtaagggacaagatgtgtggcacaatgtattacatccatgctaggatggcaaataagtaatggtttgtattttaaaacaaaatttaatatataacatggtattgcaaaatttccattgtgacgatatgcttgaagattccacatcttgccgtgttttcaccttatcatcccaattctttatgacccgtgt

SEQ ID NO: 90595 - DNA, 1302 bp, Zea Mays
tttttatcatttttctacaattttctagaaattcttaaaccctgaccgaaaaagaaaaagaaaaaaacatgaagagttctggaccggaaatggcccaagtcggcccatctataggcagaagcgcgtccgcatgcgcctgcgctgctggttttgcagaaatgcccctcacagtttgaataactgaaaaaaagtcatggcactattctcatgtctcagtgacatttgcaagaacactaccgcgtttctaatccttcacagcccgaagtccacgacggggagcgacggagaaccgagctccggcgagcttataccggccggatcctgcaacgagcggtgctctcacgcggtagacaccaaattggacccctcttaatcatttcccctcactcaattttactaacggggctcttaatcatcctgtccacggagacagcacggaccatcggatgggtaaacgtgttcccgatgatctaggaccgcctagctaaatcggatgggtcagcgagtatcaggagcaagtaagggtgctgaaacaagaggacagcggacatgaacggacctgaaacactttggccacggtgaggtcacaccgcacggtgttcttggttgatttgggggaaatcccaaattggggagctctggtggacgatctaaggtgaggattggtttactgggtgcacaattacttagtggagcaggcgggtgcagaaatttataggctccctcagcggtggcgtccaatttcgcgaagacgcgctggcggccggagaggaagaaggctactggcgcgcaagcttagtggctttcaccgtggcggctcttcggcgatcaccggggcatgcaagacgcgattcactgcgacgtggtacaacgcttgagcatgtgacgcacagcggtaagtggcctacggcggcgaggcctatcccggcagatcgacgagcaagtgggtacggtgaaactcatccacaactgagcccgagcctatctggtgccaagatctttactctgccatgattatcccctcaccagagtgcatgaatcgcggtgatggtgcaaatcaaggcgcagaggtcaccgacagcgaggggctgaacttgtgatcttgttcagtcactgtaccatggtggttaccattagagcgtctgatagaccattttgtagggctcgaatctcaaattttcatgtgataacttgctaatctatctttaacaaagttgttgttctactatccagctttaatcttgctatagcaatcactcccaaattcttactagatcatgctcaaaatggccctcacacttg

SEQ ID NO: 90596 - DNA, 645 bp, Zea Mays
gtgaattataaaatttccaaatggccaattcaagtaccttcagactattgtatgcaagactatccgcaagatcgtccttcgtcatagcacataatccagcttcaagcttcggaaatcccatacttctagccatctcccgacagacggataattctttgttgtctgggaggcagtataggaaatcttcttcgttcgtcccattgaacactagtgcccccttcggatatttcaattctttggcatagtgattagcttcaaaaacttcttccgataactttttccccgaagcatgtcgcacgatatagtcgtatattttgaaagatgcttcggggacggcggtatcaatttcttcgaccaaagttggctctgacattttcatttcttcggttgcctttgcaatttttgcttcttctgcttccaaaggtattaccttggttggttctgaaggcccggtttcaactccagtctgttgcttcggagcttcagcgacggacacttcagcaggcgcctcagaagtttcagcagtcttctttggggttgtgcttggaagtttaattgtttccaaaacatctaacacattaaccattcttttcctttttggggtcactgttggccccttttttatttttgatgcttcaatttctt

SEQ ID NO: 90597 - DNA, 653 bp, Zea Mays
ttcacctcctggtgatctaattaatagtttcctcttcaaaggatagtttgatatattatgttttccacaaacgactttgttacgaaagagtgagatgctccagaatcaaataaaaccgatgcaggtatggagttaataagaaacataccatacaccacgtcggcatcctctggaattgtttctgctgtcacatggttaattcttcccttactctggttctgaggagtcttgttctgtgcagtaccacgagtaggtgtattctgatcaagtctttgactgttgttcctctagggtgtttgtgggttacacttagggaaattgttggcataatgaccaatttctccacacttgaagcatacactaggttggactagagtagttgtattgttatttttggtcggtgtgttcacgacgcttgcttgacgattctgctgataaccactagacctttgaccagtctgagagctattcctcttttggttctggtattggttgcttctctctccttgatgtccagagtgttgcatttaataattattatttccactctgatttctagagcgaaactgagaaccctgagagttgttttgtcgggtattcctgctagactatccttgaaatttcctcttgtgatccgataattccgttctttt

SEQ ID NO: 90598 - DNA, 525 bp, Zea Mays
tactttccaccatgccgaacgctatttcaaccactacgactcgacatacttataaacgtctcatctgcacccctacacgagatgggctcgggcatgcttccgagccccccaacccagcctcgactctctacttggtcaatgtgtaggttacagggatcagacatccttctccttaccaaagacgacaccaaggagaagggtcatcccaccgaccatactgctacaggggctcggattcatctcctcttatcacaacaatcacgcgacaacccttgtactcctgggcttcccccttgcgactataaaaggaggagtctagggtctctaggacagaaggaagacaacacttgaccgctcactccactcctgatattagcactgaccttaatcatacttagagactcaggacctgctccctttcttgactaacttgtatcccctactatgtgtacctaggtgcaagataatatatgtctcatccccttgctggaagtagggacttctcttgttcaaaataggacaatg

SEQ ID NO: 90599 - DNA, 576 bp, Zea Mays
caaatggggcaacttgttctcaaaccagggagccaatagatacaaaattactttcttagtaacaattggactaaagcaactagcttacttcacggtcctctaagatcattggttacaaaaaaaaagggtacgcacaagatcatatgctatgataatgcaaaaccttatcaatctccgtgacaaacaggggcatgaccatatatataggctccacagttccaactgacttaccagctaagaaacgacaaatgaacttttcatacataaaggcgccttgtgccatagcacaacaatttatgtaagaaaccaaagcgatgacacttaaatatgaatgacaattttgaaaattaatccgtgcatcgaaaccttgtctgagtaatatatttcagtcaagcgagaacaatagactatttcgtttgttttgtatatgtaaaacttgtagcattctttcccaatcactaaccttgagcatgccaattgcgatggttgcgtaatatttctgagtcagtgcgatgtcacattccaagccacaagaagatatcactagtttaggaaccccactgcagtacccctttc

SEQ ID NO: 90600 - DNA, 456 bp, Zea Mays
cgctactcaactagcaaatctacacaagctaaactagagaggcaaacaacttaactacacaaattaagcaaaactactaagctacataatcttactagcactagcgaacaactactttactaaataagtaaactagtaatgagaatgacactaatcacttgctcaaatatgaacaagctagggttagggagatgcaaaccaacaaaagacaaatgttgacacgataattttctcctgaggtttggcggtttgccaatgacttacatcccattgaggcaagcctaatgttaccactgatcctcttgctagcggtgaactagtgacctaaagtcacactcttccaagtggagtgctcataagcaagctttagcacttgatccaactagaccacttggtgctcttcacacctttcttaaatagtgttacccttcacgatttcagtagggtgagcatgat

SEQ ID NO: 90601 - DNA, 494 bp, Zea Mays
ttgtaagagaactccgcatatggtaagctcttatcccaactaccaccatgtttaagagcacaagatcttaacatatcctccagtacttggttggtcctctcggtctgcccatcagtttgaggatggtaggccaaactgaaatccaactgtgtgtccaagcactcgtgcaacttctgccaaaaccgagaagtaactgtgatccccggtctgacatgatcttcttaggcactccgtgtcgataaactatgcgagccatatacaattctgctaccttggctccgtgtaattagtcctcacaggtatgaagtgagccactttggttagtctgcccacaatcacccaaatggagtcataccgtgcaggaatgcgaggtagaccaacaatgaaatccatgccaatttcttcccatttccactcaggtatcttcagcgggcgaagtaatccagcaggtctctgatgctcgacttttaccctctggcaaacatcacactccg

SEQ ID NO: 90602 - DNA, 371 bp, Zea Mays
gtcgctggcgcaagtgggcacggcataggacggaacagtgcttcaagctcatccgcggtgaagatcttttcaccccgaggcattatctgggcactagtgggcacaaatcgcatcgccggtgttaatcacggcgaaaggtcaccggcggcgatatcctctgcacctgaagatcttttgctactgtaccatgagaaatccaattcagggcctctgtccgaccaacttgcaggacccatatcttagttttctgtgtgagaacttgttaatctctctgtaacaaagttgtagccctataatccagctacaatcttgtcacagcaaccatagtcaaatacttactggatcatctccaaaagaactctcaaagttca

SEQ ID NO: 90603 - DNA, 368 bp, Zea Mays
caccggagccaggtgctcgtaccgtgaagctccccagcgtggcccgaccttcgcgcagcacctctgtcggtgagtccttgtcctcatgtttcgcatttatccctactatgcgatactatgctcgtactcgaggattagactcgtgcgcgaccagtgttcatcgcgccggtgagggatccgccgtggcattagatgcgccgccgcgtctcagctcggattgggaagaagagtggcggaccgtcgattttgcatcgtgcggctctgatttggcgactatgtaccgtttcgcgcggtgtaatctaaggcgttgattcgggattgggcggtggtgatctgatcgcgtacccataaaaccgtcgccgtcgatc

SEQ ID NO: 90604 - DNA, 1192 bp, Zea Mays
cttgactgtgcacttcccatatgaagacactaagtttgactatagcatttggtgttagttggtgcatagaaacctcgtatttctttaggacttcgataacatcttgaatggtagccgaagcccaactcaaaagaaactcctgaaaactacaatttcatcatcctttagctatggggtggtttcgttaccagcaaaacgaattccatcgttatgaccaatgtagccaagattattgataatatcaaaatcgctaggcttaacaatagatttagcaatatcaatgtaactcgattttgtgggctaaaggtcattatcctcttcttcgacctctgaggcattcttctcgggaatgtccccctccttgacaatctttgtcttagtcgttgcttcctggcttcagtaatcaacattgtagcccccatttccatggtatcaggagcatctttgtccctctagactgcttcggatgaggtcagagttgtcatcttagcggttggacgaatcctggccatttgatgaattaccgaagcaccgagcaaccaaagcttacacaaagagttagaggagcaaaaaaagctttggaggcaaagaattctatggcagcacgttggcatgagagtaaatgccatgacgatcatatggtgctgacagggttatataggttggtgggcatggaagctaaggaatcgtgtcgctctcgcccgctgccttgtggaccatttgcaattgttttgttttgttttcaataatgtgctctaggaatgtgtttttggaccttcggcacaaggcctccattgtttttgcggtgtatgattgttatggaaaatgaaataattttgtgatgggctactaatgggacccttcctcgaccaaaggtcctaaaagcattgatttctcaatagttcctaagtctatttcaggtgggaacgatgtgcaactaacatacaaacacaaagacaaagcaacgaccttgggctttgtattgcaaatgcatcaacagaggtagaagatgaaatcctcaaggcttgctcaacacggctatgaaggaaatgacaataataccctttaagttcttgtgtataggattgaggacatggatgtaatttttatgacgttgtactccaccaatataaatagaggtacaataccattcaaatgggtacgtcttctggagggagaaattgaattgttc

SEQ ID NO: 90605 - DNA, 442 bp, Zea Mays
cttctagctttggtgctcagcttgtttcttgtgatactccacatgttgccttataactttctacataatggaaatttccatgtcctaggcgatggcgcgagaatgagatgtctgcgaagacaatgatacaaattgttgtccacgacatcttagctccctggagccaaacaaagaatcaaatattatacccatcctacctagtgaacaatagcatcggtacaatcacaaacatatgagatgacttaaaaatcgaaatgaaatactctcatcgtccatgagcttgtccgcctgcgctagcgtatgctacccttagttcaattggttggctcctccagtcatcgtcctgcccatggtgctcaaccatctactcatatgccgcctggagaaaaaacatatcaaatatcaatacataaggtgatgcaaaagaagactacaatataaa

SEQ ID NO: 90606 - DNA, 385 bp, Zea Mays
gtcttcactgggataaagtggcctactttagttagcttgtccacaatcacccatatagaatcatacccgatagaggtgtggggtagacctacaatgaagtccatgccaatctcttcccacttccactcaggtatcttaagcaggtgcagcaaaccagcaggtctttgatgttccgtttttaccctctggcaaacatcacatagtgctacatgcgaagcaacatccttctttagtccataccaccaatacttctgcttcaggtcctggtacatcttggtgctaccagggtggatggagtaagctgagtcatgcacttcctttaatatggtttcatgaagattgtcgatctcgggaacacaaatccggttcttgaactatatcgtac

SEQ ID NO: 90607 - DNA, 1303 bp, Zea Mays
aggaatgcacgcggctccaagatctcgcacgctcagtaactccctcctacgcaacccacactctctagtgatctccctcatatgcaccatggacaccaaacattgttgtaggcgagaggcaatggtggtggctcctggcgacggcgctctctcggcaagaacatgattgtgaggcttacataaaggtatgtctagttttgatggctcaaggggatcacagggtaagtatttgtatgaccatataagatcttaggtggtgcagctagctcatctacatgatccgactcgatcatggtggtggtgttcgaattaggggcggaccgagaggggggaaagtgggccatgccccctcaattttttataacatgttatatctagtgttaatttatggttaattaaagaagaactaaagttttgggtgggatgaaacaatcttgtctttggactttttgttgaatggatccgactcccctactcctctcggtccagttctcgcatctatctgtccggtcccattctttttatgtcgctcgaaccagtctggctcaatatcccgttctcgatgccgcctgtcatagcccctttcccgagacacgccagtacccaaccccacccttcctggtgatcatgtcctgcttgttgtcattatgacactggcctgtatggaagctcctatctcgctcgtcacgatgatgcgagcggtccccggtggccaacgagcttggtgaacaagcaagccttgagtccctaccagagacatcgctagaccccatccatttatcgatgccctcgcccttcgaggaggtcaacattcgactaggtataaatggctttgatttggccaacaaaacttagcgacatgtttgatttttttgttcatatagttttgatttatatcatgttttgatataaaatttgaatcctaagcaacactagtttttacactcttggttattttatcgtgaggtcttcttaaccccatgaattctagttccgcgttcaccactttcgaatcaaatacgaggaggaaggtcctagacacagtggtccaataatcagctaccacgggacacgtatgcatgcattagagcggatgtccgaggccaaaaaaggcaaccatggccaagggaagctcgatcgagactttagtgcgcgagtcagatttcgatacaaagatggacggtgattttacatggagggcccacacgtcagtgtatccttgcatacgtacttgcgatgaggcagcctagcgttcggtcccacctgccagtgatgtggtgtctatatgcgctcaagcgaaaat

SEQ ID NO: 90608 - DNA, 369 bp, Zea Mays
ggcaaaagtaggtctcaataccactagctagaagccaaaatctcatcggacgacaagaaccaattcagagcataaaatcagcacaaaatctaaaatcaaagctagttcctctggaaacaggcaaacaactcaactcaactagcaaaacctcaaaaagactcaattttcctcccactgtcacaatactcccaaaaatctctcctagagaccaatagcttcaattaacacatctctcccccttggatgagaggaatcccgaaagaccaaatttctcccccttgatataggaaccaggaaatctcaaaatctctccccctagcttgttgacaagtgaactcataaagcataaacaagagaaacaagaaaaac

SEQ ID NO: 90609 - DNA, 310 bp, Zea Mays
tcatatctgaggcaatctacttcaaacccttataaccaactaatctaatcaaactgtgcaacaagtagatccatctcatgaacctagatccagacctaaaactatgcacaacctattctgatacaactcaaggataatggtgaggctacactagcgcaaaacaaaaattttgaccccataaaactaggaattactacggttataaatcatggaattaccactagacgcgcagggcaacgaaagacgtcttgatgtagacgaacgtgtcgagcagtgctgtgcagtcaccggcgaccttcacgtcctcgca

SEQ ID NO: 90610 - DNA, 564 bp, Zea Mays
atcgatgaagccgccgaagcatgctagaaggcctttggtactgtatgcttcttcattgttacaagagacctaattcaagaacatatagcattcagagtatggcctcttgtagagaattgggagatgccaaaggagactgtcaccgagtctagcgaaggtgacttggttcgactaaaatacaccttcagatatggagataaatttgatgaaccaaatgacgactggctgaaatgtatcgaatctataagtgatgaattgcttgggccatattccaaagtagaagataatgcattatccacatccttcgggggccgaggaaaaaagatattgaatagagtttttgatgccattggttttgtttaccctgactactactacccgctgcggggacggggaaagaagaggaaaactgctgcttcggccaagactgctgcttcggccactacagatgaacctgcgccgaagagcaaaaagttgaaagtccttacccaccggccatgttatattgagccggtcgtggtgcctgagtttggtggggagacctcttcagctgctgaaccaaag

SEQ ID NO: 90611 - DNA, 641 bp, Zea Mays
cgtcaaaaagagaagctttggaatagaacagacaaggccaagaattcatttttatctaggaaaaatcatctgattcgtaagctttcgataaagcaaatggagataactgcttggcaagaacgaaagaaataccaatatccgcctcggactagtcttcaacaacagataatactgctctcatacgaaggagtcatcaagactagggagaatacctctggtctccataagatcttcatatttctatcacaatttaccatcactaatagcttagtggtcaagaattatggatcttccggtgccaaggaccaatgacatattaatgcccaattttgcttcaagctctgttgtgatgtgggatttcatatttatttgtctactcttctcacttctggtagatcggaggtagataatagtaagcatgccaaagggtggaattcagtgtagttcagctacataaaccccagatatgtccattcaggaccgacctttaccatttagcttatagtgtataccaaacttgtcaaaggaatatcccgagtcaattcagtgactataagtatttacaattccgagagatgtatgcgacacaagcatagaggttctagatagaacgagtaaagtggttcgacgggaacacacta

SEQ ID NO: 90612 - DNA, 587 bp, Zea Mays
atttttaaaaaatgctggtatccattctttccttatttaatataacttgcgtagagtcatatcttcatgcagattatattcttctagcatcatttcccaggcacattcaaactcacgaggagttaaaggatgatgtataatagattggaattttgtttttaaatccttatcagcaaaccttgcatatagttcatttaagaatgacataaatcggttctgaatatgccataaacacagtctgtgaattgtttttggaaatacaattctcagagcagttggcattgcaggatcttgatctgcaattgctcacaaaccattatttgactatcacaataaattatttgacgtgttagcataacaaattcacataccacatacctgttagcataactctcggtctctcgcatcccatacatgttttgaatgaattgaaagcccattcaaaagcctgaactatttcatctcccaacaacacaaatccaaacactatacattgcagatggttgttagctccaataaacatgcctagtggtttatcatatatattggtcttgtgtgttgtatcaaagatcacaacatcatcataa

SEQ ID NO: 90613 - DNA, 837 bp, Zea Mays
tgaaaaacacgcttagcatagggcaaacaatacacttataaacatgtagtagggatagcaattttactcgcggatttggatatccgatccgatggagtcggacatagatatatttttgacaaatgggttaaacccatatctaatccgaagtttggcggacatagattcagatattacctcccacccacggattatccttcggatatctaaaattagccaatagtttatttttgcctagctcatattacacagcaaagaccaaaccctaactccctaaacccgacacatgacgctacaattttcccactgttggccaccccttcttgccatgttggcttcctgccctgcgtcccatgcccccttccaagtctcgcaagccgtagcaccgctggaggctggccgacgactgctccttctaggttctataccctgttgttggtcgtagttcgcgcatcataggccacccctttctacacccatggtcgcgcatttctacacgtgccccaatcttgcgtcggctactcccggctccttagtccatgtcgttgccaccccttcacgcttccaatccggccttagtgagcctccctacttccctagtggcccttggctctcgtcccctttccttgtaaggtacgaccgattaagggaacatacaatcgatccaatcaatctattaactagtttatttacattcttgccctagaagtagcatcaacaagtctttctcatcgtaatctttacctctccatgggtcgacgtcgtttagagacgtcttgggcagcatgtcaacccccgagacaaccctacgataattcctctctgacaggggtcctt

SEQ ID NO: 90614 - DNA, 967 bp, Zea Mays
gagatgaccctgtccggcggtgtgggggatggatatctacagagtccacacgcgcatgaaaacacgtctagggccacctagcaggcatcccctggggcatcttgtggtgggccgtccgaaagtaaccaggtgaagcaagcccattctgaactagtaaaggccaatgtccgagttaggtgccacgagagcacgtgtatgtcaggcatgacgtttgcgcccacccgacatgctaagtctccggcggtaacttgggcggatgagcgtagtgagttcctaagatgtaggaggacaattcgctacaaatcgggagattggcgaacatattacgtttaccacttgtgcggggatagctatccttggccgtgtatatatggccaaaaagcacccctaccatttcatcttgcctcatcccaccgttctcatagttcacagcttgtaatctcatcacaataccaaggtccccgcaggacgtagggtgttacgcctctcgcgcggcccgaacctatacaagcttgtgtgtttctcccatcgtgccaccgcacgaaccatcgagtcacgattaacgacgctgtcctgcccaaaagcatcacgagggtaaccccgtggtgtgcggtcgggtaacaaacaccaacagctagcgcgctaggtagggggggggcgacattgatgagcgctgactccatggcagtcactttcaagagcatgatcaccttcaacccaggagcagtcttctgcttcgaaaccatctccggtgtcacagtgtaaagcccaaaacttgtataggagaaaaataataaaataaataaataaatgtatgtacatgttggtaatttgggatgatggagccctaggagattatttggttacattttcttttgtttgtatatacaattgatgggaataagttaggcaattaacaaataaataaataatgaaatatgcatctcatgctgagatcttgtatttt

SEQ ID NO: 90615 - DNA, 868 bp, Zea Mays
aagtggtaaagcatgagatatgcgaaattgaaagatcaagagcacaaaagaatgttgatgagctttgtgcgggcaaagaaaaatgctttgagatattcatggagtgcgctaaaaaattaaagaacagtttctctaaagttggagccttatcctctaagcagaaattcatccgcggtgaccccgatggagttatccagtggatcagtggtgaggccgaagcttttgaagaaattcttagtgataggggggattttttgcctttgccagcgcacgcggggttgtatcaattttggaaaaggtcggttgtgatcatgcaaaggctgttgctcagccagaatttgttttctcagccgacgacattaaaacccctttagccgaagcttttgcattaggtgggaaattttactccgaggtatggatgaagggcggccgtgagatagctaatgaagctattaagaaaaatgagaaagaatctcacgacactcaagaagaagctaaaagagctgaagaagctgttgagcgcgtcaggcctataggtacatctattgtggtttagcttcatgatctattttagcttcggaactaacaaacacatgctacggtgagctgaactatctccccctctagagccatacgatccagaagccgacccgtccgtcaaagaggcgttggacattattaaaattgcaaatgacgctattgacgaagctatcaacaggcttctgaacgaagctacgataaagtcctcaaggaggactaaaatctttgtattcttggtaattaaatgcactgggaaatgattcttagttttgtaagaaatagttgtaaacaatttgtatgtatattgatgcaaaatatttctttatga

SEQ ID NO: 90616 - DNA, 440 bp, Zea Mays
tgagattgtagtttttatttgattcaaaaattaaaagtctctctctttctccttttaaaatactatttagcaagtacttagaaatgcatgggtatcttctatgtttagacacacaggtaagaagagagatggtcagagtgaggttagctgatggtaagaagaacttggtaagggaagactatgtccaaggtggtaaatttgaatcatctcgagatctgatttgactcctattcttccatgtcgaggttgatctcctccttcttgctctttggtgtctccatccgggtttgggacaggaggttaagatagatctattatgtaggtcaagttgttgggtatggccgagttgatctaggatctcaaacttgtttataggagcagggtctaatgtatttcaccaggattaactaacttcttaggtcactctctttaaattggat

SEQ ID NO: 90617 - DNA, 317 bp, Zea Mays
ggcacgtcgtctaggctctgacgttgtccgtctacccttccatctaccccctgcgtgcgcgcattcgcaccgcttgcctcgtcgttgcccactcttcgcgctcggtgtcgccatgttgtgcttgtcgtgtgctctcgctcgatcgaggacattgttgtgtgccgttgtagccatcgccctcgtgcgctgtttcgcgctgtccgcgtgttatttaatattttcgttatggtcgctcacatcaattagtcatttcttgtttagttgtcggttatttaaaataacaatttaattagaatgagtctataattttaactcgg

SEQ ID NO: 90618 - DNA, 517 bp, Zea Mays
cctctctcttcctttggtagtagcatgtaccttggtgcactagggcgctgatccattggtcgctggcgatggcgccaccgtgtgggcgcaagagccgccgcactgctcgacctgggttggggtgggtggtgcgctgtcgtcggatttgtatcgaacgaaggagattagatcgggtctgaaatacatatgggtcgttgatcctgtttcgggtggctgggattagaccaatctgtaccctttcactacatctgatccatgccatcaattcatccacgggcggtcacgattagatgcatgatgtcgttttggcattttaaatctgggccacagatcggtgaacgggtgaatcagttggggtcatggcagggggattgtgggccgtggatcttggatccaaaggcatgtggcgcgtaccgtttcatttggtcgaggacttaatatgaaccgcttgtctgtgatccagcggctgggtggttgtgtacctcttcggctcatgcttttgctaaagagaccctgc

SEQ ID NO: 90619 - DNA, 323 bp, Zea Mays
cacaattagaacaaatcttagacaagagtattatccctcctagttatgataggaaaaatgtttccaatgaagatcaaagatgtatgcgcttaaactatatagcttttgacatcttagttaactctcttagcaaggaagattatcatgccctcataatgaatcattatgaacatattcccgatgcgcatgatatttggactaggattaaaagtaaatttgatgaatccaaacatgatagttcattttgtacctctacttcctttggtatttgtgatactaacctttgcaaggaagaagaagaaaatgaacgatggagaccaaac

SEQ ID NO: 90620 - DNA, 314 bp, Zea Mays
catctaatgagggtcgcactctatgacccggactgtcatctcgaacatgagggttggaaatgaaatcagaaaagggactctatggaggtagattccaaacagaataagataagggggcaccagcatttgaaaccctaccccttagcatcaagtcaatttggctcagcaggtcctcatcaggaaactgtctattggtaatttgggtagggtcgttgactgtggtgtacagataagctgggtaaactctatccttcaggggctagatgttcttaaaaacaaagtcagcgaccacagtctcagcagtcaggcctttg

SEQ ID NO: 90621 - DNA, 499 bp, Zea Mays
gcagagtggatcgtgtcactagcacaatcaaggactggcgggacacgtgtccaggacgtgggtgacacacatgtggtgcattactcacgatggtttggtggttgagcctcaaaatcattcaacgccacgaatgacgggttttattgagtttggtcctcaaaacttgacggtgcggttccggtgggagtcagaggcgacaaatggcgtcaccgcgaagggtgcatcgaggcgaagcaatttcgtgtggagggtatggctgtcagatgcatattacaggagttggtacattttgcccctagtttagtggatgagctctatgtatttaggtgtagtttagtctagtgaaattaccctctataaataggtaagtgggctattgtggacatccatcccttggggcatttgtttagtgaactcttagtttccatttcctagtttccagttctagtccgagatcctcaggcgattttgttccctggcgtctgtgactcagattttg

SEQ ID NO: 90622 - DNA, 717 bp, Zea Mays
aaaagtgaaaggtgaaaagagtaaacaccctagagacgatcgcctccttttatttcaaaacccggaaagtgcaaacaataacacccatcatttcacacgtctagtcaacttttatttcaaaacccggaaagtgcaaacaataacacccatcatttcacacgtccagtcaactttttgacgcccctgatgcaactcaaactgatgatcaagggcagtgtttgcatccttcctggcaggctttgggacaggctcattaggttaagtctacccctcgggggctattgttggtacaatggcataatcagtcctcaatcacccttatgttaacctcatatcaaccttatctgcgaatgtagagcactaatatagtgtagacaagcctaaatggcggagactacgctaaatgtacgaagtccccctagcacgacactaaggctccataggccctagttgggtctacgggccacgaagatttggcccatggaaggggcctttgggccatgagatcgaagaccttggtacttcactcccgatggcctcattcctccctggattggcgaacacaaggacctcgagggctctaggacaaaggcctcgagggttcggcacaagaaggttgtgcggataacacaagttgaatgggcccacaaagaccaaagcaggctcatttgccagtctcactagtgggtacaaaattttggtgcggttgggtcaaga

SEQ ID NO: 90623 - DNA, 467 bp, Zea Mays
tcccttgccctcgtagctggtactgataatcagggtatacgaagccaatcgcatcaaatatcctgttcaatcttttcttgcctcgacccccgaaagctgcagacaaagcattatcttcggccttggagtatgccccgactagctcatcactggtagcttcaatacacttcagccagtcatcgtctggctcatcaaacttctccctaaatccgaaggtatacttcaatcggaccagaccaccctcactggaatcggtggtggtctccttcggcatatcccatttctccacaagtggccataccctgaaggctatatgctcttgaatcaaatccctcgtcccaataaaggcacacacagtgctaaaggccttctgacatgcttcaacattaccatcaatttccaccttcggccttcgaaggccgaagcgagaccagatggggcactgaatgatttccttgatgtcttcc

SEQ ID NO: 90624 - DNA, 523 bp, Zea Mays
agcggcacccagtgcgagagcttcaaacgaacgggtgctacccaagcagagaggtaaggcaaagtacatggatggattctcacctgccgcggatttgtgaaggagcttggccacgccgtgatgtggccctgtggccaaatccaaagacgacgagcaataccgggctcccccgccattgatttcgcttattgatgtcacgagcatcctcctggtgatctggcgatgatctatggactctagtgaaagcccgagcgattgcgtagagcacataacggtggcgtcgaatcttattgtttcagtgcgcacatagcttcacgacggctactacttctgctatcgaatcgattactaatggcgggagcgcagggtcttcatttatctactggcgtcgtgtctgttaccgagaacacaggggagaagataggccccgaccggtagccatcaccggagggtgcatagagaaatcgcgatttcagcaacggattggaggggataagtctgacatcatggccccacatgtccg

SEQ ID NO: 90625 - DNA, 896 bp, Zea Mays
tccatcttcctgcgaaattagtggcaacaaggcaacaaatataggtggaatatgaagctatatagaatctcacaacctcgccactcttaccaaccaaagctcttatgagttccctgcgggttgcaagaaaatatgtggtggtaacaagaaagtggtggttaagtgaatacaagaccagagtaccgattatgatggcttatatgtggagcttggtggggaataataaacaagggatgcaatctgaatcctagttgttgtaaagttaaataatcatccaactagaagttccctgcctagtgctgaccacaagatacgagtgatgtaaatagatcaaacacacgcgcaagaaattttagatttgatgcagacaaggagtatgattggaatgcaagtgttgtaatcagatccaaccaaaatttttcaccgaatgacaatagcaaactggttgaacaacttgataaaactttcagcacttgtgcacataaacaaactgattgttctacttttctttcacaatcttgttcaacattttttggcacttttttttatagaactaaatacagagatctgataggatattgcacactttataatacttaacaaagaactcaaccagcagttataacttaaataggatcaaagttaacgcgaaggaaatgatgagggttttcagatttttctttttgtggatattttcagatatatataagaggctcaaaggaaacacaaaggatagagtgaccagcaactaaacaaagactctaaggactgaaacttaacaaaacttactggaacaacagattgaaacaaagggctatgataaaaatattttatggcttttgggtggataggacgaacacaaaatatatgtagctaagggtaaagaatctgtgggg

SEQ ID NO: 90626 - DNA, 285 bp, Zea Mays
ttaatagttatttgtctactcttctcacttctggtagatcagaggtagataatggtaagtatgccaaagggtggaattcagtgtagttcgactacataaaccccaggtatatgtccattcaggactgacctttaccatttagcttacaatgtataccaaacttgtcaaaggactatcccgagtcaattcagtgactataagtatttacaattccgagagatgtatgcgacacaagcatagaggttctagatagaacgagtaaagtggttcgacgggaacacacta

SEQ ID NO: 90627 - DNA, 2537 bp, Zea Mays
ttttttttctacttttatttcctgagatcaatttctatttgttaagtgagtgatatacgtttactttgcatttgcagtcatgaaaaacttttgatttcgccaggagacaaacatgctacataccctcataagaatatgaatattgaggaggaacccacaaacaaagaagatcatatattgaatgtgtcacatacagaagggtacatttatcaactattccaaattttaaataataaaatagattaatttctacttttatttcctgagatcaacttctatttgttaagttagtgatatgcgtttactttgcatttgcagtcatgaaaaccttttgatttcgccaggagacaaacatggtacatcccttcgtgaggatgtgaatattgaggaggaacccacaatcaaagaagatcatatattgaatgtgtcacatatagacgggtatatttattagctattccaaaatttaaataataaaatagatcaatttctacttttgtttactgagatcaatttctatttgttaagtgagtgatatgtgtttactttgtatttgcagtcataaaaaccttttgatttcgccaggagacaaatatgctacattccctcatgaggatgtgaatattgtggaggaacccacaagtaaataagatcgtatattgaatgtgtcacacacaaaggggtacatttatcagctattccaaattttaaataataaaataaatcaatttctacttttattacctgaaattaatttctatttgtttaagttagtgatatgtgtttaatttgcatttgcagtcataaaacctttttacagtttatggctgaaaatgatatgtctactggtgttatcttatatgatgacgtaaaggattgtatgataacagttattgtaagagaaatgagtgtagactttctaaattacatttttaataaattcgagagaggaaagtgttggagtgatggctgagaattaagtgatatggaaatggaagttgaagcaagaagaaagtttgtcattaccaaggaggctgacgcagatcttactgttgaagatgacacacaaaatatatttgttcatcttggttttctggtaccgtattataaaaaaggaaactcaatccagcattttttgattccttcggaaaagatatattatacttttctgatcttaagaatttttcaataaaatggaaaaggtttgtcaaactcattagatcagcgttagctttgaaagcgcctttggtcagattaaccttaatctgtgagatgtctacaattatcgtattgcagctttaattatctaattctgcatattattaagtattataaaaaaatgtcaagattgacgtgcttcagtaaaatgggttatgccacacagacaggtctaccactacaggaacaatatctctttaaggtatttttatgataagtggtgttgtaacttatgacacgtaatgtggtatttaagaaacttcgttaagcatgtcctgacctacgtaaaagagtagaggaaatgctgaaggaagtttcttcaataccacattacgtgccataagttacaacaccacttatcataggaatacattaaagagatattgttcctgtagtggtagacctgtccgtgtggcataacccattttattgaagcacgccaatattgacattttttgataacacttgatgatatgcagaattagataatttaagctgcaatgcgataactgtggacatctcacagattaaggtcgatctgatcaaagacgcttttaaagctaacactgatctaatgagtttgacaaacattttccattttattagaaatttcttaaaatcatgaaagtataagatattttttctcaaggaataaaaaaatgctagaattgagttttctttcttataatacggtaccaggagaccaagataaacaaataaattttgtgtgccctcttcaacagtaagatctgcgtcagcctacttggtaatgacaaactttcttcctgcctcaatttctatttccatatcacttaattcccagccatcactccagcactttctttccttaaatttattaaaaatgtaatttagaaagtttagacccatttctcttccagtaactgttgtcatacaatcctctacgccatcatataagataacaccagtagacataccattttcagtcataaactgcaaaaagtttttatgactgcaaatgcaaagtaaacacatatcactaacttaaacaaatagaaattaacatgcttattaaaacgacgttaaaacgacgtttaaacgtcgtttaaactataaaacgctgacagaaagtgaaacgacaacgttttacgattcgtcgtaaaacgtcgtttaaacgtcgcgttttgacgtttaaacgcgttatagagtgaaacaccgcgtttcgggcgtttaatgcgtctgctgctagaaattggcccaacctaattagaaactcccgcccagcccgcccaggccgccgctacaggccgcactatcaccagcccaattaggaactcgcg

SEQ ID NO: 90628 - DNA, 606 bp, Zea Mays
gtcagaaaagtcttgtttgccaggtattcctgtaccaaatccctagtgctgattttggcagccaccactctgaattcaacctcggccagttggcacggggagccgagttgcatatggcacaatggtcttgtcattctgaagcttaatcgcataggactcataaccatggtcatcaacttctccctcttcttctcgtcagccttcacgtagaaccactcatttgtccacccagttggccacttggtgcggtaaccgattactagggctctagtgtcctttcggtacgcgaagttatagcatccaaagtttttgtgaaggccatccactctggccttcgtctgatagtgcaactcgtgcactcggcagaaaccttcggcattggcatccatgccttggcttcggagggcccatatgtaaacacttagcctaacaacggcatttggcgttagctgatgaaggtatatttcaaacttcttcaaaacccctcctaattatatcgtataaagggaaccgaagccctgctctgaagaagcttttaaagacaacaacttcatcctccttcggctccggaatcaccacctcgccagcaaaacgaataagtttact

SEQ ID NO: 90629 - DNA, 868 bp, Zea Mays
cgtgtccgggagttgactggccttgtctgtaccgtaggagggtggattggtgcggcggcatgaagcttgcgttctgattcggcatcggagttgttgaaacgatcgcactcgactgcagctcgctggatcttgttcttggtccccagatctcgctggattggttcgttctttccgtgtaccaaaaggctccacttgtttgctactaaaaattggtttctccacgacgcattgtctggctttgtgcggcgggctggtgtagcgagaagaaagcattcattatcagtgtagaatagaaccattttttttgttcttgtggtgaagaaactctgctcgtgcttggacatgccgctgcagtgctgctagagcacatgactgccagcatttcaggagcctttggcctcccaagggccggtatcttcgcgtctgcaagccggcacaaggttagtaacggagctcaggtcacggcaccagtaacacgttctagatatgacatgtgaaccaagaattattgaggagcaaaaaaaaaaaaaaaactagaaaattaaaatcagtgacgaggagtgaaaatttctgcgcaatgcaaattaacgagcggctacatgaggctaatacatacaccagaattaacacagcaggtatcacctcacttctcagggaccagggaagagtttcaattcacaaaactggacccatacatgcaattagcagcatacatatacacacccaactgcctgtccaacaatggaggatgctatggtgaatgccgttgcactttcttgcgtatcgcaacagacttgctcagcattgcaatgaggagaggccgagagggcatgaagataccatctttgaaggcaagggctgcggttgg

SEQ ID NO: 90630 - DNA, 953 bp, Zea Mays
attttactttatctttatttttccatagacaaattattgttcattcataacctcatacatatatgttaacagatcatggttcctatgctacgccgtagtcactggaccctttaggcaatcaacttccagcttcgtcgaattgacattttagattcaaatccttatgggccattgcttggtggcactttctagaaacaaatttacaatgatcaattgttgataaatggaacaaaagtaccttggtctagattaataatgagaatacttagcattgcgttacatgaagctcgaccgattctagtttaccaaagtttagcaactgcaagattgggcttctccccaactgtccaaccatgttaccagggtcaaatgattgtggtttttttgtcgctaactttttccgatgctacgattttgacgatggcgacatatcagaatttgttgttccggtacgttactaaattagttttttgttaatgcatatattactccttcatacatcttcttagcattaattcaactattatgactattttaggatgaaccattggaccaacgtgtatttgttctacattacctgacctttcatcgcaacaacaaggtttaccccttctctacagtactgctgcctttcaagtatgttccaaggaaacgacgttgtttgaaagccaagacttagatatcatagctgaacaagattccctctgggatccccaaactgtttatgttacttcttaaggcacttatgtcaagtgttgctcatttgtatgctacttcccatgacacttatgtttgttgttgccagtgtttatgctacttcatatcagtctttatttcaagtgtgtaaaacagaagtggtaccagaaattctagttatgttatctgtgctgatcgtctatgccattcatgtccagattgtcagattgttaatcgttccaatccaatggttggcg

SEQ ID NO: 90631 - DNA, 421 bp, Zea Mays
tcacaaagagaagcaaccaacacttcaatatcttcaggagagggtcgcactctaagacccagaccactatcaccagcgggaggattggacacgaaactgaaaaatgacttaggaggtggtagattccaagcagaataggcaataggagcaccaacatttgatactttgcctctcaagatcatgtctagccggctcacgaagtcctcatcaggaattcttctattactaacccgagtcgagtcggtaacaccactatacaagtaagctaggtatgctctgtccttcaagggctgaatattcttaaaaacaaagtcagcaaccacaacctcggcggtcagacctctctccttcagcagacagatttcagcaagcagaaccctagattctgttacttccaaggcagtaggagactcaatccaac

SEQ ID NO: 90632 - DNA, 925 bp, Zea Mays
gatcgatcaagtccccgccgagcaaaccagtaggacggagctcccagtcctatatgctactggtccatgtcagctacgacaggacgcatcatcaccaagcaatgtccggacatatgagcagcataccaaaggggcactagggggtcactgtcaacatgattgtacgtccctacgaaaggtctcaggcgtatccccactacctctgggtcgcaactatgacccatataccgggaatgacgggacaatgcactgtaccgaatgtacgcctacacatgcaggctggtgacacggggctcatgatgacagcgtctgcgctacgcacgaccgcacaataagactgaatagtgggacctgccacacactattgcgaagacatcaacaatagacttgctacatggacttgtctgacggaatagcaagccggtacacccgtaccgggagtagggctacgcatgaccctacggacgacctcaggaacaccacgacaacccggggctacggatctctccctctctagtagaaaacagtctcctctataaggttcttcccttgagctataaaagggaaggccctcctcctccttccagacagacgtaaaagttgtagcagttctcaggcaatactacgattagtactacactggactagggcgcaagcctgaaccaatataactcactgtctcacaccccctcttctggaatccccaccgaacacaaattctgtatccaccggtttctgaaaaccacgacactatgcatgtagtgttcgtaaatcgctaggtactgagactggagggacaagttgaccatgcttggaagcagcaatttctaacgaacttctaggtgcgatgtggttagggatgaaaatggatggaaccgatcagaaaaactcctctcctgtttttattttttacaatttattttga

SEQ ID NO: 90633 - DNA, 1081 bp, Zea Mays
taactaccggggaggcattattggcttaaggcgacctaggaacacgcatcaatttgacaagaacgcactgagaacggcctgtccacgtgcacggcggaaaccgcggtgtcaatcccgtgttctcaattatccacgctcggattggtaaaacggccactacgaggagcttcatgaacacatagagctgctaaaacaaggcttgaatcggacagggacttaccagagagggctggccacggagcgcagggctttacgttcgccggagacagagaaagggggaaatcggtgtcacgacggctctggttgaaattggggttggggattgaggctacagggccgtaagaagctgtgttttcattgtgtgcaatcaatttgggcgaagatggagagggcagtgcgaatttgacttcgactgagcttcactggtggagatgaaagcacctcgtcgtggcaccctactcaatttataggcacggtggcccaacagatgacccccacagatagtagcgcaagcgcatgcctaccacgtcggaaagagatacagtgagggagatggaggcatgggcgacaccgcggcaaaattcaatggtcacggtggccgccggtgaagactccggctgggctagggtagtggcgccacgtatgggttatccctccccgacgttatccattccctaccacccacgaacccggacggcggcggcacgaattttggcacaaagaggtcgccggcggtgagtttgccgcatgggcggtcagatccacttagttactgtaccatggcgtttgttcttcagtcatctgacagccaggatttagggcagattttctcttgattttatatatcaacatgatcgacactctttagcaaagttgtagccctaggatccagctataatcttggtatagcaatcctaggcaaatacttgctcgatcatgaattaattcatgcccaaagtgcttgcagttgcactgcttgtctgaagttcagaacttaatcagcctgacagccaaagtttgagcatgattatctccaaatttctcacaagaacatggcttgccctctttagcaaaattgttc

SEQ ID NO: 90634 - DNA, 291 bp, Zea Mays
catattttgttttcttgaaacttgaacaataatgcttttgggtatgcaggattcgttgaacacaacaggacaaaacgttaacaagtactgcacgcggatttgaacaatgcttggctcggcggatttgaactaaataccttaacaagaactgcacgcggatttgatctaaatattaaaaatcagtgtgaactaaataccttaacaagaactgcacacggatttgaagaatgcttggctcggcgaggcactacgccgcgcctggagcttggagctcggcgaggccgcccggcg

SEQ ID NO: 90635 - DNA, 535 bp, Zea Mays
aattccccctcacaaatgtgcaaaagtaacctgatcaaggggtttggtcaaagtgccagcaagctgcctatgggtgtcaatgtggtgcaaatcgatgtcgcctttctcataatgatcacgaagaaagtgaaagcgaacatcaatgcgcttggtctttgaatgcagcacaggattcttggcaacacttatggcactcgtgctatcgcaaagcaggggcacatgagaaaactccaagccaaaatcatgtaaagtagtcatcacccaaagctattgtgagcaacagctagcagcagtgatatactcaaactctgtggtagactgagcaacgctagacttttgcgtgaagactaggaaaccaacgaagtcccaaaaaactgacacgtcccagaagtagacttgcgctccaagcaggatcctgcaaaatcagcattagaataaccacacaaagatagaacggaagacgaagagtaccacaaaccaaacttaggagtgaagcgcaggtacctcataatccgtttcatagactgtctatgag

SEQ ID NO: 90636 - DNA, 515 bp, Zea Mays
caggccagcaggaatacccgacaaaacaactctcaaggttctcagtttcgctctggaaatcagattggaaataacaattatcaaatgcaacgctctagacagcaaggccagagaagcaattagtagagaaccaattatcagcaatgacaagggtatggcggatatccacatgatcgtcaaggaaacatcgtgaacacaccgaccaagaataataattcaatcaccccagttcagcccaatgggtgcttcaagtgcggaaaaagtgggcattatgccaataattgcccaaagcgcaactctcagacacctcagaaaaatagcaatcaacaggttgaccaaagtacacctgttcgtaataacacccagggaaaaagttatcaaaaccagaataagggaagagttaaccatatcaccatagaattagcccaggacgcaccaaacgtatcaactccatacctgcttcagttttgtttgattctagagcatctcgttcatttataagtgagacattcgtg

SEQ ID NO: 90637 - DNA, 359 bp, Zea Mays
aaaagatagttttgcaaaggtgggtgcttactcatccgagcaaaaatttattagaggcgatcccgaagggattattgaatggatcggtgaagaagctgaagcttttaaagagatcctcagcgaccgcggtgatttttgcgcttttgctggtgccagaggggttgcagcaattttggaaaaatttggctatgaacatgttaaagctgcaatccaaacggaggctatcttcaccgtggagaacacgaaggatcctttggctgaggtgactctgttcggcgggaagttttactccaacatttggatggaaggcggtcgagaattggccgtcgtagctataaagaaaaatgagaaagaaactc

SEQ ID NO: 90638 - DNA, 616 bp, Zea Mays
tacataattatacagtagagtatggaatatacacacaaattccaaggtctaggtacttattacaacacacttgttgcacacactcatagacttacaaatagatgatatctggtagaagcatgaggatcctagtaaaggtatccaaacacatcactcgaagcatattcgatgatggcattgtccaagttcatgtattcggtgttggtcagaagcggagggttggtcgtgcttggttccattgtagccatgcttgagcaaccagctccatccttcaagttaggtgggttggtgaagtgagcttcatatccctgtccttcagcatttttcccttaagagattgctggtatagtgccactaaatgacaaggaatgaaacactttttagttggatggttgaagcatccacacttcttacacttctcttgcttggaagtgggggtgtctttcctcggagcctttgtattttgcttattcgtacgcttgttgcgtttgcgcttctttgaattatcagagttcttgggatggttttctagcataggagcagctccaacatgacattgcttatgattttttatcataagctcatcatgattttctgcctgaagtagatcaggatg

SEQ ID NO: 90639 - DNA, 467 bp, Zea Mays
tgctcctcaatggctgcctgttcctcaacggttgcagcctccttggtggcgacggcagcagcctacgcagcggcaagatgagtacatttcctgaaggtaccattcatcgttacacccctatgtgatatgttcccttcttgaattcccctctgttcatctctctgttcatcactgcactcttcaattcatctctgcacctacacaaccctcaattctttcattctttgtgttagcgactggtgtgactgatgttctaaaatatgaactctgatttgtccagttctagtattcaatattcatctttgctatgtttggtattgcctcctatatgctatattgttatatatattatatatcatatattatatatataggttctgtaaatatgcaggacaactatgtggacacccaagtcgactaggacccgattattcggcctaatcgtcgtcctaatcgcgattagtcgc

SEQ ID NO: 90640 - DNA, 684 bp, Zea Mays
gtcattattcctcgatcttggccatcaactatccataaggatgagtaaaacttgatgacaaagtgaataattttactactaagtgagttccatcagttgtgttgaagtatttggattcaagtgacaaaatatagcaaaaagatgtgagaatggacaacaatggaagataatggccaaacccatggaggagcatggtcggccatatgatggccacccgaccacctcgatggccgaccgacaaaggtgagctacccccccccccacttggccaaatctctgccatacttgtcctacacgtgtcacggagagaacaccacaacttggacatgttgccatatatttgaggtggaaggacaagacctcatcaatccatgtgaacaaatctaagacccaagaaagaaacacatctttgatccaatggtggacgattccaactagtaaactgacttcaaattgactcggaggctcatgcatagttgaatggagaatagaagaaggggtggccactattataacgtgtcatcctatccacatagctatggttggtatcccctcttggtgacaaccagagtgtgacccgtgtatcccaacccccatcgttcaataggcttgtaggtgatagttggcttcccttctgtgttctgcctatctacccctaagaacccttagaatctatataatttc

SEQ ID NO: 90641 - DNA, 400 bp, Zea Mays
gttgtacccctgccatggaatccggcagtagcaagcgataagctaggctgccaactcgggccaagatagagaatggtccaatgtatctcgggctgagcttcctagagacaccgaaccacacaactcctttagtaggtgataccctgagaaggacttggtcacccacagcaaattccagatcccgcctcctcacatcagcataactcttctgacggctctgagctgccaaaatattctgacgtatttcctgaacctttttagaggtctgctgaacccaatcaggaccaaccagagatctctctcccaaagtctcccagcacagaggggagatacaccgcctgccatacaaagcctcaaatggtgccatcttgatgctagcctggtagatgttgttataagc

SEQ ID NO: 90642 - DNA, 483 bp, Zea Mays
gagcctcagaggaaacacgatgggtggcgcctcgctaggttcctcccgcccagccccgtcagtgcttgcatagtattccttagtgcatagtggttgatgacctaaattaaaaagtatatatggctaattgtttttgtgcgagtacatattagattttgttggatttgtggtttttatctagctgattttattctcgaactggaaattgtagattgtacgatgctaccagcggctgcggccagcgggtaagagtaagattgcgaaccgggcctcgagtccatagggctagccggctagcgctgcccgggtaggggaactgatcgagccgacaacagctgagcagtactgcaggcttgcagcagagggacagacggacagcagccaaccacgacgcttcatgagtggaggaagacacgatgcttgcatcagcttatcggcttgcatgcaggttctgtagcagcttgtgcggcttgcatgtggttt

SEQ ID NO: 90643 - DNA, 492 bp, Zea Mays
cgccagccacggcacacggcgcggaggtccatgtagcagtcgaggtcgtcggttgccagcaggaggtcggcgatgcggttgacaaggtctgccgggagcgacaaccagctcgccattgccgctcggtaagagcacagatgcacagcagcacagggttaggctttggaactgagactgggagagggagagtttgtgcggaggttgaagcagtgataatttcaattttcaatataaatgattggtctttcgtgcatttagtttgcagcgctttcgaggagctggaacttcaaacgtcctcctggtacgacggtggccgccaatactcctccaattctttctcgggaaggtgcagcatgaggacgccgttgcaaacttccaatcatcggccggggaacaatccttgaacttccaagctccaacgacttctcctggaatgtaaattgggtcgtatgtccacggctccacgcttcttggttttcaaacggcccatgc

SEQ ID NO: 90644 - DNA, 283 bp, Zea Mays
cgaagaacgatgcaaccgagctagttcagaggtgtgaagcttgccaatacttgtcaaagcaacaacacatgccagcacagcaactacagaccataccagtaacttggcctttcgcatgctggggactggatatgattggacctttcaaaaaagctcaaggaggatatacccatgtattggtggcgattgacaaattcactaaatggatagagttcaagcccattgcttctttaacctctgccaaggctgtggaattcatacaagacataatatttagattcgg

SEQ ID NO: 90645 - DNA, 620 bp, Zea Mays
ggaaaattttagaggtaacaattgcggatagacttataacatcggaagcgaatagctgcttgctagcgtcagggtggtggggccagtgggttgcaaggccacctggcacaggggagaagtaaagcagaagcaaagatggaaaacttctcgtgaggcgtgacaagattcaagagaaggagaaaaggtttgaaaaagcctgtgagagcagaaaaactggctacatgtggtactctttgcttggactgtagcaggtagcagtgatacactcactgatacttgagttgcaccagcaacagtccagagcctctatatcttcgataaattgtctctcctataacgcacaaccatatcacctataaattgtctcccctataacgcacaagcatatcaactatattccaccttctacttttatttctctggcagcgatttctcctaaattttctttatatacctcactacaaccataaaatactgttttcataccttttatcatctaatattattttttcccaattaataaataatggtgtgcacagaattcgatgtaaggggaccgacacagttcacccttgatctgctgtgatgtagcttacaacaggggtagaggcgagcgttgc

SEQ ID NO: 90646 - DNA, 373 bp, Zea Mays
aaagatttatacaggtttgggccactaaagtatgtaataccctgtgtcttgtttgttgagtagatgatcttgctctgaatttaagggtaccaagtatctaaggaacgagaatgctcttctaggccatgagaggggagatcttttatgtagggatacctaacctgccttatataaatgacatgattaggattacagattaacgctcttgcttatcgctcaatcctacatgctcggagatttgttctgagttgtgcgcgacgtagagttggatgtcatctttattagaaatagctgccacaataccttggtattcaagtcttgtgttgtcgtgggtctgagttaactggccagcccacgaaatcgcccgcccagc

SEQ ID NO: 90647 - DNA, 460 bp, Zea Mays
gtgatttattgttcctgtgtactaggtgttcctatgatatttctgattttctttaatatgtgaatttgacatttctacaggttgaacacggattagggaaacttggatggcatgacagccaatgaggtcattgagttcttctgtgagttgattgtgaattgattgttacacgcacatgcgatctgtgattaatctaatgttcctcatgatctgcttctctttctttatcaggtttgaaagtctttatgtgcacttctagcacttctttttaattcaaggcatcttcacatccatgatatctaggttttcataatcaattttgtggatcttagcatccctgaatatctttctgaacttttgattggggttttcgattttcctgggatctaatagcttcattttttattgaagtatcatgtcaatccttccattttttagtttacattgaatggtgtttatg

SEQ ID NO: 90648 - DNA, 346 bp, Zea Mays
ctgctctgcaaccactagacacaaacgaggagacactctccctgcgagaagccaggagctagaagagaaaggctaccagcccaacacctcaggaggaggagttggatcaggagatcagggatctagaagccattcaccagcaagtagaaaggaaaaaggaaaagatgcttcagctggctgaacttcagaggaagattgacaaagcagctgaggaaatgcgtcatctcactcaggatgaccaagatcgaaggccccaacatagggagcctcgtcaagagagcccaatcaatgaagatgaatggtacgacgattttcatcatggtaactttgcttttgatgatgcttc

SEQ ID NO: 90649 - DNA, 428 bp, Zea Mays
caaaaattgaatagagttatgacagatcaaccaaaagcggaatcagcatctcgtggagtacgcacacggtactaaatagacaatttcgaagcatgggaagaaaatggaatgattcatactcgagaatcattacgtcttaaaatcaatatcccgatatacaaggaggatgttcctcctaaatttgtgaatgggaggccgttcttgacgatggtgcaactttctaagttgtcgactccggagattagaatgcatgagtggacatggtggctagcaacaaatacaaactcgagaacttcacatttgttgtgccgaaagatgcatttttgagcaaagataatatagatcttgtgcggcatttattctttgacgatctgtggtccttgtaccaccgacaaaagatggaaaccaactacttaacactcttttac

SEQ ID NO: 90650 - DNA, 456 bp, Zea Mays
ctggctccaagaggccaggtatttggccaggcaaagccaatttagctggccggtttgtactgtagcggctccaaagagccagcaatccagcccaggcaaattagatggaaggaaaaagaactggtaaactagctggtctcggcacgccagccatttcagttggaccaataggatgcgttggttttttggcgccaaaacgaactgaactaaggccacagccagtttgcctgcttcgttggaaacagaaggttattgctggccaggtataatactgagggcatgtaaactgtgaaatggctgggcaatatagctgctcgttgttggagttagccttatcagtaaccatttagctgtggcctgtaaaatgagcagttttgcttgctgttggtaaaggtgttgcttaatgttcttccatcaaatgaatgtgttgcttgctgtcatgctgtaagaaatgaa

SEQ ID NO: 90651 - DNA, 371 bp, Zea Mays
tgacaccacataagtcattgggtaaccaagcaaagacatctttgttgtggaacaagaactttgctagattcttttcttgttccttggtcaactgagatccgaacaacacattctgatcagctatatcttcacataagagtatggattttggttgatctcccgaagctgccttatcccttacatgtttctgttgctgatgggcttcagcttcgtctatattgtgaatagccctagagtctatctagcttcctttggctattctcgcagcctcttgacttccatatacagagattggaccctgatttgatggtattttcatgcacaagtatgctgggcgtaacacagcttcgaagacattcaatgttcccctt

SEQ ID NO: 90652 - DNA, 1260 bp, Zea Mays
ctttttcattttttctaattgcttcatcagctatctcacggtcgcccttcatccacaccttggagtaaaatctcccgcctagcgcagaagcttcggccgaagggtctttgatgtcacccgccgagaaaacaaatcctggctgaactacagccttagcatgttcgcaactagctttctctaagatcgacgtggcccctgtgcaccagcgaaggcttagaagtctcctcagtcatttaaaatttcatcaaaggcttcgacttctttgctgatccacaggacaattccatcagggtcgccacggatgaatttttgctcagtagaatatgcctcaactctagcaaagctgcccttcaacttcttagcacatttcaaggatattttataacatttctcttttgaagcacgaagctcatcgcagttcttttgagctctagacctttcgatctcgcaaatttcatgcttcactgcttcgacttcaaattttcaacagcttcaacaactttctttttcagctcctccacttcggttttgtgagctttggcttgtgcagcaaggctagcctcgctagattttagcttttccactaaggaaagtaatatcctatccttctcaagagcttcgtttctcaatgatataacttctgaacgaaggttcccaagagctattttgcagctctcatcctctgcatctttttgagcctttaaagccttgcttagaatcaagccctgaaaaatgatgaatgagcatgaaataagggtaagaaaacccatagaaatgtttcattatagaatgacaaaccaaaacatacacaccttcaggctgttgtaagcgaggttgtctgcaagctgatccttcgacatcacagataagcctagttcaagctttagatagcctgtattgtccgccatttcccgatagacatttatctctttattgtctagcaaacaataaaggaaatcatctttgtcatcgccaccatacaccaaggaccctcaggggtacttcagatccttggcataatgttgcacttcggcaagttgctcttctgataattgcttccccgaagcatgtcacacaatgaatttcagctctttggtaggtgctttaggagcaggagatttggatttctcagaagcaccctctttctccaggattattggtacgcttttcaaagatctagcttcggcaggaacttctgagggtctagcttcagaaatagtctgcgccattccggcctcgtcagatttctttgaaacttta

SEQ ID NO: 90653 - DNA, 789 bp, Zea Mays
ctggcactttggatcgttaggccgcacacccagagatggggcaagcagagccgcttacaagatacttcaagattatcttaatcgttttcctggggagattgctaccgccatgcctggagtctttcctaggggtgatatattcaaccctaagtgggaccagcaaaagggtagagctctaacaggaggtgacagtgaggagcagcacagcgacaccgaagcatccagtgcaatgttcgcagtgatgtagctgtataacaacacagagtgcagtttggaggtggtcaacagttctcttgccatggtgtagaaccagatgtaccaggcttaggaggcgcatgctgcagagttagcctaggtgcaggaagagttggcccaaattacacttgagaaagatgaagaagtctaggtcagagatgtggctgttttggataatgtgttgtgtattggcgaatgccaagactccagaccttactggtggaaatcattagagaaaaggaatgtagctttgactgaggtagcacatctcagggcaacacaggtcaacctaatgcaccagctgaacaatgcagaagcttgaaatgctaatatgcatgaggaggttcaccagcttcatgcccagctcaatccaatcaacccgccaggaccagaagaagcagacaccgtcgcagccaatgatggaggtgtagtctccgagaccggtagcgtgcaggtgtagttgttagctgtcactagaggataggctaacccatttggatagtgttcctaggagtaggaacatgacttttggag

SEQ ID NO: 90654 - DNA, 723 bp, Zea Mays
gggacatgctctaggggccgatgagatccctgaactggagggggagccggtcgtctttgagccgtttttcatagcctgtttttgcttgcctgtgcatcgctttgtttctgaagtcctagcttggttcgaagtccagctccatcagcttacaccaaattgctatggtggtgttggcgaagtttattttggtggaggctacatatggggggatcctttggtggatgtcttcgtgaagaattactgccttcattggcagaagaaaagtcatcggtggcaagattgcacagtttggcacgtgcacgctcacgtcgtggactaggaagacttcaggtgagattgtgcctatgcgaagaacaactaggggaattggtggggtttttggttttatgtggcaatgaaggacgtctaaggagttcctgggctaccttctaccattctatgttcacactgctatgtcgcctttccgcagtttgaggtggggaagaggaatgcgaatgaagatgctttgcgcagtgcgtcgaagacaagcagcgactgtgacttggtggaagaatttattgcttgcggggtgtggccattggcgcatggctgggggtggacaaggtgaaaccacgctcgatgcctttaaattggaaggtgttgagtctagccttcaccattaatctgcgtggccggaatggtgcaaccttcgttagagagacagtggttgaggcagtaaaaatt

SEQ ID NO: 90655 - DNA, 542 bp, Zea Mays
gttccttagctgtagctgtagggcaaccgaattaacgaccagacgggtccggacggtcgtccactcgtcctcgtccatctgcatgcatgcaatgcactctgtctgcagtctgcacatgggtttgttgttccgattccaccaccagcctgcagatatagctccgcagcaaccctggcactggcagtggtcctcagtgtacgtaattgtagtagtagataggcgccgccctgtgcgcgacacagcctctgaggacgcatgcactctacagggagctgtcgattgcaagtgcatgtgtcggacgtacacatatcatgcatgcatgtgaaatatactcctaattaattgaacaatcaacctacgatgacgatgctaatacgtactcccacaccatgtgtacgtgctgtcgcttatccaacacaatcatctgccgcatgtgctgtgtcatcgggtacgccggccccgcatcagcttgccacactggcagatgtatccgttgtgctcttccgtcccttctattattagtcgggttattaggatcatat

SEQ ID NO: 90656 - DNA, 372 bp, Zea Mays
atttgagacatgtacaaagcatccataatacatggcatgctgaggaaaagcacatgcaaccccaagggttagcccaatcctcaagcaatactctgtagacctagtagagcaactttcaatgtggaccacaaccaagaggggaaagagaaggacatagttccggaggaaggcattcacaaatctctcaaaaacgaacactatattgtgtcttttgtggagaagataatgggcactctaccaagtactgcaccatcactatacagaaacaaagggagctagcatctaccatccaagctagccaaccgaaggaaatatgtcacatgccatcctactatgtccagcatcagggtcttaatgcccatcctttggcct

SEQ ID NO: 90657 - DNA, 602 bp, Zea Mays
caacttcatagagctgatcgacaaggtactatgtgctgagtcagataatttagagaatgagacagatgtgccacaataaacaagaaattcggataatttgtcgcctaggaggctgaatcatggcgaggtaatatagaatggttgaccttatgagtatctaatttattctcaaatgtagcaccgtatgatacacttctttgaggtaacattctcatagctagtcctacttagacacctgccatccatagtaagaaaatatatactagttctatatttagggaacctgatcttcggcactctaagggttgttcttgtacctaaaagccaagaacctctctgatatttggaaccaactcccagtaataaaatacttctctccattcttcattgttgttgcgtcttcctggtgttgcctctcatgcttttagaatgaactcctaggcaagccctacaaatcgaaatctaggcaagcctttttttaggtagtggttgagtctagaagggatgcaaaatggtcgattaagaaggactcctaatgataaggttgcgatggtggatgataatcaaattaaggatcatggacgaaactagctaggtcaaca

SEQ ID NO: 90658 - DNA, 664 bp, Zea Mays
cttggagaaggcttatgacaaaagaccaatgaatattatgtggtgggctttggacaagcataaagtttcaacgaagtacgttgaacatgtacaataatgtcgtgactattgttcgaacaagtgatagagacacctgacttctagattagaataggactacatcaagggtcaactttgagcccttgccttggtttatgttttttgagggcaatgtagtgctagtttattaaagccgagcaagactaactaggaaacaagagttgtggcgggagactcagcagaactaaaaccgaatatatgagatgtgccaaagaaggatacctttcggtatagggtcgatgctaccgagagacgatgatattgatgaaggtgttagccagtagctatagattcaaagtagggtggatgtagggtggatgaagtggtgtcaagcatctaacattctatgtgacaagagggaaccatagaagctaaaagcgacttttataggacgacgattagacctgctacgtttcatggtgcagaacgttggctacaaaaagatgacatgttcaaaatgcgtatgatgcattcgatttgtggccttacaataaggaatcgagtttggaacggcgatattccacattctttcgggctaatgatttgaatattagatagattcgag

SEQ ID NO: 90659 - DNA, 663 bp, Zea Mays
tactcccacttcgtatgtcatgcttttgttagttgttacacatgattgggtgagcgtgctgcagggcatgttttatataccaagtcatgcatcatcataaaatttgtgggactctcactatctttctttgcactcctgctcttcatagggctagccattcctcttatcatctatccctctttctgacaacaatgttttttcttggtggctccctcaatgcttgaaccaagaaaacaaggctaagtttcatgctatggcatgtgtgactgctagaattagacgtacaatcctactaggccttgtaattgtagttttttctcgaatacacaggagagttgtgtatcattatattaaaaggagagaaacacccccccacacacactcacactcacactcacaaaacaccacctacatataacggcccaacacacacacaaacaaacaaggagaggaactcctctaaccagggtcgaacaggtttcgtatatttttggcacctacaagagccaaagctacaactcatccctaacccctcctcaagagaagataggcaaggtctctttccatgaaagacacactttttttatgtttccaaagctccatcctccaataatgataatattgttgaaaccttttcttttgcatttagggaccatatatgaa

SEQ ID NO: 90660 - DNA, 300 bp, Zea Mays
gtttgctacgcctggaaacgcgtcgtagacgaatgcacgtgttggtgttgccagtaccgcacgtactaggtagaaggctccaaccaagtgtcagtgtctgaagggaccaacagagaagacctccacgacggttgtggtgcagcatgtcgggagtgctgttgcagctcacgattgtcagagtggagtagacgaagtagttgaggatgagatggcgacgctggcaacaaggttgtgctggaagaaggtgaagaggtaggcatggcgacgcatcgaggattctggagtcgcggcggcgagagc

SEQ ID NO: 90661 - DNA, 541 bp, Zea Mays
gcacgccagctgtccacaaccccgaaggtctgcaaataacttaggacatcgaaggccaccgcatcgtcaacctcatcatggtcgaagactgacgggccccaataacactatacttgcaaggccactaccatccagccgatcacaatgaggccaaacgactaaagcacatgagcagggacttcgcattaatcgagggtcagctgtacaaaaaggggatcagtcagcccatgctgaaatgcataaccgaaaccgaaggcatagaaatcctccgcgaagtccacaacggaacctgcggctcccactcaggacccagggccctcgctgcctaggtgattcgttagggattttactggcccacaataatttgcactgccaatcgagtcagaaggtcatgcgaagcatgccaaaagttctctcctcgctcaggccacccttcgcaattcaccaagctcatcgcccatacatggccacttcaacgttggggttggacatcgttggaccactgcccactgctcaagggaatctcaagttcacctttgtc

SEQ ID NO: 90662 - DNA, 494 bp, Zea Mays
cggagagtcgcgatagcagttcgatgcttgccgacaagggaaagcaagggtggcgccgcagatggaagcagtggcgtcgcttggcgagtcggaggctagcacgatggtccgatgtcatctacggaagaatatgggtgagggaggcaaagacgagaaacagatgagcggttcaagatgcttgccggtggggaaggtaagggggtgccggttggtgagactaggaaacagatgagccccacggatgtggcacgacgacgacgatgactggcgagtcggaggccagcatgatggctcgatgtcctccatggagaacctaggtaagggaggcagagatgggaaaccgatagtaggttgagatttaatataaggactcatgctattggtggttgcatggttggttgcatatgcaagaaataagttttttcttatctaatttttagacgagacgtggaataaaacatgtctacatgcttcacggtgtgatgcacgaccgt

SEQ ID NO: 90663 - DNA, 554 bp, Zea Mays
cagaccatccgccgctacaccgtcgtcgaccacgtcctcaccgcggtcgctgcaccgatggaggattggctcctgatggacgaagtggtgctctcttggatccatgacaccctcacggccgagcttcaggacatcgtttgagtgccggacgatactgctcaccgtatctggggtgtcgttgaggctcagttcctcggcaaccaccagactcagattctgtacctagagaccgccttccgctagcttgttcagggtgatctctctgtggaagagtactgccgccagatgaagatgatggcggacactctcctcaccctcggggcccccatgaccgatgagagcctcgtgctcaacctcctctgtggtctgagtcctcgcttcgatcacgtggcgcccatcgtcacccacatgaagatgtttcccacctttgcggaggccaagaacaatctgcttctcgtggagctttgcctctccgccgctgcaaccaccgctcccgccatggccctctacagcgtacctcgggctgccccctccgactctgtgggggttcccgc

SEQ ID NO: 90664 - DNA, 311 bp, Zea Mays
ctcatggcgataaggaggtaaacaggaatggcagatagcacaaaacgaaccaaagcagttctgctcgccaagttaagaagggaggccttccagtaaggtaaacgatcagctttcttttcaacccaaaccattagagtactcttcgatagcttcttgttggatatgggcagcccctaagtaggtgcatggaaaggttgttgaagggcattgcagtaaggaaccactttcctgaaccgcctgatcattacaagcaatagggataaaacaactcttttgcatgttggcaaccaaccccgaggcctccccaaaac

SEQ ID NO: 90665 - DNA, 716 bp, Zea Mays
cacctcgcccgggttcaatcacacgctacgctccagcagcagcaccagcaccaccaaacccaccgtcacttgcggccgcaagcactatcacgcgaaccgcacaagttaaatgaagcttcgtggctctgggtctggacagggctgcgctgagtgcgggctcttcctgggcctgtttgggctctggggccgggctaagcatgcattttccagtcacatggcctgctaaatcactgaattgtaagagggccccggggtggagccgctgcaagatgggacttttgaaattttaaaaacgcacactgaactgaaacaacgctgaagcaaacggagcactactgattctgctaacaaaagaagagaaaaaattactaattctagccatgcacggtcagactcgagaccactcatgagaagaaaagatgcatggagaaattaacagctggcttcatcaacattcagggacagatccaggttactagaactccagaagagaaacaaaccgcaagaagacgagctcttttgtgctcgacaagcacgaaccatgtttacattctcacaacagggacaggaaggaggccgcggcggccaggaacagcagagcgggcagcgagctccatccggcggtcctgctggcgccgcgcgcggccgcgccggagggcggcgcgtcagccgagccggcggcgggcgcctcggcgacggacccgcccttggccggc

SEQ ID NO: 90666 - DNA, 700 bp, Zea Mays
cagataacacctgggtccactagaaggagaataccctacttggggccataagccagtcgccccacaaggtcgccgcgtcgtggaccgggcaaagacaacggcggagatgggtcgacctaggaaggcgatgggctcacgtccggattattcacggcttggttgtgatcctgttgaagctgctctcttttcccgtgcccgacgtcctaaaacgccagggatagcttggaacggaggtgctggggtttcctcaggataagcaaagtctgttcgctattagctaggagataagctggaagattgtgctcagcatgtgcgtagggagtgccctgcagtcgtgtatataaggcctagggggatccccatcatttttatctcattagcacctctccactcgggagacaccacttgtaaacacacgacacatacaaagccaccccaggaagtagggtattacgctcctcaagcagcccgaacctggagaaaatcgcccgacactctcttcctcatgcctccgacatgaaccatcgagttacgatctatcgcaccgtcctacccaaaagcaccacgagggtaccccctggtgtgcggtcggacaacaaacaccaacacctggtgttacgagaactaaaactttggaatgacatcatatgcattggcatttcattatttatgctacacctaggatgcatccactaggtta

SEQ ID NO: 90667 - DNA, 757 bp, Zea Mays
gcagtagccacctctaatgctgaaggtccctcagtcacttccatgggagcagggcaatccaaatcagcttcctgaccctcaagaccgcgctccaaggtcgatgaggcgtgggacgctgcccgagatgaccccaacccggcgtcgagtacatcaacacaaacatccatcgcgccaccatctgccggttctgataacagatcctctggaaccatgtgttcaagagtttgatcaaagttcgccagagataattcttgtagaccaatgagggcagacaaggcgggagaaggaacaccactactttccccactagctacgtaacgccggctgttcttccgattcagagagatttcgtcctcttcttcatcatcctcatcaacaacacggacagcacactcattgggatcagcgtcagacgggtcacacccattggggtcagcgtcagacgggtcacacccattgggatcagcttcagtaaattcatgcacgggcacttcctcagcagtaggagcagaaggaccagcatcccgatccaagctagacactcggcaaagacgtctcttcttctttttctacccatcagcaggaggagcaggctgattggctcggcaagggtgcttcgggcgaacactgtcaggcctctaaatatccaaggttttactagcttctgggagaggcatcaccaccaatgttccggcaggagcggcatcaaaagaatcctcggctaacatatcaagcatggcacttatttctgcatcac

SEQ ID NO: 90668 - DNA, 1748 bp, Zea Mays
caaggagatggcatggctgattgggtgcatattccctgccttgtgggcaggagattgattggctaattgggcgtctaatttcctgccttgtggggaggctgcgcgcccacctcctctctctatttaaccaggggttgcgcccctcctagagttggattttctttgatagttttagccatcgtgcaaacttcctgtattgcagttgtgctcaacggccacctgtgaacaacctagtgaaccccaactcgtgagtgattgatattcagttttacctacaacttgttcttgcttgtttcttcgattgctcgcgggaatagaacttcgtgttaggttgattttgccaccagcaaggtcaataaccatttggagttggttctgcgattgctaaggtgccatgacctgttcgtttgtagtcaaatcgctagagtaacctcctccaccaaatcgaaattatccacctcaccaaaagatcgggcactccagttctatcaagtggtatcaaatttttaggttgctcggtgagtgttattgagttttatccctttagtttgagagtgtttattgtcccaacgtccaccagaaaaagctacaaaaaactttttaggctagaacattgttctagaaccatttggccttgcattttctttcagtaatattgtattattgaatttgtgagcatttgcatcaagtgttgctggttgcctcgtagttccgttatcaccgtcgttttttcgttcatacatcccacgtctatcgttcaccaccattttttcgttcatacaccccacgtctttttttcctctctgctggtttcgttggcacgttgtcagccttgctgattggaacgctttggggcgtcagatctggttatcaaaaaaggaaggaaagaaacaacaaaggatagcaaaaaaggcaaggtacaaaaaatataaaaacaaaagaagaagaaagaaggaaagtgaaagaaggcaaccaaaaattagtgtgccccatttccttaatcagcattgttgggtttggcaagccgaacctgcaatcagatttgggcacctaccatctttgtttttggcaagcagcccactttaccttacacgcccctcctttccttgttcagggattcgggagcgcccattttcttgtccaacattttttgtttttggcaagaggcacctccatatttggtgcgaccaagctttccaattcatgtcattcgattttggaaagcaaacattgtttcctcgtttagggatttggttctcccaagcattttgggaaaccatcttgggcgccactttttccagccggggttttggtacgccttctccaccttttgcacacctcccttacacgcccccccttgccttgttctgttcggttttagttggttccagcagcattagctacgtgtttgcacccttattcaactttacatttgctgattgattgtgctaatccttgctctaaagtgcagccttcctacaactccacaaatatctacagcgcgtaggttgtgtcctctagcaatcgttatccaagcttcatggttgcaccgctgttttgcaggtcacccctgtggacatggtaagaatgagtaagaccttgataacggttgtttagttgagcgtccagttccacaacccattcaactagttgtaggacatattattttgttccttgttctcttgtctttgcactaactatggcacgaccctcgggggttacagaggatgagaacaccatgccacagt

SEQ ID NO: 90669 - DNA, 646 bp, Zea Mays
tcgaccgtggtcgctagaaatgaaacggatgagtctacgtctaagttttctgagtttgatgactctgggagttcggtagtgtggacggaagagtcttcggatgaggacttggattactttgtggctttggatgtggctgtggcggaggcttctccgcgtgttacggatgctgaagttttgcctggtccgagtgctgggcgtaggcggcgaagagcggtggcgaagcgtagagtgagtgaagtggatggtggtcggcttcgtgtgggcagggctggcaagcgggaattgttgtcctcgccggctggggcgagcatgggtgagggggagttgcgaagtcttttttagggtgaggagctgaggataatgctgtttaactatagggagatgggaatcattctgaaggttgaaccaatgtaaggtgtgatgccctcgctgtacgtgtgtaactatagtttgtatgatgaggttgtgtgacttcgcgcactcggctatgttcataggggcgttgcgcacttggtctagcacgtttaatatgtcggtccagctgcgcctgtagtcggtctttgcgtggacagtttctcgatgtagacttttgcacggatgtaatgtgccttcgattttgcgcactcgttgtgctagtctggct

SEQ ID NO: 90670 - DNA, 668 bp, Zea Mays
gaaacattctatgagtttttgaaaaatgttaagtttccagatggatatgcttcaaacctaacatcatgtattactgccgatggatgcaacttggctagcttaaagactcatgattgtcatatcatacttcaaaggattttacctgttgcactgagaggaatcatggataatgacatatatattgcaattgccgaactaggtcacttctttcaacagttgtgtgctaggaccctaaagttagatgcattgcacaaaatgaaagatgatatcccaattgttctatgcaagcttgagaaaatatttcctccatcattttttgatgtgatgctacacttgacaatccatttacccgatgaagcaatccttagaggtccagtgcaatatggctggatgtacccagtagaaagacgtttatacactttgaaacatttcatgaggaacatggctcatcctgaaggttcaattgcagaatcatatgttgctaatgaatgcttaaccgcgtgttcgaggtattttgatgatcttgatacacgacacaacagggagggaagaaacagagagcgtgttgatttgaccaagggtgagttgtctgtttttcaacatggtgttcatttacttggagcccctaagattacatatgtagaaaaagtttttgacaagatggtttg

SEQ ID NO: 90671 - DNA, 342 bp, Zea Mays
cctcgcattgtatggattagctccggttgtggttctgcggtcgtttggagatcgagtcgaagtctacacggtttcggtgtctctctccccgtcgcttggtcacctctgaccttgatcaggtataaagtcagttacctgctattcttcagcaattttaccttggtattcagttacttttatacccaaccatcctatttatcaacctactgtcgtgaagatcgggccaccccagtatcgaatataactcaattcctatcatctggtatcaaagctttcgttgtcacagtaggtcttactgtcatccatttatttatcacagtcttcatccatcttatatttttt

SEQ ID NO: 90672 - DNA, 673 bp, Zea Mays
gtccatgaatacactgtacatcaagttcatgaagaaggctgatgcattggttagaccaaaagacatcacagtgaactcatacaacccatacttggtaatgaatgtcgtcttcagaatgtctgaaggtcggattctgagttgatgataacctgacctcagatctatcttggataacacactggctcctcttaattggtcgaacagatcttctattttgggcaaagggtacttgttcttgttgtgacctcattcagagctcgataatcgatacacatccttttggtgccatctttcttctccacgaataggacaggggcggcccaaggcgaggtgcttggccggatgtaacctttctctaacaactcatcgatctgcttcttaagttcaaccaactctggtccggatattctgtaagctctcttaaagataggggcggttccaggaagaagctctatggcaaactcaactttttgctctggtggcatacctggtaagtcctttggaaacacatctgggaactcagacacaacctggatactctcaattgggtctgcttcactgctatcgacagccatctgataacaacttcctttctttggctcaggcgggactaactcggtcaccacttcctctcctagtggggacaccaacttgatcgtcctcttatcacaac

SEQ ID NO: 90673 - DNA, 399 bp, Zea Mays
ttgaaaacgcatatcatgaagaagagctgaccctctgctggcactgaagtctgtgatttcttcattgggggatcgtcgggcttgagccttgtgaagaaccaacccacaaacattgggagcatcatcggaaggaagacctataacatcacttttccgccttcatcatcactggaaggctcccatgcttgtggattagtcgcaggacgagagcgactagaaggggttctagccgtactcccgcgacttccctaagacctagaggcctcaccacccatcatgacatttccagatcctctgccacgcttggatctggaccatgagggcacctcctcacgaatcttaggggaactatcatccgagtcagatttgatgatggatggattccggcatcgaaccatc

SEQ ID NO: 90674 - DNA, 424 bp, Zea Mays
agagaaggttcaacgaataattcataatttgaagaaagctcaagctcgtcagaagagttacacagacacacaccggatacccttgtactttccagttggagattatgtctacctgaaagtttcaccaatgaagggtatatcacgtttcggggtaaaagggaagcttgcaccctggtatattggtccttttcctatccttgaaagatatggaccagtggcataccgacttcagttacccgaaaccttgtctgcagtacataatgtgttccacgtgtctcaattgaagaagtgtcttcgggttcccgatcgcaccattggagtaacggatgttgccttagaaccagacatgacatattctgagcaccctattcgggtcttggatcaaaaggacagaactacccaaagaaaaactctcaagttttac

SEQ ID NO: 90675 - DNA, 648 bp, Zea Mays
aatcttggtgagaaatcccttcccagtctcgctttcaactctacttcgaattatcgtgaccggagggatgattcgtgcggggtttgggtggtattggtctggccgaccatggcgccgccgcgggaggagcttaactccgacgactggcgagtgagagggggcgcgatgggagacgtgtgccgtcggattttgtggcaacgctccagattagatcgtggccatttcgtttcaccaccgtggatcaatcaacggacggtcttgatttaatcaggcgtactgtttcgatctggcgcgccctgaccgtcgatcggcgatcgatcggtttctgggtgattcgttctgcttaggatccatgccgttgatttttaatcctgtggccgagctgatgtagccatccgcatgatgatcagatctaatctgatcccttaagttttgatctgacggtcctggacaacggataccccttcgcggttgtaaatatgcataagagaccccgcgaaagacagaaaacaacccaccgtccccatccgctgagtctggggaatcttgcacagtggcccttgagtttctgtttatttggtgcgcagtccatccaatagtaaaatctgagaaattcatttctaaaatgattgttaatgtaaaataatt

SEQ ID NO: 90676 - DNA, 810 bp, Zea Mays
gccgatgccgtcgacgtcgtcttcgatctcgtgctgttcttcagctttacagccggtggaagagctagtagtagtagtaaagaggagcgaagactggaagagagagagagagaggggtacagcatgcatgcagctgatgatgatcagctctgctactcctgagtgctggctagctagctacactaccataccaataagtcacctcacatgtgcagtgttgtaggggcatgcatttatgcctctttcgtttctcttttcatctgcagcattcaattccatcactctgagtgagtatgtgctcctatactgcacattgtttttttttccttctaatctatttccctctctctctcgtttgcattgaccatgtctcattgaagctaagatttctcaccattgcatgtgttccttctccatgcaccttcatgcactgaaatttttgagcggtttaagtagttgagcaatattttatcattcacatgcctcaactggagcactcatgcatgcagcggtcgatcgaaagtgctgaacctttccatcaaccatcatgaggtcatggcttgcatgagatggagcgccttggctgtttctttttttattacagcttcagctaggtgcgggtgcggctcatgtatgcacgccgggtgcagcagggcagggccgagaaagcagggaaaaggaagatgtcaatggcgccctacaaaatctgcaagcgcgagagccggacgcggcaattactcccgtcagtccctatactatacgtttccaaggccgcatcatccgcatggcattgcactgcgtccggggtcc

SEQ ID NO: 90677 - DNA, 431 bp, Zea Mays
ggaaaatttagtggaggactttagaattagaggatggagggaggggtaaaaggtggattagggtttcaaacctagattgggatttttgggatgctacagctcccaagtctcatatgcgcggctagacctaaggactacgggactggtgctctctactaagccttgggtgtcgtgggggttcgctccttggctccaccctttatggtcctctgggtcttcaagtgtggtcgtccgtctgcgtgtgtatgtgtgtgtccgtctatctgtcgaccgacctcccgccttttataggccaaggtggagggtcggttactagtagcttctcaaggaaggagctacgacgatgtggtaaaatgggacattctaccttggtaaagtagtgtttatccgcatgcgcctcagtagtctaggcttgccttgtcacgttcttt

SEQ ID NO: 90678 - DNA, 1074 bp, Zea Mays
tgagaatgtcacaccgccttaagtcgtcgccgacttaagtcgattgctccgttagtagggtatagtggtcaccccgagttaagtaagtgcgagcatgtcacaccgccttaagtcattgccgacttaagtcgattgctccgttagtagggtatagtggtcaccctaagttaagtaagcgcgagcatgttacaccgccttaagtcgtcgccgactcaagtcgattgctccgttagtagggtttagtggtcaccctgagttaagtaagcgcgagcatgtcatatagccttaagtcgtcgccgacttaagtcgattgctccgttagtagggtatagtggtcaccctgagtcgagtaagcatgcagattgacaataaatagctcgagtgcctttgagaatgaagtctttttattgatgacatatttcccaatttacagaatacaatgccatcccaatagcttttgaaatctagctaggggtaaaacttcctgagatgctctatattccatgagttccctatttccgtgccgtccatttgagtaagacgatatgatctaggccgagtgacttctgctactatgaatggcccttcccacagtggcgacaatttgtgccgtccttcccccgttagaattcggcggaagacgagatctcccactatgaaggatcgatgtcgtatggccatatcatggtagcgccttagagtttgctaataccgggctgactgcatcaccgtattcaatcgttcttcttctagcatatcaacatcctctagtctggtagtctcagcttctgctatgttctcgaagattaatcttggtgccccaaacttgagatcagcaggtagcactgcctccgaaccgtagaccataaagaaaggagtgtttccatgcaaagctcggctgggttgagttctcaggctctagacaacatacgacaactctctgatccactttcctgcgaacttttcattcttatcgaagaccttctttctgagtgcttccaatatcattccgttggctctttctacttgcccgttggctctcgggtgcgccaccgaggcatacttgatctgaat

SEQ ID NO: 90679 - DNA, 325 bp, Zea Mays
ggagggcgaggggtgggatcgccccgagtttggagacgaggtggaaggtacgtgtatgtggatttgcgcgcgaaccagcttgtacaggttgcttgctctcgagaatggccggcgcaagaacggagtaggaaaatgggatcattagccgtgataatctagttctcctaaatctaacgaacttctaaaatttgattatcgtctaaagcgcatcaatgctgatggttgtcagaaccgaattacccaaatgataacaaagagcaattgtttcaactgacatgtctgatcagtttagtttatacgagagtaatctctgattctgttcgcc

SEQ ID NO: 90680 - DNA, 299 bp, Zea Mays
ccttcttctttcttctttggcattccccatctgctagaagttgggaaagttctatttgccaagtattcctacactaaatccctagtgccaatatgcccagccaccaccctgaattcaacttcgatagttggcatggggagctgagaagcatgttacacagtggtctcgtcttgtcgaagcttaatttcaaagggctcatcaccatactcataagcttttctcttttttctcgtcagctttcacataaaaccactcatttgtccagccagtaggccatttggtgcggtatccaatcacag

SEQ ID NO: 90681 - DNA, 735 bp, Zea Mays
ccagaggagatcccatgccctcagacgtattcttccacatggtcggagcacctgtggtaagagaccccgatggcctaagaatcacaaaagactccatcaaccaaagaatcataagcctcatcatgaccgaagactagaggacccccataaccctatacctgcaagggcgctaccatcacacggatcaagccgaagcgaaaatattgaaatattgaagtcgaggattcacaataataaagggctatctttatagaaaagacaccaatcaaggtagagagctcctccatgaggtccacaaaggagtctgcggcaatcactcaggccctagggcctcgtcgctaaggtcatgcgccaaccacatggtacgctcatgcaaagcctatcagaagttttcaccataaagcggtaccccctcgcagcagacaaagctaattgcccacacctgaccattgcagtgttggggccttgacatagtgggctcactccccatagcccaaggcaacctcaagtatgccttcgtagtcgtggaatacttcaccaaatagatagaggcaagggcagtctccacaataacgacgaatatagcacaaaagttcttctgatagaacatagtttgtcacttcagggtcccctcaaaattaatagtagataacataaagcaatttggcaaccaagacttccgcgacttatgtgcctcaattgggactcggatagtctttgcctctatctaccacc

SEQ ID NO: 90682 - DNA, 499 bp, Zea Mays
aacatgcgtatctaatgtagtccgtacgaccacctgccccgctgaaggtgccaaagtcaacaaaggacaacacgaccacagtctaatctacttttaccacccacaacgatgctcagagcgcgaatacagggcattattcccccagtctgaccattgttttaatcacccagagtgtgactacatgcaacgtctaatcttggcctcgacctcggaagaaatcttcgcctcgcccaagcttgacctcggccaactgccccaacagggaagcacgcgcaataagaccaccttctctcccatgaacctctctgaagatcggaaggctacaccggtgtccaatctactttcaaccgcctaggatgacatccagaacaaattaccacacaatttttcaccatgccaagcactgtttcaaccactccgactcgacacacttggaaacgtctcatccgcacctctgtacaggccaggctcggacacacacccatgctctcgaacccga

SEQ ID NO: 90683 - DNA, 364 bp, Zea Mays
cttgcctagacatctggatctgatggaaaccagagtaagcatctaggaaggataggaggtcgcacccagaggtagaatccacgatttgatctattcgtggaggtagatatgggtccttgggacatgccttattgaggttggtgtagtcgatgcacatccaaagcttcccattagccttgggaacgatgactggattggccagccatactgggtgatggacctcttcgatgaagccagcgtgcagcagcttccggacctcctcacgatgaaatcctgccgctcaatggactgtcttcgaggcttctgactcaccggtttggcatcagggtggatcttcagatgttgctcgatcacctccttggga

SEQ ID NO: 90684 - DNA, 305 bp, Zea Mays
aaaagctgcagcattagatccctgactgactgacaaagaaagttaccggcgcagcaggtacaattgcaaagcagtacagtataccagagcggcagcacaacaggcacgtactgactagacagcgttgtgtcgggcgggtagtttagtttgtttctgctttgcacagcaccagcacagcaatgaagggtaaaaactcgaaaagggactaggcaagacagtgtaacgatacgctacgtacgtacgtagagagagtgagtgactgctgatgcgtagcttgtgctcacttggagagtacacttgtactg

SEQ ID NO: 90685 - DNA, 431 bp, Zea Mays
aaaaagggtgcaccaaaagcacgagacttgtgtcatccactctatagtgacaacctagtggtggatgttggctagtgtgtagaacatttaggggtgatccccaatggtagggttctaaaccaaactagggcaagtatgatgagaaggtacctccaaataaacatatagaagctcgattggagggaactttgatggggactcatcctcatcctccgacgcctcatcgtggagatggagtttcccactacaattagtggcatagtccatactccctaagttgagagcctagctaggggtgtcggtgaaggctctactgacgaagatattctcattagagaagtgcatgttaccctcggttgtgatgcctctagatttggtgatgaggatggtggtctacaccatcgaagaacatcaatcattcatgatactag

SEQ ID NO: 90686 - DNA, 647 bp, Zea Mays
gaaatagtgccataggaggtttgaaattgaaaatgaggcatgaaatgatctggaattgagccgatacttcacgaataggtttatatgggtaaatatgagtgaagtgtgcgcttggtttgattttaggcgaagaaaatggaattcaggcactcgactcggaattgattgctcgaaatggggaattgagtgaaattgaagcctggtatattggattggcgtgaaatttggcgaatatgttactggaggtattgtgaaggtgcatgaaaagtttgggttcaatcggagcaatttttgctggtttgggcatttcgtcgagcacatggcgtgcggtgttttagggttttagagaaatggtcaatttaggttgtgaaaccctccctaaggagctaggaacgtgcagggtagctcaagggatacatagatgctcttggattcacaagaatttcataagaattggaattgagcaacaaggggtgaaaatggagttcactgcactgagcaacagagagaggagagggaggcagaggatgctcaccagagggagagatagggaagtaggggaagcttcttggtcgccggaggatcgctgccggcgagaggaaggtcaccggagagagcagatcgccagagacagagagagcagaggc

SEQ ID NO: 90687 - DNA, 271 bp, Zea Mays
aagatactctccactctagtggcccagtcatcagcgctcatcgcggtgagactttcgctcttggaagccgcatcatgttcggctccctcgacttcctcaccaccacaaccggtgaatttcgtcttttcgaccccggcgtgcctgttgccacaagcgcaggatccacgtgctccataaggagcaagacagagaagtggtgccttaatcggctcgtcgtcgcaatcaagcagcacacagaggaaacttcaccattaactttcttggtcgtcat

SEQ ID NO: 90688 - DNA, 386 bp, Zea Mays
tcctgacagaggtcagttttggtgtaaattcttttacagttttgtgtgccaacatcaatcaatcaaccaaactagcagttctaaaaaagttaccaaagaacggttaccaaggactgaggacacagtttggataatctgctaatcatggtattcagttattctactgaaacatatgctcgccacactagctgaaccacttgtattaaaaattagcagtaacaccccatggttcattttggctgcaccaacttgcaagagcgtagagctaaatatgtcatggaagtttcgtttaagtatgcaaaagaagcatacacctatcacctatgcaagctgcagatggaaatatacaggtgtaacactttcatgccgataaacttgtaccaaag

SEQ ID NO: 90689 - DNA, 665 bp, Zea Mays
gataactatgcgattgtgcacgtacgtacagttttcagtgagtaaagaacgtaacaaaaacacatggattatagtcgcctcacgtaattaattctccccctgcagaaatatcttaattatatatggcggaggaaaggtgtttcctttcgttgaaaaaataagtccactttacactcgctttgatagcttgccgacggacgacacgaaatgtggacgaaaggaaagagatatgcacggacggacctgtacttgcagtttggacgaaagctatagctacgagcggatcggagcgggtgatcgatgacgcgcgccgggcgtcgtctatatccacacagcggtttgaccctgaaaaggacctgtacttgcacaacggtaggggggaaaacaaagagagaaagagtacacacggagaagttttgtccttgctctgttgctatcggatgatgctatctcctacctttccctgttgatattacttgtagctaggtcaacgctgcccggctaatttaaaatctggaccgtcggcggggttgaaaacctctggtcttcgtctgcgcactcggaggacgacagaaaatctcacgcgcgggctctgacaaactgaaaccgaagatatatttttgttttgattgcgtagtgtgtcattgtgtttgtgtgtgtgtggg

SEQ ID NO: 90690 - DNA, 486 bp, Zea Mays
aacgaactctgtgatcttcgaaggcgtgcacccctccaccacttcggtcctccgccagtgcaagatgaggccgccctgaggcgtatcagactgcaccgcgaggacaccgccgtggctaacctttggtgccgtgcattcaccacggcgatgctctgatcaaaccctcccccctctttgtatattacaaattttttcagctagcctacttttgatctgattaggcataacaccatacaaataagacttttggtttattctgatgactttaaatccttgactttcttctgtcaaatcatttattaacagtgaacttgtgttccacttgtacacttacctagaaatataatgcttggctcttaacaaacaatggtttcattttcttatccattcatgttttaatattcttccctgtgtgctagtgcttcttttgacttttgttcatggtccaccttttatgtgcatatacatttcaggctcaggttttag

SEQ ID NO: 90691 - DNA, 1078 bp, Zea Mays
gcgtgagcaagttgcaccgacttaaatcgtcgtcgacttaagtcgattgctccgttagcagggtatagtggtcaccctaagtcaagtaaatgtgctgatttcaagccaagcccaatcgaagtcagctgtaagtcaagagtctgaatgcctttggaaaacaaaaagtttattgatgatgaagtcctcagattacatagtacaatgttccttcaagaatttagaggcctcgctaaggataaaattttctgaggtgttctatgttccatcagttcccacttttgtgtcgtccatctgagtaagccggtatgatcccgcccgtgtgacctctgatatgatgaacggtccttcccatagtggtgatagcttgtgccgcccttcccccgttagaattcggcgaaggaccaagtctcccactgcaaaggatcggtgccgcacaactttatcatggtagcgcctcaagatctgctagtacctagtagactgaattactgtgttcaatcgttcttcctccagtacatcgatatcttccagcctggttgcttctgcttcggctatgctttcgaaagttaacctcgacgccccaaagattagatcggcgggtagcactgcctctgacccataaaccatgaaaaacagggtatttccatgcagagcccgactgggttgagttctcaggctccagaccacgtatggcagctctctgatccattttcctacaagcttttcactcttgtcaaatactttctttctgagtgcttacaatatcattctgttggctctttctacttggccattggctcttgggtgtgccactgatgcttacttaatctggaagctctgttgctcgcagaaatcgaagaattcagagctggtgaagttggatcccaggtcagtgatgatgttgtttggtatcccaaacctgaatattatgtcttgtataaactccaccgctttggctgaggtcaaagaagcgattggcttgtactctatccattttgtaaatttgtcaatggcaactagtatatgagtatagcctccttgagctttcttgaaaggtccaatcatgtctagcccccag

SEQ ID NO: 90692 - DNA, 364 bp, Zea Mays
catcgataaagcatcaatcttggtttaattcgagtcaggagcacaagaatcacaggcgacacttccactaatattgatatctcagcttactgtggcaattgtttttatttgtatcaatcaaggggcggcatatgcaactagatagtataccaaagtgtcccatgcatatctgtatttctataataaagttcatgaaattgtgatataggttttgtctaatatggaaatcaatatagataatacctagtcggtaatgctaacatgtgtacaaaacataaagaatctgtgctggtatattacttagaaatttgatgaacacaggttcagtactacttcctccgttcaaaatcaaaacacagatatt

SEQ ID NO: 90693 - DNA, 680 bp, Zea Mays
gatgttgtttacaaccactacggcatgggcggcctctcccttgggggctcgagcgtacggacaacccctcggccttggctctctatgggaagtcagcagacacaaatctactgaacggtttgtcgtcacgtcaaacgccaaggcatatctctttcgaatataaaactcagtttcacttagttcgctcccgttggtgtgtaaatagggcagtggtccctccacgagaaagggacaaggacacatatagacgaactctcgctctctcactctgtcttagatattggcatttgcctcaatcatctctagggacttagggacttcccctctcccgctgtgctcgtaaacccctactacaggcactacggtgtgagtaatataagcctcatcctctctgctggaagtagggccttgagtggcccgaaccaagataatcgcttgtgtcacctcgcacaccatctagagctagccacgcgacacatttactggttggttaaggacccatggtccaaacaccgacagttggtgcgccaggtaggggatagtcgcgtgaaacacccccaattcttgccagcgctctagatggtaggttctaaccatatgctcaggctcgggacgacgatcaggttcgggagtcttgagttcatgtctcttggcaacgagtacgtcatggtactcctccc

SEQ ID NO: 90694 - DNA, 1004 bp, Zea Mays
caaggcctctaaataatgtatagaactcctataaaaagtttggatatttttggaattactatatgttttctaaaaatccagaactactactttaaactactttaaatgccttaaaattccttatttcctctaaaaatcataaaactatttttattaaattctagggaaaataagaagtctaggaaaattggtttcacaattttaggatttttctaccattttctataattgttttagctctggaataaaaagaaaaggaaaaactggtgaatagtactgggctgatttcagcccagcggcccagtccagaggggaaaggcgcgccctcgttggcatctttgcagaaagggccctggggttttggctaatcttaactggattctattactattcactgtgtcgctgacggattacagaaacaccctcaggtttctaatccttcacaggggaaggtccttgacggcgttcacgcctagccgaactccggcgagtgcctgcaccggccgaacggggcaatggctagggttcccgagcggcggacatcaaattggacctagcccgagcatttcccctaaccaagttccatctatggcccaatggcttgctctggccacggcggccgtgaacattgcggatggatgaaggtgttcccgatgatccatggcggcttagttcaatcaaaggggtcagggagcatgaggagagcctagggatgctagaacaggcaacggtgcagcttgaactacctgagttgagctggccgcgacgaacggatcttcacggtggcggagaaaggatttgggggaaacaaggaattagggcacaccggtgatcgattgctagcaattcttggtggctgggtagctgatgaccttgcggagctagtcacgggctcaatttatagggagaacgggcggtgtccgcgaatttggacgagacgcacggcggtcggaggtggagaagaatactggcgcgcgtgaattggtgtcccatgccgtggcaac

SEQ ID NO: 90695 - DNA, 337 bp, Zea Mays
tggtgaaaggtacttcttcaggcctgatatggtgaaagagactgaagaaagagttcaaaggataattcataatttgaagaaagctcaagctcgtcaaaagagttatgcagacaaacggcgaatgcccttatacttccttgtgggagactatgtctacctaaaagtttcgccaatgaagggggtatcacgtttcggggttaaaggaaagcttgcaccccggtacattggtcctttccctatactcgggcaatgtggaccagtggcataccgagtccaactacctgaaacattgtctgttgtgcataatatgttccacgtgtcccaattgaagaaatgt

SEQ ID NO: 90696 - DNA, 312 bp, Zea Mays
ccttcagcactgttgcttctgttgaaggacttaaaatccctggcatctttgttacttcttcagtttttgacctttcagccttatctttgtcaaccttcatttcaactagctcaacgaaaggtgccttcggcattatagccggctcttcagccttctgcatgggaggaacaggttctcttggttcagcagctgaagaagcctcctcgccaaactcaggcaccacgaccggttcaatatagcgtggccggtgggtaaggacctttaactttttgcccttcggcacaggctcgtctggagtggccgaagtagtag

SEQ ID NO: 90697 - DNA, 303 bp, Zea Mays
gaggagcacctcgcggaggcgaacgtacattggacgacatcctcgatgcccagtgcccgtaccacaaggacatgcgccacaccctccggaactacagagacttcaagcactccgttgggaacgaccgacccttccaacctctaccacctcccccacctcgaggaggactcgaagaaccttgatagcctcagcaacaggaagggggaggaggcggagcattcccgcgtgtcgacggagaagtcaatgtcatcttcggcggacatgggtcgcaagaaagcaacaggcaacagaagctcaacgacc

SEQ ID NO: 90698 - DNA, 499 bp, Zea Mays
gtgatggtccgccgtctgtgcgggcgccgccgtgcccaggcatgcgggggaggtgatggagcctggggccatggatctccaatccgacggccgtaatagcgtaccaattcgtcagtagatctggccgttggatctcgatcgtacgggtggattcagggtgcgtgtgtcgattcagcagagcgcgatctggaccgttggatttgtgctggtgggctcagatttgagaatggcgcagagctacctccgaccgtagatttcggatccaaggggggtccaattgcgtaccagttcaggctttgcgcggtctaatctggaccaccgattactgatcgtgcggtcgtgatcccgcgataccccttcgcccagacccttttgcatatgagtccctagattatttcagaatgaacccgccatcctcgtctgtgatgccttgtgtcttgggaacttttgctccgaggcccatgtgcttctctgaaattagtgcacaggccagtcggtg

SEQ ID NO: 90699 - DNA, 955 bp, Zea Mays
gtgaacatatctgcaagattctcacatgacttagtatgcaatattttaatctcattcatcttgtgcaactcatgtgcatagaagaatttggggtttatatgcttcctaaggttgcttttcacatagcccatttgaacttgtgcaacacaagctgcattatcttcataaatgatcgtaggtgtttcctcaatgttcaacccacatgcagactggatatgattgatcattcttcgaagccatgcacattcacgtgagacctcatatagtgcaataattcctgagtgattcgttgaagtcgagaccaaagtttgtttcggtgacttccatgaaattgcaattcctccacaaagaaacacatcatgtttgtgatttacctgaatgcggattagataggtatccagcgtcagcatagccgacaaggttcaaatcttgatttttacgatagaacaggccaagatccttgcttccttggaggtaaaagaagacgtccttgatccctttccaatgccttttggtgggctccgcattgtatcttgctagcaagttcacagcaaatgcaatatctggtctcgtgttatttgctagatacatcaatgctccaattgcgcttaggtacggatattcagctccaagaacttcctccccctcttccctaggtcggtatgggtcttagtctacctgtaatgaccttccaatcataggggttttggcaggatatgccttctcaaaactaaatctttctaatagtttttgagtgtaagttgattggtggattaatatgccaccttcaaaatgttgaagctgcaggcctaaacaaaatttggttttacccaaattttcatctcaaattcagacttcaagtatgagcttgcttcttcaatttctttatgtgttcctatgatggtcaagtcatcaacatatgctgatataatacagaatccatttgaggattgct

SEQ ID NO: 90700 - DNA, 833 bp, Zea Mays
gtccattgctagaataaacaagaacgacgatagcggatcaccctgacggacgccacacatgtgcttaattgcatttgtttgttgaccgttgatgatgatttttgaagagcaagatcctaatattgttgcgatccaatttctccatttctgggaaaaacctagagctctcagaacctctaacagatatgcccagttgatggaatcaaaagcttttgatatgtcaagcttgacaaaaagggctggctgattattcttatgaagttcctgaataactttttggacgtagagaaagttatcatgaattgaacgtttttgaatgaacgcgttttgagcagtggagacgatctcattcattcttagcgcaagcctgtttgctaaaatcttggtcaatattttcatgaagctattgatgagactgatcggtctaaacatgtcaatcctgtcagcaccctcccttttttgtaaaagtgtgatatttgcctcattaacgaggttcaggtttttgcatctatggtgataaaaatcatgaattgcactggataaatcatctttaatcagttcaaaacaactcttatagaaaatccctatgaaaccatctagacctggtgccttttcagagtgcatccccataaccacatttttaatctcatcttcattgaacataagatctagatctgataattcaaatggactatagcctaagttatcccaccgaacatccctttgcctagtaccccttctactaataacttcagagaaatgatgatgggcctcatgcagtttctcatcctgactggtgagcagcctatcaccgtgaaccagtgatctgatga

SEQ ID NO: 90701 - DNA, 1143 bp, Zea Mays
gtgaagctctcgactccatcatctttgaaagcgttttgaagatacgaggaaacttcaagaactgaagtagtttatggatttgcaagcggtgcacctatagaaacggttgcaaaagacccccatccgaccaaataccagctagagaaaacctaggcagctgagacagaatcaaaggatgaagattatgggtttgaggatgacacagaggtggaaggggagcttcaaccgacgaagcctagctatgtagagattgggaagtcattgattaagaacaggaatatgagtctgataatgaagcttggtctctttgaaaatgccgatatggtttgacttggtggagaggacacaactccaaagccgcgcgaaaacgaggtagtcgtgttcaagagcttcttccacgctaggtgttggtcacttgcttttggctcctgagtgaaacaaaaagcgaggcaacacaagtgaaataattcttccttctctctttaataaatcccttctgaagagattgattaaaggaagagggccgaaaagataaataatgtctgggaatgtttgaacacaaaaaatatggcataacaaatcattctaggcactcaacttgacttcgtctcatttcattatgaaatattacaagtgtaccttcagctgtacaaaggagggcacgaagatagggtaaaacaccttcggaggcagagagattccaatactccttgtcctcaatcatatcctatgcatatgatattgttcctctatttatagtgataggatataacttcgtgtgaaattacaaacatgtccacaaattctatacacgcgagctacaaatcctgtagggtaatgttgtcttttcctccctcgtgttgcgctagtcaaccttctggattcttctcatccacttctgcttcgagtgctaataacgcagagccaaagcttcttctctccttcgttgctatctgtcagtcaattccatggggccgaagctctctagtttcatcccttcctcgcgtgccgcttcagacgaaggctagcttcaccatcttttggtagtacctgaacatatttgactgataaggtgatgctttgaggacctttagcaatagaagcccccaagagtagcctctcgtgggattagtttgtttttcg

SEQ ID NO: 90702 - DNA, 304 bp, Zea Mays
ctcggctcggaaacgatcgctcaaaacggggaattgagtgaaattgaagcctggtatatcggattggcgtgaaatttggcgaatatgttactgaaggtgttgtgaaggtgcctgaaaaatttgggttcaatcggagcatttttggctggtttggacatttcaccgaacacgtggcgtgcggtgaattaggtttttggagatatgaccatttgaggattgaaaccctcccaaagggagctagaaacctgcagggatattaagggacacataggaacacattccaccacatgattcacagagcttt

SEQ ID NO: 90703 - DNA, 732 bp, Zea Mays
tccctctgcagaaatcacatgtcccagataggtgacggttgtggttccaaaggaacacttagactgcttggcgaacaacttgttggctttcaaagactccaaaaccgccttgacatgtattaggtggtcagaccatgatgcactgtaaatgataatgtcataaaaaatacgatagctattcttgcggattaacgaaacttcttcttcttcctcctcctcatcctcatcaagcacaccgccggcaacccaagcatcgtcacaacctctgacattgtcctcggggatggtgctcatcgggccatcgccgaggaataatatggaggggccagcatcttgctccaagcacgataatcgctggagtcgtcttctcttcttctcctcgccaggtgcagctggatggttcactcgacgtgatcgcttgtgacgagcaccttccgatttctgaatttcctcgtcttcaccaaggtcctgcccaatcgcaaccgtcgtcgactcagtgcgggcagagttagatgattccccagctagcatgctaagaacaacgttcatctcgacatcatcggtactggttggcatctcaaaatgggtctacttctcagcctcgggaagattctagaagggagcaataaaagcctcaatgtcttctaaggagggtcgcactctagggcccggactgccatctctaacatgaggattggaaacgaaatcggaaaagagactctgcggaggcag

SEQ ID NO: 90704 - DNA, 323 bp, Zea Mays
tccgtgcaggggaaatctcaaccctgctttgaagaagctcttaaaaactacaacttcatcatcttctggtttcaggatagtttcttccccgccaaagcgaaccaaccccttcttggcttctttgaagtagcctagcttcgtcatcagtcatatcagcttcagacacatttgatttcccaaaatccagatggatgggcttcgatggcataatgatgttataatcaatctctccttcattagcatcaccctcttcaatatctgcctgctcagtttcagcagcgggtgattcttcgtcagcagcgccttcagtcacaaccaatccc

SEQ ID NO: 90705 - DNA, 813 bp, Zea Mays
gctgccgcacggggaaggctagggctatcgtcgtcaaccgtcgagctctaggctgggaaaagaccgactgcaatactcgcgcacattggtgacctttcggggtgggagtgttggtcggggcaccgccgattgctcgtcggagctatcaagccttcgtcgatccgcacgttgccgtggtcgtgggtgattcactccaaatttaggtatgaagcttcccagatactttcgtcaccacctccgcatcgtttaccgtgtaccggcgttaagtttaggtcatcagctcggtgaggggcatgcatcatctatggcaccgccgcggaaaccgggcgctgtcgtcgtgcttcgtcaccggttggggcgtgcgatctcggtcgtcgatccatgggtggatggctgagattagacgctaggtaatggttcgaccgatgtgtacgcaactgtaggattccgagcgaacggtcatattagatcgcagccccggtatctcctctgccgttgattcaccattgtgtggccacaattagaattaaggtaatgattcgacgagtgtgatcctggccgctggatggtgatctaaggggttgtggtgggagcaccgcgtggatgtattgtgagccgtacgatttagatccgagagctctcagttgcgtgccgtttcgcaggggcactgatctaatctggcgtgtagattacggatcgtgtggtcgacattaacgcataccccttcgcagcgtctattttactaaagaacccctacgttttactggaattaacccgccgtccacactgagtgttgagaacttactggttggc

SEQ ID NO: 90706 - DNA, 815 bp, Zea Mays
gattagggttccaaaccttgggttgagatttttgggatgttacaaacctaccccacttaaaggaatctcgccctcgagatttaaactggatttgagaaaagataagggtattccctcctcaaggagtcctcactctcccaggtagcttcctcttctccttccctgctccactaaactttacagagtttcacttctaaggtgcgggtcttccggactgctgaatcaaggatctttactggcttctcacggtactgaagatctttccgaatctgcactgcctcttcttcgatgtgactttctggtgcttgcagacatttgcggagctgggatacgtgaaacacgttgtggatgtcagacatggattctggtagttcaagacggtatgttgcgggtcccactctgccactgatgggatagggaccgacgaatcgcggtgctagcttttcttttacttggaaccttctgacaccacgcatcggggagaccttgaggtagacaaagtctccttcctcaaatctgagttctctccgctgttgtctgcataactcttctgtcgactctgagcttcaagtaatctcctgtggatcagggcaacattctcctcagcctctttgacaaaggcaggtccttcaagtgccttttcccctacgttggaccacatgagaggggtctagcattttcgtccatataatacttcgaacggtgacatcttgatgctggcctgatagctgttattatacgagaacttcgcatagggcaaactggattcccaacttttatcgaatgttaacacacaggcccttaatagatcttcg

SEQ ID NO: 90707 - DNA, 479 bp, Zea Mays
tgagagcttccttgcaaactgggcatgggaacttaccatgaacacaccaggcgcagaatagctcatacgccggtaagtcatgcatggagtactagtaccaaacatgcattctgaagtttgtcttcgtacctcggtcatacatccataccccttcctcccaggcatgtaccaattcatcgatcaaaggctccatgtacacacccattttattccccgggtgtccggaaattatcaacgacacgaatatattttgcctttgaaagcacacaccagggggagattgattgggataacaaacataggccaacatgtgtacggggcagcgctcattccatagggattgaactcatctgtggccaacgcaacacgtacattacgagcctcttcggctttctcacggtgaatggcatcaaagtgtttccatgcttcatcatcggatgtgtgcaccatcttgtcaggattgtatcgttttccatttt

SEQ ID NO: 90708 - DNA, 1308 bp, Zea Mays
catcgcctcgaggctcctcgaacgtggccggttcatcatcagtggtggtaaggagcaagtcctcagccaccacgaactctcgttctaccaacccgggaatttccaccaacctaagcacattatctagcatcttgaatcggaaaggcatcccactgctgtggtcaatggcaaggtttgaagtagtgtcaagtggtaacacaaactccaccttcgtctatgatgaaggtgtaccgatcgctggaggtgtaccgagcgtgggtgtatatgtgttgcatgtcgttggcatcgttggcgagcctggcgctgatgttgcaccactcatgtgccctagcgagcctaacacaggcaccacatcgcttgtacccgacatagatgttatgtcttcagtgccttccttttctgattcaacggtgtccgtgccttagagcatcaccgtcgaaaactcaatgtggaacggttctgctcccgtagcgttggacccgttgaccctgatctagtgccacgtgtttccttcttcaaacaccacatccggtgttaggattgtagaacctatacacattggaccctggctcgtactcgatgaacaccatcggtgtactccggtcatctagcttttgctggtgcttttcgaccatcttcacatgcaccatgcgggaggaagtgaaccaaaggctttatatcataccatgcttcaaacgacgcctttccttcggcactcctcgtcggtgatcagttgagtatgaagatggttgtggtgacctcctcccgccacaaccagcccgacatccccttggtcttcaacatgcttctagccatgccaagcatcgttggttatgcctctgcacccccaccattttactagggcgtgtatggcacaacgagatggtggatgtcatgcttggagcaatagtcatccaacatgtgcgtcgtggactcgccaccatagtcggttttgcctcatctctacgtgtccctggagttggatgatggcttccatagcctggtcctttgacaccagcaacatgagccacataaagcgactcttgccatcgacagggaggaacaacttccctccaggtgtctccagggtaactacataagtctgcatgcactaggtcgagcaaatgaggcacacaatacttgttggccgtagggaacggatgtggtcgaccagtggtagttcgcgcaccatgccatccttcgatagttcccggagccctggaacccgagatgtccgaacctggcatgccattgccaggtcacctccgagcgcctaccatcgaggcacagaggttgagcgatgttgat

SEQ ID NO: 90709 - DNA, 335 bp, Zea Mays
ttgtcaaatcttgcgaatccagttggtggaatgtgttcaattgtccctagtgtgtatccctgcaggttcttggctccttcgggagggttttcatacctcaaatggccatttccctaaaaccctaattcctcgccctccacgtgttcggtgaaatgcccaaaccagtcaaaaatgctccaattgaacccaaatttttcaggcaccttcacaacacttccagtaacctacttgccaaatttcacgccaatccgagatcccaggcttaaatttcaccaaatttcccgttttgagcgatcgtttccgagccgagtgcccaaattcctttttcttcgcct

SEQ ID NO: 90710 - DNA, 549 bp, Zea Mays
aaggcgtgtctgaccctgagagttccaagagggtgacctagtgcttcatatacgagaagacaaccgagggcatcacaagctcactcctctctaggaaggacccttcatcgtcaccaaggtgctaaagccagggacgtacaagctctgcaacgaggaaggagaagtctacgacaacgcgtggaacatagaacaactatatcgcttttatccttaggcatacatgcctaattgtactatgattttcatgattaataaagaatagctttcaagagtggctcgaccttgctttcaataccgagcctccctcgggggctagccggggaacccctcctctgtgttgtttttccttgcagttttgaaacaaacatgttccgtaccttcgccctagtcataatgcgaaaaccctcaataacaaggtacatcccaacttggaaagatagccgagctgaaggaacacatacgcctcagggatatggtttcctcactcactattcccaacctaaagggtaactcacgttctaacggggacactatagtaagattaaggca

SEQ ID NO: 90711 - DNA, 1829 bp, Zea Mays
actatcttgcaactagccatctggtacctgataaggaggatgacaaaaatgcataaggtccctacctagcgcgccaactgtcattgtttcgagtaagcagtgacgagtaaatttatgtatgtgagtttttggcccggatggtgtgctcgatggatgcactgattgtttgtagtagggggttacaaatgggcgagagagggatgttcccaagtctctgtggggtgtgagtgcttctagcgtattgcatgtgttgtgttcctccttttttgttagagggcctcctctcccttctataggtcaaataagaggggttatggacttgtcgcgtagtgccatcgtggtgaaaaaggagttggtacgcctataaggtggtcgggttcctttttccaatgccatctcctgccactattgttgcagctttgttgactttcttggagaggtttcgtgaagattacgggccacagtgcatgcgtaagcatgcctcaggccttggtgtgggggttggggttcttctgaccccaacaagaggcctaagccggagtaggcattgcagggctatctattgtggttaccatcccttagggttgtttaacattacccacgagataaatcggtagatgacgccatgtagttcattcgtaccttcgtcattccatgactgacttctatggtagaaagttatatggagggtcggcttcgtccgcgggatggttggccttgacacgagcaaggttcaagcaatcctgtgagccagcttgtcttagctcgattggaggaatcagctttaggcacgtcctacccctttgtggtttgcctgaccccttctttaagtcaaggaaggggagtggtcgggcgcccgtggcctgcctctgcctaccagagtaggccaggtttcgtctaggcttggtttcagcatgctttttccttccctcgatccatgggcctttgccctcgaggattattacccccgacgacgaggtagccaaggaaagtagaatatgtatggtcatcaaacagacaactggtgaataaatatcaaaataatcttcgtgttctttctaggtataacctgttgggcggaggccgaacacaccctcaattaaccaaacaaagaccctactttcccattaacagtcttcacatatccataagtgaagggactccgacaaaggaggtctccgattcggcgaactcaacacattgaggctgcgccgagcggcggccgagcgaccaagactttgctatgactcagacgctgagcccctgccaccctttgctcgcataggtcgaacaaagggaacctagcacgaaggctgcaaggatgtcagcgaagactacgtgacgatcagtccatcgtcgatcgaccagaagacacatctagaggcccacctgtcagcattgtgtgcgggtgtgtaatctagtgtgtgttgtttgctgtacaaatgtcatcgtaaattcgtaattactcgttacatgaagttgtagttccccactgtctatcttatcgtgcacctgagctctcacctactctttcagtgtttgggtctgatagagcgattgcacatgttagtgcccaacattttgcgcccaccgttcgtgcaacaaagacaactcccatgatgcctcccaagaagaacacatgtcctagttcaccatcaaacaacgaagacgtcaggccgcccttgttgccaagaaaggcaaggtcgccctctcgctgaccattccccaccacctaacctcaaggccaccaccgacccacagagcgagggccacactgcaaagaaaaaataggtagcagactccaccaagtaagagggcgttgcacccac

SEQ ID NO: 90712 - DNA, 275 bp, Zea Mays
tgagtcattcgtggaaaaacataacataccaaagcaccctcttaagaagatgttacacattagttcaccgggaggtgacatgaaggacacacattcatgcctccatgttaatctcaagattcaaggaatagattttccagtcaacctagtggtcttaggatccaacggtattgatgtgattcttggatgcgactggttgaaaagttgtgatggagtgatacaatgtgtcaaaggaacaattatgttgacaagtccacaaggtgaaagaatccaag

SEQ ID NO: 90713 - DNA, 660 bp, Zea Mays
agtcatccaaccaatggcgtgggaaatacgaaccaggggagaaagtgaagatggcgtccctgggccaagtcagaagagtattcgaaggagccaaagaataccgcgatccaacaagcgcttcatagggcctgaatggcataactaatggaggcccatgggaagtaatgggagggtcatcttggaacagaatcctgatcctggttgcgtccgatgactggcggcgtgccgtcgtgtaaggactccaaatatttccacactacagagctcttcgagagaggaccttgagtaccgggagcggtgctcaatcgcccacattctgcgcactcctaatagttggtattcaaagctaggctggatctccctcacaagtattttactagatcggtgccatcgaatattgaagatcccatggcacagctaatcgcaaagatcgaggagggcaatcgtgggacccacaggcgtatggagacgatgcatgcctctatggggaatatggaggcgacagtgaagggggatcttaaagaacatgacgagttccaaaggtggtggccagaggtggagaagaaagtgggggagatgaatgaagcactgaagacgatccaatttgtcattgagaggcaagtatagaagcaactagaggaagttgtaccaacatcgaat

SEQ ID NO: 90714 - DNA, 382 bp, Zea Mays
ggcaccactcacattcagctctggctacttggtgctttgatttctcactcagagtttgatgtggttgatttccttgcgcgggtgctccaacgaggactaggggagagtgccgactcttcgatacctcgagaaaattagaggagtcttctaaactttgctttacattccgcacttaattcaagtactttaccttgtgcatttgtttagcaagtagttgaagtattgtcttagcattgttgtatttctagtagtattctcttattgctagttgttggggtgaagttgggctcttgcttagggtttaattattgttgatttttagaaaagcccaattcacccccctcttgggcatcgtgatcctttcatcctccctagcccccga

SEQ ID NO: 90715 - DNA, 758 bp, Zea Mays
atgtgaagaaaaaaaaccacgaaaaatagatctattatgtggtgcgatttacaggataaagggagcctatttatatagaaaaagaagatagagatagagtcatatcttattatccaacagtgtcctgaacacttcaaataaaataatatagtatttcaaatcttgaagcactattttaagtcacatagttggagatgctatgactaaataagttgcaaacacaggtattatcataaggagcacgtggcaaacctaaatcctaagatggtacgattgatttatttcgaaatgacacttcccaatcatgttcgctgctgttacccaagcatcacgttttgttgccgaaaggctaggtcactcgcaaactgttggcacggagctttgccctcacatcaaacttcgtacaagtcaggccaccacaggtcaggtccagttctgaaaagaatggtgcacattgctggcatgtcgccatgcctgtgcatcgatcagtcatcgtgccacagaacagcaggaacacaaagcaaataaacatggggaattagagctggttttttttatgtacattgttttttccctctctcgctctctctacagtgacaatgtgcagtagaagtgcaccgagcacaaaggagattgtagtacacaccacaccagcaccgtttcctagtcaaactgatagtatgccccagtccccaccccagaggcccccgcagtggagctttcagcttttcaccgacacgaacagacactgcctagtc

SEQ ID NO: 90716 - DNA, 377 bp, Zea Mays
gattggctctcccgggttgtcgtggtgagtcgtcgtgtgtagccgtactctcagtatgacgtcgtttgttactccggctcctatatcgattccatcactgacatttttgtagtggtgcacgccgagtcccacatatcagtctcatggtacggtcgtacgtggtatggctttttttatcgtcatgagctatttgtcacctgtcagcgtgcgtaggcatacactcggtatgacgtgttgtcccgtccttcgatgtacgggtcactatagagacaccggtgctcattcggcgtgctgtgtgtatgtccggacatgatttgatggaatcgtagctgacgtggatcagttggtcgaccagagctgattgatagagagttggt

SEQ ID NO: 90717 - DNA, 602 bp, Zea Mays
gcactttggtgtatagagccttggaatggtgtctctataaactagtaatgatcattagctctccacactcttaaacgaccgattgagtgggaatatatagagccctaagcccaaaagagccgttgtaaggttgtagaattttctgtgtctcaccagactggtccgatgcgccatctgtgttacactggactagttcaatgcccttcacgtcagctagccattgctgctctcacagattctctctgtcacgctagaggtcggatgcactattcgactagtccagtttccgacacatcagatagccgttagagctagtcgttgcctaccattgagcttttgctccaacgtgtcacccgtgcctcactgaattggtctgctttgccaggtttaggatgcagaagaatatgctctctgtgtattcggtctggcatgtcactgatgcctcaccggactggtccggtgtgccagcaggcatagggtgccaaagttatgctctctacatattgggtctgatccctagtccgatgcaccaccgaactggtatggtgcacccaggaacaacctagtcttcatatcttcaagttctttcacttgaacttttc

SEQ ID NO: 90718 - DNA, 732 bp, Zea Mays
tgcataaagttttacccgaagtaacccgaagatatataatataatgcatgaaagcctttttggcatagaagacatcacaaattggatttctattagtaagcaaaaggccttaccaaatgatttaagactataaatctcagccatgcattgctcaaccagatgttagcacattgctctcttcgctaaatgacatgaagcaaactatgagataaaaggacatgtaatcgccagcaacacgaagttgtgagtataccgagaggttattctgagaaatttttcacaatgttggtgtgaaaaaccattgtgtgttcccgtcgaaccaatttacttgtcctatctaggacctctatgcttgtgttgcatacatctctctgaattgtaaatacttatagtcactgaattgacttggcatagtcctttgattggtatggtatagctttaagctaaatggtaaaggtcagtcctaaatggacataaatctggagtttatgtagtagaactacattgaattccaccctttgaaatgcttaccgtaatatatctctgatctaccaggagtaagaagagtagaaaatagccatgaaatcccatatgaccacagagcttgaagtgaaattgggcattaatatgtcattggtccttggcgccggaagatccataattcttgacctataagctattggtgatggtaatttgtaatagaaatatgaagatcttatggagaccagatgt

SEQ ID NO: 90719 - DNA, 646 bp, Zea Mays
gctcaatctggtgcgtggcctgcttgggtggagcgagccagggctcgccggaagaatccgtgtcgatgctgtcccccttggcgatctcgtcgccggggagtttgtgttgttcacctcatacatttcttgcgggttggcgctgccgatttcgcccttcttcctgctactattggaggagttcgggcttcagcttcaacacctcatgccccactccatcctcctggcagcgatcttcgtccacctctgtgagatgtttgtaggtgtggccccctgcacttccctcttccgctattttttcgtgttggtcaggtccaggaagactagggaccacatcggtgcctactactttcagacgagaccagatctggccatagtctacatccccacctttggtggtgtgaggtgggaaaactggcgcagcgactgggtgatcgccagcaccgaggccaacggccgcctcatcctgtcgagcaatgggccagcactcgaccgcaagcaatggaggaccaagccatccctctcgctagagttcatgtccgtattggacaggatcaaggtcttggccatgggcggcctgacatcaatgcatgtggtcgacgatctcctcaagcgccggatcgtgccgctgcagaagaggccatgcctg

SEQ ID NO: 90720 - DNA, 614 bp, Zea Mays
ggggctatgcgcaagatatcccagacacagagaacagggtccctggactacgggttaaattctatttcactcggggtctctttagcaaaattctcgggcgaaggggtatcgactcaccagaaccatccgattgaaaatcaggggctcggattagattacatgaaaggggaaccctgcgttcgtttgatatcgcatcaatggccagcacataccctggtcgaataggtaaactctactgaatcctagtcgtccatttcttatcccgcggtatagccacgataaaatcccgtacgtccatattaagatcgatggcaccctggcttcttctacctccggccagagccgaagtggcgcacaggcctacgcgccacaccgactgcctgacaccctccccgacggcgaaccgctcaccaccccacgcgtgtaaatgtaggaaatattacaaagcgcgaagaagaaatcttaccacacccgaagtgaacagatcgacgacgccgttgtggagacgaactccacgatgctgcggcggtacttcgcgatgactcggctggacgatgtcgcccgcgcagttcgttccggcgatcagcagttcaccaacggcaacccacaccacg

SEQ ID NO: 90721 - DNA, 389 bp, Zea Mays
gaggatatcttcggctgaagggttgatttcttcagaagtagctccaaccgagttaaatattctcttcaaccggttaatgcaccgagtgacgaagtcagagcacttgttctgaaggttctcaatagcttcgtatagcttcgtatttctttcaacttcggtttcaatctttgctttgagctcctttgtctcacggtcaaagttgtgacctttcgttcaaaattgttcgagcttcgtctagctcctcgctcaatttattattctgagatcgtgcttctgcgagggatccttcggctgattgcagcatgatgtcttttccctttaaagaagcttcatgttccttaattttatcctctaagccttcaattataacttcgtttcttctatcctca

SEQ ID NO: 90722 - DNA, 393 bp, Zea Mays
tgaactcatgcgatgttcagcacctgctaacttgaacagggactgcaaaaactggttagtaaagactgggtcgcgatctgatataacagccatagggaacccataaagacggtacacctgagacaggaacaactgtgcgacagaagcaacagtgtagggatgggataatggaaggaaatgggcaaacatagtaaatttgtcgaccaccactaggatgcaatcagaagtgccggaacgagggaggccttctacgaagtccaatgaaacttgtgccaagctgtgtgtgggaccggcaagggttggagcttgctcagatatgcaaacctctctggtttcgcttgcaaataaatctggcaccgtttcacaaattcatggactgtttgtcgcagtttg

SEQ ID NO: 90723 - DNA, 566 bp, Zea Mays
ctggtcttcattttgcttcgtgcttcaatgcttctgttgattagacttgtacttcagtagatatttttggctttccttcgatctctatcgatatctttcttctgtcttgatacattcattgcgtatactgtatggatgtgactgcttgggaaaatctattgaaaattcatggacgtccccttcccaatgggtgtagccaagggacggcttggtgccctgagcgtttagcaaactgcccttgagtagtaacttaacatgatcgcggggtgtaatcatatcgtccaagcagttgaccttagtcccaatggtgtcatgttacgtgaaacggcgtctgccgcctgacttgtttccagacgatttgaatggcttattgaatacttgtgactattcagtgaccatggtaggagatgagcggttgtctcccgcctctataaatagactgcctgcttcgctggtgtgttcacacatctcctggccatttgttgcttattctccaacttttctcttctcttccaatcaatcatgggcaagaacaagaagggcggaagttcgtcgcaccactccgg

SEQ ID NO: 90724 - DNA, 390 bp, Zea Mays
gccgactacaatgccgaaggtgccttcgactaagcttattgaaatgagggttgacgaaggtaaggctgaaagatcaaaaactgaagaagcagcaaagatgcccgagattctaagtccttcagcagaagcaacagtgctgaaggcagaaaaaagttctgcgataacccctagaaggaaaagaatggtaaatgttttagacattttggagacaacagactccaaacgcccctcttccataaagaaggttgccgaaagtgccgaggcacaggctgaagctgatactaggcagataaaaggtaaaactgcagcaattgaggctgggaccgaagccgaacccacagtgcctgttgagacaaagcttgccacaaccgagcaagtggccgaagaagc

SEQ ID NO: 90725 - DNA, 540 bp, Zea Mays
ttgccatagcttctttaactcttcaatcagtggttgaagcatcacattgaggcatacgccaggatgctcaggcccaggtataacaagacataggaacataaactcatatttcatgcaaagagcaggtggaaggttgtacggtatggcaatgacaggccaacatgaatacaacgtagcggtcatattgaaagatgtgaaaccatcagttgccaagccgatacgaacgcttcttgcatcgctggcaaactctggatcaaagttgtcaagagccttccatgcatcaccatctgacgggtgcaccattaacccatcttgtctatccgtacaatatttatgccacctcatgtgcatagcggtcttcctcgagagaaacaaacgtttcactctaggagtgagaggcatgtaccgaagctgtttatgtgcaacctttgtgaccaccttctccccgtcttcatttacaagctccacgtacatcgacttcccacattttaagcatttctgctctctgccacgctccttccaaaaaagcatgcagttgta

SEQ ID NO: 90726 - DNA, 354 bp, Zea Mays
tgagtaggtgggtgggaagcatcctggcatgacaggatgaacaagcgatgcttattgcgtcgtctttcgggttgttttactcggccgttttgttttagtgggtgaccggggtttctttgttagccgatcgcatagaacgaccttcttgctagcatatttggctagcaattgttcgaatgtagggccagcttttatcagccgaccatgtgcgtcatgttggctttgcccttgcgtctctttccttgctttgtgtggacgctgacgcctctggccatgggaggactgtctggctgagtcagtcggaccgtctgtatgagcaccagaccgtccgcacgtaggtgtcggaccgtccgc

SEQ ID NO: 90727 - DNA, 974 bp, Zea Mays
tcttgttgtttcggtgaggcagggcttcaatccctgcttggagaagcttcacggctccttagggaagctgtccaagggctcggttgaggctgagggtctctgaaagtggctggtcgcggtggccggcgctcgggtggcgctggcgggtgacgaagagctcgccggagctaaggacggtgtctggccagcgaaggtgagtgcagagtgaggtaaggcacgtctaggggtggtcttaaaggcgcaggcgagcacgaccgaggggtggctctgacacgcgctcagggtgtgcgtgggcaagcgctagtgcgtgctctggcgcttaggcatggcgtcgagcacgaggcagcgcagagagaggtcaagttcaagcgcggattagctccaaatctttgtgattatggccatgatcccattgagagatctcttcccctgacattcctttgtcgtttgtgtgtggaggcttatgggttttgctgactggagccaaagatatggagtgatgaagtttggtttgtctcactgatgaactctaagaggaaatcccagatttgacatgtctaggttacgaatctcgatgccatcttcacacacgttgcagaggggttagtttagaacaattttgaaaatggggacttaaggatttgagctagggatcaaggttaacgtgctgaagttctaggtgagggctgaaattcagaaatctgaatttcagattttccctagagagcttccacatggatggcctttttggagattttaatcattttttggccaaagttttgtaacaattattgtagcttaattagtgtatttcaacttttataattggcctaagccatgattccatgtttttcatggtctttttaccaattttttcctttctactcaaatggcctatttagggttgttctagggtttaaacatttttcccattttgaatgcatgatatgatttaggcatgagtcttaggacaa

SEQ ID NO: 90728 - DNA, 614 bp, Zea Mays
aatatccgagaagtttatcggatatatctgactgctatccaatcaaatatccgatcagcttagcacatctttttttgtattcagtcaaaaacactatatctcttttatggagcataaaggcataccacgttccttcattttgcgtggtggttgttgagaactacgttatcacggatcaccagatacagtcttttccctccgtgagcagattagacatgaagaaggtgtagatcatgtttttcttcctagaaacacaacaaaaacatatgagacatagtatatagaattaggtagggatataatatggttctatcgggaaacacacgattaggggtggatatcgtgctgactcggctcaacttgattcgactcaagctggctcgttaaggtaacgagactccagcagtccagatccggcccgccagacccgcagcttgtccgattttcttgtcaaatcactggtttattaattattagcctcaaattccatcgggaattcatcaaccaaatcaaatcaaataaaagctgctttgttgttactgcgccttgcgtcaattgctgggctggcgctgtgatgcccggtgtgcgaccgctttcttccctttttcctccgc

SEQ ID NO: 90729 - DNA, 586 bp, Zea Mays
ctatcgtgagaccagggataagaactccttgatcttcgtgagaccagcaggaatatggtaaatcctgaagtgagtagagaattctgcctaagaaatggtgttagcagcagcgtgcaacagcgcaatatgcatcccaccaattcgcagcggggccagtgaggcgacccgatgcatatagcactttctccctgtcggtgcattgggctatgttgagcatcttttccatggactttaaccagtcgtcgacttgtagtggttctgaggagttagagaatgtaggtgtcttgtgactcataaattcacggtgcttatctctgggtagagttggtggtggaggtggtagttgctgtcattcatgtcgttcttgacgcatttcttggcgttcttgtcgcatttcttgacgttcttgacagatttttacttgcatttccatcatcatgttggccatttgttgtagtagtcgcatttgagtagcagccacgtcattaacatgcgggggattcggaggaggattcatttctagttccggattagctacaacccttcttcgatgaattcgtgcgggtagatcaacacctcctcccct

SEQ ID NO: 90730 - DNA, 551 bp, Zea Mays
caagaagagcgtgatgcagctcaacagtgcttgaaagtaatcagagggtccgtgctcttgctgaagcacgagcctcatgattgtaagagtcattcttttactatcactgctgcatcagggtcgctctacctcctcgcaagtatttactatcaattatatattttaaaaaaccaaatgaacaaacaaaccgaaatttcaggcaacaccccctatttcagattgtgcaagcataatgaaacagatcaccaaaagaattcatagaaaaagaagggagagggattcaagatcctagaggattggtgcatctcaaatcgaatcgagaggaacaaggtcgcaacgcaaagaaaggcgcaagcagagatgagcagaccggagggaaaaacaggagacgaatgctggcggcggacgcgaatgctgactggactgccatggcttcctgaaaagctctgttgttgatttatagcacgagcctagggttaggagcatccccggaatttacgtttctgcccacccatgtggtgcgcgtggcctgagttttctgctcggtgaga

SEQ ID NO: 90731 - DNA, 535 bp, Zea Mays
taatgcaaaggtgtttcggtcttagaggccgacgtcaggcttttctcgatggcttacatcacgcgtcgtagaacacatggcagcagcgggcctcaccctgtgggggggtattaactgggatcacccttcctcgagatagctccggaccgcccttggctggggggtccggatggtgcttggtgtggtcacgtctcctccggtgttggccaacacgtggtagcatcggacccccttaggtccgagtggccgttctcgagggtctggcccccgggggcacgtttcgagaggccatgtattcaaggtacgtggcgaactcagactccctccgctagggtttcagagcgttgattataggtgtcggtctttgctcaaatccagtggccttactaggcaggcccaaccaatgggctaggatggaccaccattagcatggtgaaaaagggtagttcggggggtccgccttgacccaacagtagtgggtaccccaatcttgaggtaccaacaagtctctctattgaatcactacatagaaatg

SEQ ID NO: 90732 - DNA, 287 bp, Zea Mays
tgttcttgatttgcaacattttataagttatgttcactaggggaatggtccttttgttattgaagggagattgtggttgcgagttggtaattgggtatgtgatttctgaatacaaaagaaaagaaatggtactacctcttttccaatttattataggttgttttggtttttctacatacacaacttttattatgtatctagacatatcttgtatctaggtatgtatctataatagctaacaacctataatttggtacagagggtgctaataatatattggatcagcc

SEQ ID NO: 90733 - DNA, 403 bp, Zea Mays
cttgtgcctaagcaagtgcccagcgccagcaaatgatttagcagagaattgttgtttgcagtgttgacaaatggcatgagttcttaccctcttaccattctcaaagttgaacacctgttcaaaatcctcctagactggagaactggaggccctcttcctcgttcgcccctggttacccatgcttgcctcggtacgggtcgcactgctggagcccgttccaccaacatcgccggaaggagccgctgtagcatcccgacgagagcagcagagctactaccgaacagggcttgagcagcatcttcttcctcgttttgggtttccaacaagtgctcctcgtgctcggctaccaggtcaagttccatggcgaccagccaaccacctcgccgggtgtcggcgactctgg

SEQ ID NO: 90734 - DNA, 472 bp, Zea Mays
ggctggatggcagcatcaacttgttggcggtgctagcctagaactttgccgaggtaggaaagttgagtgtcttgatatccaattgaaagatagtattaagggatggcgcctcaagtggtttaccatggaaaactgtaacaagtcccttcctacctaatctggaaggcagtctgacgtccaaacgcctagctagatagaagtttacatagatttagagcttgctaagtccagagtgttgcttgcagagatatgtgcgttgaaggacagagacttgactactgaagatattgttattgattttattttcaagaatattcaacctctaaaagatagagtctaccctgcctacctgtacactagggttaatgaccctactcgaattaccatcaaacggatttctgaggaagacgtgttgggtcgagttgatgtgatgctgagaggcaaggtttcgaatgctagtgctcccttttcg

SEQ ID NO: 90735 - DNA, 912 bp, Zea Mays
agaaccaacaaaggagcaactctcagaccaaccagaggtctggtgggaattcacagaatcgtcaaggtggcgccagtaacacgcaggctagaagcaacaacgcaccagtacaacccaatggctgtttcaagtgcggtgagctgggccactatgctaacaactgcccaaggcgcaaccagtagacacctcagaaaagcaataatcagagaaatgaccaaaacacccccgctcgtggatctgcacagaacaagactccgcagaaccagagtagaggaagggtcaatcatgtcaccgcagaatcagtacctgaggatgccgacatagtgtatggtatgttccttgttaactccatacctgcatcagctttatttgactctggagcatcacattcatttataactgagtcatttgtggaaaagcacaacatacctaagtaccctcttaagaagatgttacaaattagttcacagggaggtgacatgaaggccacacactcatgcccccatgttaatctcaagattcaaggaatatatttttcagtcaacccagtggtcctaggatccaacggtattaatgtgattcttggatgcaactggttgaaaagttgtgatggagtgatacagtgtgccaacggaacaattatgttgacaagtcctcaaggtgaaagaatccaagttagcatagacaagtctacagatgcaaaagggaagacagtgatcaatcacttggaagaaaagcccttggaaaatatcaaggtagtgtgtgagtacccagacgtatttccggaggaattaccaggtatgccacctaaccgtgatatagagttttctattgaattattacccggaaccgcacctatctcgaaaagaccttatagaatggatgtcaaggatttagtagaactgaagaaac

SEQ ID NO: 90736 - DNA, 422 bp, Zea Mays
gaatcggaattgccttgcctatttcctagcacaattttttcttcttctcttttgggtcatgcttgttctccctttgccgtaatcttaaaatggtgcatctttttttttattacatccaatctgaatgagattctgagcaaaccaggtgctctcctcttttgatcggcaagcactgtactagctaagatctacatcaaaatgttatgctatactttcttttatgtcaatcatatgtttcttttggcatccatttggtcccttgttcaccatacaagatttcggattttattatttaagtgtcagttttatgcaatccctttcccagtggcagcatacattgattgctctcccaatggtgaggattgtatctaagttcggtggaaacttctacatccaaaattgaatgacttctcagcaaagct

SEQ ID NO: 90737 - DNA, 475 bp, Zea Mays
cgaaaaatgtgtgatatagctcgcgggaggccaagaaccgctttaaggtgctccggagacaaaaacacgcgtggcggaatgcagacataaaaatggtcgctcggcaatggaaacgtgtgctatagctcacgggaggccaaaacagccttaccagtctcaatggtcaaatcatgggtggcggacgggaggcacgaaatcactgttcgacgacaaaaacatgtgtcacgggaggccaaaatagccttacgggtcttcggggactaaaacgtgtactttggtttggacactaaaattctaccatgcctgcaagcttactttggtttggacactaaaaccttttagttttggtgtttaaggttagggtttagggattggattcggggtctaggttaccatgaaaacgtgtgctatagctcacttgtggcaaaaaaatgtcgtaacggcctctctggtctaaaatgtaggtggcaggtcg

SEQ ID NO: 90738 - DNA, 1066 bp, Zea Mays
gcgaaaggttggccccattcaatttaggggcatagcccgggccttgagaggaacaaccttgcaccggaagtaggcaccaataacgccagcgcaagacatacctttctctcagaggataaccacaccttctagatgattgcggatgcgaaccttctcgtcgggtgtgatgtcgcaactccaactgacgggagcctcgaagggaatgcctagatcaaagctaggaagtcatggccctagtagggtctcctaaactgcaacccacaaataaaaccattgttgatgccagcccttcttggatagggaaagtgaaatcgagatatactcgagtgacctcccattgcagagacgaatactcgtgcacccgattggccatgcctctaccattcttcgctcctccctcttttgcagcaattcaacacagaaaatatatcaacataagtcaaaattgggctcgacgctcagatacctttcgcataaggagataaaggcagcaacatgttgaatcctgtttggatttaggtaatgaagttgcacctgcatgtaatcaaaaagagtcagggtaaaggtgtgaacgaggaaggcaaggcctcactcgtgaaaatgaacaaacgaaaccacataaccaggaggagtggaatttcctcaccgccaggggctagccagttgccatcgtccaacaggccacgcttgacgagggcccgaaggtgctcttgatccaccgaggatcggcgccagcttgccacgagggatgtgacaaataacctaatatcaaggaggaaaatcgagtgaagaagatggggcaacaagcggtccgagagaaaagcgaggaaaacatggggaatgacacgactaaataaaggctgccctacaactctgtcgcttgatgctagggagaagtgagtcgtctaatgaggaaacatgtctgacccaccgatgggtcagaagcaaaccagtgcacacaccaccacccctcaagcagggatgcaggcaataaatttcccctagtaaaataggggaaaggaggacaaaataaacgagcatcagtaaagtttccccaagctacaac

SEQ ID NO: 90739 - DNA, 381 bp, Zea Mays
actcctcctatcactatgagcacttctccgttcaaatttgtcatactcgtggtcgctctctataacttgagtattcggcctactccgttagcttgttacgaactcagagcaccgctcctcgcccccgattagccaccgtagccgcgaatttggtatttccccccaaatcggtttgctgcgccgccgtgaggcatctcgccgtggccagctgatttcaggttcgttcatccccttctatgccgtgattaagcatccttgactattaacgctgctcatcgacccaaccacttgaacgctaccacactggatcgtcgggaacacctcggtctgtcctcgtttttcaccgtcgtcatgggcaagggaattccggggcggattagc

SEQ ID NO: 90740 - DNA, 322 bp, Zea Mays
caagattaggcctcaccaatatgatgcatgcttcacttttgttgtggacggcgatgccttgaccactctgctccagaacaattcagattattttatcacttcaatttgaagaatgctcacctgcagtatgcagattcacaaggaacaaaatcacatgcacatcttgtactgtaaattgcatatagcttaaataaagtattcacactacctggtcccaacgaactcagtggcagaaccattacttatgtcaacaacattcgataaaaataaggacaaatatgttttttttgaactacgcaggagaactgcgtgtcatttcatt

SEQ ID NO: 90741 - DNA, 277 bp, Zea Mays
ctctctgttggcttcatctaatgtaggaacattgatatattttcagaagtactgatgttgttcattcatttgtttctacccatgatcatgtcctgctctcccttggttgttttatgtggacggcctaatggcatttgggcttttgatttttagagagcatatatctctgcatgagacttgccctattcgtcctcattatttaactctttgaatgaccagccaaccaatgttttttgtactacaaactatcatgtcttgggtcataacaaaaatgtcg

SEQ ID NO: 90742 - DNA, 282 bp, Zea Mays
ggcttccaaactagcacgaaaggtatgcgacaacgctttggcggcggtggtagccccaatgaacacgaaggacgccgtgggttatcgcaaaacacgcagggaatgaaaagggaaggcaagaggatatgtttgctaaaacgttctggtggagcaatcatccgttggatcaccaattgaaggccaggattttatatgtgcatcatgtgcaccgctagctgatgtgtacaatatcgccatctaattatggcaacgactaatatacaaacaaccattatgtgcaag

SEQ ID NO: 90743 - DNA, 850 bp, Zea Mays
ctatgctcttgggagcaatctaaccacaaagatctgcatggactagctcaagatttttaattgccctgaaacctcacactttgggaaattgtttcctgtgttgttttcctaggacacaaccatcacagacttgctcaacttgcttcacatttggtattccaaccaccatgtttttgtcacctagactttttaaagctctgaagttcaaatgccccagcctggcatgccactgcctggccttttcttcagactttgccaacaaacataccggtgtggataaaccaaactttacaatatacagtttatttgaagttctaggagcagcaatcagtaatttttgttccagatcataaacacagagtttcccattttctcccttaaatgtaaaacctttttcttctaattgccctaaactcacaatattactcttcaattcaggaatgtaatagacatctgtcagtaccttgtgaccttcatttcgatcttgcataattactaatcccataccttgaatcctcacatgagatccatcaccaaatttcaccgttcctcgaactcttgtattgagttgtgttagcattgttcgagttcctatcatatgattgctggcacctatatcaagtacccaaacatcattaggaactgtcactagcacaattttctcggtcagatgaacctgctggactgaatcatgcaccacatcgcacatggacagcatcagtgcgccgtgttgttcaacaccgctaacagctaggttcgcctccggctgttacagcaaattatatagcttttgactgcataataagataaatatacgtagtttatattgaacttcaatgcaaagaaaaac

SEQ ID NO: 90744 - DNA, 350 bp, Zea Mays
gtggaatagagaacttaatcttagcaaatggatcatggtctggttcaggattatgatgacgacgtctaccattacctcccataccttgtcgattacgtgcgaggcgttgttgcagcggtgcataaacatcatcgtcgtcatccacaggagagtgagctggggctggagttggtggagggggacgagcctccagtacgtccatgcgtgtaacaagttcagcaactcatcgatcaaactgctcataggatgtcgccacagagtcctggtatttttaaaagcttcagtcatcgcgtgcatcatttccttcaactccatctaagagacacgctcatcgtcgttaagcttaggtc

SEQ ID NO: 90745 - DNA, 685 bp, Zea Mays
gttctaccgtcatctcccagtctaagtaagcttcaacatcataagaaccaatgaatggtggaatagagaacttaatcttagcatataaatcattgtctgattcatgattatgatgacgacgtctaccattacctcccatatcttgtcgattacgtgcaaggcgtcgtcgcagcggtgcatcaacatcgccgccgtcgttgtcgtcctccgcaggagagagcactactgcaccagcagctggggctagagcttgtggtggggcctccagcacgtccatacgggtaacaagctcagcaactcgttgatcaagctgctaataggatgtcgccgcagagtcctggtattttttgaaagcttcagtcatcgcgcgcatcatctccttcaattccagctgagaaacacactcatcgtcgttaagcttagggctcttctccttgtccgtttggttctttggtcctgtcattgttagtacaaaacagagacaaaaaggcaacaaacaaacagtgtaaaccctacaactatctctcaaggtggtgatggtggaacacaagttatgaagcgtcttaccctgctcttactaggttcttaccagcactgctggtggcaaacggtggccggtgtgactgtccaaaaagcgtgggtgtggttgcaaaggagtacctgttctgctcgagagaaaggtgga

SEQ ID NO: 90746 - DNA, 710 bp, Zea Mays
tgcccctggttacctacgttattcctagaatattcccctcttaagggctattataggtcattacattgtaattaagtacaacacggatggttacaccattaatcccacctacactgtggcttacaagtgggaccaggcgacctagggcagtttcacacgggctcgcttcaattgcagtgtgcgggtagtgacagtagcctccgtgttctgtgcgtcgggtctttggaagttggtgaggccttcgccattcctaggttcatcgggaaccggtagagccttcgcttgctttggacactccctccgtcttagggccttcgattggctagagtggtcttcacttttcctccttcatggttcatacctcctgttataaatgaaccgagcgagggggcagtccgccttcgccccaacacttccccccgaggggccagttcaacttagtgagctggtcccgaagtctttttcgggagatggccgagacgctgccctcgcccggttgaagtggtcccgctggggtttttgacatgtgactgttgaaaggtgacgttttactgtgggactgttgggttcccgaggcattttccctggcctatataaaaagccacgcgctcaccgctatgagatttttacccatctccatgtggaaaaacccctagccctgttgctttctgcgtgttgccttctttctctctcgccaccaatgatctggc

SEQ ID NO: 90747 - DNA, 1098 bp, Zea Mays
gacattcaatgatctctcaaactctaagtcggctaagtgacgataatcaccaagagtaacaaaaactaaactagccacgagtatacaaacgcattaaaggctctccatctcactgaaatgtggaatgaatggatgcaagtaagtgaaatgtgtttctcagctcttaaaagatgggtacaaaggctagaagttccaaaagagtgctcaagaccgaccacaagggttatttaaaatcccataagaaagtgaattgttaccctttgtagtagcacaatgcggtctcaccagacatctccacgaacaccgagcacctaatcgaacaaccctaacagctaggaactagttgatcctgtcagaggtctgatgcgcacatccgatgcacactagatacattcaatgcatgctagctctaagtgtccccaaaaataacatcttcattgaatggtgtgggtgtggcctttgatgccacactagacacatctagagaaggaatctaaacttcacacactcaaatagaccctcatctgacctctccgatcatacatgtctagtgcacatcagagtaagatgcttagctaaaacttaactcaagtttgctcacaagctggtgcatccggtgagcactccggttcttcaccaaacacgtctgatgagtagtgaataactccatcgacaacactttctcaactatttgcaaacatagtgatggggacatccaacatgtttaaggtaactcttgttttggtggaacgtgacacaattcgacttcaaattaaaagacccgaaccatgtaagcttagcaccatgactcctctagttatcaattatgtgattaattcgattgacctcactgcttgtgaaatgaaaaacacaagaaagaactctaaaccacgcatcttaatgaaaataacaattgcgagtgtatgattaagataaaaaaagagtttcacaactgaggacgatgactattcgatgatagattgatataaaggaaatactgagccttaagacgacattcaacaacttacccatatggccgtgtaaaatactgtattttcttgtaggttagtcctagattttgagatggactcaaacttt

SEQ ID NO: 90748 - DNA, 731 bp, Zea Mays
ccggcgtggatccacggttacaccgacgtcgaggcctcggtaccaaacttgggagcttcactgcgttcctacggaggtgatcgtggccacgcctgggcgtattggcgaccgggcacagcggaattgctcaccagagttgatccccgccgcgaatccgcacctcgccgcgaactgacttcttcacgacatcaccaccggtaagggctgtctccgcacgttcgcgatctcgtactagatgattagcactcgtcaatctcgggtttggagcgctcggacgtcatattgccgcgcgccggcaagcatcgccgccgcgggacctcgggcaccgccgtgccctgggatcgttgaagcaggtcgcgtgggagccatggatcccagaatcaacggacgagatcatatcgagataacggtatggctgtaggaaacgtggtccgttggatctggcattgatggctgtgattagatgtaggataccccttcacgcgttacaatccgggccgctggatcagatcgggcggttctgattgaatcgcacttcattaaatcgtggccgttgatcctcgatccgagggcggttatcacataccggttcgggctgggaagcttttaatcggagccgttgattcgaattgaacggcgctgatacacctataccccttcgtccggcaattttgcgtaagagccctcgaagaatcaggaaaataacccgcagtccacccttatgtaaagat

SEQ ID NO: 90749 - DNA, 271 bp, Zea Mays
gccagaaccaaagtctgggtgcgatttggccaggtgggcgcgagatcactgttggcgatttcgctgcggtctgttatggtcgagggagagaagagaagaaggggaagtcactgcgctccgggtcccacaagacagacagaagggtgctgacggcgtggccctacctgtcggtgcgacagagtccatcccacgatccacagcgaggaacgctgtgactggccggtggacccagggtgtcgacgccactactcccatcctcaactgggctggc

SEQ ID NO: 90750 - DNA, 341 bp, Zea Mays
gtttgccgtatgccgaattctcatataacaacagccatcaggccagtatcaagatgtcaccgttcgaagcattgtatggacgaaagtgccagacccccctaatgtggtccaatgtaggggaaaggacactggaaggacccaactttgttaaagaggccgaagagaaggttgccctgatccgcaagagattacttgaagctcagagtcgccagaaaagttatgcagacaacagacggagggaactcagatttgaggaaggagacttcgtatacctcaaggtctccccgatgcgtggggtcaaaaggttccaaatgaaaggaaagctagcaccacgtttcgtc

SEQ ID NO: 90751 - DNA, 500 bp, Zea Mays
acttcattactttgcgagtcttgccttaactctgtccatggattatgctttttcatcattatcacctttatccttgtcgcctctatatcttaccttgatgtttatcttataccggcctttaaaatatcctcttttctatctcaatctgagcattgtactttacctacttttcccttggtcgtatcctcttctttgtcacctgtgagtttttaactctatactttgttgggtttttgtttgttacttcctttacctttctcatcactctatcctaccttgtgataacattatgtctgttatctaaaatctccaatctcctatctcaatttgagagcggtgttttacttacctcacccttggcttatcctcttctttaccgcgtgtactcttgggcgcaacttcattctttgttgtactcataccactggctttccaatgccttcatcttttccttcatacccttgtttgttatcgcctttgacccatgcgatattgaggtc

SEQ ID NO: 90752 - DNA, 651 bp, Zea Mays
cattttcaggccatggactccgagaggatcgatggatcggtggttcctcctcgcccatcgcctggctccaaaccgggtgggcagtgcgtgtccatgtccgtgtccgtgtcccccggcctgcaggtgcccgagagaggaagaggagaactactgatctgaaggtcccgccattatcgttttcgtgaacataatggacgagccctaatccatagctcgcaacttgttgctatctctactgctagctgacttttcgccggagcacagctctccatcagtcgatcgatcgaggtcgatgggcttcgcatcctcaccctacagcgcgctcctttccgtcagatttcagtattttgctgtagctcaagttcagaactacaggccaaatcccaaatgtggcatggaatctctctactgcaccagaaaggcaaatgatatgatatgatagctgacaccaaaccacccagaaatccagaatacatgccatctctccctgccttcctttgcctaattcagcgaagtaaagaaatgacatcgcctggtatgcttttgcggaaggttctcaaattaacaaatcttagttttaattttgtttcaggtagtcataccccgttgcgacgaccttcgtggactgaggctgtctacagccgcgtccgc

SEQ ID NO: 90753 - DNA, 339 bp, Zea Mays
gaaggatactactgccgaatcaactaaaggtgggttggtccaactgaagtataccttcagattcagagatcggtttgatgagccaaatgatgattggctaaaaagtattgaggctatcagcgacgagctacttggagcatatagcagagccgaagatgatgccctgaccgcagccttcgggggccgagggaagaaaaggttgaacagggtatttgatgcgattggcttcgtataccctgattaccgctacccgctgtgagggcagggaaaaagagaaagactgccgcttcggccaccttagttgtgccgaagggcaaaaagatgaaggttctaacccac

SEQ ID NO: 90754 - DNA, 502 bp, Zea Mays
gtgctgtccgtcttgttgatgatgatggtgaagaagaagaaaaagtccctctgattcggaagagcagctgccgttacactgccagtggggaaagtagcggtgttccttctccagccttgtctgcactcattggtctgcaagaattatctctggcgaactttgatcagactcttgaggacatggttccagaagatctgctatcagaaccggcagatggtggtgccatggatgtttgagttgatgtgctcgacgccgggttggggtcctcccgggtagcgtctcgcgcctcatcgaccttggagcgcggtcttgagggtcaggaggctggtttggattctcctgctcccatggaagtgaccgagggaccttcagccttagaggcggctgctgcagataactcggcccacaatgacggtgctagcctttacccagcccccgagggtgctgctggagatgatccggctcaaatggatagtgccagctactacccagcccccgaggg

SEQ ID NO: 90755 - DNA, 284 bp, Zea Mays
cctcttcagcgctgtggcctggacattgtcgggccgctacccacagcccaagggaacctcaagttcaccttcgtcgccatcgaatatttcactaagtggatcgaggcaagagcagtatccacgataacatcgaagactgcccagaaattcttctggcaaaacattgtctgccgattcggagtaccgtccgagctcacagctgacaatggcaaataattcgatagccaagacttcaaggacttctgcttctccattggcaccaagcttgccttcgcctcagtgta

SEQ ID NO: 90756 - DNA, 305 bp, Zea Mays
gtttgttatcattttgacttgttattttttatcacgtacactctaatattcagaagtatttaatgtgataataattgaactctatgatgatgatttatttgatcgtattatatcacttttaatgaagtgaagtactatttgaagtttgtattatatgaagtaaagtattgtttcggcatgtcatgcatattccatcattcttttgcatttgaagttatgttgtgacattatggtctggtcgtactggtacatacttagcatcatacattgccccaggaggggtgtgatgcagctccatacccttc

SEQ ID NO: 90757 - DNA, 703 bp, Zea Mays
tgactaagctatagccttagtatgatcgcaaccagccttctccaagatggacgtggccccccaggcaccagcaaaggcacagaaatctcctcgatcactaagaatttcttcgaaagctttggctttcccgctgatccactagataactccatcggggtcaccgtggataaatctttgctcagagtaataggctccaaccttagcgaagctattctttaagctcttagcacattccaaggatacttcgtaacatttttctttggcagcacgaagctcatcgacattcttttgtgctcttaatttttcgattttgcatatttcatgcttcaccacttcaacttcgaatttttcggttgcttcagcaaccttcctctttaattcttgtacttcaactttgtaagcttcggcttgggctgcaagcttggcctcgtcagattttagtttatctaccaaggagagtaatatttttttctttttcaagagcttcatttcttagcgtgataaattctgagcgtagattcctaagagctatgcggtagctctcatcttctgcatcattctgggccttcaaagctttgcttaaaattaagccctggaaagcgaagagtgagaatgtaacaatggcaagaaaaaccataacagtagataattcaaagtatacacaccttcaggctgttgtaagcaagactgtctgcaagttgat

SEQ ID NO: 90758 - DNA, 547 bp, Zea Mays
ggccacacaagtgtattatctcccatatgcgtgccaaacgaaagaatatcttaagggttgggatgttgtgtataaggtatcgccgcacgagaggttacctgttcctaacgatgaagattacaacttagacccggacacatatgatggagagttcttccaagaagatgggctagaagggcgatttgagatagacttaaccgaagctatcggaatggatgtagatattgaaatggttgttgatgaggaggatgatgaggtgcaaaatgataatgacttagtaatccttgaaggcaacgacattaatgacgaacttgcgtctttcgatggtgtttgagattgaaatggttgatagtgatgatgagagttatgatccggctaaccccgacatatatgaagattatttttaatcgatgtaatgctatatgactttttatttcgcacctatttttaaatatatctttttatatgttcttatttgtttactcttaattgcagatttttggacaaatatggtcgacggtaattggctgaggaggaggagggggag

SEQ ID NO: 90759 - DNA, 497 bp, Zea Mays
ctcgactgtcagtaccttcggcactatagtcggctctttagagctttgtgcagttgggacagtttctttcacttcagcagacgaagaggtccctttgccaaattcaggtatcacggccggttcaatgtaacgtggccggtgagtcagaaccttcatcttcttgcccttcggctcagatgttatggccgaagcagcaacttttcccgaagcagcaatttttctttttaccccttgccctcgcagcgggtagcaataatcagtgtatacgaagccaatagcatcaaataccctgttcaatcttttcttactctgacccccaaaagctgcggacaaggcattgtcctcggtcttggagtatgccccaagtagctcgtcgctagtagcttcaatgcacttcagcctgtcatcatttggctcatcaaacttatccccaaaattgaaggtatacttcagtcggactaaattaccctcaccggagtcactgatggtctccttcg

SEQ ID NO: 90760 - DNA, 389 bp, Zea Mays
actggaggagtgaaaaaagctttgaaggcagataatttgacataagcgggttggtacaagcaaaaatatcatgatggttgcatgggaccaaccaaattatataagcatgcgggtgcggaagccgatgaattatcctgtttgagctcgctactctgtggaccgctagtgttcattgttcaaagatatgctcatttaattttgtttttaataacgtgattgaggaatgtgtttttggaccttcaacataagccttcatcagtttcgcggtctgagcatgttatggaaaaatgaactaatctcatgaggggctactgttagagaatgcctttgctaaaggttctccaaactaattgatactaacaattatacagtctgtttcacggataact

SEQ ID NO: 90761 - DNA, 409 bp, Zea Mays
aaaactgtcaacgcgaaggggaatcggctagatctggtcgtccgatcagagacggacgtgctagattagatctaggtttaagtaactcggtgtgcgcccaaggccgttagatcgcgatcgatggatgaagggcgatcccgtcccaatcaaatctaattcgttcgatcaccagccaacgcaccggattacccctagtgaaccagtacgctaagatccgatctggaccgcatgcccagaatccaacggttcatggccatcggccaccaccgagcagtagtggtggcgccgcgccccccttctacggcggcaccattaccggtgacctccaaatttacgcaaaagcggcccaaacgccgtatcgggagatgctacacgtagctaggaatctagtgagcttggcaagatcttc

SEQ ID NO: 90762 - DNA, 752 bp, Zea Mays
gtcgtatccagaactacattttctttggaaatggtattagtattaattaagagtagctggctgagagatttgcagcagaaatatgacatggtggcatgttggtaggtgctcactcttctgcacgctagccagcgtgcactgaacagggtcacacgaaagaacacgcgaggacggcaaaactaacatcgcctcacctaggtcggcaagataagaacttcaccaatagcgtaccgacatgttagtatgttgctgataatgatagatcacccgtagtttggatagcacggccagcttgatccgggaagttggtaggatggcgaaatttcagtttcctaatgatgcaaaaaaaaaaccctcgtgatcttcttatgattggatcattggaagccggatcttatacgtgttttaacgtagaacagactaattgtagcctaaaatttgtccgcacaaaaaaaacttctcaacacctttaaaacaccagtttcttgtggtgtgggtcatgcgtcatgtgcgaaaactcgtaggtttgttgctctctcccacttcacgtttaacaataggcatcaataagttgatacacaatagatgagtcatgagaaatcatttaagctcaacatgataggaagccacacgtaacgtaacactgtcatatagtaccacctcgatagctgaaggggacgatcgaccaaacgagctataaaaaaaagtcaaactctttttcaactcatatcttttccgtccttttaactaag

SEQ ID NO: 90763 - DNA, 408 bp, Zea Mays
gaaaaatgtacaaaggctcacggggtgcatggtagcactgagttgtttcatctcaaggctcagtgagagggggatgacatgctataaactgcttaagaaagtgaacagatttcagtggactcaagaggctcaagaagcactagaggcactcaagaaattcttgaccacccctcaagccacccaaccaagccatggctagtcggccggttgtagaccttctactgtacatctcctgcatgactcacgtggtaagcactacattggtagtcgagcgggcagaagaagggcatgcatacctagttcaacacactgtctacttcatcagcgaagtcctcgggccctccaagataagataccctcaattccagaagctactgtatgcggtactcctcactgcgcgaaagccgc

SEQ ID NO: 90764 - DNA, 275 bp, Zea Mays
ccctggtagcaacaagatgtaccatgatctcagatctttatattggtggaccagaatgaagagggagattgccaagtacatatctgagtgtgacacttgccagagaatcaaagccagtcatttgaaggcagcaggccctttgcaaccccttcccataccatcttggaaatgggaggacatttgcatggacttcatagtgggattgtccaatacctccaggcaccatgattccatttgggtcattgtggacagattgaccaagtcacctcatttct

SEQ ID NO: 90765 - DNA, 1444 bp, Zea Mays
ccaacttagtagaatttagagactttcgttcatctttagcttgcccgcctttgtcaacagacaagggtgatggaagaggatggggacctttcgactcagacttggtccaaggaggtgtactgaatttgtggaaatctttatgatgacctatgtcatatacttcctcctgtaaaagagccaaagtacaggctgtgtctaaatcacatggcatgtgcatcatcactacagcacacacatcctcatgtaacccatccacaaatcgtgttgtgaaatacagtgggtcatgaaccacttcatacgcaaacaactaatcttttaaggtacaaaaacgatcaatgtaatcagagactgaaccggtttgtcggatgcagaacaggtgccttgacagtgcctgatgctggttcttcccaaatctttcaagcaacaacttattaaacaaagaccaaggcacctccatatagtggtattgaaccgcttgaaaccaacaagccatagggggtgtcatatgcatagacgccaccctcacccatacatccggatccacaccatacatataaaagtaagattgacaacgtgaaatccataaacgagggttctcaccatcaaatgctagaaacgacagctgcgacaatttgccgagcaatcggaacccataatccggtccatgcagaggatgatgccacatctcccactgatatgatggagaacgcatctacggtgagccctacggaaaaggtatagtgattcatacccttgggtggctctggtaaatacgtagtgacagaaccaaatggtggttcctagaagtggaactcccctagaggttccaacaacccatcaacctccgatccgatcatcttcttcatcgataatgtactcgacttctacaacaacggaggctctatggagccatccattgttgtacgatcccacgcttgttgaacttgtgtaactccaacttgacatcatccatggcgacgtcgaccttgggtctccaagcccccaagtacgctctagccgcttccaactccccaggcgagcctctttcctagttgcgaactcagagaacttgcgctcccacttcagatccagcgcagagaatttcttccaggatcaacttggtattgggatccatgacaccttgacgacgctgcaaccgagtgaaatagtcgtggccggatcaggatccagcgcgaactacccagaatcgatgaatctgataccagatgttacactactaatagtggagaaggattcagagaggtaggcagcgttaacatgaggaacatgttgatgagagagagtagctggagaataataatttgttacaactttcggtaccctccactctcctcaactcacgcctttaaccctcttcggcaacacgccaacacccacacacgcatgctcacttggacgccaccactcaaggcccaacaacctt

SEQ ID NO: 90766 - DNA, 473 bp, Zea Mays
tggtatgctctatattttttgtcaaaaattgtaaaataagacattgtcgtgagttgttttttatgagttataaaatatgtcattgatctaaggcattgttatctgttagtaattttagcatagttatagtaagaaggtccacactcatgatgcaatcgcataacacatgttgcagtcccatcaagtcatcacacatgtatctgacacacatcaacccacacatatttgcatttagcgcatcctttctgtggcgtgtccattcatttgcattgcgcccactttcagcattctcaatccataatttagcctctcatttaatctattttagatacgccactgtatggtagagctactccatggtggagttgatagagcagagctaaaactggtggaatagagaagtcccaaacatccctaaacatttgtattgcagctctcagggactctataggggttgtaactctagagctgtg

SEQ ID NO: 90767 - DNA, 637 bp, Zea Mays
ccaactcccgtcctccaggcagctccccctggcctataaataggataccctacggcttcaggagggacatgcgaacacttcacaagttttctcctccacacggtattggcactagcctcaatcatccctagggacttgggattcttctctctgccgctccgcttgtaaaccctactacaagcacttaggtgcaagtaatataagtttcatgcccctctgttggaagtaaggcctctgtttgcccgaactagaataaaagatttgtgtcatcttgcatcaccatctgggtctgagcacgcgacattatttcactagttggttaggtccacggatgcaaacaccgacagatacattaccatctagctaacacaagaactcgcgcattacggtatcattatttatactttgacatatatgtatggttcctaaccgttggtgccaaacatcaatgatccctagagtttgcaaaccggcactagcgtgaggtgaggagtgatattccaaccctcttctcagcaaaccggcactagcccccaaattaactctaaaacacatttccacccgtctaaacaatacccatatcaatacccacccacaaaacccagtacaattcaatgcattagtagggatatgctaa

SEQ ID NO: 90768 - DNA, 591 bp, Zea Mays
cggatggcgcggaggttgttacaaccgcctctagccccgcctcggccgcagcttggggcattaataccagggggagcccttgttgtcttgaccccccatctataccgagtccacgaccagatcgagctaattcgggcacaaacccgtcgaggagagagagagtgagtgagtgagtcatgcgtcgccgggagtgccctagaccgtgtattggttgttcaagcgggggagccgcacaggaactcccacgtcgcattggacaagctattcgtggcatcatcagtcgagggacggtgatcgagcggtgggatttctcgccgggcagtggtggttggcgcggggttcccctcattggaggcagtagagtctacgcatccgatctaggtgaggactcctccctctaattcgttacggcctcctccatgaatagtgcgcatctagcgaatgttaggaagcgaggatgatcactggggcatcgctagtaatgtcgcagttgtgggtgaaagggccggcactgcttggcctaccgcgtaggaagaagatgaaatcgtggccgtcgatttcctcgcagacgtgcctgatcagggctcgaat

SEQ ID NO: 90769 - DNA, 1185 bp, Zea Mays
tattctcgtattgtttagaattcagcagtatctaaatttgtagaagtaagatgttgtgtgatgatttcgagacttcttcatgggacatagatgtcacccctatatgagtaattgcaggcatgtggaaccgtcttaagtcgttgctgacttaaaccgattgcttttgttaatagggcatagtagtcatcccgaattaagtaagcgcgagcatgttgcaccgtcttaagtcgttgctgacttaagccgattgctccgttagcagggcatagtggtcaccctgagttaaataagcgcaagcatgttgcaccgtcttaagtcgttgccgacttaagacgattgctccattagcagggcatagtggtcaccccgagttaagtaagcgcaagcatgttgcaccgtcttaagtcgttgccgacttaagccgattgctctgttagcagggcatagtggtcaccccgagttaagtaagcgcgagcatgttgcaccgtcttaagtcgttgccgacttaagcctattgcttcgttagcagggcatagtggtcaccccgagttaaataagcacgagcatgttgcaccgtcttaagtcgttgctgacttaagtcgattgctccgtaagcagggcatagtggtcaccccgagttaagtaagagtgcaggtcgaccatgaacaatatgggtattcttgaggtctctttattgatgatatatttccagtttacagagtacattgtcatcccgatagcttttgaaatacagctaggggtaaaacttcctgaggtgttctatgttccatgagtttccaatttccgtgccatccatctgagtgagacgatatgatcctggccgagtgacttctgctactatgaatggtccttcccatagaggtgacaacttatgtcatccctcccccgttagaattcggcggaggacgagatctcccactgcaaaggatcaacgtcgcatggccttatcgtggtaacgcctcaaagtttgctggtaccgtgctgattgaattactgtgtttagccgttcttcttcgagtatatcaacatcctccagcctagtagcttcggcttctgctatgctttcaaagaccaaccttggcgccccaaactttaggtcagcaggtagtactgcctctgacccgtagaccatgaagaaaggggtatttccatgcagagctcgac

SEQ ID NO: 90770 - DNA, 867 bp, Zea Mays
ccgaggcgaatctagaacaagccttaattgagttaatacggacctggattgacctgaccacggcgacagcgaataccgaacacaaatcaaagcgttccggttgattgagtgtggtcaagcacaaagggttgagccgatgagtttcacaagcatgtgtgggtgctaaaacatgaccaaggagagcgggagcagacctgggaacggctggccacggagcgcgaagaattcgtgctctacagggtccgacgagggggaatgggcgtcgcggcggattccggtggaaacagggagccacgtcggggctacacggccgcaaaagactaccaattcaccatgtactatcaatttggggaaaggaggaggcagtgcgaattttggcttcaatcgagctcactggtgaaattgtgaggatctcgtcatggttcatggcgctatttaaaggcacggcggtccggctaacgatcagtggccacgaaacacatcgttcacgcatggtgaccatgtaacaaaggagcacagtgagggagaatggcggagtgagtgacacggcggtaaaagaaccgagtcacggtggtcgccgatgaaatatctccggtcaggctccagcaaggttcgcggaatcatgacacggcccgtagttatctcaccacggtcgatccctcccccaatccactcgaacacatccaaatctacagtgcctcggatcttttcgttgttcttcagatattttctgtgctctgatcttcagtggtttgctgaaccgacctcctttcaccctctctatctcctaatttgtgttaagaacagggtgatcttcattaataaaatttgttcaccaaacaacagtcttccagtttactataggat

SEQ ID NO: 90771 - DNA, 603 bp, Zea Mays
gcttaacaaattcacatgcatatagaacattttcatctgtaacgatgatagatgaaagtgtccgtctgtaatatttctttagcaatgcaataatttggtattcatgtgtcaaagaaattctttaatggttaaaatacacatgttgaccaccattttgcagtataaaatgatgataattaagaaatcctggcagtgatctagtagatttttcgaccaattcaaccaaattgaagagaaatctgatgggtgttttgttggaaactatgaatcgattaccattcattgccaagttagcaacagcaccagcagtgactcgatgaatagtggtgttttctgatgtttctagaagggatagaagagcatcgagccctccttcctcaacgattctttcctgattaacatctgcaatcccagaaaaggacaagtgagcaaaaactggtcataattctaacacttcactagaaatataacacttcttaaatctgagttgtgaaactctacttcagccactaatatgttctaacttctaacctatttaaattcatcacattaaaatagtattattaggtttgttaaaaaataatactccctccacataaatta

SEQ ID NO: 90772 - DNA, 532 bp, Zea Mays
ggaactttgtacggtggccgggattctttaatggccgggcttatccccggcggtgtgctccgagtgcttatcaagtcatcctgagcacgagttgagacgacggcggcgcaaatcttagcgcagggagggtcgccggcggcgagcaggctatgctggcgttctgatccactcgggttactgtaccatcagaagttcagtttcagtttcttgctacatgcctgacagagcaacttcagaactctttttctccagattttctatggcaacgtgatccacactctgcagcaaatttgtagaggaatataccatctacaaatttgttatgggaatcatacccaaacttgcactggatcatgtttaaatccaagtccaaagttagctctgtttcactgtagttctgaatttcagaattccaccagcctgacagtccaacttcgggcttacttatctctggatttttcttaacaagtgagcttaccaccttaagcaaagttgttcttctataatcaggttacaattttgatgtggtgac

SEQ ID NO: 90773 - DNA, 281 bp, Zea Mays
actttttctctcgtttgaaaaagtttatgtcgttgcccaattttagcttctttcatttgaatactcaagatttttgtaaccacaagagcagtaccatgctcaaattcacatccagtatgttcctcatcttcatgagtgtcatctacatttcctgcttcagcttcctcttcactagctgatgtatattctccatcatcattcacaaggatcacaccattattggacaatccttaatgacatgaccacgacctccacacttgaagcactgaataccattactc

SEQ ID NO: 90774 - DNA, 404 bp, Zea Mays
gcgaacctgcgtctaaaagtctttgatttgaatgtaggattagctgagaaatagtctttgtaaagaagcgtatggtgtagtagtctttcacgatctactacgtcatgtcccacaacagaaccaattcgacccggatgattaaccaaatcatcaacgattatgtgagcggctccaaaaaacagatcattgtcatcatccgaagaggagggatcaatcacctcgttcattacaaaatgattgaattcttcatctgagtccataccgttgcggcgacaactaaccacgacggtgatgtcccgtttgcagctttgccttaagatttttggagcaaatacgagccaagacagtagacgtcctgatctgtgcctggctttcagcttccacgtcgtgcctttcagcatgaa

SEQ ID NO: 90775 - DNA, 690 bp, Zea Mays
cacttgcttcctggcttgacatgaactacacaatttgttcttttcaaatttcacatccttcaaccctcgaactaaataatgcttggataattgattcaattgtctcataccaacacgaccaagtcttctatgccatagccaacctagtgaagtcttagagaatagacaagttgtaagctttgcctcattagatgaaaaatcaacaagataaagattttcatgtctagaacctttaaatattagattgctaccatcaacactagagatgagaacatcatcaacagtaaaattgcaactaaaacccaaatcacatagttgagctacgaatagcaaattaaagttaagagattcaactaaaagtacatttgaaatggaatggtcatttgaaatagcaattttacccaaacatttaacctttcctttgtgattgtctccaaaagtgatgctatcataggttgagcaaccttcctcactcatttcagtgaacatcctcatgtcaccggtcatatgttatgtacaaccactatccaacacccaatgatttcctcccaccttgtaatttacctacaaaaggaaatcattctcttttaggtacccaaatttgtttgggtcctcggatgttagtgaccaagggttttggcacccaaattgctttctttttggtaccaacaattgaagtgccaacaaact

SEQ ID NO: 90776 - DNA, 368 bp, Zea Mays
gatgtcctcaggcacagatgcccaagttgatgccctcgcagggaattcatctgtcgccgagttaccgcgaggaacatgttgcagttcaaaggcgtcgaagtccttctctagctccctcacatgaatgaggtatgctgtgagttggtggggtggataggacatgagccacccttgccaccctgctggcgtgggcgcttgccacgcgggttctggctcctagtcgtagtcgcagcgactggagcaccgagcaacgacttctcaccaccgtggttctttttcttattttccttgtcgttgccctgagcagcggcgcctgaggcacccatttgggtagccccgacttgtggggccgagtgccatgcacgaac

SEQ ID NO: 90777 - DNA, 583 bp, Zea Mays
ccgcggcgaggacacgcagacgcggatcccgttggcgctgctggaggagatccgcgggctgcttcgttgtttccgagcatgcgacgtgaggcacatctaccgagaggggaaccaggtggcgcataccctctgccgccaggcttaccactgccccggcgtctgggtagggactgtgccgtcattcgctgtgttggacaaggccgaggaagaccggcgcggcgtgttgcatgagcgtgcaatggtccgattcgatgatcggccggcatgcaaagttcctgacatcgtcaacggcggcggcgttccatggagaatagagaatgcggggcggaaagagtggacttctgtccatgcatgcgacttgatggatcagcgccaagaatgatgaaggcgcaggcttggcagatggaaggattagcatcgccaagaaagatcacatccttctaagcatcaccagctactttggatacttctgaactttctcatctcatgtggcgctgtttcgtgtttattagatcatgatcgacccgtcatgggtggctaccgttctgatgcattgtcattaaaagaacctttctattttttt

SEQ ID NO: 90778 - DNA, 535 bp, Zea Mays
agagcctgatcaaaatttgctagggataattcttgcagaccaacgagagcagacaaagctggagaaggaatatcactactctccccactgactatgtaacattgactattcttctgaattaaggggatttcctcctcttcttcttcatcctcgtcaacaatacgaacaatacacccattggggtcagctctggcaggatcacacccattagggtcagctctggcaggatcacacccattgagatcagcatcgtcaaggtcacacccattgggttctgcttcagcagggtcacacccattggggtcaactccagtaaaaagtttcattggtacttcttcagcaacaggagcagaagggccagcatcttgatccaaacacgacactcgccgaagccgtctctttttcttcttcttcccctcggtaggagcagttggatgactggcctgacaaaggcgtttcgggcgagtgctatcagatttttgagcattcaaggtttttacaggctctaagatggttgcaacagctagtgtttcag

SEQ ID NO: 90779 - DNA, 518 bp, Zea Mays
ccccacaacagtccaagccttgatattttgcagtatggagagaccccagatcttcagggatgtatctcaactcgagcacatgggtggagtacagcagagagaggatcttgttcagtttctcaaaccaaactctgaagttaactgaaacaggactgctgctccattccactcattactgtttaagcccttggatctcacatatccccctaacaacagaccagacttacttgaccaaaattactctccaaaccaagccctatcactttggtataacaccccagggctaaaaacttattgcacaaaaactatgatgccctaaagtagagaaaaaccaacactgacagctcaatctcaattgactgaaacaacccataccgaactgacattgagttgtgtaacataattttctccaattccttcccagtaacaagcccaactctttatataaaaattgttcaccttataacaatctccaacattgctatgtacttcttaatctagaacctgatggaatggtc

SEQ ID NO: 90780 - DNA, 678 bp, Zea Mays
attacctctatgttttcagattcagactgatgacggtgtacactggtcagatcatatcagtgtttttctttttttggggtgtctgtttaactttttcaaatgatggtggttataaaaagaaaatacaaacttcagagcaggttgcttgccactttatgtgagtaggggagggaaaaggatgtcctaaacaaaaccaatagtaagaacaagatgatgggtgttgaccaagacatggaaaagataataatatcggatgactgcagtaaggttgaagctaagaagaaggtccacaccacatcccttgagaaggagaggaagaagaaacttcacaatgccagcactgggaagaacatgcaaagggatgatgacgaggagggggaggaatatgagtaactctgctactaaggtgaaaagcaaggtgtccagccaattatgtaaggagacgaatgagaaaaagatgaacaaaacataccaggggaagaagatgcagaatgctgacagcaagatgaaatatgacagtggagtaaagaaggttgggtactgaattccacagaaaaataaaaagttgatgcctcaccttagatgggatgcgtggaactgttgtgtctacgactggtcaccttcaaagcattaattctgcaaagataactatgaaccgggtaagtgcttgggaataag

SEQ ID NO: 90781 - DNA, 565 bp, Zea Mays
ggtcgtccgatctgaaacgaggcgcccagattagatccggacgcttaactaaccggtacgcccacatagctgcaggatctcgcatctacggctcggattttaaataactgatattgaaccgtatccgctcgttcgcagatggacgaccaaggttcactaggacgaaggggtatgttatcaactaatcctagccgcccatcacaggatctaaggccattgcttctcttccctactgagcaggaagcaaggcggcggatcaaggtccgcacggtggcacagcggcgatgcggcggcctagtgctccgaatctcaattaaatgagccctgacctcacaaaatatgcagcgatcacaggggtaccgacaatttgactatggtagttgattggggaaactgcacatacgctgaacatcaactcgccggtaacccacaccgacgaccccaaatcatggcgctagaccatggtctcggttacgggcatgccatagatgtagaaggacataaggcgaaacgcaatacgcaatgctcaccagggtttgcggcgtgaggatccctccactccgac

SEQ ID NO: 90782 - DNA, 1000 bp, Zea Mays
gccggtgaattgagcgagacgcgcggcggccagagaaagaagaagagcactggcgcagcggctgggtgtctagtgccgtggcaattgctccggcgatcaacggagagcaagggtgagtcacggtgatgcggtagatagccagagacacgcggcggacaacggcgacggcacaacgacgatgagattccaatccgagggcggtgagaaaggggagaggtatcacggctagccggagtggagtctagctcaccggcggcgaagattcttttaccccgcagcgctatccatccacctaggcactaatcccgacggcggtgacacgaatcacggcggagggagccgtcggcggtgaggacagccgcgctggcggtctgatccatatggggtactgtaccatggcgatttcagtcagatgaacctgacagagcatcttggagctccattttctcccagattcatatggcaacatgatcaacactctgtagaaaaattgtagagcaatatcccatctacaacattgctatattgtgctgccacaaaaagtcaatggatcttgcttgaaattaagcctgaagttcatgtcagtccactgtcagtctgatttcagactttaagtagtctgacagtccaactttgggcttaattatctcctgaatttttttaacaactatgctcacactcttaagcaaagttgttctcctttgataggtctatatgttttatgtggtgacctagggcaaaaatcctatactttgaaagttacaaagccccaaagttgagccaagactctgaaattcagacttaggctatattcacatattcatgaaccaaaggacttaatatgccttaacattgtagtttttacactttagtccaaatgtgcactgtttttgcacataggcccctagggtttggacttagggttttccagggtttcaattagggtttttggtatctcaggggtataaatgtgattcaagttcattcttgggaacatttt

SEQ ID NO: 90783 - DNA, 709 bp, Zea Mays
tagatgtcagcaagaatcatatcgatggggtggtccctttgaatgatttggtggactcttgagtgtggcacttgaggtcttgtctcttcattttcttcatgaccctccttttcttgattttcttcatttcccctttgatttgtgacatcttcttggtcatctttacttccatattgagttggggcgacacttttgtggaggatgattgatcttgttcttggattggctcttgtggtaacacatcttcaatggacatgttcttcattgcaacacatggagcctcttcatcatctaactcatcaagaccaacttgctcggttaggagctcatagggagtcttcttggaaagtcggtgaaggtataaccgatttatattatggcaagtggtgttaattgcttccaccaaaaatcgatcgaatgtcttatactcattaatcatggtcctcatcatatcaattagagttcggttctacctttccaccatttcattttggtatggtgaatagggagccagaaactcatgcttgatgccttcttcgtcatgatactcctctatttgtgttctcgaatcctattccgttgtcgctccttatcttcttgattctcaaattgaactcattttgagccctttcaagaacttcttcaaagttccttgggttttgtatttatcctacaaaaaatacccaagtaaaacatgtataatcatcga

SEQ ID NO: 90784 - DNA, 350 bp, Zea Mays
aagtagaagcacaaaatgaactatcatgtttggactcatcaaatttgattttaattctagtccaaatatcatgcgcatcatgaatagattcattataattcgatatgaaggcacgataatcttcattgctaaaagaattacttaagatgtcataagctagatagtttaagcgtatacatctttgatcttcctcggaaggatttttcttatgacaactaggaggtataatactcttgtataagatttgttctaatcatggatctacagttctaaaagcatttagcaccctagtagcccatgaatcataattagaacaatcggaaagtaatatctcaagagttacctccttg

SEQ ID NO: 90785 - DNA, 623 bp, Zea Mays
caccagatctgcgtcattagagcttcaaggtccaaggtacgtgagtcgctgctccatgttctacacctccgattcaatccgtgtcccaaaaaaacctaagttcgattcaccctagggtttacatgtacttcactagtttaactagatcgatttatttgttcatggccaactgggacaactagggtttactctgtcctccgagtcgcctattatgctcaactgatccgtcgttatcatgtacaccaagaccaatgctttaagttatcgatcataggatacgacatgaagactcttgtctgcttttgatattcgtcatcgtggagtgctcatttcagtgtatgcaccaaactgtaactgatcaattaatttgctgtcatgttgtttgtatgttgtttgctcaatgttgctcgtactcaaattaatgttcttgttcctatgcggacaactaagtaccatttaccgtatacttccccaacagatccccttgttgttgcatatcaatttcttgtaattcgacttagtacctctgtgtatggtttgtagtcaggtctcatacaattttgcttacatgactaagcattgcatggaactgatgatacctttacttattatgcagcttgaaa

SEQ ID NO: 90786 - DNA, 322 bp, Zea Mays
aacacgggtgcggtggtcacgtgctgccttaaagtatgaaaggcatcctcgcatttctgactccactcaattttctttaagagcttagtcattggtttagcatatctagaaaagtctggaataaatcactgataatatccaactaatcccaaaaatcttcgaatctctcgaaccgtagtaggagacttccattccattacttcttgcaccttgtcggggtcaacggctatcccttcctaagaaattgtgtgacccaagaacataatttgcttcagccagaattcacatttagaaagcttggcatataagcggtgacctcgta

SEQ ID NO: 90787 - DNA, 401 bp, Zea Mays
cgcgagtggcggatcaaggtcgggttaggcctttgttccaacaatgtgaaacttgattccacccgaacaacgacgttccttccctgaacattttcgtcgtcaaagcaaatttaataatagagccaactgttggctgcaaggatccttgtagcatgccatttagcttgtttatgtagcagttagctcttcagtattaatgtaggacctcatctatctctcaaagtttattgattcctgtgtcgaagctggcaataagtttacaacccttttcttctccctctcatgttctttctcctgcacctcagcatttagttagctcatagccttttattatagtttctctaagaaattcgtagccacataatggtgcccccacaagctaacctcatgccccgtcattt

SEQ ID NO: 90788 - DNA, 626 bp, Zea Mays
tatgcactaaccatcacaattggttattcaacgttgaattcgtatttcaaatagatggacaattttttgggcatataccatggatgcatcgtggaataagatcgttatggaaatgctgagttcgttgacatgcaacgtgtggctgtgatattcgatgatagaccctcctttaatgaggtggttgctaaggctaaggagaagatttattgtcatgatgctgatgacatcgtcattgatggggtgctaaacgtaggtcctctacccagcgtgcaaagacttatcatcccaattgagtgtcagtgagagtgggataattatgttaaatcagctatgaagacacaaaagcaagtcatggaggtagtggtacgacgtttgttagttgcctctcgccttgaagatgaaaactatgatcgtggtgttgaggtcgtgccaactgtgcatgatgctcaatctgcccccaatatgatcccattaagtgagcctacaaatgattgtggaactcattacctccacctagattctaccgagggtatcactttggcagggacccttgcagtaagtctctttgtagccgctcatcattttcgagcatacctattttgttcttttcattgctgccattttat

SEQ ID NO: 90789 - DNA, 341 bp, Zea Mays
aaggatcagatagttcatgaagacacatgtgaatgttttctgcacaaaaaactctttaacactttagtttgttgtgcattcgtacttttgtgccttagaataatatggatcgattagtcgatcagacatcctaatcgtccaagactctagaaaccgaccaacctatataatacgcccatatgctatggtgttgcggtggacatggcttcagacactgaaccgcgggtggagtaggaattgcaggccgacaaacaggcaacagccatacgcccatacgtccatgaacctatcttgttaggtcgagatattgttggtgggactaatggcagagccactactca

SEQ ID NO: 90790 - DNA, 305 bp, Zea Mays
ggaaatctgaagaacataaacgtaagtaagtcgatggtaatccgttttgatgtactcaaaaacttgacatggtgtgaacctactagtatgcacttattgaaatgtaatattgggtcggctgcaacaaacatgaacacctttcaatgatttccactcaaccgtaaccaacaatcgattaattgcatatgtgcatgacgttgctacgaggtaatacacgaggcagtaacatcttaaccaaggacgtacatgaaacctaacccctaatgaagtcatggggatgcaacggatccggataatgacaatag

SEQ ID NO: 90791 - DNA, 459 bp, Zea Mays
aatgacttcatcgtctcttggttctggaactacttcgtccccagcaaatggaatcaattcatcatcatttttttctaaaattctgattctttcattaaagccaaatcctctgccttaactatggatttttcgaactcaatatggctaggtttgcttgggcttagaatgccatcatcttcttcgtcatcactgtcagcttcgacaacagttggttcagcttcggcaacagcaacatcttctatcggaacagactcttcttctcgtacaactaacctagaacatttcatcatttttgagatagggtccgtctcagtagctctagcttcttatccttcgtgtgctactctggcagtagacctgactctagccatttcagttttatgtgatgaagctagactcagctaattgcacgtttgtccgaagcttacacagcaagtgcacggaaagtagaaagcttcg

SEQ ID NO: 90792 - DNA, 480 bp, Zea Mays
caaaaacgaggctgacacctctgttcatcatactaattgtttaattttaaaacatttgttgtgtttttatctttgtcaataatttattaaattatttctaatatatccatattttcattagtgtctgctttctcaggcatccaaaatgggttataatgttgtagtccatccattgaacatccctccccaaccttcatttgataagacacctgttgcacatgttagtttttcaatttcccatagatatgtacataatcaataaacattacattgtactaatcttcataatttatgttttgtataattatttacttcagggttcatccacggaattgttggttgaagtcccaccgaaggacctccctgtttttgacgagacgccggtcaccgaggttagattgttttcaatcccatatcaacttattataaattatgaattgtacacatttttactgtaaacatagttgtatttacttcagc

SEQ ID NO: 90793 - DNA, 787 bp, Zea Mays
tgtgatctgggcagtctagaatatttgaatccgattcgcttacggcttaggtcgggccgggctcgggtgacgtttaagaatgcaaatccttgccggagataacctgcgtgggcttgtcgtgagcgcgcaacctcgtgcccggcttagggtcgccggagtcactatcgtagacttgagtttgtgaataagcaaaaagacagggatctcagtgctaatgcccgatagcttggttgggttgtgacagcgatgataaatccactaaagaagcaaaacaaattttattttgatatagagagagtattataaactatacatgtgatggttgcttcggtagagagaagctttttaaaattaaaatttttatgaactatttatggtcaacaataactcaagagaggttaaatggcttggtgattctatatatcgaaaaaaagttgttggatgaggcttctatatcgaatttcgcactgggcccctgaaaagccaggaaggccctgcttgatctgcttcaagtgtttcatcaatttattgtgcgacggtatcaattgaaatgtacattaatattgtaatttgtgtaacaaatcttccctgtattatggttaaaatttaataatacaggtattttgaattacacaatcagtttttggcaaaatatttgaaaaccatattgaattaattaaataattaaggtattatttttctgtttccctccaattattttatttccctccaatttattttactgacagactatatttccctctgttgttttggatccctacggttc

SEQ ID NO: 90794 - DNA, 369 bp, Zea Mays
ctagaagggtattgcgatgctgactacgcaagcagtagggatgatcgaagatccacatctggatattgtgtttttgttggtggtaatctagtttcatggagaagcaagaagcaagcagtggtgtcccggtctactgcagaggcagaacaaagagcaatggctctagccttatgtgaaaatgatgtggttgacaagtcttctaaaagagcttctggtgttgaagaacgggaccatgttacttcattgtgataatgtagctacaatcaacatagcaaataatctagtccagtttgacctcatgaaacatgtggagattgataggttctttatcaaggaaaagattgatgttggggctttgaagttgaagta

SEQ ID NO: 90795 - DNA, 982 bp, Zea Mays
gaggaaattcccttggttggtgcaattttgggggccctggaacctattgcttcaaaagcctaagaaatgaagatcgaggatgccattgctatgattgcataaggagttactcctctaaaactgctctcagatggtgaagaagaagaagaagaacgaatagctccggtaacgagctcataattcgatgtggacgaagaggagttcaaggaaaaagatactgccagcacaaccttggcgcctactgtgatgtggcgatatcaggaagtccgaaggttgaaatgatgcctgcagtagtaacaccttgaacaatcataatggccaaggatatagtagttcttcaaaggctatgctggcagaggataagggtaaagggctcgaaaaatttgaagaggccaataaagctatcgaagatgacacgccgcttggtgaggggccttttaattaagagctgggggtcaaagatatagagttcatcacgctgctgggaagattatgggtgccaaacagctagccaaagccattggttttgttgaatagctcgggtagccttcggcgtttacgatcttcaggggagggctagatgactatttgtattgctgcccagacaacttagagactaaagtataccgctacatggtggataatattggttttccaaagctagaggccatgcttttaactatgtcttccaaagagttttcggactgccttgcttacacgcatcttaaggtgatttctatcgacttttcctttatggttcgggttaaattgctacaagacttgtgctgattttgacttctagtagggcctattcttgagcaaggctctaaagaacaagaaaaatgttgagggtgaagctgcccaaaaggaaatagttaaacttagattcgaagtatctgggctcggtacgactgcaaagagaaagaaaaactgtttaagatcttggagaatgattttattgaaagtcaagtcgaagttcaag

SEQ ID NO: 90796 - DNA, 672 bp, Zea Mays
tactataatggtcatcaagaacctttccaaactcaggactggcccaaacactaaaatcaaagtgagcacaacttttaagtccttccatgttctaactttgatactttcagcttgatcttgtgaccatgtccttttcttgagctagtacctcttgagacttatgacttgaaccatccaaatgtatataaattactctgatgaattcaagtcacgtcttcttatgttgtcgtcttcaatatcacacaactcttcacatgttgatcacctttgactcttgcaagcagtttcttcttcactttagcttttgatacctcaatcttcttgaccttctcctttacttagttcctcgaagttattccttaccttagtccttggtctaccaaactgactccaagtcaagttcaatgactagcaacttaatcaatgtccattctgcttaaccttattcaacttaggattactctccttagcatgacctctcttggacttgattggttcttcgactcaatgtaattacttgcttcttcaccttagctttggtacataaatcctctttaccatctcctttgcttagttcttcgaagccatatttccatgctatcttcacattatcaagccttccttaagtcataccatcttgagtgtacattgaatatccttcttgtgatatac

SEQ ID NO: 90797 - DNA, 938 bp, Zea Mays
gaaaacattactttaattttaattagagaagttaatcccatgaacgtgggggtaaacaaattaattattcaaaacatgttacatggtaaacataaagttactaacatgtagacaattttattacgaagctagcgcaactggaatggaataaaacggagttaaaacgaattaactgtggaatttctaattttctcggatttattttatacatgaaaatcaatttctaggatttattcatgaattttaatagaatttggaccaggggaataaaatctcgagagcccacggtgcaaatcctaaattccaggacccatttgtattttctgttgaactaaagtggactgcgggttatttccaattaaagtcagggtctcttttgcaagtctggctcagtgaaggggtatgcttacatctggaccattggatcagaaacacgtggcccagattagatcagagaagttgcatgtaatgaagccaatccagaccgttggcgcatggatccacggtcaatgctttacgcgaccatgatctaatcccatacgcccgatctggaatcaacggttgtcattggatttgaccaaatcgcctccagcaccaaatctccaccgtcgttttgccgatcaactatcttcgttcgtcacccaagcccgcgttcgtcaacattgcggcggtctcccgccggtgtatgaccacccgccgagccagaactcctatcatacaactacacggtcctacacggagtagacacgaaagtgaaccttatggatagattcatatcgacgattgcgccacatagggcactgtccaacgatccctgcggctgggcaacacggaagatgtttcggcgaggagtctgtcatgttctgcgttgtaactgcgcttgatgtcgtcaccaacaccatccagaccatcccagtgaaccatgacgttgtccatcg

SEQ ID NO: 90798 - DNA, 1099 bp, Zea Mays
ctagggttgaccggttgagacttgaggagagatgatcttggggctgccgggctgggctgtaccgctgtagcctgtgggcaagcaagactcattaaggccagacgcccagacccgagggagtcagagttgggctgggatcgggaccgggaccgggtccgtgagaattgatagctaaggctgtcaggcacccagtgaccccgtaagtatttcgggtattcgggagaatcgggtaccgcgatctggtacccaaaaatatccgaaatttgatcgggatttcacattacatacccaaaaattgtatttgggcttcgggtttcgggattttcggtttcggtctcggtttttctcggtttcggtcttcggtttcagtttttatgcccggggctagatagagcccgcacgctgaggcctgtcgcctgaggggaatggaagaatgaagttaggcttgcctgtccggtaagaggagaaaggtaggtggtgggcacgtcaagattcgcgtgtgccgtcggatctttgttgcgtggcccatgaggataatttggcactcaaaattttcatttgttctgatacatcttgaaatcgaagtcgacatatagacacagtgttactctaatttattgacgaggtatagctaaaaaaatcgacgtaaccttctcgtcttttcttttcccttgtcatgtgcttcttttgatggagcggagcggcagtaaccgttcctgcgaggtatgtccagcatcgttttggagtcggactttggtttcgccgtcgtcagaacatcttttgcttcatttgcaaatttctggtactagctttgaggaacaaataagctaagctaccaactttgaggaacggaggttggttcagctttctacgttgtagttgcactttacaattgtaagtaatcccgacgctttccttactgtttttttagtactcaatgtcgccattcgtcaaggatgaatccattcagtgtactcaacagctcccacagcatttggctggtcatcctcaccgtctacagcctgcctccgtggttatgtaaaaaatgcaggtttctttttgctaacaatgcttatttgtaacaccacgtccactccct

SEQ ID NO: 90799 - DNA, 426 bp, Zea Mays
ccgaccaccaagccttttcctttcacattgtcatctagccttcgaccaacaaatacatcaagcacacctcaaaccaccaagaggcatggcatttgtttaccaactcttccagacacaatgattacatcccctataaaactaataacccaccaaaagaggtctcctcatctcccataaatagtgtccctatcccactccacataaaacttagagggttgtcaatattgatagtgagtcaccttagactcgaagggtccaacacaccatgattatattactaggtgcacacaacaccatctcacaaacattcaatgtgagacccaaacaatcaatatatcatgcagtaagaacctacttaagccttagataaaaactttaaattctcataatgaggatgaagtgttctaacttgcactatttctttgg

SEQ ID NO: 90800 - DNA, 641 bp, Zea Mays
tcgagtctctgaaggttcatcattaaccacatgtccccgaatgcaacaaaggcattttgatttgaaccaataaaagcatgggctggtatattcacactgatggtgtcgatgccaactgaagatgcccgcatgtactaatcatgcaaccttttaatatagccgggaccttccttagtttctcaaaagtgagtagtggtctgcccggcacatattttttggcacgtttttataatctgccttagttggcttctttatctttgcggccattgcctcagccttttttgcggactcctcgagataggccaaatcaatagtgtctgacgtgaggctccgtccaatccctttcaaaagatgagttgttccagaagtggatttactcttctttttcttctcgaacggggacactaattttggtatagaaactttagatttctttgatggtcatggatcccttgatggctgtggagaaggtggatccctgaagggccatgtatgtggcggagatggtgggccaccatgaggatgaggagaaggagggtcagaaagaggatgaggagcagcatgtgaagtttgaggaggtgatgatggatgtacaataggaacaacaatttgagaaggcggagacggttgggcctgcgaca

SEQ ID NO: 90801 - DNA, 487 bp, Zea Mays
gagagaagcgacgttcagtcgagcaaactaagatggacaaaaaataatattcgacacaaaagcattcggggcaatcagtcgtcggaattaagtttcaacacatagggaaccaaacaaaatcaggagtttaatactgtaattagatctcaaaacatgacaaagaactcgacaatcagaggagacaagccatcaactttattatataagcaggggcatcattacataagaaggatcggttcattatgaactaatccttacaaaagacccctaccactactaccacccctacactacataatactactatttaagcagtggtgtcttgccaccggtgtcgtggccatcgccgccctcgccgccgatgttgttgctgcccttgctgctgccgacgtcatcgcctttgcctctatcgccatcaccacctttgccattgccattgtcgccattgccgaccttgtcatccttgccgccctcatcgccaccatca

SEQ ID NO: 90802 - DNA, 750 bp, Zea Mays
gaaggtgtcagcgacatctttgcagcactctaagagaaaatcaagtgatctctaaactggctaaggctggtttgaaagaaggcagacaatgttcgaagccagcttcgaaggtggagcaagcacaaaaaacagtaaatacaaacatcaagagtcgtgccctataacgatgggtaccgccccttttatacgcgcaaccgttcgacttaaactgtcacacccaatgtccactgggtccaactatgcaggagtgccattatcataacgagcttcggggaggtgttttttggacctttagcacaaggcctcccaattatatttttttgtgatctaagctcgttatgaaacaacgaactcatcccgcaaagggctactgttaggggcctatactgctgaaggtcctttgattagttatattacatgattgccttaaggacacaacgaaaagcgatgccaaagaccacttattgacgaagaaacaatcacctaacacataacttcagtcatgagtaaatgtctttcaggaacgtttcttcttacagatgaaactgatcttcgactggagcagtaatcaaagacgcttcgtctatgcgcaaatagcataaatggaaaacgaaggcaatggcatcgagcgtgagtcaaaaaggaagtcaatgaacaacgaaggctgagacccgcaaagacgaaggcggagacaaaacaatactatccttatatcatctgtaaacagcgtatgaaagccttgatgggtat

SEQ ID NO: 90803 - DNA, 456 bp, Zea Mays
tttgcgctagtagattcgaggattaatgcctaggatcgcagggcagggaagttgtcggcgtggcgagcgcgttggtctaagttcgctccgccacgggatggccgagggtagaagacgggagattaccgtttgatcttttttgggcggttgagattagagcggggatagcctctcgggtgattgatccagtgtcgttggatcgagatctggcgtcgttggttggatcggaacttataaaatctgggctgtcgtgtcttcatccaacggcctggccagcgtaccggttcgacgcggtctagatctaatcgtgggcgccgattaagatctattggtcctggtaaaccctagagcgctgaacatgtgtaagttgcaaaagagaccctatgaaacagagcaatcaacccgccgtccatattcactatgcactaagtctaggatatcttgcgcagagacccc

SEQ ID NO: 90804 - DNA, 703 bp, Zea Mays
cttgaacttgttttctctaggtttgttgcgtaaactctctttgactgcatcaagcagcataacatcatcagctccactcgctctagacactacacgcggttgtagatgttgttgaatagggtgatattttggttgttcatcaactactgatgctttagttgcttggcgtacattggcaaggagcttctatggtgcagttgtatgtgttggctatttgcccctagaacatcgattcctttttaccattgccatcaatggaatccgctgagtgcaatagccacacttgcacctaaaaatattgtgtttgtgcaataggcaatggtcatcgagcgtgatggctttgtggctgctgttagaggccatggtggtaggacaactgatgaagatagggttatggtgatggtgcacataatggtggtgatggtgcacataatggtgggctgggagatcatcctcaaacacataattgttggctccgagtaccaagatattatggctagagatggtaatgaatgacctgaagagaatatagtagatggaaggtaagaaaaagcacttgtgcttctttaaggctagaggtttcttctatgcacatacaaagtgatgtccctaattttatagtcctatggcatgagactaaaccgttaacagatttggattaagtatatataacccctaaactttagagggtggtctatttcac

SEQ ID NO: 90805 - DNA, 1115 bp, Zea Mays
catcattcgaacatgttcatttgtgttgtagaacacagacaactgactagtataaaggttacattgcagtgcatacacatttatatgatagattacacataaactaaaatgtaaacattatatacccataaggatttattgatacatcatatatcacatatagtgaatagcaagttcatcgcaacacatattttgacgaatatctgggtagagataagtatccaaccatttggatctgttccaccttcacgaggtgggcctcattttgttcaaccactaggtttggggaatgagagatgtatatttttctgtctcgcttgaacttgaacctcaaccattgagggtctaggtacatgcgactttacctcgaggttgtctcgctcgacccctaaccatagagggactattatgcctctaagtttcatctcgctcgacctttgacttttaatctctaggggtctgggagctggataactccctcctagggtttcgctcgatcatgctggtatggatggggtcaggtacttcgcctgattatgttggttcagaattctcgagatcgtaccatgacgtccattatggacataggaacatgcaagtcatgctctaacacgggtgtgcagtcaaaatgatggcatgagagttggtatgtcaaaacacgagcgtcacctattaggtgtggagagtagcacccgcttaaccacttcgtagctaggaagttagcaaagggcatcaagtaaaccaaagtgtaatgacaggcactggggcagcattggtgtggctacagtatctacccggagtgtaacgaaaggcaccaaggtggcattggcgtggctagagtatcctgatggaggaaggggacgtcatctagggcgtcccatagccggtgggaaccttaaaggacaccatgctacgagacaccacttacctttgctcgctttccccgaccctgtgactcatgtaactagatctctctcacgttcgcctataaaaggattggaaggaccactattcaaggagggagcaatcatcactcgcatcaacatagagcacttgtaactgcagcactcactcatcggacactttggaacttggtccgtcttacgcatgtttat

SEQ ID NO: 90806 - DNA, 300 bp, Zea Mays
ttatttcctacaatacatagtgatggccacactataaatgcaggtgatgtgctctcagaagactacaagctctttcgatacaactactataataatgcatgcaagcaccgatcaataagaggtgttctaacctcactcaaacattatgtctaaacctaaagcaagtgctataagaagcggtctaactaatttaagaacttcacaaagcatctatactaataatcgagtgatctttgagcacttgggggtataaagctactagaaatgagcttcaactttcattgtgatgttcctcagctc

SEQ ID NO: 90807 - DNA, 540 bp, Zea Mays
cgacatggaaggagatgccaacaagcagatcaagaagaggaagatcatagacggcattgggttcagccaacaggaggtggacagtgacaagtcgatgctacctctttcgctctcactgtcactccgtggcggcgacatcggcggcgaggatgcagggaggttcgaggcagcggcaggtagcggcggcaaaaaggccgctctggggcggagcactttggatctgaccatgtcgatcaaggcattggagtgagaagatgtttcacggccgctctggggggtgagtactttggatctgaccatgtcgatcgatccatcaaaggcattggagtgagatctttcaagtactcgtcccaaggccttccaaaacttgcacactgcaccatgagattaattaagtcataagactgtttgtttaagttaaccatgcatgagcagaccaggccagaccacatatacttacaaataataactgtcttcgatgagatgcactagacatagctacgaactgtacgtttttctctatgtatatgcatatatata

SEQ ID NO: 90808 - DNA, 631 bp, Zea Mays
aaattgttgagggagatctacggctactcgtctaggtcgatgacagactatcattgttgctaggcaccatcatccggataaggataaaagtatccaggatatgaatgagcgtgaagtactacacaaaaccgaacaggtgcttggtggctctcgtcttgcgaaacacaatggagatcctcttgcatggatgacaaagataacattaaaaaaactacaagattgattaagctaaagtaaatgcttaacatccaaaaacaggtattgtagtgtggtgcactttaacacgcaaacgctcccactgctcacctccgcctgcagttcataacaccgcatgcaaattcatcccctatcaaagaacatgctgaagtaaaaaagtaccgtatgattcatcatcattgactgatcagtttcataactacagtgaaattgtaggctcacgccacaccatctgcgatagcattatcgcttgtgatagcatcatcgcttggtcattcacataagtggaaattgaaattgtgagagcaataaaaaaatagaagtgagcagccaaccatttcattgaaggcttcattttaccaacaaaatagtggtatgaacagctcgaaaactaattcagaaacctaaaatcttg

SEQ ID NO: 90809 - DNA, 618 bp, Zea Mays
aaatatgcaaaaatcttcagtagtatttctgtcttgactacggcataccagcaatggatcatattgttacttttaccgtatacagccccactacagagcagcaagctgggagtaggaatggagaggggaataacgatgacaaaatagcacacctagaatcagaactaaaatacatacaagacaagttattaaacatgagcttgcagtatgcggaagtagaggcccaacgggaggaattagtgatggagcttaaaaatgtgaatgcaaagaaggggggacggtggttctagcaattagtgacagagctcaaaagctggatgccacagtcatgaggcccacatgccacagcacagcgaaggtacctaatacatgtattcatctcatgcttctttacatgcgcccaattgcatttgattacttgaggaaaaataaatgtaaaattaacattatcttctttattgctcctacttgggttgaactgaagctgaagcaggttttttgtctctatgtctgtttttggaaccaaggataggggctctgtcattcatatcaggaagaagagaacacaccttccactcgggtaggacataccgacagaaaggccttctcaacacctca

SEQ ID NO: 90810 - DNA, 484 bp, Zea Mays
ggaaaattaggaatctagcaaaattggtatgacatttttaccgtttttctacacttttctaaaattgttttagttctggtagaaaaagaaaaagaaaaacggtgaacagtcctaggccgaatccagcccagacagcccaaaccaaggtggaaagcgcgcgcccgctcccgcgcgctgcagactttgcaaaagtgcccacacgattcaactattttattaagagtcctagctactattccctgtgtcgctgactttttcacttaaaccctccgcctttctattctttacatgccgagatcctcgacggtgagcggcgttgcagagctccggcgagctcgcgtaccagccgatttacgcaaggactggcgcccttctttggcctaaaccaaattcgggatctaatgaacgtttcccccaacctaattccaagaatagttaactggttggctctggccatggcgaccgtgggcgtcgtggacagttg

SEQ ID NO: 90811 - DNA, 470 bp, Zea Mays
ccaaaactgaaatactaacatccaacatcttgatcatcctcatcctgccatttgttttttctgttgcagtcctcacatgaaagaaacaaaaaagtgtaacaaaatattaaaggggaaaaactgaaatgaagggaagattaaatcaatagggagctatataacctttcaatcggcatacttggtgatatttctcaatgaccagttctgtacttcagcacatgctcaatacaagaggctggaaatgcagaggaaaatataaaaaaatcaatccctttagctgttatggatttgcgtcccacactgcatttactaatggatatcagcgtgcataggagtaagttagtatgaattatgctcatgtgaaatagaatcccacgaaccatttctcacaaacatgtgacgtggtagaggaacaaacaaacatgtggcacatctatagatatgtttaaggcatgccacatagattttag

SEQ ID NO: 90812 - DNA, 309 bp, Zea Mays
cgtgcatgtgctctctagcgtctatgacgagaccgtcaacataacaagaaggaacgtgatgctgatcagcgatggggtcagtgccaccgtcatcatagggaacaagagcaatgcaactggcgtccccatgaacatgacggtgacagtgagtgagtaactctggcgatcgatatttcactccagttgagttgtcatgcatgcatactgtaaatcagaactattaatttgttgctgctgctgcagatgccttgggtcacggcttcatagcatagaacctgacaatcagaaacatggcagggccagaaagga

SEQ ID NO: 90813 - DNA, 1484 bp, Zea Mays
tggtttcaccctcaccttctaaagaagtataatggggccatcaatctctctgagtttctctaaatctatgtcatcgctatcctcgccattggtgggggtgaaggtgatgatgaacaattttcatgtgaccttgactagctaggcttggtcttggcgcgctcatgaatctctctaaggcatccatttggtcatgggaggagctttgctgacaaattatgtccaaatttgaaagcccttactctcagaccaataagagtccgacatccaccatctaacaacaatctagcgaaacactatgtgccttcatgttgtatttatgtcaggccacaaacattgtcacgtgtatcttcatgtcctatgtcatcattgtgcatgtgagtctgtgagatgagaaaatgcttgagaagcggtgcaaccgcatcatccataacatgggtgacctactctatgtggcagacaagtgctcttagggcactaagggttgggcacgcatgcccatcacgctacctagctagggctagtggaagccattccttcctagggtggtgcctagaataataataatgcaaggcctcactgctaggcctatgctgccatgggcgatggcggtgatgttgtcccccttcgaacacaagcgatcacgcttagggtcctaaggcattgtgcaaaagaattactatcctaggcacacaatgaatgataatgaattgaccttagtgccaagcagttaaatatctagccaagcatgtctaataatgatctagctagaagcgacaacaataatatgcagaaccatagaagaagcgtaataatgagactcaggtcgtcaaggtcctgttccctaaatgtagcatggatgaccttgacttctaggagttaaagcgcaccaccaccatcatttatagaaccaccgacaagttatccttccaccgtgtcatcaagcttatacactgtgaggtgcatgccatgattccatagcacacaccactagccccctcaaatgatttaggacacccatcatctttgattcctttgattgttctcacaacatggtaggtgcgaggattcatgctattgtagtcttccccaccatcaacaatatcaagctcaaacatatcctgattgatgatggggacaaagtcaacttcttatcgatgtacgtctttgatgaaatgtagacctcacgcatcgatctcatggccatgtgctcattaacatggttctcctaagagatggtcctttttcccttttatcagctccatcaagttgatagtcacctttggcactaaggaaactttcacactaagtatgtgaatttcatcatcactgagctccaccttcactgcaatgcctttcttaagcactccatgctctataaattcaaagtggttgtccactactagtacctaatcctcaagatacatgggcctgaaggcataatcattatgccctctagccgcactaaggccatatttgcggttgag

SEQ ID NO: 90814 - DNA, 747 bp, Zea Mays
ggttcagtgtctccggaaagcttagcccgagatacattggaccgttcactatcttggcctaggttggcagtttggtttatcgcttgcaattgccggattccatggaaggggtacacccagtatttcatgtctctatgttgaggaagttttttgcaggattcaaaccatcaaattgagttggaaccaattgctgtggagcaggatctgactctggagtgtcgtccggtgcgtatcttggagtcctcggagcgtgtcatgagaaggagatcaattaagcatgttaaggtcttgtggactaatcaggctgagcgcaaggctacttgggaacttgaggagctgatgcggcagaagtatcccaaacttttcgttatgggtgagtttttggtctttgttaatctttcttttgtcgttccgatagaagcatcggaattcgaggtcaaattctttttaaggggggtagagtgtgatacccaattttacaaaaaaattaaagtttatttttctttttttctctttcgtgttctgtgctattggggcttggagttttaggaggcataacctcagtgaagcagtagaactttcttgacttttacgctgtggtcgggagcagatgtgagagcgggtttgggccatcgatcttgatatgttggatgggagcccactatctctccctctccaaccctagtcgacctcccctttcccatttttttgtttgcagctctctcttgttccctttggccgctgccc

SEQ ID NO: 90815 - DNA, 654 bp, Zea Mays
ccaccggcagcaccctcgggggctgggttgtagctcacgctgcccacccgagccggatcattactggcaacaccctcgggggctgggtaaccgcttgcaccatcactgaggaccaggttctctgcaacagccacctctaaggctgaatgattctcagccacctccatgggaatggaacaacctggaacaacctcttgactccgaagaccacactccaaggtcgacgatgcacgagacgctgctcgggataactctaatcccacatctggattgttagagtaaacgtccatcataccaccatctattggctcggacagcagatcttcaggtaccacatcctcgagagcctgatcaaagttagctatggacaattcctgcagaccaacgagagcagacaaagctggagaacgaatattgctactctccccactgactatgtaacgccgactattcttccaaattaagggaatctcctcttcttcctcttcatcctcgtcaacaatacgaacaatacccccattggggtcagctctggcaggatcacacccatggggttcagctcgagcaagatcacatccagtaggttcagcatcatcgaggtcacacccattggggtcagcgtcagcagggtcacacccattgggatcagcttca

SEQ ID NO: 90816 - DNA, 530 bp, Zea Mays
tatcgtcagatcaggaccatccgatcaggaatggtcggattagattagatctaggttttaatcaaatgggtatgcgttctatgccgcgagatcgcgatccaacgacacagatgcctccacgaaccctacaagcgatctaaccatcgatagtaaggtcagcggctcagattctatctcctaatatcggatagtttccccaccatcacgaccgttgttgagtggatcaacggcccaaacgcactgcccgagcgatcccatcgtttcccccctttgtggaacacaaaccgcggcggagttcaaatccacagcggagccatggctggtccatggcctagcaccacggttccctaattccccctcgactagtcgatttgtggcaagtgaacgatggtgaacctacaggagggcttaattacgccgagaagaatgggctcggcaacagccacgttgaggcaagttcgtcggtgatgttgaatccccgatgagaaattggttcaaaccccgccccgcatttcctgatctagttgaac

SEQ ID NO: 90817 - DNA, 769 bp, Zea Mays
atgaaaagggacaccatccttagatgatgcaaaactcaaactatattatgatcacaatctaaaccaacaacaagaccatgatgtaggaaacaaactcaatacgatggaatccgaaaccaaattgtgcaaaagctatgacgctaaaggttataggataggaaacaaatattatagtggactatgggatgaaggaaaaaacacaagaagtaggtaatagatgctaacctgatggtatacctgaagctctaattaccatttgatgtgatgaggattcctgacctcccattaggttcgtgataactatcgatttgttggagatgcgacacaccaatccggattcaaatcacaaagactcaaactctgtaaccttagcaccacttctcctctagttatcaaccctatcacaatctagtttgacctcgccaagaaggctaatatgtgcatgtgaattgaagagcacaagcaagaacaagttgcaaatagaaaggattacacactcaagttggggttctacaaggtgacgagatggcaaaactgtgtacaacagaattatctaagcaaaacccatctaatctaatagatacaaccgaatatatatatatatatatatatgtatatatacacaataaatacggctaaggtggtggtcatcagggtggtcgagcaacactagggtgtaaaaggcatttgggaccaaaaacaggtaacactgatttctgttagattctagacatcatattgttataacgattttcatcgactcagagcg

SEQ ID NO: 90818 - DNA, 774 bp, Zea Mays
gcggagtcctcgaaaaccgatcggggggcttcgctacgatacaaggagggtcccattgtgcttcattggcgggattagtggctcgggttcctgggatttctcgtcggtgtgggaccttcgccgccgtaccgcagcgagccgcaagggcagctccatcgccgccctagcccggtaagatttccatcagctgtttcgcgtccatccgcacatcgtatgtcgcctcgccgttgtccgtttactacacctggtcgctgggttggccatcgacggcgagctgcgccatcgtgccccctggttctgctcgatgcccggcgcgaaaggaagataggggcccgacggtcaatataggaatggacgactcagattagctcgagccataccggttcgcgggcgtgtgggagccattgatcttggatcaatcggttgagactcgtataggcgctggatccatttggaccgtaggatcggaatctgaccgtgctagtctcacatcagttatccgcgggatgaatctaatctgggccatcctttcttcatcggtcggctccgatgggccgataccctttcggctgttggttttgcgtatgagtccctgtaaatagttgaaaccaacccgcagtccatcgacaggtagttttgagtcttagatacttttgcgccgttgcccctgatttctctggaatttgtggcccagtccagagaattataaaatctagaaaaaggaattagaaaatgatttttatgcaaaaataaatgctagaatttgtttaattc

SEQ ID NO: 90819 - DNA, 339 bp, Zea Mays
aagtcgaaagttacgaagctgctttgaagaaaaaggacttcgtcattcaagaccttgaaaataaagttaaagatcacgaagctgccttggagaagaaggacttcatcattcactctatggagggtttgctggctgaagctcaagccgaaattgacaaattaaacagcgaattactcataaaatcagaaaaatctgagcaagaaaagaagaatcttgaaacaagtctcaagaccgaaattgagaagaattcaaatttgcagaaatcattgaaggagcttcaagaaaaatgtttagattttggcaaccgatgtgtgcagcggctgaaggatgtgttttact

SEQ ID NO: 90820 - DNA, 456 bp, Zea Mays
gccttacaacagatacagcaattgcattcttccactgcttagtttcttcagccttaactagattcaggggttggtggtgtcatggtcctctgaaatatgggcagcaaaaggacctacgcctttgatgatccttgcatactcactgttggtttataagggcgataacaattaacttcaagcttagctttgtgaccacaatgaattgtccccttggcttttgtgagcacacactaaataaaatctgaacaactgaaattgaatataatatgccacacgatgtgcgatggagaattgattcatagccttataggctggcttggcacaacgaaattcttgtcccaacgtcagtccaacctgcttacttgcttagatccagctaactttaacgaggttgcaagatgataactagattgtttgtcttctttgtcctgtagcttgaattttctattgcatatt

SEQ ID NO: 90821 - DNA, 578 bp, Zea Mays
ctgaaaaagaagactatgtgtgtaggttgaagaagtcctcccagacagtggtataagaggtttgattcatttatgctttctaagggctttcagaggtctcaatatcactacaacacatatagccttctatgacgaataccttgtgacaatagatcaaaatgtcataagcttctcctacttatgacgttttgtaggggatgattgactttagtgatgaaaagtaaaactttgtcattaagaccaatgcaaaatcgtcataaatatgaaagtgtcacatttgtgacgaacactctttcaatcttatgacaattaggtagtgtcactatttcatgacaatgttgatcgtcataattctcatgtgaatttcctaaaaagcaaaaatgtagacgccactacatataattaaatgaggaatgaaatcttaacaaggtcatttactactgccataattaaatgatagggagaaaaataaataataaagaaaagaataaatattgttatcataaatagtaaagcttagattcacatgtgtgtgtcaaattggatacttggaaattttaaaagttcaaacatgaatt

SEQ ID NO: 90822 - DNA, 627 bp, Zea Mays
cacgacagttaaggcgagaagcaggggcaacactgtggacgagctgggctaggcggtgacatggtggagcagggggccgccatggtcgaggcgttaaggaagggacgacgtgggggggggggggggcgacgtggtggaaagggaggcgtcgagcaagagtagagttgtcgtgcctagatggcgtgtcatggtgaagcaggggcacgacgacgtggtggcctgacactcataggggcgattgctaccaaactagacgagcaggagcaagctcgggcaaataaggcgagggaaccctaacacgtcaatgcagctcagcccgctacattttggtcctatcaagaaaacatcacaataaataggctaaacatcgtttacacccgtctagagccgttctatttaggctgctttgaccgtttagaccagacgatgactgtttatatgggtcaaccatttagagaaccgcttatgccttaaactgcatggtgttgcttcgtttaccgtttaaaccgatttaaactaatgtctaaaaccatttagagtttggggttataaaacgacaaagacatagagagaaaacaaggagcaggatgatgaaaaaatgaatatattggcagggatcctaatgct

SEQ ID NO: 90823 - DNA, 372 bp, Zea Mays
aggaagaaaaaaaaggtaggtcgtttcttgtccaaggtccacatacaacctacctgtgttgatctgtttgtgagatcaggaacctgcagcaaggatggaagtcgcccctcttgccaagccgatggcccatccatctgctccctttatataggagcaagtcttaaagaaatggagctcatgcactctgatgacctaatctatgtgtgaacagtaactggagatagatgatacctctctctctccagacttctcagttcccaaggaaaaagctagctaatccttgcaggatcagtacatacatattgcagacatggcccttctgttgtagtacttctctaatcctagtactgaccagaccaagacctcaaatca

SEQ ID NO: 90824 - DNA, 975 bp, Zea Mays
cccccttttggcagcgagcaccaaaaacaggagaagacacagccacatattactaggatggagagggatcaaagaaccgagatgctagattagcagcaaagttttcctccccagggttagcagggggaggagtgcttcctgaagatcctggggggaggataagacgacgaggggcctggatcaccctggtagggaggcgggacaaactgatctctatcatcaaagaactcttcctcaacatcttcatcttcagcagacatgaatggaacaccataagcttgttggtgccattcattgatttctggaggggtgcatgaaggggcacgtcgggcgagcggggggcaaaaggaattcccatggtgatagactgacgatggagattgtcatccgtctcccgctgccgcctggccagctcatgaacgtcagcagaaatgtccctgcacatagagaaaaaggctgcaatcccatgagccaacctggctcccaggccatgacctcgaccacgaccacggggagtgagagagccacgaccaagagaaggatgggagggaccagctgaggtctgctcacgagagctggcaggagccttcttcatcctgcctgctggattattggggtcaatccaaaaaggggtgtaggaaagatgtctggtgcctttttcatatctgaattgggtgacaacctcaatcatctacatgatgtagggggcatgcagacaacctttgagtggggagcaagaggcatgaatgatttcttgccagatcatatcaaacacattcaatctctcactgctattgggcttcatgaaagagagaagtaccttgctttcacccagaatgttcatttgattgccctctttgggaatgagagtcatcctgaaaagagagttgaggtatctatagtacttatgcatattggtggatttctagaactcatcattttcagaaatatggagatctttggcctcagccctgg

SEQ ID NO: 90825 - DNA, 924 bp, Zea Mays
ccgcttcttgcggccttcctgtcgctccaagtacacggtctttcccttgacgtgcctgaaggggcgacgaggatcctcatcatcgcctcccactggcgccgacacattcttcgtgcgcggcatcctaacctgacgactacaaattagagagagaagctaagcacaagtcgataatagccgtaagaatatcaaaagaggagatgtctacctggaaagctcacacgagaggtggaaatccaggcaggacaggagacggctcacaggcaggcaaggtcactgaaatgacagaagaggtgagcacgtattagtcacatagtcataagtatatgaaatgtgaataaatacatacatagagaaatatggcacagagaacgagagatatggcgatcgggaggtcaaacgacgtgaaaacggcgtttgaacgagaaatagtgtcataggaggtttggaattcgaattgaggtatgaaatggcgtggaattaagctgatacttcacgaataggtttatatgggtgaatatgagtgaagtgtgtgcttggtttgaatttaggcgaagaaaatggaatttgggcactcggctcggagacgatcgctcgaaacagggaattgagtgaaattgaagcctggtatatcggattggcgtgaaatttggtgaatatgttactggaggtgttgtgaaggtgcctgaaaagtttgggttcaatcggagcgtttttggctggtttgggcatttcaccgaacacgtgatgtgcgaggatttagggtttcggtgaaaaggctatttgaggtggtgaaaccctcccaaaggagctaagaacctgtaggggatttaatggagcactagggcacacaaccatgcactgggattcacaagatttacacaagaatttgaaattggcacaagaggtgggaaggagttcact

SEQ ID NO: 90826 - DNA, 373 bp, Zea Mays
gaaagggtgactcatacgtggcgccatctcccgagctcggccggagtgattcaccggtggccatcgcgtcagccctttccgccgcggtgtcctctgcaccgtgattctttctcactgtatcacttctctacgtgtttggcatgcgtttgtgatggtattcaggccgcgagttgatcgccggacccccgcggctataaatagccccctggatcacggcaaggctcggtcatcacgcacaccagtgaaccaaatcgaagtcaaatttgcactgccctctccaccttcgcccaaattgattgcgcacggtgaaagcacagcctcttacggtcctatagccccgatcccatctcccaatttcgcccagagccgccgc

SEQ ID NO: 90827 - DNA, 393 bp, Zea Mays
atataacctcagaccatctgatcccaaagtggatcgtctggcaccttatgccagacattctagtgttacacctgaccacccgaccacctaggtcagaccgtccgggtatgtctacaaaggacaaggtgcaacatgaaacacatagtttatcttcccaccttagtagcactactatctcccacctgcaacacatgaaaaccatagcatgccaccacccgtacatgtgtccaaatattttcgacccctagggagctatagaggttcaccccatactatacaacggtgggattcggtacaagtatgcctcgggggcctataccgaaggctacctttgattgtcctagggcagaaggccggcataatgagaactgaccacctaagccccatgtctcg

SEQ ID NO: 90828 - DNA, 650 bp, Zea Mays
tcgcatcaaatatcggcgcagaagattccgtatgtggtgttgctttaggagtgacgtttgtgttggtcggcatgttcttcccaccgtcggcatgtttaccctaaaaaaattgtaatggttatatgctatttaaagaaaacgatgaatacagacccttcaatgaacaatacaagtaataagaaaaacattaccactggggttgtaggtgttttgttctatttcgttatatttgtatgaaccagtggatcaatatcagcttcatcgggacaactttctaatagtacacgaatatgctgttgccttaacagtaattcatgtacttgcgtgtctgtcaactgcgtatcctgctgggatgctggagtagacatatcgggtacagtttgggggggggggtggacatgtacatccttatttacgtatcatgtaaacaaaaaaacattgtttaaaataatggcatcaaaacgatatcgacaaatgtttgaatgaattttttatattgacgtaaagaccataaaactgactaacctgcagtctggggaagaatatcatctgattttgtagttgttttctgcacatcataaccatcttcattgtcccccgactcagcacggaggacctcatcaattaactcgccaaaaacatcagataga

SEQ ID NO: 90829 - DNA, 441 bp, Zea Mays
tcaatatcaatccctttcgcaaggaatctccacacattggagtctcttgcaaccatacacaaaagaatgagttacaactctgaagtacatcaaatagagagagtagagtacacacacaagagcaaactcagccacacaacacaagaaagaagatcataagagcgcactctcatagaatgacaagaatagctcagaatgacactcggatctcactagaacgctagaatacgttgtggtagagtgtaggagtgatcaagtgctcttggtatgcttggggtactgaaggaggtcgctaagggggtctttttaaagcccaaatacaccctagatgttgctccttctttataaaaaactgctgacatttagctctactcggggcaccagactagcttgatgcgacactagatcaagaacaagagctccttccttgggatctgactg

SEQ ID NO: 90830 - DNA, 441 bp, Zea Mays
tccaatccacccgctcctgcctccaattactcaccagagcccctgaatcgctcagttcccccaaatctgttttccgccaccatgaacaagctctcaccgtggtcaatgcaatttaggtccggtcttgccctctgctctcttgtttcagcactcttacatgccactgatgctcctcgacccattcaattaaactagaacgcgctagatcgtcgggaacacccgtgttaatccgttattcgcactgtctccatgggagggcgatttagagctcggattgtgcaattgatcgaggggaaatgtttgttaggtgttgaattaggtcttagccaaattagagcaccggccattgagtgtcgtagctagtacagactcgtcggagctcggtctgtcgtcgtgcgatgtcgaggtcctggcgttgtgaagaattagaactaaggggtt

SEQ ID NO: 90831 - DNA, 444 bp, Zea Mays
cttggtattgcctaagcaatgctcaacgatattgggctctccgcccctggcggccacttacatcaagaacctcacgatgcggataggctggttagtggatcatgttgtcgtcaagaccattgtttttagatcatctaactaatcacgattagttgggttgatcaatactcttagctcgatcaagccattcagttcgatcaggtaagttgatcgtccgtatcgttcgattagttgacgatatggaacgattaatcggctggttagcgatcagtcgtgataattacttagggtagtccaacaatatgttctctaaagacgtgcttagctggcccatatttaatataggtagccgccctccagatcctccgtttcttcttccttgcggacctgtaccctagaggctaggacgactgttcttcttctaggattggcggctcccttctc

SEQ ID NO: 90832 - DNA, 395 bp, Zea Mays
gccatgcacagtggctatgtcaattagcatgatttgccaagaagactggagggcccaaataattttgtacctatgaggacactaccacccagataacccatcagaagaatcgaggcacgaatatagaagtctccactacacaatcatcaaagacaccctctctagaagagaaattgttcagtccctcctaaagtgcattgccaaatatgaggacagacaactcctaattaaagtccaccaaggattttgcggctgtcacatcggccccagggccctcacctcaagaatcatgtgcctaagtttttctggcctagaattgtatgtccaaaatatagcaaaaaattgcgaaactttccagaagttttcaccaagcaaagggggtccttcgcagaaat

SEQ ID NO: 90833 - DNA, 621 bp, Zea Mays
ctcgggcgctgggaaatgattactagaggaaattcactccgggcaatgcggggtacacgcaacattgagaacactcgtagggaaggaattcagtgctggtttgtaaaggccaactaccaagaaagatgcagccgacctagtccacagatgtgaggcctgttaattcttagccaagcaacaacatctgccagcacatcaattgtagactattccagtcacctggcccttcgcatgctggggttggacatggtcgggccattcaatgcaagaaagcttagggatgatatgcgcatttgtaggtagctattgacaagttcacaaaatggatagagtacaagccaatagccatcctggcctcggccaaggcggtagagttcatccaagagagtatctcaaatttgggatacccaacaacatcatcacagattttggttcaaacttcaccagtgccaaattctttgacttttgcgaacaaaaatgcatctagctcaagtatgcctcggtagcacaccctaggaccaatgggcaggtagaaagggcaaatggaatgctactagaagcacttggtgtcacacccgtatttaagggcaaaccagggtgcatctcatatgtgcgccaaac

SEQ ID NO: 90834 - DNA, 504 bp, Zea Mays
atcgttgtcatcattgtcgtcgtccacaggagagtgagctggggctagagttggtggtggagatatcgatgagcctccagtacgtccatgcgtgtaacaagttcagcaactcgttggtcaagctgctcataggatatcgccgcagagtcctggtattttttaaaagcttcaatcatcgcgcgcatcatctccttcaattccagctgagagacacactcatcatagttaagcttaggccccttgtccttgtccatttgattctttggtcctgtcattgttagcacaaaatagagacaaaaaggcaacaaacaatatgaaccctacaactatcttttagggtggtggtggtggaatataaattatgaagcgtcttaccctgctcttacaacgttcttaccagcactgtaggtggcaaacggtgaccagtgcgactcccaacgagcgtgggtgtgattgcaaaggagtacctattctgctcgatagaaagctggagttctgggaagg

SEQ ID NO: 90835 - DNA, 587 bp, Zea Mays
gtgacaatgacttggccctgactcccgagcgagcgagcgagtgatcggccacacgacaccgccggctgcatcggtcggtgtcatctcggttgttttcgccatcacacgagagacacatgctccggtagagaaacctaatcaaaagttatatccaccaggaaatcgcacacgacgacgtacatgcatatctttctttcgtctgctattcataaaacctttttttcttcctttttttttaacgacaggacttcacgaggtcgtctcacatgccctgagacgcgacggtctccagcttcattcaggtcaggtccgggccatcgtttctgttcgcacaaactccgttctcgtactgccagccgatcagggaaccgtgccttgaccatccgggattgactcgaaactctgctccaatttgcgccctggacacgcgacatcgaagcccggaaacaccaatcagcacgaacgatctgtcgacgactcggagatggacggcctatctgttcgccggaacaaaatatatactagtagtaaacagacggctctttcatttggtccaaaaccgccggctgctcttcgattccgtgagc

SEQ ID NO: 90836 - DNA, 330 bp, Zea Mays
agtgaaacaatacctaatctaggatgtagcaagaaggtgagctagatctccaccaaaattcaagcctaggtggttggatttaagcagatatcggtggaggccgcctcgcttggtcgcgcgagttagagaagggagaagaataggagataaaaaggggagcccactttgtatgccacacttctgcgccggacaagatgatgtggctgagtggcttcatttcatcaatcaggcttccactaacttatcacggtgacaccaaggtgtttagcatgacataataatttggttgcgttagataaattgatacaactaaatgtatggtaagatatt

SEQ ID NO: 90837 - DNA, 347 bp, Zea Mays
ttcattttgaggtgcccctgaaccctagtgatgcggatataaatgccatgcttgatctgctagctgaggattcctccgacgctgctcctactggtacattggcagtggtgccccttccagaggttggtacaactttggatgtccagaaaccagtcagtactcgcccgaggcgccctagccgaaccagtcagcctgagccttctgctgatgagcaaaagaagaagagaagacgcctccggcgagtatccagttttgatgaggatgccggtgcctcagttccggctactgaagaagtgcctgcgactggacttactgatgccgaccccaatgggtgtacccaaactgct

SEQ ID NO: 90838 - DNA, 491 bp, Zea Mays
gtttgatcggtgcctgtagaatttacttggtttgcttgatctcgtggctctggttgttgtcgtgtaggcttacggtgacggtgaggagctggacaaagtgttggccaataggttctgttcatgatggtgcagtgcttctgtgcttgatggcttggtgctgttaaataattttgcattgattgtggtccgtgcagtgattgaatcctccaattcgtttttctgtttcttttgtgacacacattacacttgaggcctatgtttatcgatggcccctcgttgatgaatcttatacatagtaggcactgacttcatttgctgcctgcaagagctagcgtgcctgtgtttccatgttatgcaaattttctgttggaaccgatagtacatcattttgatgaccctggagttgctgtagtattgtttcctctactacaatttcttgcatggcaggaaaccttattgcattctgctgtttattccacagtaagattgca

SEQ ID NO: 90839 - DNA, 673 bp, Zea Mays
tattagtggcaccacattttttatttattttttccttgaacgacaggggcagagatgcatttcatgtcatttagaagaagaacaaaaggggtacaaggaaaaatcggagacctctccctgacccacactacattcacgccttgtatttcttaacaagcacgacaacagcataatcacctactcaagtcagggatactgggatgaacaacctaatggggagctcactaagagccaatactccaaccgaacaccaaaggccacactcatctgccaccgtttgctgtactacctgaacatttggtctgacctcttcaaacacacaagaatttctttgtttccaaatttcccaggccaccaaaatggtcaaagaattgaaattttcaaaaccctttctcaaatccttggggactccttttatagcattgtaccatcaactggagaaatgagagacagaaggtcaggggtggtaggaactaggaagcagccccagctgttggaggatcattgtccaaacctgtctggttcagcctgatcacatagagagatgcataaaatccagcatttattttcttgtagcagcatctttacactaggttgaatttggaaagataactttcctcaccctttgtttttgcctttccccgagtctatacctggagcaaaggcatagcat

SEQ ID NO: 90840 - DNA, 445 bp, Zea Mays
taggctgcctccagcaacgctcggtaaaacgttctgtacgttatatatagcagttcttcagctactttatgcgtctagcaagctcctgtaaagggtccggtaaaatttggaggacgaagtatatccgccaaacattgaggttctgggctcgttctctatcgccttgatttgctggttcgcgcgtcaggttggatatttcatccgcggcatccgtctctgacactaccactatggatacatggagttggccaccgaggagatgacgaaggctgaagagagagaacaaaattcacataatttatatacattattttttgcataatatttacacgttcactaatttgtggttttggaaaattattagttgcatcatttttaatgcgacacgttagatccaattaaaattatatgaaaacaattaataaataaggtagttgtgtattct

SEQ ID NO: 90841 - DNA, 597 bp, Zea Mays
cgatccgacggcacagatccaaactccccaagcggtatgccagaactaatctaggccgcccattaaagaatccacggccccgcacccttcatcttccccctgacgcgcccaggcggcggcgccgcgctctacacggtggagcactccggcgaggcgccaaatctaccccacccgagtgccaaaccccaaattggaccgagctacgcgatgctacgcacacggcgaactagtggaagtagttcatactaggaaggatggcgaggaggtttcagttcacggtgttgtgcgtcccgacagcgcttccctagctccggtgacaaattctccagttcccagtcatgaatcctgttcaacgaggctagggaaaccatccatgtgtcgcggcgaagcttctgcgcccagtgcggtcgcctgattgttgacatgggccacactctattgcggcggacgaattcctccccggcttccctcacattcgcacgacggcttgttcacccacacggttccagcgaccgaacacatttcccctcatgcgctcacgatgccacggcgtagacgagatctggcagcagtggctccatcctccttgcactttcc

SEQ ID NO: 90842 - DNA, 802 bp, Zea Mays
gcacatctgagaatatattgggggtcatgtttgacagagacccttcggcattgttcccttggtacggacatggtttagtgatggtttgttttattgtgctgacgttgctcagtggtattgggttagcctcgcctttcccatatgggtctgcttgccagagagttggtcggcaactccgcctcgtcgtgttgctcggcaactccgtcttgtcgatttgctcgtcaggcaggttggtcggcaactttgtcttgttgtttcgctcggggggtgagctggtcggttagtgagccgtctttaggaggctttcatcgagcacccggttactaggtacccgacaccatcattttgatgaacacagtctagttgtagggtgtgtactagctagtagctagctagctgccgggccatggattgcattttgatgaatgcacaagaaggacagccggaccggcgtcgtcgtcgttgtcctgacactgccatatatggcagtcaacaggtacatatatactgcactgcactgcaggatatgatgcatgttcctctgttccgtattactaccttttttatttttttttgtgggcagcaaatgaatggccacaattgcatatgcatgcatgacaacgcattatagctcacgtgttgtagctcgcaacactttataacatagccgcagtatatatacgtacatgcatgcattgttgctaggctggaatggatggaggggagctgagctacacacgaatttgcatgtgcatgtgcatgcattcaaagccatgcatgcacgtatattaattaaatttgt

SEQ ID NO: 90843 - DNA, 304 bp, Zea Mays
gaaatctccacggccactaagtatttcttcaaaaacttcaacttcttcgccgatccattgaatgactccttcaagatcacctcgaataaatttttgctccaatgagtatgcacccacctttgcaaaactgtctttcagtttctttgcgcaatccaaggatttttcatagcatctttccttggattcatgaagctcctccacattcttctgcaaccttgagcttgtccattcacttatttcttgttttgcctttgtaacttcaagatcttcattcattttggcaagctttttctttaggccttcg

SEQ ID NO: 90844 - DNA, 655 bp, Zea Mays
ccagttgtcttcttcctccatcagctcagcacggcggtggacgcagagttccacccagaccgcacaccgacacttgcgaaacattgacctacacacggatcctggccccggacccgaattaatcgaagtcccgaccatgctgaacctattgacctccatcacgccttggcctagcatgctaaaaagtcttgcacaacgcaccatggctccgcatagcgaccatgatggagagccccgacacagggcccccggcgccttcccaatttaatccaaagggcactaatcgtggcataggtgaactcgaaccgcttaaggagatggttaccgtgattatgggtgatggtgtggacacgagcccaaccgcggccatgcagtcccctctcttttcttctctgcgcttggtggcgaggcgtattatgggtcgaggtagccgtgatgcttgggttaaatagacgagcggagcggattagggaatccatgcatcgtccataaccataccgcgatgaatcccatcggatttcctggaatcacgcgtggtttgttacggtcggctttgggaagaagacgactgacagcacggccccacccatcagcgagacggtgcgcgcgcggaacgggagggactgacggccgggccccatgcgtcatttgcacc

SEQ ID NO: 90845 - DNA, 762 bp, Zea Mays
tttaccttatttgcacttttctttccattcattaggagtgagagtaatctagccttagcctagccctagtatttgtctccctcgacctatttcttcattgttgttcgactctgcgtcaactagagacgtcttgggcagcctgccgaccctcagacaatccctaaaactctcctccccgacatggtccctcccaggcgcggaccgttcggaagcacacaaggaaggagtcgctcctgcgttgaggccgtggaccgttcgacacagagccgcggaccgtcctcgctcccgtagatagcatcgccagacggttcatctccagtgattgacattcaaatcgacgccaacaccatcgtagaagatctgcaccacactgacaggagtctcgagatgttatagagattgctagttgagcaaatcgataaaagtatcaaagtttggaaccccgtctgctcctctacctggctccacgcctccacggctccacctgccccgttccgtgctaaaaaaaggcgtggcaaaagttgaatttaggggcgtccaattatttccatacggacagagacttgtgatgggactgatgagtgacacgaaaaaatggtgagagtatatatatgatatcatagcaacaatcacagaaactcgtgccatctgatccagccaatatacaagacatttctctaaccagctaacctaccggataacaataaaaactaaaagcctggaacacggatattattgagcaaaataatgcccactagctca

SEQ ID NO: 90846 - DNA, 537 bp, Zea Mays
ccgtgggtggggtcggctcctcctcatccctaggggcaagccacttggggtgcgccccgaaggagcggggacggagcaacccctcgtcgaccaagccctgcaagtctacatcagtcacggaggagaagggtcatgggtcgcggggagcgaggacgttcagcttctcaaccatggcgaaggagggaggtggcagagaaaaggtgagcgagcactttttcgctcccctcatctcagtgcgtcattcttggctatggcaggaaagagtaaaagtggataggactgagaaggcaagagcaaggtaagagtcaggagggacccccttctggatatatatagggaccaacggacccgctgtggtcagggccaagccccccccatcaaaagatcaaatttggaaacagattttgtctcttcgaatcccacacgcacacgccccacaacagatagcccatgagctttgtgtcacgtcgcattaactcccacctaggggccacacgtcccattcggctaacacaaccaacagacgcctctccgtct

SEQ ID NO: 90847 - DNA, 368 bp, Zea Mays
ttgcttgatatcagtctgttctcggatatctgctctcgtcttgcacaaaggaatcgatgaagcacatatctatgtgtgtcacaaccgctaaagcgtagagtgtattggcggagatgtacgcctcctagatgtggttcgtgaccgtgaacacacgcattgccctcgccacatgcagagatgcgtacccacgtggatgagatggcctcctcaagtaaaccgctcactgatgatgaattcatcgcttatgtccttgttggcctcgatgcggagtacaaccctatcgtcacatccatcacccttcatgtcgacgacatcatgtcaacaacgatgtatatcgtctgaatgagaaattttaaattgggccacgg

SEQ ID NO: 90848 - DNA, 691 bp, Zea Mays
ctctacagcttgcttcccaagcaggatatacaagctattgtcatgtctggctatcataaaatcggaagcccgtcatttctacaaaacggttaagagagagtacgtggaggtcaaaggagatgtaagcttagctgccatttctaaatatataatatttttcccacttcagttttagctgtaagtacgcaataataatatcattgtattcttctttctaggcatgtagcatttgcaaatttaaagtataaatcttatgtcactccaaaggacgaggctaaagttaagaccgatgatgttggccacatacttctaacttatcgaaagcgtgcaaggtctgttgccatgtatggatttatgattggttgctttgttttctgtccataattagttgatatggtgaatcgaggacaaatgagtaaataacacaaacttagacatattcttatcatgtacctttgtgtaatttggtgctccaatgtaccagattctaaagaaaacttcattgataatatatgtgttcttttttatgtaattggtgtgcgctcacattttgttgaatatttgtgtgccgtcgcaacgcacgggcacctaactagtcctgatataagagttctacggccactgcatacattgcaaaacaaattgatatgttcgctctgttttaatatagtagttgttttaactcttagtt

SEQ ID NO: 90849 - DNA, 1415 bp, Zea Mays
atgtgactgatgatgaagctcagagattatgagctgtcattcatagtcccaatgaacaagggttttcagtgcagaaaggtgtgattagaaaacggaatcagatttgggttgctcagaactcagctctcagaacaaagattattgctgcactacatgacagtatggtgggaggccattttggcagcctggcaacttatcacagagtgaagaggttgttttggtggaaagggttgaaaactgatatcaaattgtttgtgcagcagtgtttagtatgtcaacatgctaaatctgagagagttctctcaccaggattgctacaacctttacctattccttagggtgcatgacatgacttgactatggacttcattgaaggccttccaatgtcagaacggtgtgatactattttggtggtggttgatagatactccaagtatgcacacttctttgctttgaaacaccctttctcggcagcaactatggcacaagtgtttttggataatgtggtgaaacttcatcattggtttcagacagggataagatttttactagccatttttggaagtccttatttcaatctttggacacaaagttggctctgaccactgcttatcatcctcaatctgatggccaatcagaaagggttaatcaatgcttggaaatgtacttaaggtgtgccattcatgattgtcctgctaagtggaaaaggtggcttccattagcagaattctggtacaattcatcctatcacactgctcttggattttctctttttaaggtgctatatgggtatgatccaatgtttgctgcagcaccagtgttgtctgaggaaaaggatcaatcagtccatgatttgttgatggaagacaatagtgttcagaaatattgaagtctcggttagcagcagcacagaatcgaatgaaaattcaagctgataagagaaggtctgatcgagtgtttcaagaaggggaattggttctgctcaaattgcaaccttatgtacaaagttcagtggttaatcatccttgccctaaactagcctataagtactttgggccattcaaggtgttgaagaagattgggttagtggcatattatttggaactgcccgagaattctttggtacttccagtattccatgtttcatagttgaaagctttcacaccaaatgcagctcctgtgttttcggatctgtctcagttggtggatctgtctcaagtagaggtcaagcatttgtacattgtgattatcgcatggtgagaaaagggagtcatgttgtgattcaaattcgtgtggtgtggtctcatttactataagatgcagctacttgggaagactatgaggtgatgaagaagcgcttcccagacgcacttgattgtggacaatcaaactctagcgagggggtaatgttagga

SEQ ID NO: 90850 - DNA, 656 bp, Zea Mays
aaaatataaataattgatttagaataaaactaatacaaagtgtgttgtaggaaatatggattcaagtagtttgtttaacatcgaggatcattgagttattggtactgaactactgattaagatatcagtttcttcatgtgtcacttcctctagcaagcgtgagcgaataaatttcccctcgagtacggaatattaaaaaagtagagtatggataatttgaacttaaggtctctttggcatgtctctttagacggctccagctcgagcttatagtgaagcctagcaaatggtcacaaaaatgacttcatcgatagtcctctaagagctggagtcgttcttttgttgggaacaagagcacaaaaaacgtgccttctagcagctcctattttttctcatacatcattcaaaaaacataggggaaaatattttgccaaacgaattgcaaaatagctctggctccttcagagaagccaaagagccagagaacccaaagccgaaactatttttagaggaggcggagccctagcaaagtcgtgtttgtttatgttacataaagaagagatattgtaaatatatacatatactaataatttgaaatttgaaagtaaaaaaatataatgatgtttgaataaatatctcatttaagagaggactac

SEQ ID NO: 90851 - DNA, 437 bp, Zea Mays
cttgtgtgagcttcgacttgagggcatcaaaggcttgctgttgtgatggtccccaacgaaacgacactccattctttgtcaactcgtggagaggtgctgcaatggtgctgaaatcccgcacaaatcgcctgtagaatcctgcaagaccaagaaaacttcgaacctgcttgaccgtggttggaagtggccagttcgtgatggcaacaatttttgcctcatccatctcaatgccctgcgatgtcacaacatatccaagaaaagacacacgatcggtgctgaaggtgcacttctcaaggttaccaaataaacgtgcatcacgcaaaacatcaaaaacatcacgtaaatgttcaatacgatcatcatgagacttactatagataagaatatcatcaaaatataccaccacaaatttaccgatgaaagcacgtaaaacctcg

SEQ ID NO: 90852 - DNA, 499 bp, Zea Mays
ccgggagctaactcaaggcgggagaacagtcagtgagtatgtgcacaagttcacagagttggcccgttacgcgcctaaggatgtcagcaccgagtccagaaagatggcccgtttcctgagaggattaagacccgagcttaagaccatccttgccagccaagacttccacagcttctctcacctctccaataaagctattcaagtggaaagagcaaaagaggaagaaaaagggcacatcaagaggaaattccaggtcctccgagcgcaacagcaagaacgtcaccagagagctcgaccctttccgcccaggggtccaagcttcaataaacaatctggaccctctccatcacgcttcagtcagcagagtcagagctcccatcaggcaccctccgtggcaagcaaccagccgccagcaaacgcctgttggcactgcggggaccccagtcatttcaaaaacaactgccctcagttgaaggcaccgggaccaacctattccaac

SEQ ID NO: 90853 - DNA, 648 bp, Zea Mays
ggttttatatgctttgccatggatctacgacaattgtcagcatggggttcataatgttagagtggtacggtgctggatagaggtgtcgggtccgaagccagagctggatgggtttgtttcgtaaaggtacgggtgactcagtttggacttgccctgaccattggcctctattgctgcagacatcgcaggttgcggctgctgatgggcgccagaaaaaacgtgtcttttacgagatcatgtgcgagaacaggagccttccattgatgaacgagtacagggtacctggggatggtctcagctgtactccccgcgagtaaaaagagatggactgatggagtaaaaagaagttcagctcagtactgtgacaagtgtgatgagtgatgaccaaggggagtagtgcacggataatgcaggtatggcaaatattcatctagaagatgaacggagatacatgcaagcctcttcggcaaaacccagattggttataggccttcgcggaaggattattggaaaattatattcaggtggtgggatgaccataaacaatggggttagcgacgcaacagaataaacgtcacaggaacctgttcatcagatgaggaacagctcctaagcgtggacagctagcttgcttttcttgtgcacaca

SEQ ID NO: 90854 - DNA, 554 bp, Zea Mays
tgattccagagaaaggtgttatgaaaaatccttggagtgtgcgaagaagctaaaagatagctttgcgaaggtggggcgtattcctcataacagagttttattcgcgatgacccgagggtgttatccaatggataggtgaagaagccgaagctttcgatgagatccttagcgatcgcagagatttttgtacttttttcggtgcccgaggggttgctgtaattctagaaaaggctgggtgtgaacatgtcaaggccgtggcccagccagaatctattttctcagctaacaacactaaggacccttcagttgaggcttctacattgggtggcaagttttacttcgatgtgtggatgaagggtggtcgtgagatggctgacgaagccatttaaaagaatgagaaggagtctcacgatgctcatgagaaggctaaacaagccaaagacgctaccgaaggtgccatgattatatgtatttttacttggaactttttgccttgttgctcgtttttaccttcgtaactcaccatcatatattcattacagtcggcctctctc

SEQ ID NO: 90855 - DNA, 750 bp, Zea Mays
cgatcatcagatacataaagaatgaggaggagccggatgacaaaaatgcagtggagcgtattgcaaggcagtcagctcactacactctcattggggaaacactatacagaaggggcgcgacaggagtcctcatgaaatgcattctttcggctactgggaagcaactgctagacgaggtccatgctgggcaatgcgggatacacgcagcatccaggactctagttggaaaggtcttcaggtatggtttctactggccaacggcaaagagtgatgcagccgagttagtccagagatgcgaggcctgtcagtacttatcaaaacatcatcatttaccagcacagcaactgtaaaccatacctgtaacttggccgttcgcgtgctggggactggatatgattggaaccttcaagaaggctcaaggaggatacactcatgtactggttgctatcgacaaattcactaagtggatagagttcaagcccattgcttctctaacttcagctaaggcagtggaattcatacaagacataatattcaggttcgggataccgaatagcatcataatcgacctgggatccaattttactagcttggagttctttgatttctgcgataaaaaatgcatccagatcaaatatgcatcagtggcacacctaagagcaaacgggcaggtagaaagagccaacggaatgatactggaggcactcagaaagaaagtcttcgacaagaatgaaaagttcacaagaaaat

SEQ ID NO: 90856 - DNA, 3361 bp, Zea Mays
ctaaattgatcttctactggagaactagtattcgagggacaaccttaccttaaaaaatgatgtgaagaagagtgcaagattttgtataaacgcctgcacaaacgaacaaagtgtgtttattaatataacatagagtggtatagaagtagggggagcatgaatcatggactctcagaatatactactatgccagataatatggtttcagatgtacctgctcttcagtggaaccattagcatatacgtccgggattttttcaggaggaagaatagcctatatgcaaaaggaacaaaaacttcaatcattaaatatctggaaaaaaatagtttacttgcacagaagaaaaatagtaaatgtcttcaaaattacctgcaactgaataatgaaaaatgtatatgtcttcacatactgcacattataaaaatcaccaaactgaagtgctgcaacctgcaaggtagctagaaatataagagagaattgaacacagaatttctccagttggtcccaaacgtaagtgtcaggttagtgtaatatatatatatatacacacacacacacaacacggagctcccaaatactgtacaaaagaaattgtttccacatttgtcgttgaaattacaaaatatggctaaattagacacagaaagcctaggtgtccttacctctgttaggcattgaagtgtaagattccgataagcagccatagggaagaacttcagtaatgtctccagctaaataaaaaaggaaaaggtaagggccagcattttcgtaggcacagttggtatcagtcactcacaaagttcaatcatcaacataccaacggtgactcaaagatgaatccaacagggatccatgataagaaagcatggagtgtcgccaatgtagcacggatgagctctggcctttgcgttgcagataggacatataaacatagctcgtgaatgagccggaactcactgaacgaagacaataagatatcagctaaaacagaagtaacttttttgttaaaacatagattactgaataaactataaaacagaacctccaacgtagccaagaaaatatagaagttgacaacaaacccacctgttaagtgacgacttcagttctttgatcttttgttgtgtcatttcacctcttgagaagtcaaaaatttcttcgcttagaagctgcatgttatcaaattggatactcataaccaatccagtatgtaaattaaagatgccgacgaaaatgtcaaaattgaaaatacatagaaaataacttgccttcaatatagccatgcaattttcacatagagtttcactactctttgcagctgcaacaagatcaggtatgaaggatgaccatctggcaggccactcatgtttcagtacctattacgttgcaaggaagcaccatgagaaataaataaatcaagacacacagcatcatatcaatgttgggaacaagaacatcaaatttttcagtgcaaggttaaaaatgatctggtaaactagctgccaaggtgaagaaaaaagaaaagctaaatgcacagcttacctgcaccaaaataatattgagtttattgacataaagcctctcctgccgaaaggtaacttcattgctggaaagctgtcaacagtacaaaaagggcagtagcacaaaaacaattaaatggatcagattttattaattgataagtgtaatcaaatgttaataaaatgacatatactaatccttgcctgcacaataacatcagatatgtaattctttatgccatcacgttgatcgacgggcaatgcattccacctgtacttgataacactttcaagtatctgcatgaatgttggtacaaaatcatcgcatgctaaatattaaaacactcgaaccgcacgtgcagcagttagcccactcagaaactatcttccatttacatcattgatatgatttttgcctcacgttcctatgctagagaagtagagagtagaaccttagattgaaaaaaaataaagtagaaccttaaaaggctctgtatgcgacaattgcttagccttatttcatggggtacagttataactaatcttgaagataaagaaattgcaccttgtagtgataaacagagaaagttatcatgatacagatagccttgattatgcagttccatttgcggctggacatagttgcaaacttgcaatcatattatggaagtaatggaaacaggagttgaccttggtcagccatgcattctaaggtaattatgtgagtctgtagatatgatattgactgtacaagcaagccttttaagttcaagactggggtgaaaattgcatgtagtattttaaaccaatcaaaccagggcataaacatagcatccatcctcccttttgagcacaagctaccccccccccccatgtataacaacaggcagcagagtggacaaacttacttgcaatgcaaagaacttggtgttgaggttctgggaattctgcagaatgtgtacaacttgtagccacatgtctgggttgttttgtaggtcacgtagtatctgatcagcggcgctcctctggaacgaaaggcagcagatatagttatctgtgttcaatgccaaaaccacgaggctagaaaacaaatacacaaaaactagcaatgttaggcctctggtgacgagaaaggaccagtcagctcggagtgggggaaaccccgactattcacgtttgctttaacatttagtcattccgaaggtctagatagggtaagtgtgaacggagaaggataaggcggcggcggcgcctcagagacggactaacatatggcacgccaaaccatatcgccaacagaagaaaaaaccctaaacactaaagtatcctagtttagcaaaacaggtaccattcgcatttagcaagccgagctcggatagactcgaagctcgagcaaccgaagtaaaccctaaagtcggtcgggggcaggtaatccgcggatggtccggtggaagagattacctcctctttagatccggtgccgtagaaggcagcgacagtagcatcgaggagcgtcacgtctaccggctggcttagatccctgagcttctccgccatggcggcagcggttggagtgagcaggtgaaggaagcttgtggaggcaggggatcgtggggagcagggaaggcaccggaggcgcgagaaggcgcagccctagaagcagcgagcgcggcgacgctagcggcggcggcggcgggccggattcttaccggaagagggagtcgggggagaagaaagaaggcggattttaatttttggttttggggggtttaagagagagaggggcagagctgggttgggacgcggggagttgctgcaaaactacgccaacgtatggtat

SEQ ID NO: 90857 - DNA, 850 bp, Zea Mays
ctaagttcaaggtcactatgaggaagttggaggtaatatataggagcataactttgctaaagaagggttgggttgttgtacgaaaaccgtagtaaaagtgccttgaagtagcgctgtcagtcggcctgatggacatgtgttcactgcatttgattgaagcctgggtccactgttattgagccaacttgggcgtcatggtgtgctcaatccatgaggattttcggtatggtcattataccaaaatgaaagaacgttgatcaatgaacaactttgatacggactgggttgcaagtaaccatataaagttgggcgcaatagctatccgaattcggattggcaagcgcgccgtcaaccgtggttcagtgaacctcactgaggataagaacaccatcgcggctgagacactactcggacttgcggccgcggtaaaaatctcccgcaacgtggcgcatgtaaccatgaggtggcaccgttcggctaaagcatttcaccggacgctcgtcgcggccctgctcgcgcgcgcgagcttgccagcgcactgggaactcagttaagccatccctctataaattgagcccgagcgctacttcctcactacattacacacccgagtgcttgcgcaaaccactcaatttcgcaaaggaactcagttaagccataagcccctcctcgccgttcttagctccgtcgtgaaagacctccccgtggccaggtcaaattgagcgagccctccataattctatctcgtccgatcctccttagatactaagggtactcctgaatctgtttgatttaacacgcctgccgttatctcgccagaacagtcccttgtcgccgaagtgcttcgtaa

SEQ ID NO: 90858 - DNA, 590 bp, Zea Mays
caaaaatctttcattggaaacttctaggggacatgcaagcatcctaggaaccccctagacttaaaatttgaaagatgtgactaaataagaccctgagagactatattaggctatctcgatctaaatgttgcaacaagttgctcggtgtgagtatctccgacgttgtcagttcgtttatctacgacaccaccaacaaggtgttggtgcacaacataggccacaataggcccaaaaccatcactgtgctaataacgatcgccagcgaccacacgtcctgtgaagatgcgattggtgccatcttcgatgaacaaacaaagagtcatcttgactatagggtcgagctgcacaccccttgcaaccgatgggagaaatggtgtcgtcatggcgacctcctcaaactatgtgatagaattggttgccaccgtctaacgaccaacccagatccatgacctccacacccaccacatggtccccacgactagcacgaccggcacaaccaaaagacttggtcgcaagctgagcatagctaatttgaaaagctcatggatgtgtcgtgttcacatcatgaccgggtcatggggcacatgtac

SEQ ID NO: 90859 - DNA, 449 bp, Zea Mays
ctgaaactgctgaaactgctccgatttccgaagtgatgaaacaatcggggctagtagtgtcggaagatgtttctgacgaaggtgcacctgctactgaggctaagcaggttggtgctgaggaagatgaatctgaagatgattatagtgtcgtgccatctaaacccagccacctggaatttgggaggtccaccattaccgaagatgatatgcctaagttgatgaagttaggttatttcattgaggccaaaaaggagctaattcgctttggcggagaggaaattattccgaagccagaaaaggatgaggtggaagtctttaaaagcttcttcaaagcaggattaagatttcctttgaatgagatgattgctgatgttttgaagaagtttgggatttatcttcatcagctaactcataatgccatcgttaggcttagcgtctacatatgggcc

SEQ ID NO: 90860 - DNA, 378 bp, Zea Mays
tggtccgagtgctgggcgtaggcggcaaagggcggtggctaagcgtagagtgagtgaggtggagggtgctcgtcttcgtgtggacagggctggcaagcgggagttgttgtcctcgccggttggggtaggcgagggggagttgcgaagtctttttgagggtgaagagttgaggataatgctgtttaactatagggagatgggtatcatcccaaaggttgaaccgatgtaaggtgtgatgccctcgctgtacgtatgtaactataatttggacaatgatgttgtatgccctcgctgatccggtcgtgtccgtgggggacgtatgcagttgatctagcgcgtttatgatgtcggtccgactgcacttgtagtcggtctttg

SEQ ID NO: 90861 - DNA, 362 bp, Zea Mays
caggggtcaaaggctgtcgccctgtcctcggaccatccggtcgtgggagcatcccgtgatggtccttgtttcccttctggtgattcatgggaggctgtgttcctcgaaagtttgatctcccattctccttccggtttgtctccgctggaatccagggctgctctactgctcgaccccatgctggatgaagctggtcagaggcacgggaccgcgcttccggcgtgccttcctgaggctgttgacatgccggacagggatgcgtcccacgagttgtcgccttctctcggggagccattggcctcctcgctcgagccgtgcacaggcgttgatacttcggtcctagggccgacgtcggctgctgg

SEQ ID NO: 90862 - DNA, 1411 bp, Zea Mays
gtggaattctgtaaagaatgttttggtgcgaaaaggaaggaaaccaactttcttcagtcaatggctccatcattgccttggacttgagcaatagaagttcgctgagctactgctactgctatctagcctgcatgaattgttcagcaaattcaaactaacggtcaaaataaacaaagctctggctcatccaaatccaatttaattaatggtcgaaatactctgcatggaagtacgcccgcctttgagttcatcgtctgcagaaaaaatggcaagagcaaccaggaatgaaataggtagtagcgaaatcaggaacttacaactttcgagcttcacttctcacagcaaggatgcgaaaaattacacgctacactttgatcaagtaataatgtatattactcatctgttgaaaatcattttgatcaagtactagactgttgcgaagtcaacatgaatcagtatatagttaaatggctgtcctgctagttgttttgtttatatcaagaacttttttttagataatgggatagagtgttcccagcctacatcacgaaaatgacggcctgtcacgccaacacaagaccaacaaatccaactcaaatgacggcctgtcacgccaacacaagaccaacaaatccaactcaaagagccacaagcggcgatacaaaccccaaacgtagttgggtggacagcgaaaagtaaaaacaaaactcacagagcaatcctattactaaactgccacccatgaaaagcgaagatctgcatcaccgtcgtctcaagcttcctgcaggcttccctgatgaccttggcgtcttcctcatgcctttgaagttgcgcccagaaacgacaccagtaagttcctctgtaaagtacctgcatgtaagttttgatcggacttttattaaaaaccacatcattcctacttagccaaattgcccagcatatggctatagcccctactagaatctttagtatatccttgggggagaatccccgggcccaaagattaaaaagatcataaacgctataaggtgtccttaacccaaaggtaagactcaccgcccgccacatgaatttggcaaaatgacactcaaagaacagatgttgtatggattcattgcaattacagaaacacaatatttaggaccgttccaattacgcttagccaagttgtctctcgtgagagtgacaccccttctcaaataccacgcgaaaatcttaattttcaacggtattttcatcttccaaattgtctggtcctgccggccttgtccactgcaaatcattacagagtataacgattgcactgtgtactctccgttctgggtcagattccaacggaagtgatctttcgcaaggttgagggacacatcaagtaccaaggccactaatgagttccactgcctcaacgtat

SEQ ID NO: 90863 - DNA, 1139 bp, Zea Mays
ctcattcgcaaagcaacaaccgcgaaggggtatcagcaggccagagccgtccgattaaaaggtgacgacgcggattagatcatggctttaaacgaaccggtatgcgactacaaccgcacgatcgcgatctaacgtacaggattcattggaccgaaacgttatcccctggtttaatccggcccgttcatcagtcaatcaatggcccacagtaattccttccccagatctaatccccctcatccattcacgatcgaacgacagggagcctttcttcctcccagagaccgaacaacgcggcgcgaagtgcccagcggctgcgaccggcccttcttccccaacccgctggccgagagcggtgacgccccggggctctgcgtcccgctcccgccgatgcaagatgcctgatgccatggtgggaggttctttccccaaacacgaacatgctccaaagaaagtgggatggagggcagagtcgagtgaacatacctctcaaccagcgatgacaagcagcatagagccacccatggcggtccaaactcaaccgagcagagaatgatccgatgagcaaattcctgcgcccataacgcccccgagcacagccggcgagtatgccccatggatcccagcatccccgtggccatggatcgacggtgacaaaagcgaagatgaaccatccacggcgcagagaggcgtggttgacagtccaaactccaatgaggttctagctatattgatgatccctcatgagccaaaaaccccattcatacgtggtgcagaattgtagatcggacaatcatcttaacccgaagtagacaccaaggagcacttctagcacgattatcttcctggcggctccaagctttctctcccatctcctcagcccgagtcccctagcttccgctctcttggtgttcatggggggtaggcatggtggccagggaggtgttcgcggcgaatgttctttttatatccagaacgcgaggccgaggtaggaaaacgggggagggcgttgaggtagaggcgagatccacgggtggtaggtcagcgaagtcagttgggaaaatgagccacgacacggcggattcggtcagccgttcctcaaatcacgtgtggcggcggagatctcggtcatggctgtt

SEQ ID NO: 90864 - DNA, 964 bp, Zea Mays
cggaaagccaatttgaattcgtcccaggtaatttgatgaccagcaggctggatagccacataatctaacctgctctgtccacggtgaccgtatgatcaacgaccaaaccaacgcgttcccggcgatctaaggtagcttagctcaatcgagttggtcgaggagtatcaggggcacacaagaacactaaaacgagagggcagagggtatgagcggacctgagacgagctgaccacggcgaggtcacaccgcacggtgttcttgggtgatttaggggaaatcccaaattggggagttctagtggatgattcgaggcactggttgctctgctgggtgcacaattacttagcggagcaggcggggtcggcaatttatagcaggcttgagcggtggccagtgaatttgagagagacgcgcgacggctggagaagaaggttactagcgcgcgcaattggtggcaattaccatggcaagctccccggcgaccaccggacaagctaacatgagtcacggcggtgaggttaatgtgtcaaggcacgtggcgcaagaccgctcagtggctagctccggcgaacccatccaactcaactgtggtctgctcgggtacggtggccggagtaaaatagtggtcggagcgtatccacggcgtgatatttacggatccccggtgttatccaactgatccgagcgcgaatcaccacggcgatagcacgaatccgcgcgtggctcatcggcggcgaggggatcagaacctgatcctatctgttactgtaccatgggattgttcttcagtcagcctgacagcccaagtttggggcgaatttcctcctgattttacatggcaacaagaccattgttctgtagcaattgtagcctaatagaccagctccaactttgctacatcgtgcccccacaaaaattcacaagatcttgcttaagattgagccctaagttcatccaatcccac

SEQ ID NO: 90865 - DNA, 856 bp, Zea Mays
gtttataatttagatcttggctccattgttcagattatttaatcatttctgtgcattgctaattgctatgtgcctaagtcctatactcctattcctatacgtgtgcgcatgtgagtacgtgaatggcaaagaaatgaatgctaattatgtgccgatgtcctatactcctattccaaacgcatagctctagctgttgcctcttgcctgttcgtgtgggtggcaattcggccggcaaagcatctgcaatcaactctaacgctcatacacagccacacagtgtggctgtgcccacacaggatggttgttgtctcactgcctgactgtttaggatggccacgctaacattccagagtccaatgcttgtttagaatggttgctgtctcactgtctgactgtttacttttattctatctataatttatttttcttttgtcgataaggaggctgtgggctgcggttgtgtttgttccattttcactttgttttcaatgactacaggttgcaactttttaagtgatggaatcagccgtggaaggaaaggggaggaatgcaagtgatggaactgattcagaaagtaattcgtttgacaagagggatgatatgtctgaagatgaactggtagtgcttggtggaaaaattgatgattcagcggacaatgtcaatattgatgaatctgaggacaatggaagtaaaaaaggagtcaagagaaggcgcaagagggtgcagatgaaggctacagctgaaaggagatctgaattctaatactctttgttagaatataggggaaacatgaattatttagtgctatttgtaaactaattagaattgccttcacagaatttggaagaattggatg

SEQ ID NO: 90866 - DNA, 399 bp, Zea Mays
cgttaattcctttgttgaggctctattgtaatatttgctttgtcggtaccccaaaaactggggtacccactcctgctgggccaaggcgacgcccatgtggctatccgcagtctagcccgactcaggatatggaccccactagtgggtcctagacccccacgagggcccaccggatccctagcatagagtaaaagcagtatgcggctacaggctggggccgaacccctgtggggtgatcttagactcttacatgtgtcattcagacctctagctagcaggggaggtctggagctatcgcatgtctggaccattacggatgggaaccgaacctccacaagtgccctctagacccccaaccaggggatgttcggagatgccactactgcaagcgtccctagc

SEQ ID NO: 90867 - DNA, 303 bp, Zea Mays
gcagaaagatcagcttgatgatcctctgcttcctttctccttgtgatttgtgtccattctctcatcggagaggtggacagcggagttctccgggctgagggaccctcaacccctatcttgccggaggtgatcttttttaggagcaacggaggttgcgctttttcctgcctcaccccaattttctcggagatttctgaggaaggctttctctcaggcggatccgcgaggcgatgcagagttccctcctcatccactacagatgagatagtaccgaagcagaatatggatccgaggcggaggatg

SEQ ID NO: 90868 - DNA, 840 bp, Zea Mays
gggcgggctccggcctctgggttctcgttggtgcgtcctcctcctgtttgttggtcctcatgggcgtcttctcgtctggggcccatcgttgtgggtgagtccgtctttctattcttggatcccgtggtccgagggtcaacctcttccgtttataggccgaggaaaggggttggccagcggtagctttcttaggaaggagtcaccaggcgacggtaaaccaagtgttctaccatgggatgaagccacacatgcttgtcggccccagggtcgcctcgttgtctcgtattctttatgatagacggcacatgcagcgtggggcccgagcaccataatttgggctttgctgaaccctgtcctttgtagcttggggctcgatgtggctcgtcgtgtggtgccctaccagtggtctgttcactcaggactagtccgataggtcatgagtgcaccgcaagccaggtggcgcaagccataaatgacacagtttgaggggtttgtaggtcatgagtgcactgcggcctgaggggtttctaggtctgacaccaccgccacagctcgtcactaggcatagttaatgcagtcggtcacttatgacgggttggtctcgaaccaggtgcgagatccactcgagtggtttcccttatgcatgctcagtccccctgttaggttccaccacgcccgaccctaggctcgatgttgtggggttcgtccgggagcgggttccaccagggtggtcgttacctatctcctccagctgaccaataggccccagttgctagatgcctttccccagtgcgcttagacctaatcatgggccacccgacccaaatcgcccgaaaaaac

SEQ ID NO: 90869 - DNA, 314 bp, Zea Mays
gaaggatcggcgatgtgagtcaatgcatttgaggacgccaacgcgtagcttcatggcacacatagcgtagacaaggtgaccactagttccattctcccagccgggtttagtagaagagcattccaacccgacaggtatttatctattttgctaaggggagagtgggcattcacggggagtcttgtggttgacagggggaggcaaagatatggcagggggaactgacctaggctacactagagagtagaggtgaactggattgcactatcgtggacaacatggatcggcacaagggtgttttttcgtaattgatg

SEQ ID NO: 90870 - DNA, 496 bp, Zea Mays
aaaatgctgaggatgaaagttgtcagatagcgcttagcaaccttcggtcggaggttatcagactgaggaacgaagctgcagaaaaagtcaaaattctgctttccctagtggacagagtgaagaaagacaaggcaaaatttaatgctcaatctgaagtccataaatttgaagttgagaaccttcagaaaaaacttgccgaagctaatgaaaattttgaacttgcaaaagtaaagcaagaaataagtgaatggtcgaatgccaggctggaaaagaatgttgaggagcttcgtgaatccaaagaaaaatccttggattgcataagaaaactaaaaactagcttagccaaggtgggtgcatactcttcggaagaaaagttcattcgaggtgaccccgaaggagtcattgattggataggtgaagaagccgaagcctttgaagagatccttagtgatcgcggggatatttgtgccttcgctggcgcccgaggggttgcagc

SEQ ID NO: 90871 - DNA, 442 bp, Zea Mays
taagaagacatctagaatgagcatgcatcatgattgtcgcatcattgtctcttgtgcaccaacatgcttctctcacctttattccaataataagaacttgtgagtaatgtgttgtattgctattttatgaaccacaaaaaaagtgatgtatgttatgctaatgaaaagaccccccctccaaacaaccttgagtttagcaagtgaaacctaaaaaatgcatgcttgtgttggtattttctaacccttgtgtgttttacccttgaagttacacctgcacatcttgtagacccccatagcttgaccgctagaccaacccaagtctccttgtgcacttgttgtgtcaaagaaagaaaacaattgttgtttggtgtctagttgcacaaactctatcaaggccatgtttctttccatagatcctgtcccgaatcttcataacctttct

SEQ ID NO: 90872 - DNA, 780 bp, Zea Mays
taaatgtttttaatgttttctcggcactggtattcacacaacttcattgaatcgaacaggcagagtctctcaaaacctttttcactcacataatccagtttaatgcttttgaaaggatatgctacttactcttattactcacgcagtagtagatgagggactcacacagtagtagatgaggggtcagagaaattgctaaccggggaagggaaagataagctagtagataactgtgttgtcgtgccctgtactttttagctgccaacgacatctttctcctctccctgcagtcccgaaggcataggcacgcaacgcagagtcaagcagcgggcgcaaacgtgagtggcggtcctgtagagggtggagcgggcgagcggcggcctacggagaagcgatacaacggggaactcacacagaagctttggccagcgtgagccaagtccatgggctagaacaagtatggcgtgtgccatagctatccgcgtccgtctgatcagggcgggtagttactcacgatatgcatgcatgtgattgaggtgattaggttagcatctccaaaaggctgttaatctgaccgctaatatgttttttaggaagggaaacataaaaactaaggtccaacagatatcgtaaatctgccccaaattttagcgacgctaatccttcgtgacgagctacgcatatcttcgcggccgtgatgcgcccccaatctccccttgcgtcttctcctgcgcgccatcaaactattctcgcgtgtttcccttttccacaagcctctcc

SEQ ID NO: 90873 - DNA, 511 bp, Zea Mays
gctggatcagcacaacaagtgcatcacaacacctaagggtgcgaagttgtccgagagacgcccagttctatccaagcaaaagtcgcctaagggtgcagctggatcagcacaacaagtgcatcataatacctaagggtgcgaagtcgtccgtgagacgcacatttctatccaagcaaaagtcgtctaagggtgcagctggatcagcacaacaagtgcattttaataaatagcacgaagtcgtcggagagacaaccactccgagcaaaagacgtccaaaggaacaactagacaaacacaagtgcatcaaaccacctaaaggtgtgaggtcgtctgagagatgcctatttctatccaaacacgaagtaacttacgagtacagtcggatcagaaaacaaaacgcacctttaataatctaagagcgcaaaacattccgcatacgaacaacgaagggcacaacttaattcaaaaatgggaaaacaataagcatgaagttaccattcctatacaagat

SEQ ID NO: 90874 - DNA, 1081 bp, Zea Mays
cgaggggtccataggtcatgagtgcactataacccaaggggctcattggccatgagtgggaggcagaccgacgccgcgcagttaatgcggtcgatcacttttggctggtcgatcacttttggctggtcgatctcgagctgggcgaggaacccactcaagtggtttcccttcggatcgcccgaccccctgtctagctctgccacgctcgacccggggttcggtgcctcagggtttgtctaggggcgggtgcttcaagggcagacgtttcccttctcctcttgctgaccgatgggccccggttgccagaggcctcttctaagcgccctcgctgactgatgggtcccagggaccatggatcttatctccgacaacttgtatgggcaaaaatatgatatctacatagatcataagagtctcaagttgatattcacccaattagagtaaacatgagacaacatagatggttggaattgatcaaatattataagttagagatacattaccatccaaggaaggtgaatgtggttgctgatgccctaagaaggaagagttaggttaatatgatagccactcacctggtatgagttagccaaggagttcaacaagtcgagtcttggatttttgattcacatgcaaggagtaaccatataattggaacccaccttagagcgagagatcgaggagggacataagaatgatgagaaaatcaacaaaatccggtagttaatcctagaaggaaggggtaatgaatttcaagaagacaccaaaggtacaatatgatttaaagatcaattgtgtgttcctaaaatcaagcccattcggaagttaatcataaaggaagcccatgagacagcctactccatacagctcggaagcgagaagatgtaccgagatctaaagaagatatgctggtggtacgggatgaaaagggagatcacagaacatatcgccatctgtgacaactgttagaggattaaagcagagcatcagaagccaacccgacttttgcagctgctataaattccacactagaagtggatgggatcgggatgaattttatagtaggcctaccttgcacgcg

SEQ ID NO: 90875 - DNA, 356 bp, Zea Mays
aagtttctagatttgtttttgtattaaaaatgaatttctataattatttctctgtttttaaacatctcgggactgggcctcaaatacagaaaacagcaggggcttccacgaaaaatgtcctaagactcagactgacactgctgcggactgcgggttctatttcaaaaagtacagggtctcattaacaaaaagtctccgcgaaggggtatcgcggatccagggccgttggatagaaaccaagggtccagattagagttttactcatctcaatcggtatgcgactgcagcggtcggatccagcacctacggtctagatttttataatcgcgagatgcaaccatggccctagatctcgc

SEQ ID NO: 90876 - DNA, 565 bp, Zea Mays
tttggctgaaacgttgtgccaccttcagtagatatgtcgtgggcaaaatactgttaactgtgcgagctttagactgctcccgaaggtcgcattgctactgaggccgaagatgcccttctggatgctgatcatgacttggggcaggcgccagtggtggtggtggtaactgagcccagaaagcttgagagtgacttgccgaagaggcagaagccgtaggctgttgattgcctacgtactccgggatatacgaagagtagcatgaagcagtatggaggacctacttcagctgattctgatgtgcttcacctttcagcaatttccttctgcttctgggtcatgacctggcacgtccttgttgtgtgtcccttgtcctcgccatagaacaggcacaacaatttcctaggttgataaccgtaccttcctccgccaaagcttctcccccctctgcctctcagggctggtggtctgtaggaagtttgctgcatgcccgaagactatgagctgtgctaactgctctgagcgttactggccctgtcattgttagcattgggattgtggattatcc

SEQ ID NO: 90877 - DNA, 322 bp, Zea Mays
ctcaacatgtcttccaaaatctgatttaccctttctgtctgaccatctgtttgaggatggtatgctgagcttcttattacatgggtcccaattgattcctgcaattgctcccagtaatgtgccacgaatggtgctcctctgtcagatacgatagtccttggtattccatgcaagcgaactatctggtcaatgtagatttctgcatatttctcatccctgtgggtggtatgcaccggcaagaaatgagtcgtcttggtcaacctatccacaatgacccaatagaatcgtggtgtcgggaggtattgggcaatcccacaatgaa

SEQ ID NO: 90878 - DNA, 728 bp, Zea Mays
gttgaagaagctcaatagagaaggatcaaatttgattcaagaaagaagaaattcttttccaacaaaagaaagcccatttctgagatggattgttacaactgtggtgagctcggccatcttgctcatcaatgtaacaagcccaagaagaacaagttcaagggcaagaaagaagatgacaacgatgatgaaaagaaggaaaaagaaattctttaagaggaaggatgggaagcaaaagaggttccacaagaaggagaatggaaaggcatatattgttggtgactggctcaccgacattgagtcatcaagtggatcttcttcaagtgaagaagagaatgatgaaaaagttgccgccatcgccggggacttctcttcaccaccaccatcgccatcattgacttctcacctatgcctcatggctagaggtgaacggaaggtacaaaatgatattaatattactgatgatagtgatagtgatagtgatgaggaatttgcttcaccttcatatgatgagctagctgacttgcttaaagaatatactcaaatcattagaaagtcaaaagctaaatgtgataggttgaaaaatgaatctttaaatgccaaatatgacatagttatgaaagctagtgaagaaatgaaagaagaaaataaaactatgtcatcaactgtaaatgagctctcaaactccctaaaagatgctaaggataaatgtaacaagctaaatgaagcta

SEQ ID NO: 90879 - DNA, 327 bp, Zea Mays
gttaagttggcaatgattgacatgaacaatgtcttagcagtaaataaacgaacctcatgtcctaatgttttgggtgctggtagcaccgacggtagagtatgatacatgttgtggcccatgaccccgatccctacaaaatcgagattaactaaattagaagatttcaacaacatttgagaaagattataataaagaggtataaaggacttatttacctagaaagatcaattcatagcaagttaagctagaattaccctttggaggtactaaagacctggatgtcgcctagagggggtgaataggtgaataaaagtactaactcaatcg

SEQ ID NO: 90880 - DNA, 384 bp, Zea Mays
gcctgatatctggtggggcaaggcagtactcacggtatgctatgccctgaacagagtaccacctcgcaaccgtgaggccacaccctatgaaggatttaaaggaaggaaaccagatctttcgcatcttcggacttgggctgccttgcaaaggtgaatgtctcgttgccgaagaagagaaagttaggccctaagaccgtagactgtgtcttcctgggttatgcacataacagtgcagcttatagatttctagtggtccattccgagacgagcgaagtcgctgtaaatgtaataatggagtctcgggatgtgacattctttgagagcatcttccctatgcgggataaggaagtggtagccccagacggtccatctcggacatattct

SEQ ID NO: 90881 - DNA, 389 bp, Zea Mays
gaacttggtaagggaagactccatccaaggtggtaaatcttgaatcatcttggtgatctcacttgatccttgaagacttgagttggtgctcatccttccttgatgaagttgatcatcttcttcggtcttgtctcattgattaggagttagtgtatattattgggctggggaatatggttaatataggtatggatgagatagactacatgacgtaggtaaaaagtttgtttgatgttaggtggtggttgatagattatgcaatccattaagactctattggttgggttggtctatcattctttatttagtgtagggtgaagtaagttaaaacatgtggataggatctaatctatttcacaagtattaactggtccattaagtaactcact

SEQ ID NO: 90882 - DNA, 553 bp, Zea Mays
caaatgtcgacgtgttcgcatgggaaccgtcgcagatgcctgggatccccagggaggtgatcaagcaccatctgaagatctaccctgacgccaaaccgttgagttagaagcctcggagacagtccgctgagcggcaggacttcatccgaaaggaggtccggaagctgctggacgccggcttcatcgaagaggttcatcacacagtgtggctagccaatccagtcatcgtaccaaaggcaaacgggaagcttcggatgtgcatcgactacaccagccttaataaagcttgtcccaaggacccgtatccacttccacgtatagatcaaattgtggattctacctccgggtgcgacctcttgtccttcttagatgcttactctggtttccatcaaatccatatgtctagggaagataggaagcataccgcttttgtaacagtggatgggctttactgctatgtcgtaatgccttacggtctgaaaaacgccttgccgacatttgtgcgggtgatgagtaagactttcggggatctgattagggacagagtagaggt

SEQ ID NO: 90883 - DNA, 550 bp, Zea Mays
gtcgagcgccggtggggtgcgccgccgtaggcctctatgctgtgcaacctgagcagcggattaggagcgacgcgtggatgctgttggatctacgtaggatggacaggattagatcatggggtgatggcatatttgccttagatcccagtgtatacggttgtgattagatctcaagtcaccccttcgtcattttaaatcggaaccatggatcagtaatcgtacggtctggtatgggtagtggcctggtgcgaccctcggtcgtccgatgtgattgtgcgcgttggattgggcctcagtatttaaaatctctaccgcagatctcacaatcaacggttgataacgcataccgactcactcagaataatggtctaatctgagccaatgatttagatctgagcggcccacattagatcataccccttcgctgagccagacatacaaaaaagaccctggaaaatcaaataataaactcgccatccagtgcagatgtagcctgagtcttgggaattttgcagactagccccggtactcttcagtaatcatgcgtacg

SEQ ID NO: 90884 - DNA, 604 bp, Zea Mays
aaatgttccccagacacagctttaacccgcggtggacggcgggttgattttaatgaatatcaagggcttcttaacaaaaacaccgcggtgaagggttacgcacaaataagagccgtccgatccaaaccctgcggaccagattatatcgcgcctataaatgaatcggtaagaaatggtggccaccagatccgaaagcgacggttctgattttaaaggggctcgatcaaatctacgccatccaccgtatgatcgacggtcggggccaacactttgccagatttaatcctattcgttcccccctatccaacggctaccagcccatcttcaacctctcgcttcctactctctctcctcgcctgtcagcccagacagaacgccatgccggcgtgcaacagtgcatcaagcccgatcttggaacagagaacgcgacatagtagcggtagggggggtactcaccatagggacagagattccctgcttgcagcggttcgacgttgaagtcccaccgtgaagcactcaccggccacctgggcaccgcccttctcttcccacgacgagtgattgccagcgagggccgagcacactgaacgcagttggggcgagg

SEQ ID NO: 90885 - DNA, 454 bp, Zea Mays
agaagataaattcgattccttgccaatttgagcattttcatgaaattttgcgtggatgtttcttgtacgttcccacataggacttactcgattagaaatgaattagaggggattaaattccttgcaggttaaaattatatagaaagtaaattaatctctctcaatcctcttcgattcctatgtagccgtatggcactaatgtgcggctgtgagggcgaggaaggtaatccatctttcttttatctgtcgatataatgcaaagcaatcaagggttccatctgacaaatgtagtagtagcacactccttgacctactttgttggattcgaatatgggaattgatatatttaggttggatggtttctgttcatcctctaccctgggttgttcttcaacatcagctgcacacagttcacatgtgcctctacctaccgttggctaacctcctttttctc

SEQ ID NO: 90886 - DNA, 596 bp, Zea Mays
cttggtcattcgtcttgcctcgcagacttgctcggttgggacctagtcatccgtctcacctcgtagacttgctcggtggggacttagtcatccgtctcacctcgcggacttgctcagcggggacatagccatccgtctcacctcgcagacttgctcggcaaggacctggtcatccgtctcacctcatagactttctcgatggggacttggtcgtccatatcgcctcacagactttctcggcaaatgggtcagaaagaggttatgggccttaccttgggtaccccgttcctaggtacccgacagcaacccccacgccttcaagtgactccttggagtcgcacagaggcttatgctcggtgccctatatgcttaggtgcacgcaagcacatatgctagatgcagcccgagtaatccatgtggattgcttgggtttactttggcgataatgcagtttagggacggattcttcctgcgattgatgccatgtgctaggcgcgggtccatttccctttagtgagggaaggacgctcgggtgcgcgcaagcgcatatgctagatgtagccctcgatcccctgagtaatccatgtggattgctt

SEQ ID NO: 90887 - DNA, 572 bp, Zea Mays
gctatggcaaggagtggaagtgtatgactgcttcaagaagcaaaaattcaatcttcgtgttgcatatctgttctcagatcatgattttatggtgtatggtatttctctggatggagcgtgcatggtagattgacgtgtccttattgtgctaaaagatacagattgttttcgtcttagtgttggtggcaagatatgttactttgattgccatagatgttttctacccttcaatcaccccttcagaaggcagagaaaggagtttaggaagggcaccatcgtcatgaagggaccgcccaagcgacgtagtgggatagaaattatagaagagcataggaaacttgtcctagacgagagtgggaaaaggtatcaaggttttggtgaggagcataactagactcacatatgtggcttgtgggagattccatatgctaagtcattgattttgatgcacaacatcgacgtcatgcatcaagagagtaacttttgccaagcgctcataaatacatgcatggatttccgtgataaaacgaaagacaatgacaaggcacgcatggacttagccgtgatttgtg

SEQ ID NO: 90888 - DNA, 790 bp, Zea Mays
tatggatttcccggtgtgaggcttattttgacatgtatgaagtggaatctgaggcctggattagggtggcttccatgcatttttttctcccattccttgctggtttcaaatgcagcgccgatatgtagagttccattggccattgttctgcaaattgctattgaataggttcgacaaggatcaacatcagtacctacttaggaaactttttcggatctggcaaactagagttgtgtctgaatatatttcccatttttctacattgatggatcagttatatgcatatgaatcggtgtctgatcccctgtactttacaacccaattcattgatggactgagagatgatgtttgagttgtggtcatggttcatagacctgggggatcttgacacaacttgtacacttgcacttttgcaggaggaggtggttgaaccaaccaaacatagagagtttccgaggttgggttctagcccatggagcaaaactgaggtgaaaggtccttttcttttaccatccccaccatctactgagaaaactagtgctgcaacttttgatcgtaaacccacatagccatgtaagaacgttgaagagcgcgtgacaactttacgtgtgttccggagagcaaaagggttgtgtgacaatcgtgtagaaaattagtatcgagtgcatacatatagcacgacaatacagttgcaggctatgcaggaggtctgggatttgttttctgtggaggagaacccttctcctaccccttatgaagcagcccctaaagaacacctcttcacacttat

SEQ ID NO: 90889 - DNA, 450 bp, Zea Mays
tgacgtcctgaggtggtctttccgaaccttgccgagggcctgaccttcaaacctctgaatagtattccgcttcaccttttttcttcccgaggggggacgcccgaggtagaagatgccttctttcgttgtttgtgaggggacaaaaaaaaggaaagagaggtagagggaggagggcgttccttttgaggtataatgcgaaacgacgctcgttgtctgacgtttccacctggagggggcatggtcatttaatgcgatgggatgtcccggcttgccagtcgaccgttatggcgcgcgtgcgcgtgggattcgaagcgactgtcgaatggtctgttttgacttggaatggcgtagcccgtgcctcggtgactccgcccatccctataaattcgcccgagatggacgcttcagatttttaccttgtcgttttagctttcctgccttagacgtcgt

SEQ ID NO: 90890 - DNA, 395 bp, Zea Mays
ctccccccgttagaattcggcggaggacaagatctcccactgggaaggatcgatgccgtatagccttatcatgatagcgccttagagtttgctggtacctggctgactgaatcactgtattcaatcgttcttcttccagtatatcaacatcctccagtctagtggcctcggtttcagctatgttttcaaagatgcgtcttggtgccccaaacttgagatcagcaggtagcactgcttccgaaccatagatcataaagaagggagtgtttccatgcaaagctctgctaggttgagttcttaggctccagaccacatacgacaactctctaatccactttcctgcaaacttttcattcttatcgaagactttctttctgagtgcttctaatatcatt

SEQ ID NO: 90891 - DNA, 1221 bp, Zea Mays
agcatgcatgaacttgcatatgagacgaaggccatgggcaaggaataatatcacaataactttggctgttatggatttactgcccgccccaacgcaagttatccagtgccaacataccgaaaaaggtggcctagagcctggatggaggaatggttttacgtgaagaaagacttgaaggcaagagaaggtatcaaagaagttattatgcgccccatttggtcccgcttcggccttcgaaggccaaaggttaagattgacgaagctgccgaagcatgtcaaaaagcttttggtactgtctgtttttttattggtacaagagatttaatccaggagcatatagcatttagagtatggccacttgtagagaactgggaaatgctgaaggaaactgtcaccaagtctggcaaaggtgagctggttcgactgaaatacaccttcaggtacagagataaatttgatgaactgaatgatgactggataaaatgtatcgaagctacaagtgatgaactgcttgggctgtattccaaagcagaagataatgcattatccgaatcctttggtggccggggaaaaaagagattgaatagagttttcgatgccattggttttgtttaccccgactactgctacccgctgcggggatggggaaagaaaaggaaaactgctgcttcggccactccagatgagcctgcgccgaagagcaagaagttgaaggtccttacccaccggccatgttatattgagccggccgtggtgcctgagttttgcggggagacatcttcagctattgaaccaaatgagcccattcctcctacgtataaggttgaagattcgactataatgccgaagataccttcatccaaggtagttgagtcaaagactgataaagataaggccgaagaaccgaaagttgaaggaacaagaatgttagaagttctaatcccttcggtagaagtagcagtgccgaagacagaaaaaagttctgttacaacgcctaggagaaaaaggatggtcaatgtattagatattttagacacatcggattccaaatgccctgctcccttgaagaaggttgctgaagctgacaaaacgcaacccaaagctgatactaagcaaatagaagtcgagactacaataacccaggctgaagccgaggcagagcccacattgcctactgagacaaagcttgccgccaccgagcagacgaccgaaggaataact

SEQ ID NO: 90892 - DNA, 461 bp, Zea Mays
ggcgtactcaaccattcacgagattaatgaggaaaggtgtgccattccattgggatgagcaatgccaaaatgcgcttgatagtctaaagaggtacttacttaatcctccagtattggctgcacctgtaaaaggtcgccccttattttatatattgccacacagccagcctcaatcggcgcgcttctcgcacaacataacgatgaagggaaggaggtggcttgtaactacttgagtcgcaccttggtggcagctaagaacaattactctccaatagagaagttgtgcttggccctagtcttttccttaatgaagttgcgacactatatgttggcacatccaatacagctcgtggcaagagcagaccctgtaaggtatgtgctaaatcaaccggccctcatgggacgccttggtaaatgggccgtaatcatgatggaatttgacattacttatgtgccagaaa

SEQ ID NO: 90893 - DNA, 274 bp, Zea Mays
tggggatcttcctagtgcgagtactgggtataggcggcgaagggtggtgtcgaaacatagtgtgggtgatttttcgcgaagtggtaggcactgtcgtatggggatggagcgtggccgtctccgagtagaccgggttggtaaacgagaattgttgtcctcgccgattggggcgagcataggcgaggaggatcttcggaatctttttgagggtgaggagttgaggttaatgatgttcaattccagggagatgggtatcatcccgaaggttgagccg

SEQ ID NO: 90894 - DNA, 892 bp, Zea Mays
attttttaatacatatatagacaaacaattgtcagtggattgtcgtgctagcaacttttaagccagatattagctgtagcgcattcaacgcaccgccgatgataatattcatatcagattaaccctgcacgggtcccgagctactactaatcataataaatgccgtttttatacggaataccagaccagttgtccgagggcctgcttgccaagttgtcagtaactgtggagagcacgagaaagtggggcatctactttttttagactactgctctcggcctcctctccgctccattttcgcaattccttcgagctccgctccggtgaagggcgctccattttggagatttcgcaacctctgcctcgttctgccatttttttttcttgcctgcaccaacgtcatctaaccagtcattagttggtgaaatcctccactcccctgcagaccacgtcagccttcaccttgccgtctccgttacgcgccgcgagcccgcgagcgtttggggagttttggagcggaggaggcaagggaggacggacagggaagtttggttgtggaaatggatgtggtggaatcctcgccgtcgtcgtcgccgatatcgtctccggccgggtcttcggagtccatagacctcaacttcctgccgttcctcaagagggagcccaagtcggagcccgcgtcaccagagctcgggcccctgccgctgcctgcgcccccaacccagacgccccagcagcagcatgcagcggctccggctcctgaggccacggcgcctctgtcgccagcgactcctgacctctcgtccgctccggtgatggcgccgctgcagtcgctgccgcctaacctggacgaggacgcgctccttcgggagtactaccgcctcgcgggcct

SEQ ID NO: 90895 - DNA, 456 bp, Zea Mays
gcagcccatccggactgcattagtactcgcgaccagattgctagcggcgccatgggcgcgcgctggcagacccgcgacgctttcatccgctacgggtcccggatcttccttcccccgacatcgactttactgccccaggtgttacagctggcccatgtgggcctcgagggcttccggaagacattgcatcggctgcgcgcgaacttctacatcaccgacaaccatgcggtgctccgggactacgtccggacatgcacaacctgccaacgcaacaagacagaagcactctagccggcaggactcctacaacccctagaggtgacttcgcaaatttgggccgacatcgccatggacttcattgagggattgcctcgcttccatggcaagtccgtcatcttaacggtcgtggaccgtttctccaagtacgcccacttcattgccctaggacacccctac

SEQ ID NO: 90896 - DNA, 279 bp, Zea Mays
ctcggcattggtggttatttgcaggccctctaggttgcggacggctggtgtgccaatgacgtggtagaacacgtcggagggcagggcttcgcctctagctgctgctttggccaacgcgtcagcttcttcgtttctagagaggtccacatgctgcagggtgaagcccttgaactgtttctcaagactgcggacggccgaaagatactgcagaagtgcggggtcttttgctgaatagtctttttcgatatcgccagcaacgactttggagtctgtcttgat

SEQ ID NO: 90897 - DNA, 431 bp, Zea Mays
tgaatatcagcttattgaccaaatggctttggaagctggagaaagaagatggtctttggcagactattgttaaagaaaaatatatgaagggcaaaccactgtctgtgttgaaaaaaaacaaggagactctcaattttggcgtggcattatggatagtaaagaggagtattgcaaaaacagaaaaatggagattggaaatggttatgcgactagtttttggatggacaaatggtgtggggatgaacctttttgtattaaatacaaaagattatttgatttatcccttaataaagagataagtgtgaataaagccttgagagatagttgcaattccttaatcttcagaagaagattattcggagtaggagctaatctgttggaaagtttaaaaatggactgtgatggatactgttttaaggacagtaaggata

SEQ ID NO: 90898 - DNA, 617 bp, Zea Mays
acaattcaaggggttcaccttgcagcacgtggaccgggccaagaatgaagaggccgacgcactggccaaggctgccgccagaggcgagtctctgccctccgacgtgttctaccatgtcataggcacgccagccgtccggagccccgaagggctccaaataaccaatgacagcgagggccaccgcatagtcaacctcattatgaccgaagattggcgagcaccaataaccctgttcctacaagggtactaccacccaactgacatcaacgaggccaagcgcctcaaacatcgaagccgggacttcgtgctgattgagggccaactctacaagaaaggggtcagtcagccaatgcttaaatgtgtcaccgagaccgagggcgtccaaatcatgcgcgaggtccacagtggtacttgcggctctcacgcagggccaagggccctagccgcaaaagtgatccgccaaggcttctattggcccgcaatgatctgcgctgcaaatcgggttgcaaggtcctgcgaagcctgccagaaattttctcctcgatcaggcaggccctcgcaattcacaaaactaatcgcccacacatggcctctccagcgctggggcctggacatcg

SEQ ID NO: 90899 - DNA, 401 bp, Zea Mays
tagcttgcagtctgagctagcagagagagaagctaggatagatttgcttgagaaggctagctcagtgagtgcccctgcacctgcgcagtgtgcactttgcgagggtttgcagtctgcccttgagtcctgcagacaggtcaagacaagaatcaaggaagaaaacacataccttcgatctgtcttgagttgggtgttgtgcagtgagccctagttgggcatgatggtcagtcagttcaagaggggaactggcggaccggggttaggctttgctgctaagaatggaagtgtcactctctttgggaaggttggtgagtgtagtggtttgacaccttcagagaaaccttcacccactcccaagcttatcaaaaccacccctgctaagcctatcacccctgtgagag

SEQ ID NO: 90900 - DNA, 536 bp, Zea Mays
cgctctcagttctctgcgttgcgcactctctccaggcgatccacccctcaccggcgaccaccgtctccggctgtgctctggcgatctcctactgttgcgcccttcccccctcgctcggtgagcagcctcctttcctcccctgtcttttctctctctctgttaggctgtgctctccccatttacaccctttgtgcaattttccaaatcctgtgaaatcccagtgaatccaagttgtgaaatgtgttcccttgtggccattgagtgtccttgcaggttcctagctctttcgggagggttttcataccgcaaatggccatttccctaaaaccctaattccttgccctccacgtgttcggtgaaatgcccaaaccagccaaaaatgctccaattgaacccaaatttttcaggcaccttcacaacacttctagtaacatatttgccaaatttcacgccaatccgagattccaggctttaatttcaccaaattccccgtttcgagcgatcgtttccgagccgagtgcccaaatctctttttc

SEQ ID NO: 90901 - DNA, 1741 bp, Zea Mays
ccctgatcgatgacaactacagcaatcggtatgtcctttttcctactgcaaggtaaaatagacataatgaatgaaagatctgaaagttcaggctaaagcactaattcaccaatagatggggcaggcaaaaaccaaatcaaccaaagaaggcagagtggatgattccctaaaataacctgtacttccaactttatttaactgaagaaattatcagacaaacaaaagtttgaatcagggaaaccactagtttttttagttaacacaagtgccattttgtaaacttgacatgggaaattgagattcttcctggtaaacatgaagataacaagaaatcacatacacggcagcatcataaccactcataagcagctatggcaattgacacaacccatcaaatgagccaaccttccgaataaatcaaacacaaccaattatctatccatgctagttacatcatcctagaagcaaacaaagatggagcccaactaaaccttagtaccctgcacaccaatcaaacaagacaaacaaatttccctaatctcacagctccaaacccaacaaagaagccagatatttctttcgctttcaatcaacaacaaagaagtaacggcataaccccagtgatagccgagggaacatggcagaaacacaactacgaagaatcaacaatatagtcatagcacgaataattcgcgctcctcaacaacgatcacgcggctggggttcgccgcggtaggaaccggggaggagcagcggctgcgccggcacaagaggcagtgaagccaggggggaaaccgccggcgccccatcgacaacacgcgaaacgaacctcgaaagcaggtaccaaatttggagcctgacgcaatggtgtccatacctgtcgcaatcccaacccgccgccatgctcgctcccgagagcccagacccgcgcaccgaagaagaagaagaagaggaagctactgcgctcctctccccccacgcctcaatccatcccctaacccttggaccatggccagcagcaagctcctgagttcaaacggctccaatccctccgaggaagcagaggccaagacgtgtagcaccaccaccaacaacaccaagtcgcaccaaatcacagcccggagcagttgaacactggagcggtcgtgtgcccaccggtatttcaagtggcagtgaggacgcgagggggcgcgagaggacagagagccactgggaggagtgggaggttctcgctgggtgctcggcggcttgctcgagtgggcgtggtggcggtgccggtaacgatttctacggtgcgcgagcgcaaaggcctcgcctttccggtgccgcgcgcaattcttttggcttcttttatttagccgagggcgcgcctaattgcgctgcgctaatgggatcccatcccccaccctgccacttttacgagctcgcgtgttcttcctccactctccctttttctctctccaatagaccaatacaggtgttgggaactgaagacgaaagcttttggtgggctcccgaatttccatttccttgctccgaaatgacgcggacctaaccggggtcagggtgatcaggccggtgagttgacccgagctgaacgggaagctattattgccgattgggcccctcttgagttccttccccgtgtctcgctctcgtcggatccgcttctacttttgccagcgcgattgctctggaatccccattgttggctgcaggaatttgccacttcgatcccacg

SEQ ID NO: 90902 - DNA, 827 bp, Zea Mays
tatctgtttctactggcatgttgacactgaccttgatcctttctccttgcggacttgtcaaggtaaccattctcttagcactagagattactccatcatagctcttcaaccagacaaatctaagaatcacattgatcccactagatcttaggacaactaagttaaccaagaagtctattcccataatcttaaggttaacatgagggcatgagtgtgtggctctcatttcacctccaggtgaactaattaataacttcctctttaggggataacttgctatactatacttttccacaaaatgctccgttatgaagaaatgagtctagtatcaaataaaacaaatataggtactgagttgataagaaacatataccgagcaccacgttagctccttccaaaaccaattccacagtcacgtaattgactctacccttactctaattctgttgtcccttgccttaagagttgcgagagggtgcgttctaggctgacctctgattgttggtggcttgtggtgtctgaaaattcttcttgtgacaggtgttggcataatgtccaacctctccacacttgaaacaaccattgggatgcattggggcgataggatgttggcctttgctagggtattggtggcaactccctgatgagtctgctgacctccatcggttctctgcctttattggttgtacctatgagtttgctgacctgagcgttggttctggttttggtaattcccactctgaactgcggagcgagaataagaacactggttgtcttgctggtagtggacattcctactagactcgcttggagtctgggacttcctc

SEQ ID NO: 90903 - DNA, 315 bp, Zea Mays
ggttgcaaagctccagctgatttcaagtggcttgccttaatcctctgacagatgtcacattctgatacatactgggctatctccctcttcattctggtccaccaatacaaaggcttcagatcatggtacattttggtgcttcccggatgcatagagaatttggagagatgagcctcatccaaaattttcctcttgaggtcctggtctttaggaatcaccaatctgcttttgaaccataacacacccttttcatcttggcggaaacaattatacttctcaaccttctgatggagattcttcttgataatttgcact

SEQ ID NO: 90904 - DNA, 314 bp, Zea Mays
gctttgttgtgcactaaaaaattaaaaaataatttgtatatcgttgcaaagcatggatattatactagttatgcttataagaggagatatactgtcattttttaaattgtgttggttctatgatgatcttgtgattattatcagtttacttttctatatttgaactatcatgtacatgattatgtgtctttaattttatttgtttgttggacggttggccaattaatattatcggggtgaactatccgacaaatacccgttgtctacccgagtaataaccgttatccgtttctttaccgtccgaattattatac

SEQ ID NO: 90905 - DNA, 631 bp, Zea Mays
gcttagtaggtaagcgatgcgttgaccctctactcagtgcttaaccgcgcctaatcgcacgcctaatcgcactttcttgaaccttggttcttcgctagcttcgcggcatggatttctcgttgcttttgtgtcgatcgacctccttggctgaagcaaaacgtcgagctcggatttatcggtgttttcttgtcgatcgggtctccatagttgaagcaaaaaaatcgtgcacgggcacaggtttgtaagtgaagacgtgagtatttgggttgaatacacagcttgaattataatcaacaaatgtgttacaataaatagccatgcgcttacccagtttatagcaacagtagctgggcagacaggcaagggatcacgtgattgatatcccataaaggagcttctatatctatttatagcatgctatgtatgtctatctaacaccccccgcagtgagaacgtctgtggaccggacgttcatactggaccgaaaatcaacaaaaattgtagtagggagacccttggtgaagatatttgtgaactaggaggatgtcgggacatggagaacatgaaccgcgccggcgttgacacgctcacggacaaaatgaaggtctatctcgatgtgtttggtgcattg

SEQ ID NO: 90906 - DNA, 336 bp, Zea Mays
acaaaaggcatgaactctctggcggcaagttcaccggggaggatggcgccggcgcaaatccttccgccgaacgccggcgcatcccatccaagtaggcggcacaccatgtcgagcacccactcagtctgggcatgctcgagatgaacttacaaggccatggtaaactatggcgacacaaagcacaaaccttgaaggcaaaggggcgcagagagctcgaaggcgaaagggcaacgcgagtgggagagaagcaaggcatggctgctactcaagggatgaacccctttttaaaggcagatttccccgctcgcgccccgaagcatcacgggcaaagtctcc

SEQ ID NO: 90907 - DNA, 820 bp, Zea Mays
ctctcgactcaattttactccggaacgatcaccacggatcaccggccgccaacaaacttacagttcagacttgtgttctgtctattcctctcagttcgccgccaccttctcctagtgtaagccaatacttcttattacagtctgttacaaggccacttgggccaaataaacttagccactcacagctcgggccatatcgctctcttactccttctgagcccgtcgaggcctgcttctggcttcacatccttctcctttcccgcactggtattcttcgcttcttccgcgtcctggttgctgatcaccgggacactgacattttccctcccttgagttccagcttgtccccaagctggtgcaaaggaaaaatgtcgcttgatgtccgcctcctcttcccatgtagcgtagccatggatgtaggctagcccgtccactgagatgattgttgctaccagcatgcagttttcccatcgcagaggaggcaatcctgagataaaatacatagatactaccagccacgtatggtgttgaaccggcaatggaaaacgttcagagtatttcacccggtcttcccaattacgtatcgtaggatcaaagctaccttcactttgcccggcaggaaatgacaagttcgaaaattcgtgaagacctattttatctgtaaacaagttaaacccaaacggatgcctggtcgtcgcttgttgacagttaacacaagatcgaacaaagtcacgcactgagggcttcattcctggccagctcaacactgccttgatgcaccggtatgtaaccagaaagcctgactgcccacacagagtgc

SEQ ID NO: 90908 - DNA, 487 bp, Zea Mays
tcgaatgcttgttttattacctctggacgaaatttatgctatttcgatgttatgttaagcaggtcagatcgtctttctccatggccacatatatttgatgaacgctgttgtgccgtgtactgcatgaggatttctgggatctgtgagacgccaacgccgccaccacacgtccacaacagcctgattttgatcttgttaccctataataagaaacgtaattaacataaaacaaaaatagatttaagatgggcctagcccagaagcagcaatgctagaaggcaatcagcgttgcctgctttacgatataaactgccgaaggcccagtgtctgacaaatcgagcccgttcaatattcctgggctgaggagccggaactggcagtaatttctgcccttcctgtcttactcgctccggtgtactgggatccgtcctccgttctaatgaagggaccggatcgtattgatgcgctgcaacgtacagtcgttgct

SEQ ID NO: 90909 - DNA, 304 bp, Zea Mays
aagaggtaatggaagccctgggcttccgttagtgggggaagccctaggcaggatgccaaccagatcgcggtcggcccactgtacgcgagcatgcgtcagccatgcatatgatagccacgaatcctggatgagacgtgacaggcgatatacgcatgcataaatatatgtagaaatgtgcataaatcatgcatagaaggaatcttttgggccacgaatcacgggaacgaatattaccatgtgtacaccgtttacgactgcataaagctgtgtaacatgatagcgtaaaccatgcaacatttaaata

SEQ ID NO: 90910 - DNA, 782 bp, Zea Mays
tgcaaatcctccatccggtggtgaaaatcgaaaacatgtacgtgatgaacaacgccgacgaggctgccctgaagcgggaagtgcacaagaagccggtgtccatgctcatcgacgccagaggcatcaactactacatcgagggcgtcttcacggggccgcgcactaagaagaggtctctcacgaatccttagatctgaggccgacgtcgcctcagtgacctcatcctccatccccatcaccagctccttgctgatgttgcgctccactgtgggagcaacagggctacaacagctgtcgcattagctgctcatcgcccccacaggcgatgatgccagccagtaagtcagcctgaccactctcccttcgtttccctctcgccgggttctactggttagggttttggtctcatgccctagcaccgttgatagtcgccgagttctccgcctcccctcctccagtcggcctccaccgctcttctctagtgccgacgccaccacattgccactcgctcccacgggatgccgcctctctgtcccagctctttggcttcgcctcccctccccccgtcctccatcgctcctctctggtgctgcctccacaccactctctcccggggatccaggtctgataaacatagttctaggcctcgacacaagcaacacgtacttatatatctctttgatatgacataacaactacaaattattttttcttctatccatattttctgatagaatgtgttcatggcaacagatgacaatggtgggaatatcccaagaaat

SEQ ID NO: 90911 - DNA, 461 bp, Zea Mays
ctcggggatgaacttggggcactgttttgccctgtcgccgtacccacttgcaccggcaatgtggttgtgcgatcgtcgccgtcgtgccgccgtctggctcgattgtgacacgccttaagtcatcccaccactcgtcgcaagccgttaagactcgacagtgaccgccgtagaccgtgaaccagtgaacgccacgttagcgaactccggtgtctcttcccccttctcaccgtgagcgcttctctattcaaattcacccttctcgcggccgtccactataaattggtgcctcgacctgttccgctagattgttacgaagccagagcacccaccctctccctcgattagccaccatagccgaagaatttcattcttcccccaaatctgttgtctgtgccaccgtgagacgtcgcaccgtggccagccacctccaggtccactctcgctctccttgtctatgtttc

SEQ ID NO: 90912 - DNA, 729 bp, Zea Mays
ataagtaatggtgtacacaatataaacttgttggttggtgatttgcacgtgtaataagccaccttctctgaaatcgagcttctatgtacaccggcatatcggagtagtccggttgaatcctcgtgtatctacttaaatgatcatgctctgcactcatgaaacctagaatgaaaccgtggcaacgacgtgacaagcatatgccatctgcttgaatgaaggccatcatttgccatttcacctcctcatcgtcagcatccatctcgtgcatgaacccagctatgaaccaattcttcttgtcatctatctttttggttgttttggtgaagtgaacgaaatttgccttattttgtaatgaatgtgttacatcctctgaactagcccaagaccagcgcatcggaccgaggcgaagctcgtgtacaaggaggcctaattcactgatcaatgatggaaactaggctttataggatggttgttgtaattgggccatatgactgagagggagatatatgtatgagaacggttttttgtaagagacatcaaagaagaacagagttattgaatatttgctccttcctctgtcttctttcttctccatgcctccttcctttcttctcaatcccaagcgcactactaacaattggtatcagtctagtcaatcctcgaatgttttggatccttgtcggatcttccactcccacaacacacatcttcatcgtcatttctccgcca

SEQ ID NO: 90913 - DNA, 1366 bp, Zea Mays
aacggatcgaaaaaatttctgttttatcgaagtttatcttcagccctgaacacccttcgaaagtctctagaatcgattttagaactttgagatctgctttatccgctctaataaacacccctgcatcgtctgcgtatagggaacatcgaagctttgcccctcttggcaggacccgccccagtaacccagcctcagctgccctctcaatcatcctctgaagaggatccattgctaatatgaagagaaaaggggaaagggggtccccctaccgcacaccacgcctgtggtaaatcttgtctgattgttgaccattgatggtgactctagaggtagaagaaccaagaattgcggcgatccaattacgccacctttgggggaatccccgggcttttagcacatcgagaaggtaagcccaatttagggaatcgaaagctttggatacatcaagcttaacaaacagagcaggctggctgtttttatgaagtttcctgatcaccctttgaacgtataggaagttatcgtaaattgaccgtttctggatgaaggtgttctgagcagttgatacgatctcgttcattctcagtgcaagcctgtttgccagaatttttgttatgattttcatgaagctattgataagactgattggtctaaatttgtctattgtgtcagagacctctcttttgggtacaagaatgatgtttgcctcattaactaggtacaagctcctgcattttaggtgataaaagtcgttaattgctttggaaaggtcgtctttaaccacgtcgaagcagcatctatagaacagcccaatgaagccatccgaacctggcgcctttttagattgtaaccccataaccaccttcttgatctcattatcctctatcacattgtctaactcggataattcaaatggcaaatagcccaaattatcccaacgaacagccctctgtctcactccacttgttccaagcactgaattataatgatggtgagcctcatgcattttatcttgttggctggtcaaaattgaatcaccatgaactagagatctgatattattttttcttcttctattgttggccatcaaatggaagaatttattattagcgtcccccagacgcatccaggtgagcctggaatgttgtcttgcaattgatttttgaatgcaagctagaccaagaattttggatttaagccatttcctgaattccaattcgtcgctggtgagctgcctagcttcctgagccttctccagtagggttagcacaatctgaatgattgccaattgcacactgacaccactgactatttttcttctccatgcgcttagagccttggctttgcgctgcatcttcacatggagcac

SEQ ID NO: 90914 - DNA, 718 bp, Zea Mays
gttgcaatagctatggtttcagcagggatggagtcagaggaatcctcagccaacatgtccaacatagcacttatctctgcatcactcgggtttacaggcatctcaaagtgaacttgcctttcatcgttggggagatcaccaagtgaagcaaccagagcctcgacttcttcgggagagggtcgcactctaatacccaagccactgtcgctagcaggaggattggacacaaaactgaaagaagtcttggaaggtggcagattccaggcagaatatgcaacaggagcaccaatattcgacaccttgcctctaaggatcatctccagtcatcttaccaaatccatagcaggaatcctcctgttggtaacccgggttgagttagtgacaccactatacaaaaaagtcgggtatgctctgtccttaagtggctgaatgttcttgaaaacaaagtcagcgactaccgcttcagcagtcagacctctctccttcaataagccaatttcagcaagcagaaccctggcttcggttatctccaagtctgtgggggattcagtccaacttggagcacgaacatccagctgtctccccaaccgagggggagggaattgccatgattctctataataaaccactccaagtgccatcctttgattgtgtccttgagtgggatgtcgaggtactctgtcttcctcccacagcgcatctccaaacttgcaccatc

SEQ ID NO: 90915 - DNA, 522 bp, Zea Mays
gggcgatactccacgcgggggctagcacaagcgaggcagagagcttcttacctcgaattggatcagtggtgagggcgtcaacgtggaatggtggattggcggcagcgatatactccggtgaaggattcctagtcaccttgggcacaccccgtggccccaatgctcgtgatcaacttaaggtaccacccgcgatgcacctaggctacgtgcacaaggccgcgcaatgacaagtcatcggacggcttgcgacggtgagaacctatccccttcctccgctcccatgggcgatgatagcaatgttcaggagacgccccgcgaattagagggatagttgggagagaggaggctagttatagggctagacatggggaaaggggagagttgttacgtcggcaggcgcgtgcaaaatcggcggcgactgttaccgccatggatagtcgaagcagggcgggctaatagcttgggcccgcaggtaagccgcccaagaggggaagtgagaaggaaaagagaccggtatccggc

SEQ ID NO: 90916 - DNA, 428 bp, Zea Mays
tgggagatgagctctgacgaacaccaccgcaccaccgttctctgctgccagtgttactagctgtgatgagaaacctgtcgggatttatttcggctctcgtacgcgtgcaattgattccgcgaccagacagtgtttatatatggtgcacgttgtgcatgtgatccggggattatgaaattatgcggcagccgcacagccccccctcctctgcacttgcaggacggcagggacgagtgtttattgtttttctatgcactctgacccggcctctttttactcgatctgcgagcgataactttgtggttttagcgatcaataaatatatgtgtgtttggagtgagagcattattagtttattactccactcattaatttctgatgagtaaccttgtatatatatgcgccatccgatccattctgtaattggg

SEQ ID NO: 90917 - DNA, 729 bp, Zea Mays
caagttctaacatttatttatgcactaaaaattaatttctgatattaatttctgattttcaatgctctctggattgggcctcaaattccagaaagcgcaggggttggcgcgtaagtttcacaagactcagagccaacacgctttggactgcgggtttattttataaaaacagagggtttatttaagaaaatcaccggttcgaaggggtatctcgagtctacaaccgtccgattagaaacgaacggtccagatttgatctccattatttgaaccggtacgcaacttgcatcaaccgatccgagatcgacgctcccgatttaaagagatccagaaccatcgctggtcatcgatctaccgttcgacggtcacgatccaatcacgcgaggggttaccgagggcatctaatctgagtcgttcagcgcaagatcaacggccagcgcaccatcgccccaatctagctcaactagcacatacccgacgctgctccccagcggtggttcaccggagtacgcgcaattccggccgacccaagtccccaatcccgaattcactcgacccatgtgagattcacaacggcccgaacccatgtcgcccctcaattccagccgcgacacagcatagactcctggcctacgacacagctaagttcacggcggagacagatactccggcaagcaattactaaggttctacggtttgactacggcgttgtgtgaacttctatcgatc

SEQ ID NO: 90918 - DNA, 868 bp, Zea Mays
catgcacaaaaaagtaaagtaaaatatatcttcaatatatgtatttacgtatagaggacgagatattgaggatgttgttggagatgaacgagatatagagagaatcttttagaaaagactttaaaggatggatatacaggatggatataaaggacgctataggaatgcttccaacacgccatgtcgccattagagttccttagcgtagatttttaaattcgcttttggcaagcgcacatttcctaggcttctacttgactcctctagtccttatgagatcttcctcttgcacgacttgccaaataaatccatcagaatactgtcgaatgcaataaaaacttcctaccataacaattggtccctttcacactgatcaacgcagtaaccaaacatctcaatgcgcatacaatcgccacaagtgtgccactgggttcggagtcgcagaggtagaaggcacccttggagcgcagggtgcaccacagttgcagaaggctggatgtggctgcaataggtgaggtagagggagcacggggagcttcatgtccggccattcgagatcaacgcctgagcacgctgtgtggcctcactcgcactctccaaccgcaaggagttgaccaccccccaacacgatgctatcaactcgctccaggtcccgcttctttctcctatccccttgccgctattaggtttttaaccacagtaaccactgcctcaaatcaattggtttgtctgctaatcttatcgagaagcacaccaatttagcattgaatcacgggtccttgttatgcaatgtgagagttgtgttcgctggtgtttatgatctgaccatatggtcaggttgatttgagagagcggaggtacctgctct

SEQ ID NO: 90919 - DNA, 556 bp, Zea Mays
ccaaattcgtgagacaaaggaacaatatgtacgtaatgtttcaatggttcgtttgatatgatctttacgtgcgcatagaagttgacacgtcttgatagagaccactgtcaattattgggccaagtaagagtacttgagccatgtctatgtgtacatgaatctatagggtcacacatttaaggggaaggaatcctaacttagattggatccaaaattagactagttgttagggttgctaatgagccttggattcaaaagcccaccagaacacctatataatgaggggcagggcgcgcttagggtcatccctaactcgtgaccagcaaaccagcagtctcgcccctcacaccctcgccaagccaccgtcacgaacctagcagtttggtatgcggcgcttccttcctgtacatggggataccttggaggtgctgcatttggagcactgggacgaaccgtgcgaggacgtgaagaacgtcggtgactgtacgacactgctcaacacgtacatctacattgataggcacaagtagactagcacttacgattctgtggctgg

SEQ ID NO: 90920 - DNA, 462 bp, Zea Mays
cttttgtttctgtgatgagttcaagacaccagcggtaatggcatgtagaaccatgtctcctataaaacgcagcagcagcaacacagggtctatttaacccttcacccgccagactcggcggaggagctcaaaagttggtacgcctgagtcatcacatcgcatgacccactcgagtgcaatgaaatatcttagacagaatgatattaaaggcgattctaatcagtatgccatagctaatgaagtacttaaagacgaggcaaatttggatgcattcgcctggctaccagacattaaggaaaggatgggtttcgtgcttcgaacctggaacgtaaaggtaagccaggcatctaatgtgttcatgttttaatttttcagctgtatttgttcaaacttctagttctcaaagcaggtgcatggtagcctgaatgcaggggacatgaactcttgagcgcctgcctactt

SEQ ID NO: 90921 - DNA, 322 bp, Zea Mays
cgtccatctgatcgcttgttctgaatcctccgtcaatccttctatgttctctctcccatcctcacatcgtcgccgcctcgtactgcacccccatccccttctctctcgtagactcacgaggtcgtagtccaccccctgccgtggtgatgttcgacctactgtcatccctgttgtccatgtcctcgaccccgtcaacgacacccgtgaactccacggcatcctctggcgcttgagtgaactccaattcctgtaccccctgccctgctcggcacaaatcgtatatatcatttaatatctaaattaatatctaaacctttgggtg

SEQ ID NO: 90922 - DNA, 781 bp, Zea Mays
gcaatattttttttgggatattacagggtgtgtcgttgatccaagctagctcaatggccgtcacctcccaatgcaagatcgctctttgccctggatccgtattctacttcgggaccatcttgtccatagcagatgaaaagggaattctgcaccacatagtggatccaccggagaagaagcttttcttggaaatctccaggaaagccggaacaagacagcgaacagcgcaacctcctgcgccctagacgaagactacctcttgcaagacgagagctaggaatttacttgcccgaagaactctgttgtccactttgcccacaaagaagtggacacgaattacaagaaagaaagaagcaagcgttcccggaaaagggatggaggcccgtcgagctatctttctggcaccttcgctctcaaagaaggacggaaaggaactcgccaccccagtaacttcgttctaccccgacatcctcttcatcagtggggggagattggagttatctcccatctccgacgacgggccaaccatgccgggagaagaacctccccagcgagaagctcggcgacgaagaaacagacgccgggatattcggcgacatcatgaagctggggagcaggacccagcgcagcccatatctcgagatgaagtctcggaagtgggagaaactcccgacgagcgggtattcagagaaaggaggaattcctgccgacaagctcaagaccgagatcgagaacaagctgaacagggtgcaaggttacgccaagagaaccctctctttgc

SEQ ID NO: 90923 - DNA, 361 bp, Zea Mays
tcccagagagttggtgggcagccagttgaacacgctgattttctgggcaaccaatggcttccagcttccttttgatcgttcgcatccaatcgtctgcatcgagggggttgcttgatccggcgaacgtgggaggtttgagtctcaggaagtcccccattctgtcttgcggtcttccaccatttggtcgttgattttccagatttcgagtgaggacctcgatgagtcgggtctgattggctagaacttgggctaggtctaagggtaggggtggaggtgcggggaggtgggtttcactttcctctctaagacttccccttcagctcttcgggggaaacctgctccaatccctgaggcggtaggc

SEQ ID NO: 90924 - DNA, 528 bp, Zea Mays
cgcaactttcacgcggtgaggagaactgcattcaacaatttctagacctaagggtatctgatctttgagggcccgaggacttaactgatgaagtatataggatgctggagtggatatgcatgcccttcttctacccgttcgactactaacgcggtgcttaccacgtgagtcgtgtatgagatgtataacagtaggtcttcagctggtgggtcggttgggtgggttgagaactggtggagtggtcaagagtttcttgactgcctctagtgcttcttgagcttcgagagtccactagaatctgtccaccttcttaagcaatttgtagaatggcattcctccctcgccgagccgtgagatgaaacgactcagtgctgccatgcggccagaaagcttctataccttcttctgtgatcacggtggatccatcctcggaatgcttcaatcttctttggttggcctcgattccctgctgactgatgatgaatttgggaagcttcctggctggtaccccgaatacgcatttctccg

SEQ ID NO: 90925 - DNA, 655 bp, Zea Mays
atttctctcaatgaaccttttgcttgaagtagtctggcccattgcttttgttatctgataagtcatatgttgctatatctatcatggattcatgacagtgggaaaatgatatgcaaaacactgctacgtatggaaggtctactgcaacatgccttgtagaaacatttcagtggattactgtagttctttgcaataggctagagtggttggatgattggatcctatttgcatagaggtgaaagatgaagaccccacgtgcggagacaatttcttgccagacattgtaggtacattttcgtttccatagtaaattttattcaagtgtcatcaattaattttgttctggatgtgccaattttattcaagtatcatcaattaatagaaggtgaaataggcacgctcaactactgcatgctgaactcaactgattggttgccaaccatctctgccatcttttgttaactacctgtcattttgtccagactccagataacagaaaaatgcaacaattcctgtttatactgtatttcaccttaacctatccatgtgattttgagtggaatagccttttagattgctgtccttgtgagaaaacaggtatatcaaatcaaactatagagcaaaggcatatctagcagaaaattgttttttttta

SEQ ID NO: 90926 - DNA, 271 bp, Zea Mays
cggtgacacagttgtctaatacttgttcactatcatgcatatactgagttagtgtcaatatatctgcccctccagcaatctacaaagaattaacatgaacaccaatgcttccaaaaatgtttatgcttccagctgtagaactcagaaaattgtgtagtttgagaataagttcacaagattgtctaatgcttcagggtaaaatttccttgcaaacaagtagcatggtctcttcagtccattccacatgcaaggcctctgcaatagatctttc

SEQ ID NO: 90927 - DNA, 421 bp, Zea Mays
cttaatgttcacatatctatctgctatcacatctaccaattaataaactatatcatttggtatccggagccttcgatcctagtccacaaattcccacctctaatctaatccagatataagatcccatctcctcccatccataatccaaaatcagacagacgtcgtactgttcacctgcgactactgttcacgcgtgaacaatactgcaacagatattgtcagcagcaacattgcctagcatcacctctggtgatgtcacccctgatccagtcgcaggcagctacccaaggtgggcgttttccaccaatgtatgcctccgcgatcaacatgaagaccacaacaccccaagctaccacagagtaggaacaaggaattgaggatggcgtctttgcgggcttcaatgtgcatcgctctccctcac

SEQ ID NO: 90928 - DNA, 375 bp, Zea Mays
cggagagtgcttcaggggtaagggattcggcctctttggccgcactcttctcaaaatctatattagtatctggagttattcctttagccttctactcggtggtggcaagctttgcctcagtaggcactgtgggttctgcctcagtttcagcctgagtcattgtagtctcgacttctatttgcttagtatcagctttgggttccgttttatcagcttcggcaaccttccctataggagcgggacttatggagtcggttgtttctaaaatatccaatacatttaccatccttcttctcttaggggttatggcagagctcttttctaccttcagcgctgttgcttctgctgaaggacttaaaatccctggcatctttg

SEQ ID NO: 90929 - DNA, 831 bp, Zea Mays
tgcgaagcaagtgaagtgcgcaggggaaacggctccctagccgcgtccgccatggggctgcacgaggaataagatcgccgaggggaggggaggaaagaagtgacatgaggaggggaggagggctcacctgcacacgaaggattccaagtgacggcgggctctggctgctgcgtggggagggacagaggagggcgccggcacttatgcgcatgcacacatggacattagttccattttatgcgcacgcacgacacaaaggtgcgggcagggtcaagaggagaggcggttttggaaaggatgattatgacgtgtggggccgatagatcaatgaaacggttgagcaagggggtatgcttgtgctgctgacgggcgggactcaagtcaggaacagtttcaggtgatttcgtgcgcgcgacatggcacacaaccgagctgaaccgggagtgaggagttgtcgcgcgaggatgaaaagagaggtggttcacgatgataaggtgtgtgtatatatatagaaagaagagggcgcgaaagtcagttgcacgatttcaccacggctcgcgatgggaggcaagacgaggagaggctgttgaggctttgtccaagtcagacgcgtgcacgcgaaatagacaacttttagagtagataaagctgacacttgggtcctcagatgaccgcgagaaaaacgagtgagggggaaggcggttgcgtgcacatcgcgtgagactttgcacgacaaggtgagaaaaggtgaagttgacgagtatagacaaaggtagacacatggggagataggggtagacgaatggtagacaaggatagcagatgtgagcg

SEQ ID NO: 90930 - DNA, 686 bp, Zea Mays
catgcccgaccctgggctcgatgtcacggggttcaaccgggaaaggtccttccagggttggcgcacctgcctcttccgactgactaacagaccctaatgattaggggctctttcaccagcgcgctcactaacctgtaggtcccatggattgggggtcattccctcgacactatgcatgtaatcggatctagaatcacatgtatagagatgtcatacaatgaattatatcaaaacacaatgctttattaataacaaatccgagtatttattacaacatcgatatggtgtatcaatccaccggtagaccctccgtagccgactggttggcagcacgctttaaactcgccatagtccttgagctcttaggtcctcctccatctggacaaacaaatacatatatagggtgtggtggaaaaggcaagagtgagtactttcgcactcaacaaatatcctagttttgttggttaagttttagtttaataatagaaatgtgtaatccttttttcgataaacatttcttaagtaaaactttattacgatccggtaacaacagcgttcatttcatcatacaatggatcatccaccaagtctcatggtaaaccattatagtacaagtaacccttgaaaacccattattgcatcccacaatgaaccattcaccatgcctcaaggtgattgttttgaaa

SEQ ID NO: 90931 - DNA, 301 bp, Zea Mays
ctcggtgcctcctcctgtcgtcgacgacaactcgagatcgatctcggacgacgactcgccatcgtcgacgtctctggttctcccagcctgattgcagagtttgggtttcctccctctcgtccctccctccgtctccctgtgcctaaccctaatcctaatcccatttggatctagtgactggtgatgttcgttcatcgctagtgctcctcggatcgccagaacgagttgtagcttgacagcttgtacgcatgcttgccttcttcgctgtcttcgatctccacctatcggggatccggtttgc

SEQ ID NO: 90932 - DNA, 513 bp, Zea Mays
cgaggacgctgggtgacaaagacttcacgatcgctcgccgaacttcactagaggcgccgtgtcgccattcaccagggctagaacacttcgtagctctccgaaaacggtacttgcttccattgcattcatattgttattctcttcacgaatctagggttagacgggcaaacgggcatcggggcatcgatctggctcacgccggtgagggctccaccgtgaatggggccggcgccgcttcgtcctcgcattaggaggtagaagatcggtcggggccgttaatcggaccactaatggctaggatcgagccatcataccatttggccgggagccttcgcgatcgtcgattggtaaatggagggatgggatgggatttcatttaaacttactctccaccatagatcttcagatcaacgaccccaaacgcataccgatttggtgtagacaattttgaatccgtgccatcaaaatctgatcggatggccttggttcacccgtaccccttcgacgtggttg

SEQ ID NO: 90933 - DNA, 353 bp, Zea Mays
aacccatttgacacgaaacacgatgagcttagaccaattcccagcactaaacaggccctgagagcataccggcggatacgcagacgctagcttgagatgattcgaattgcgtggtacgtaatatatacatggatacatgccactgtcccagcaaccagaggatcagatgctgcactatctctactgtccctgctccatatagccatcaacgagaccaccaccgcgcaggggcgcgtactgtgcctactatggcacattggtatgaacgagctgaggccccggccccaccccaagtgtgcacgcgccaaccaaacgcaagttggccccccagctaactacgtgcctagcctagt

SEQ ID NO: 90934 - DNA, 1280 bp, Zea Mays
gtttgaacacaactatttttacttcagaatatatttttttcctaaattacccaaaatgatattttggggtgtcacaaatcctaccccccttaaaagaatctcgtcctcgagatttaggaaggactagagaaaagatgtgaaaaatctatgcgaagctcttcttctctctcccaagtagcttcatcttctccatggtggctcccttgtactttgcacatctttataaccttatttcttgtaactcgagtcaaagtgtcaagaatcttgatcggatactccgtgtaagtcaaatcaccctaaacactgagctcttccattggtaactgttcctcagggacagggagacacttcttaggttgagacacatggaatacattatgcacatcagacagattatcaggtatctcgagttaataggctatctctccaactcgcctaaaaaatctgaagggtccaataaagcgaggggacaatttgtccttgactttaaacctcctcattccatgaagtggtgacaccttgaggtacacataatctccttcctcatattccagtggtcttcttcttttatcagcgtagctcttttgcctggtttgagctaccctcaaattctctcgaattatacggacttgttcttcttcctcttgaataatcttaggcccaaataactgcctttcaccagtttgatcccaatacagtggtgtcctgcactttctgcaatataaagcctcaaacggtgacatcttcaaattgacctggtaactattattatatgagaacttagcataaggtagactcttgtcccactactaccatgctgaagggcacaagctctcaaaatgtcctccaatacttgattagtccgtttagcatgtccaccagtctgaggatggtaggccgaactaaaattcaacttcgtatccatattctcataaaaacttttccaaaatctggaggtagactgtgatcctctatccgaaacgattttcttcggtacaccgtgtagagacacaatccgagccatatataactctaccaattgagataccttataagtagtattgaccgaaatgaaatgagccactttggtcagtctatccacaataacccatatagaatcatatcctttcgaggtgcgaggcaatccagtaatgaagtccataccaatctcttcccacttccactcgggtatctttagtgggtgcagtagtccagctggtttctggtgttcaaccttaactctttgacacgcatcgcacatagacacatgtgcagccaca

SEQ ID NO: 90935 - DNA, 415 bp, Zea Mays
atttgggcctaaaattattcaagaggcagaagaacaagtccgtatgatccgggagaacttgaggatagcacagactcggcagaagagctatgctgataacagaagcagaccactggaattcaaagagggtgatcacgtatacttaaaggtgtcaccaattcgtggaatgaggaggtttaaagttaaaggcaagttatccactcactttattggacccttcaaaatgcttaagtgagttggggagatggcctaccagcttgagctaccagatcatctgtctgatgtacatgatgtattccacgtatctcaactaaagaagtgtctccgtgtcccggaagaacagttgctaatggaagaacttagtgtgcaaggagacctaacctacactgagcatcctatcaaaatccttgacact

SEQ ID NO: 90936 - DNA, 656 bp, Zea Mays
cggaagcctttggatcctttcggtatgcaaagttgtagcatccgaagtttttgtgcaagccgtcagcccttgccttcgtctggtaatggagctcatgcacccggcagaacccttcagcgttagcgctctttccctgacttcggagagtctagatgtaaatgctcagcctcacaatagcgttcagggtcagctgatggagatagatttcaaacttctttaaaacttcacctatcatctcgtaaagggggaaccgaagcccccgctctgaataagctcctgaataccacaacttcatcttccttcggttctggaattatttcctctccagcaaaacgaaccaattcatcatcatttactcagaaatatccaagtttcttcatcacaatctgatcttcagttctacatgactaggcttggttggagaaagaatgctatcaccatcttcactttcattatcactctcaacctcagtcatggcttgttcagcttcggcagtagaggtaccttcggtaataactcctccctgcacaaccagccccgtccgcctcatcatttctaagatcgttgctgcctcagtcattttggtttcgtctccctcgcgggacagccttgcagtggatcttactctggccatttcgttgttcaacttctctcag

SEQ ID NO: 90937 - DNA, 903 bp, Zea Mays
ccgtgacactggctgtgggtcccggctgtcagtgctatcttcttccccgtgacaatcttcaaccagacgcgcgatttccgcgggcgcttcaaccagaatccgtcgctgccgttgtgattctcggccgagccctcatcccatctcaaccggaacgaccaagcttgcccctaggctataaatcaggaccgctcctgcccttattcaccatgctcggcgtgcgcagcagggaggaattagggaggagagagaaaaatggatgccaccgcgccttgattcgtttacaccgcgcctgtgtctgcggtgtatggcttgggcgatccattttgtcatggggaagatatccctggcatcaaatcaatgggcggaatcccggtggtgcgtcgatttctcgtcggagacgaactccaccatagatccgtcttcagccgtggtcgtgttcctgcgcttcatcaatccgggtaagatgccctcttcgaagttctcccttgtctccgttacgttttgagctcgttaccgtttgatttcgtgcacctggggctcggtaatcactcaccattaccggggatccgtgcctcactatggctaggcgggttatcgcaacaatccatggtgtatcacccctctatctggttcggattcgactgaacttcgtgtagcgaccccgaaacccgggtgtgacaggactcaaggatggtttgatgtcgtaatcctttcgtcattgaatcagactctgatgaagactccccagagattcgtgaggaggtaccctctaggtctaggtccaaacgaggaacatgatctagcaatgttgtgatgggagctgaggcctctgggtctcagagtggtcgcgagcgcacggctagaactccttctagtcgctctcgtcctgccgctaatccacag

SEQ ID NO: 90938 - DNA, 860 bp, Zea Mays
aggtagcctcttcaacgatgaatggtccttcccatggtggtgataatttgtgtcatccttctcccgccaacactcggcggaggaccaaatctcccactgcgaaggatcgatgccgcactgctttgtcgtgatagcgccttagggtctgctggtatctgaccgactgaatgaccacattcagctgttcttcctctagtatgtcgatgtcctccagcctagttgcttctgcttcggctatgctttcgaatgttaatcttgacgctccaaagaccagatctaccaataacactgcctccgacctatacaccatgaagaatgaggtgtttccgtgtaaagctcgactcgactgggttcgtaggctctagaccacatatggtagttccctgatccattttcctgtgagcttctcgctcttgtcaaacacctttttcctgagtgcatcgagtatcatcccattggctctttccacctgcccattagctcttggttgtgccactgatgcatacttgatctggatgctcctctactcgcagaagtcaaagaactccgagctagtgaagttagatcccaggtctgtaatgatgctgttgggtattccaaacctgaacaatatttcttgaatgaactccactgtctttgttgaggttaaagaggcgatgggtttgtattctgtccactttttgaatttatcaatggcaactagtatgtgtgtatatcccccttgagctttcttgaagggcccaatcatgtccaggcccaagcatgcaagcgaccaggtcataggaatagtctgcaactgttgcgcgggtagatgttgctacttcgataagaattggcacgcctcgcacttctagacttac

SEQ ID NO: 90939 - DNA, 627 bp, Zea Mays
tacaaatcaagcagacccaagacagaacctttgtgcatcaatgcaagtatacaaagaacgccttgaagaagttcggcgccgtgggcgaggccaagcctctttggatgcccaagtccaccacaatggcactaaatttcgatgaggatggtgagcccgtggaccgaaaagagtacaggagcatgattggctccctcctatacctaactgcgacgaggatggacatacattttgttgtgtgtctgtgtgcttgcttctaggcttccccacacacttctcacattcaggctgtcaaacagattatgaggtacttatgtttcattcctgagtttggtttgtggtacttctcgtcttctattttgtctttgtgcagttatccagatgctgattttatgggatgccacttggagcgcaagtctactcctgggacttgccagtttttggggacttcattggtttcctggtcttcgtgcaaatagtctagcgttgatcagtctactatagaggctgagtatgttgctgccgctagctgttgctcacagttgctttggatgatggctactttatgagattttggcttggattttcatcatgtgcctttgctttgcgatagcatgaatgccataagtg

SEQ ID NO: 90940 - DNA, 367 bp, Zea Mays
aagattgcatcaaaagcactaatgggtaagactctcatatcaatataatagaagtgaccatttgcccaccattccacatttttaaccatttgatggcagttcatagaagctccatttgccaccttcacagttactggtgaacacgaatgtgtaggtaatgccaacttctgaaccatagtggaactaccagaatcaaccaacattaccatgatttgcttctgcactactgctcgaattctcatattttgcaacccaacagtaccagataaagcatgtgttgaaacctggtagcacaacccctgttgaacatcctcctgctcaagctgttgcaacaactcatctgttaaaaccatctccacattctcag

SEQ ID NO: 90941 - DNA, 484 bp, Zea Mays
tctcaatggctagagcagggttggatggaacgaagaaatcaagtcacgggattatatactccgaagggatcaaaatgaggaaggttggttagccgtgtgattcgcaggtagttacaactacctaatcgtaataggctcgtcatggagaaagtagctagcaggaagggtcccacccggtagagaattaattcccttgagcacggtggatgggaagcataggtgcgggccccacgaatcaatggtactaggatgcacgtggggatccatggaaaacgagttgggctggcgcaaggcaagacccgccagctttgttttttttctttcctgtttttatttttttatatttttagtttattcaaacttgatttgtgtttttgaattctacactcaagttcaaatgcacaaaaaaatagactccagcatgaaatgcaaaattgtattttatttataatatttggttatctatatgcctcaaaatataaac

SEQ ID NO: 90942 - DNA, 601 bp, Zea Mays
gcggcgcgtcttctccacaataaatgcaagggcagcgtggcccagtggtcttacgtcaggcccatcccgcaagctcacgtcacgcatagtaggccgcttggctgcaccaggtcttcgcctggccagggaataggaacgttgtgtggacaggttcgcaccaagctgggtctagacacatgtcgcccccggaccccttcctgaacagggccgggtattttctgccccagaatcccgggatccggcggtgactagtccggaccccactcagaagggccgggacccatctcggaggtccgttcgtcatgtacgggggtctggtgctttccttgcagtaggtccggacccactgcgtgtatcctggagcacgtctctttccctagccacgtggcaatcccggggcgatcgatgtggcgcggttgagaactgttctccgcgcaacaagatacctttccgtcggcgtagtgccttcatattgtggcaaggggtacccctgtttcaaggtaccaacagtggccctcgggcccaccttaggggagggtgcgagcctgcaggtggggccaaaacctgtatcttgtgtaagcacaacatggccggtgaccag

SEQ ID NO: 90943 - DNA, 444 bp, Zea Mays
ttgctgagtgttgtagtcctgacacttgacaaagaagctccctctgtcaagtgcctcccagcgcactcggcaaagggactgccaaagggcccactggagccttctttgtcgagtgcgaggtcagcacacactcggcaaatagggagcccggacactcgacaaaggctccgtcatcgtcacttggcgtcgtgacagtgacttttctttgtcgagtaccagctgacactcggcaaaggccaagaaaaagtactcaacaaagaaacggttgccgatgtacagttcaccgagacctctttgtcgagagtcacacatgcaagtgtatgttgtacagctaaattcaaaattgtcatagcgtacatgcatttgaatcaagaccagctatgttttcactttcacttgtaaaggttaacatgttttccgatccttgccaatcaagcacatcct

SEQ ID NO: 90944 - DNA, 302 bp, Zea Mays
cggcgaattggatttcgggcatatgacagtgcaaagggggtggatgagggaagaaaaggagtcgtggatgatcctacttattccctcgaggactcggttcaagatagaagggaaagcgctcctgacttccggcaatggcggcgagctcctcgcgcggggcttgggcacgacccgcactgacgcaggaccccgccagtcagcgaccgagcgaaggaaggggacgcgagaggaaagcggaggaaggacggtctcttacatgcgggtcccgcatctcagtggttagcgcgcgcttgagctggatg

SEQ ID NO: 90945 - DNA, 789 bp, Zea Mays
ctgtgctctgcttctgattccaaatttatagggtcagtcgtgtttgtcacatgggtataaacctggggaaatggactaggtggtaccatctggacttgacccaaggatgtttgtggtgtaggaccacctagattcatcatagcaaaatatgggttccatggattgcggaagggaaatgaagatgtgtcattaggtccctggggccaggtaggattgctcatgtggcttgtactaccactcatagtagcaggatgggtttggtctaatccttggccctgccagaactaaggatcccacatgggtggtgggaaaatgtggttacctgaactggggccggcaccaggaggtcgaatatgtgagtttcggttgttctcagccattctgggaatgaaatacaggaatcaatgaattggaacaacagaaaacacacttttactaaaatatagcaatgttcatgcattccacaaaaggttcatacaaaaggaacattaacatacatcgcacatgtcctacatcggcaacccatgcatcatagacatcacacataagtttttatttatttggatgcattactagcactaagactctactaggtaccacatttacaggttccaaatgctatacctagtggacctgtcggagtcgtacgagtcattgtcactggcctcatacaattctggtgaggaagggggagtgaaagaattttgggccactgggttcacttgctccaatacttttatttcttcctccatcctctccttctctgggtctgaccttgctttgctctct

SEQ ID NO: 90946 - DNA, 611 bp, Zea Mays
gcgggaacgacaaatgtagatttggatgacaggtggtttggaagagtaaggtgaaggtaacatggaggtggtgttatgggaatgaggatatcaggtgtggatatagaagatgatggtgcagatgaaaaattaggaatggagggaagacacatgattgaggtggactctgtcggacatatgaggcgtgagtggactggttttaaaagaaggggcaattttcattaaaactcgcatccctagaaatacgaatacgatgagtagatggatcataacaacgataacctttgtgttcaggactgtatccaagaaaaacacactcaacatgttgagtagtcaatttagtccgctcacgtggtggtaacaagacataacacgtacatccaaacactcgaaggtgatcatatcgtggaggtgtcccaaaaagaatttcactaggtgttttaccagaaagtttggatgatggttgtctattaatgagatagatcgcagtagaagcaacttcaccccaaaagtgtgaaggaacaaaggaggatatcaaaagagtgcgtgcctctcaagaatatgatgatgtttgcgttcaacaacgccattttgggcatgagcaccagggc

SEQ ID NO: 90947 - DNA, 670 bp, Zea Mays
cgatgaaaaaaaaagaatatggaagtgcgagtagttagcctgcaggttgctagaagaattcttgtggtgcgagtgagagcatagttttgcatgcatgacactttttatctcacaaatcatggtcagtaatcaaagcagtatggcgcacaactcagacccatgacaaacaatgttgcaagaccttgcctcaaggacaaccaatgtactggacagaaaaggcaacattgaaacatttcattaagcaacttcagtccaattctgtttatgcatgtatttttattaaacttttagcattacatacataataggttcatgatcaagcatttagaaaatgctatacaacattattgcttcaaacacagctttatacttcaaagttattcggagcttcaaagcaaaagtcatgttttgcaaaaactaatcagttaactaaacctactgacatcactctctttctagtttattagatgcatttcatctcattcaaaagaaacgctaagtggtacaagcatcatatctattcacaggatgaatgaatacagctgcatatgtcgtctgcagttctataacctttgaagaccaatctcacgtgaagtttaaaacaaatgattctgaactgcagccaataaatactgcttagcttaaacagattgtgatctgaattgatcaa

SEQ ID NO: 90948 - DNA, 570 bp, Zea Mays
attcactgatacattcgcttgtggtttcatcccatcatggccataagcccataatacccagaacgatataccctccctcatgtattattagttgtctccatcataccatgagtgtgcgttagtacattcttcgaccttgagacatggtcgtcatggactcattgtcgatagatgtggttttttacccacacacaataagccattttttgacctagtctatagtgggagacaaactaagggacgaccattgtagaatcaacaaaagacaactcgagtatgtcaagttcatggccacgagtctgtgtacctccatggccattgatctctacatcttttactcctttattttcaagccagcttgtatatttgcatctgcaccaccgatcatttatttgctcttgttttttttggctctcgcctattgccatgacatgtgagttgagaaattgtggatcttattgcccacttttttttaattgttttggtctatcgattctcatctaataatgtgatgcatggatcgaggaaccatggaacccatccgtctattatttttgttttgaccctctt

SEQ ID NO: 90949 - DNA, 363 bp, Zea Mays
caggggttgatatctgacttttccaggggctcctatgaaaataaccatggtcgaatgggtattagggcccgtgggccattcgatatgaaactagcggccatgattaaatcggttggattataaaagtggtatttgttgggggttttcgtcttcctaaggtcctcaaaaacacggctaaccatttgttatcagcatattactaaagttacaggagcttcagagtcataacagctttggcacagaatagtggaagcacagcgaagttagcttcgtcacaatgacgtaggaagacgatacaagaagaaggtgttatcctagttgctagaagcaaatgacagtgttgtccttgtggtatttgtaaac

SEQ ID NO: 90950 - DNA, 508 bp, Zea Mays
tgagcatgccctatcccctttgtactatcgtctgctacatatatcataacccagattgaagattagccgtagaaatcatcgggtggggcgtactctggccatggcgacgccgtggcaggtggttcagcggccggagttggtaggcagagtcataaccgtcggatcccgtgtcgacggtgaggattagatggcgcctatcgattcggctcgtgcatatcctgaccgtctgatcttgatcgggcagatgtggtgtgatcgggcgtattttagaattgtaacccttgatcgttgatccaatggcccacattccataccgcttcagtataaaatgtgatctaatcctagcctctggatctgatcggaacgacccacatcagcagatacccctttgcgactgcagttttacataagcacccctcaacttttagtgaaccaacctgcagtccaccctgtatgtcgcctgagccttagtaacatttgcaccagagcccttgtactctttagaaat

SEQ ID NO: 90951 - DNA, 935 bp, Zea Mays
gtactttaagccctggccccttggttactctataaatactcatgttcgaaaccgggatgggacacgcttgataagacattgattgccatagttcattgctcttctcactgttttgtctcaattgctcttgagtgcttgggtccacctatcagaacccaataattgttgcttgatgtgcctaatgataagttttggctcaaatttgatcttataaaaaagtaaccatacatatgattagctattaatgtaggtgtcatattgcggtgtgattgctacacacattccaaagtacaattatgttccctaacgaccgagcggtgctaatgaatcttctatattcctttgtaagcatgaactcgcaaatgacaaccctccattacacattgaaactcatattcattgcttcgagactttagcactctgaattccttcctcaaacatatagaccatcgcttcacaacctccttgatagcatcaaggttaggaaatttagcaccctatacaacaacaatgacaccaatgtgccactcatgacacgattaccgaatccatgacccctccaatcagccgacactacatagccctcatcatctaatgattcgcctgaatcttctatctattctgcttcgatgtcttcatttaacatttgttgtactattcgagtatactctcacattcatcagcaagccctgtggttcaggttgactaacacgatagcctacttctttagcatcatctccctcttgttgtccttgtgatcctgcttcaccaccggttggagatcctttaactacaccatgtgccttcccgttaatcttaacaagcattgcaaggtaccaatcacccctcaaagttgcctccatttacatcttctaatctaaaggttacatatgtgcttcaattcccataggctagtcagaatggtcaaggtttgc

SEQ ID NO: 90952 - DNA, 377 bp, Zea Mays
gccggtgcaatttttagaactagtttaactattaatgtaattatttgttattttactaaagaataagtggtaaaaaaccctcggtagctagaaaaatctaaaaacttgcatgtacacttcattttggtgtacaatgttgacaaaaaaatttcaatttattctgacaaagtggtgacatacatcctcagaaaaggcatacatctctcacatagagcctagttactcagtgagatatgttcatgcttgtgatggatctatactcccactttatccaaatcatttcaaactttaatgggatgtttattgaaccaacctatgatgttgtgtgcatttatgcatttttcagacctagtttaccaattactgtaattatttga

SEQ ID NO: 90953 - DNA, 787 bp, Zea Mays
gtttcatgatatcttcacctgtttgtcgcttcggaggcccatctctaaccctctctcctttccaaattgactttgtatcttttccaaaaggatgattggcgggaaggaaacgtcggtgcatatcaaaaattgtttcctttttgtcgttctttaatctatatgcttgcaactcattcatacatatcagacaatgcatcctaccatggacacaccacctgcaccaaatgctatatgctaacggatcatgaattgaccataaatatgccgctcatagattaaatctacaattcagatggctatcataagcttccacccctttccacaacacttttagctcttcgaccaacggttgcataaatacattgattttcgtacacggatcgttagggctcggaataaccagagcaagaaacatgacctcttctttcatgcatttggtaggagggagattgtagggcataatgaaaaaccaatcaacacgagtatgaagtggaacttctgttgaaaggagtgaatccgtctgtctacaaactaagacgaacacttctagggtcccttgcaaattctgcatcaaaacggtccagtgcctgccatgcttcgccatatgatggatggaccatgatatccagatcttggtcctgatgatccccttccttatgccatctcatttgctttgttgtctcctgatttagaaacatctgtttaagccgtggagtaataggcatgtataggagctacttgattgagacttttgtagtgacctcagtgccttccacgtccaccacca

SEQ ID NO: 90954 - DNA, 638 bp, Zea Mays
ttagggtcctaaccaactagtaaataataccacgtggccagagtctagatggtgtgggagttaacgcaagtgatttatcctggttcgggacttggaaagccctacttccagtagagggggatgaggcttatattactcacaccgaggtgcctgtagtacggattacaagcacgatgggagaggagaagtccccaaatccctagaactgattgaggcaagcgccaatatcaaagactgagtggagaactgagtgttcgtctgtgtgtcctgaatgtctctctaggggaactctactatcctatttatacatgaaggggatgtctgcagtgaagcccggtgtcattgtattcaaaggagagatgtcttggagccttgcaagccgacgtgacggtgcactgcattgttgacttgtgcccgctggtttcccgctgagagccaaggcagaggccgaggggttggccatacgtccgagcccctcagggaaggggatacccatatcgtagttgttgtaacagggttcgatatgggtaaaaagcctgcttatggggtgtgtcatcgtccttgcgtgtgatgatgttgtgattccctattgcgtttatcgaggtcagagccacgctcaggcgaggcgaaagtcttcc

SEQ ID NO: 90955 - DNA, 336 bp, Zea Mays
gtcagctagataccagcagaccctgaggcgctatcatgataagactatacgacatcgatccttcgtagtgggagacttggtccttcaccgaattctaacgggagaaggacaacacaaattattgccactatgggaagggccattcatggtgtcggaggtcactcggccaggatcatatcggcttactcaaatggatggcacggaagtagggaattcatggaatatagagcacctcaggaagttttacccttagcaagaactatcggagcaacgttgtattctgtaattggaaaatacgtcatcaataaaagatttcactctcaaaagcattcaaac

SEQ ID NO: 90956 - DNA, 373 bp, Zea Mays
gccattcccgaagtcttaagttagaggcggacgaacgttgccctcgaccatccggtgaaccgccttgagggcgttgcttgatgtgacagatggaaaaccgaggcagcactgtttgcttagcgcccctctagtctcagttatatagatatattgcagatagagtaataccccagtggtgaaggcggcagggtccctttcaccaggtcacgggttcaaaacctagtcttgcaaaataatccatcgttgttcctcattcactctcgggttacgactcggctgtgtgctaccctcagacctgggtgggcttttgcagagtgggcagcttgaatcggcacagggttcgggggtttctcggtcgggacgttaccgctgc

SEQ ID NO: 90957 - DNA, 368 bp, Zea Mays
ctggttgcctcaatagcatctaaccaatcatcatttggctcgtcgaactgacttctgtagcggaaggtgtatttaagataaaccaaaccaccctggctggagccagcagcagtttccttcggcatctcccactcactcacaagaggccataccttggaagtaatgtgttcttgtaccaaatccctggaaccaatgtaagtacatacggtgttgaaagccattaggcacgcttgcacctcattcccaattgcaattgatggtcttctaatgccgaagcgcgaccatatgggacgttgaatgatgaccctcacatcctccctctaattcagatcattctttacagagaaccattgcttcatccaagagcc

SEQ ID NO: 90958 - DNA, 1072 bp, Zea Mays
agacgactaatctctaaacctcatcccttcgggtcttgccggttgtcgctggccacttggcttggcctccgccacaactagagagtatagagaaggcaatcatgcaaagcagtaggctgatgttagtggcgccgaccaccagaaccatgtgtcacaatatgggcgtccacatcggctacaaaaactaggtccaaatatggttgacctaaatgtatactacattagatctcgtggagattatggtcaccgcaggggagtgctatgcttagtaaccagagaaacccaatagacgactatacctttagggaatctttgtaacaacttcatagtgagaccctgctatttcacctttggagtgatcaaaaggggagtcatgatcctcagggagaaagagaatcatgactcgtaggcaaagtgtaagccatgctcatggttaagaacataatgattttcctctttgattagagtttatgtggtttgtttattataatgaacactcagaagttatgctctaaggttaataagtatggagtgatgctaagctaatttagtgttaatagatacatgactgtctaaaagcaatcgctagcgatctaactcttcataaagctagtccaccttagccaaacaggacacttgtggagtacgctatatactcttgctttcacacaaacaacggtagccctcaatgcaaccactgcttaggcgaagttgttgatacaaatctttaggagttctaaggcttcgatgagtataaatactaggccagcgatctcccctattcagatgcttatggagggtcgtgctaccttttgtttccatagtttatgttttaacattataacataatattgtagaataatgttatatttatgtctttgtttgcaataaggttaaatacttattatattcatgcactatgttatgatatgatatttatgtaatcactatgcacgtgatttcgatcctagtacgtgcatgggtcacattcaatttgtcttctctgaaattgggtgtgataaccataataatgttgtcgtatggtctgttacataccatcagactagtccaa

SEQ ID NO: 90959 - DNA, 486 bp, Zea Mays
caaataccttcacttggtcgaagtgtagacatttctggcttgtcgtacccttgccccgtctagtcgaagtagagtgagcgcactattaggttgcagggaaggttgacacactacgcatgtaggggtgctcaagtagcggcggcctgtcttcttcgcctatcacccttgtccttggtaacgcgcgggctacaaggggagtcatgatgatagtagcccaagcgtcacagtgagtcaatggtattgtctcggtaacacgcgagttactgtgcggcccatgtactccggacacaccgcctgccactggggcgggaaggtatacatatcatctgtagttaatgtagaggcacactacactcagaggctgacgtcaggctttctccaatgacgtacatcacacatcgtatgacacgcggtagcaccgggacttgcgttgtgtggggagtagtgactgagagtttgagacgtcccttcattatatcatattcg

SEQ ID NO: 90960 - DNA, 507 bp, Zea Mays
ttggcaaccactcatcacaaacccaaatcaaaagtgacaagccagccttgttttcgcaatctcccccatgatgagtgcattgtcaacaccaccgcacaaacacacagatcaacaaaaaggaaggaagtaagaagaagaaactcactcaaatgactagaagccagacagaagccaaatgcaagtcatcgagagtgagcaaagcttggtccctaaagaaatgggcaacgactcaacacaaccaagcaagaatggctagtccacaagaaaagacaaaaatgggctcaacaccactagccataaatcagacccaaatcggagcaaaggacagagcaatagagttgaaagcaacactagtccctctagaaagaggcaaatggctcaatacaactagcaggaactcccctaacaaggaaaactccccctgaagacaactcgccctaaagaactacacatacctcatagaaaagtttgcagatgtgtgtgtgggtgaaaatgtcccccttgaac

SEQ ID NO: 90961 - DNA, 674 bp, Zea Mays
atttccctggagtgggcctcaaatcctagaacacgcaggggtcctagcgcaaagtgtcccgagacacagcaaaaccaggccgtggactgcgagtttattaacagcttttccaggggctcttttacaaaatgttcaaggcgaaagggtattatcggtcgtccgattagaaatcacgcgtccagattaaatcaacagacgcgcgaaccggtacgccatgggatccacatgatctaagatcaacggtcaccatttaatgaatacagagataagcgcctatcgtccgattcgagatcgacggcccgaacgaagggggtatcactgatctaatcagaaccgttcggccgtaaatcaacgaccatgggttcatcacctccaccgctggccacccacggcggcgctctgctccccaacggtggagccattgccgccaacagaggccgtgcgccaccgctatcccaaactccgattgaacagggcaacatgcatggtagatgatggcgaatatgggtaaccgagactcaccggtgatggcgtgcccaaggggtcggtctgcgacagtatgcggtcccacggtggtccttcaactgcggcgaggaattcaccggagttccctgtctccgctgacgtgatttcgccgcagcagcaacccacgcaccgcggtgacccgtccaggc

SEQ ID NO: 90962 - DNA, 619 bp, Zea Mays
gaaaggagcaacattcacttgggctacacagataaggtaacacatgccctttgctccaacctacaaatttcaataaaacttttgagcttgaatgtgatgctagtggaattggattggatggtgtgatacttcaagaaggcaaatcgtttgcttagtttggtgagaagttgagtgaacctacctagaattattcaacttatgataaggaagtatttggtaccgtaagaattattgattttatgatgaggatacccctctcaacaatacaacccttattgccccttcgcaccctacaacatcttttaccatggccatggggcatctcgtgcattgccccctgggcacctcgctcatcagcccttagggcacctctcgtgtcttccccctagggcacctaactcatcgacccttggggcacctcttgcattggccttgcacctctcactctgatccttgaggtcatcgaacatcagcccctaggtcacctagcacctcgactcctaggtcacctctttccttggccattggggaaccttatgcatgggccctcatggcacctattgtactggcccctatgaaacctcttgccccgactcctggggcacctcgggcatcaagg

SEQ ID NO: 90963 - DNA, 282 bp, Zea Mays
cactcaaggggcggaaggaataccccaacaagaacaaagcaaggggaaagtgtgtgcttcagttgtggtaagtctggtcattttattgcacaatgtcgtgataatgatgaccaggctaaagacaagagcgtcaagggtaaggagaagaagttctatacgaataagaagggtgaggtgcacatcaacaaggagtgggactcattgctcttcacccgactccaacgacgaaggactagccacctctgccttcaacaaatcaactctcattcccaacaagtgcca

SEQ ID NO: 90964 - DNA, 327 bp, Zea Mays
cttctttgtcctctagaaccctagtttcttcatgcttggtacaacaaatacagttaggcatggaaccgatttagaacaagtggagttgaattggttctaatgaatagtattctctcttgttcttacagtctctacgtggacaacacatgaaactaatttgcttatgtctcttagccatcttcagaaagcaatgaacacctacaatatattctttagagcttcgatccatggtgtacatccattaacgatccatctacattatttttataaaagacataagagaggatgaacttacaaattttccccggtgtacatccattaacgatc

SEQ ID NO: 90965 - DNA, 516 bp, Zea Mays
cttaacttttacaatctgaatctgactcacctgcatcccaactctattctgcaaatttctgtctttgttcatttgtgcgaagcctaccttggaattcttcctcacttcagtttgtggaagtacttgtatcattgttggcatgggatggctggggggcagcaccagctcgtgggtggtgcgagtctggagatgtgctgtgggaggaaaacggaataccttgacatccaacttaaggatagcattaaaggatgacgcttagagtggttcattgtggaaaaccatggcaagtccctcccccctcggtcagggagacagacggatgttcgtgctccaagttggattgggtcccccacagacttggagatagcagaatccaaggttctgcttgctgaaatttgtttgttgaaggagagaggtctgactgctgaagctgtggttgcagactttgtttttaagaatattcagccactgaaggacagagcatacccggcttatttgtatagtggtgtcaccgac

SEQ ID NO: 90966 - DNA, 280 bp, Zea Mays
tacaactacaccgtttactgagggggtgtagggtaaccggtggagctgagcacctcccacaagatggaagggaaaccctcatgggaaacgtagttggaactaaaacgagtgtctcctctgttgatgggggtgggtgaagtcatctgtgaaagagggttagatataaatgttatggtggtgcaaaggaaaatcatgtgcccgggttgttaacaggaggtaggttaaattagattctacttcttatgttatttattgttaaccctatttgctacattcacac

SEQ ID NO: 90967 - DNA, 651 bp, Zea Mays
cccgttcatctggtcactatctgcttgcgtcgtgtctagggtatgtattgtttgatattctccttctcgaacaattatgttctacgaatgttcgcgtcagctcagttttcttacttccgtagttcccttctcgggcagattcgattctgttctgagaggaaatagtttgtgtcttcgtcagtgcttaaacatcaattccacgagtatctgctgcctgtgctggtttagttggcatgtcgtgattccaaaagtaggaaagtgttatcgtcagtgtagttgaaataattagcagtgacgctgggcaatatatatgctcaaccaaaaaggggttcggtttcatcgctctaagctatacatgcttctcctccccggccagttatatattttattttgaacagactgttgggccagacaggttgttagaacatggtaggtgcactactgcatgtgactatatcatatttgcatatctggccattatttccccgctccattgaaaaataagcatgtcaagataaatatttctttccctgatcgtacaaatccacgacatgaagaatgatgttactactaatcattgtttttatatagggtcaggcgattctcttttcttggatacatatatagcaattgatgttttggatatttcgc

SEQ ID NO: 90968 - DNA, 510 bp, Zea Mays
cgacgggttgatatataaaaagggaaggggctcttttacaaaacgggatcggcgaaggggtattagatgattctagccgtccagatcagatctcacgaccaggatagaattacccttaatacgaattgatattaaggggaaccatcggtttgagatccgacgcccgacgttttaaataaccgagatcccatatgattcttccagccctagattgatggttcggattgaaacaccgaaaaggtatagcccgctctaatcttggcccttgatctgagatgaacagcccagagtgcttcttccaccttacgaccgaggctgagcaagggccaagggcacccaagcccatgccagggagctcaccggagcaccccaatacggcattcccgggcccgattatccctatggcagggaaaaaataatgcggacatcatggcgaagcaactgtgaaggagctcactgtggatgacatgcgtaggagcatcaaccatgacatagggcggcccacggcgg

SEQ ID NO: 90969 - DNA, 582 bp, Zea Mays
ataagttctggatatatttttatacacaaaaacacttttctaaattattttctagaatttcctaagcttacggactaggcacaatatttcttaaaagatcaggggcctaaatcacaattcccctaagactatgattcctggtgcaaggacctcgggttattattaaaatgtccagggtctcttatacataatcccctggctgaaggggtatgatggattttgagccatccgatctagtcccaagggcccagattagaaatccggccactacgaatcggtacgaatcttgatatgtccgatacaaaattgacggcccagatccaatgactaaaggtttacatcctcggtccaatctcgcccctctatcccacgatcgacggtcccaattgatccagccgaatcgctacacagtgtttgatcacagccgttcattttagaccaacgaccaccacgctgtccactacttcccaacgccgacccggtgaaacaccgctcttgggtacagcggcgccatggccagtgcgagccgagatacgattccaatgtccaaacttagattagatgaacgctacgcgtagagga

SEQ ID NO: 90970 - DNA, 558 bp, Zea Mays
caccacaacagacaaccccatggagtcgtctgagtcctcggaagacgccacgggggacgctggagtaggcgaccaatcatactcggagtaaacctcctccgagtactccgagtccccgaagtgactcggaggaagcttgtgtttcccatcagcacgacggggccatcccttgcttctcttgcctctgcccatggtcgtacagaaggaggagaagtgaagaggaagaagaaggcaagtgatcaagagcaagtgaagaaagaagatgaggcagtcgggctatttaaagaggccgaggggtgaccgtccacttcctaccccactcaccgaacagtcacaagaattcaataagcaattcaaaccgcctgaaaatgagtcaggcgtctgggcgctgttttgtgtaacatggcaccagttggattcaagtcaacctctcaggcaaatgattacacctctccatcatgtcaagttactacttcaggacaacgcgataaacaccttttgtggggcagacacccttgaactcttcaagatttttctgaagcggggatacatgcaaaa

SEQ ID NO: 90971 - DNA, 366 bp, Zea Mays
ttggagttggatgtgtatgacctgattttgggttttgattggctgaaaaagcatagtcctatgcaatgtgattggctgcagaatgtgctcacatttgtggacaagggagtgattgttcagctaagaggagatgcgggtcagtagaaggaggttccacaaatttccattctacaagtgaataaatggttgaaaggcaatgaggtttgggctttagttatgctggagcaagtggtggataagaaagaagcaatagtccctgagcagttacaaaggttgctggtggagtttgaggatatttttgctgtccctactgggttgcctccttccagagattatgatcatcatatttctttggtaccatgacat

SEQ ID NO: 90972 - DNA, 301 bp, Zea Mays
gggggttctgccctaaaagttattattgctagcatctatataacatgctcctatgccaaaaatcacagaaggtgacttaatggttattttgttgtgattttctaaagtttaatgccataatggtacttataactaacttggtatttgaaaaatatcaaacaacagaacttgtatttttcctagatttctattagcataatagtagtcattcctaaggttggggtggttcctccttaggattatttttctatgatttttataagttctcattgttttttatcaaataaaaggtggtgcattt

SEQ ID NO: 90973 - DNA, 1271 bp, Zea Mays
acacccaaagggtgcgaagtcttctacgacaagcatatttctacatatgcaaaagtcgcctaagggtgcagctggattcacactaggcgcatcacaaaaagcgaagtcatcacagaagactaccaacagatcaatataaacatattaacgacgcccaagcgcacgaagacgctaccaggtgcaattcagcgcaaacacaacaaatgaaagacacattatgttacaattataaggtgcgcactatgcataagatattcaccccacatagatgtccccatagccgtcctttagcgaagggggagagggcagcattttcacttatcgtcgccaaagaacggcgatggcaacactcattattacatcggttcttgtttcggaataagaccagcttctcggaaattaaacaacatcaacctcaactcttccccatcaaaaaggtcccgcagatccccctccctgatacacgacccggacatcggcgctaataagtcatgatgggtcccctgatccagtcgtggtccgatccgaagacgcgacctctccatgcccattcgacgatgccttctaacacctcgcgaagactctccgacactttgtttcgatacccccatcttcttttcgcccccgcgggtcaccagggactacaccgatcgaagtccgcgacgcatcacgggggcgaccctcaacagagactccattgcagctaaatctaacgccgcaaaataatctaaaccatcctccgaggattcgttatctatccaagaaaaagggctccccaactttccaccttccgaagacaacgacccaacatcagattcgccagatgcgtcactactaggaaacactgcatttccatccatcaaaatatcatcaatcgtgtcatcgtcacggtttgcttgtgtaggcccagacaccggaacctgcgcagcaatcgatcttcagtatcacgcacaaaacgaacactgtcagtctattccctattacactctcgcaacctacaccgaagcgtctgccattgcaggaccctcagctccacctccttggagcaaggattgctcttctgctcccgcctccactgcagcatccttccgggtcaccgagctttcacggttggcgaggtcctccacatattcttcgttcatcgcctgcgaagacaacacaataacatttcaaacaacgaacacacacaacacccctcgccaaacccaaaacatacctgcgccagcgctcggtctgctacttttggtgttcaacacatttccccttgcctt

SEQ ID NO: 90974 - DNA, 1113 bp, Zea Mays
agccgactggaaatgattcttagaggcaaagtatcaaatattggtgctcctgttgcatattctgcttgaatctgccaccttctaagtcctttttcgattttgtgtccaatcctcctgctggtgacagtggtttgggtcttagagtgtgaccctctctcgaagaagttgaggttctggttgcttcacttggtgatcttcccaatgatgagaggcaagttcactttgagatgcctatgagttcgggtgatgcagagataagtgctatgctggacatgttggctggggattcctctgactcagtccctgctgaaacaatggctgttgcaactatcccagagcctgaaaaaaccgtggatactcaaaggccttagggtactcgctcgaaacgtctccgctaggtcagtcatccaactgcacctgccgaggggaagaaaaagaaaaagagacggcttcggcaagtgtcgtgcttagaccaggatgctggcccttctactcctgctgctgaagaagtaccggtggaactctttactggagctaatcccaatgggtgcggccctgctgatgctgatcccaatgggtgtgaccctgctgatgctgatcccaatgggtgtgaccctgccatagttgatcccaaagggtgtgaccctgccagagctgaacccaatggttgtgaccctgctagagctgatcccaatgggtgtgaccctgtgtcgtttattgttcgtattgttgacgaggacgaagaagaagaagaggaagtcccattaattcaaaagaatagtcggtgttatagagtcagtggggggagtagcgatattccttctccagctctgtctgctcttgttggtctgcaagaattatccatagcaaactttgatcaggctctcgaggatgttgttcctgaagatctgctatcagagccaactgatggtgatatgatggacgtctactctgacactccagatgtgggattagaggtgtcctgggcagcgtctcgtgcatcgtcgaccttggaaggcggtcttcggagccaagaggttggtcaaggtcgttcaattcccatggaggtgactgagaatccttcagccttagaggtggctgttgcagagaacc

SEQ ID NO: 90975 - DNA, 275 bp, Zea Mays
tcactaaatataatctgatttggcttaacaattaatcttaagactagcgacatatctcaccttatcaacatatcacttatttgtttcacctttgatgtactccctccatctcaaattacatagctttcactgtttatccactttcttttaaggtataagctaaggctcacatatgaacttattgctgttttacctctgttccctctattacttcctctctcacctgtgtgtactcaataactattctctattactccctcatgttttctgaggtg

SEQ ID NO: 90976 - DNA, 467 bp, Zea Mays
aaattagtggcgacaaggcaaaaaaatataggtggaatatgaagccatatagaatctcacaacctcaccactcttaccaaccaaagctcttatgaggtccctgcgggttgcaagaaaaatgtgtggtggtaacaataaagtcatggttaagcgaatacaagaccagagtaccggttacgatggcttatatgtggagcttggtggagaatagtaaacaaggaatgcaatctgaattctagttgttgtaaagttaaataaccatccaactagaagttcactgcctagtgctgaccacaagatacaagtgatgtaagtagatcaaatacacgcgcaaagaattttcacatttgatgcaaatcaaggagtatggttggaatgcaagtgttgcgatcagacccaaccaaaaatttgcaccaaatgacaatagaaaactagttgaacaacttgatgaactttcagcacctgtg

SEQ ID NO: 90977 - DNA, 1136 bp, Zea Mays
atctcatcaatcccttgggatggcaagacggttaagtctgccaagaatactaccccacttaaaaggattctgacttgggagcatttgagctgacatagaaggtctgaccctggggttcgggtgaccaagggaatctctagaggggtagagggaatgccatgcttctccacaaaactagtggctataaaagaatgggatgctcctgaatcgaaaagtacggtagcgggagtaaattcaacaaggaactcatcgagcactactcccggagcttgctgagcctgttgagcatcgacgtgattaactcgtgcccttccttgatactgggtcttgttctgctggctgatggaggagggctccttgggggcggatgctgaggtattcttggggccattcatcgagttggagtaggcaggtcctgatggcttcagccgggggcagttgttcttgaagtgtctgggatctccgcagtgccaacatgcattcgtcgggggttggttgcttgcaactgagggggcatgaaaggagctctgactctgctgactgaatcgtgacagggtgggtccagttggtctactgaagcttggtcccttgggtggaaatccaaaggatcgagttctctggtgccaatcttgctgctgagcccggaggacttggaatttcctcttgagatggcctttttcttcctcctttgccctttccacttgcatggctttattggagaggtgagagaaactaaggaagtcttggctggccaggatggtcttaagttctggcctgagtcccttcaggaagcgggccatcttcttgacttcggtactgatgtcatctggcgcgtagagagccaactccgtgaacttgtgcacatattcactgacacatcttctgtcttgagtcagttcccgtaattcgtcttccttgagctgaacgatcccttggggcacatggtgctcccggaaagttgtttcaaactccgcccaggtagcatttctaatggtaacattgaaggtatcccaccaagctaaggccatcccggaaagttgatgagcagccagttgaacacgctgattttctgggcatccgatggcttccagctttcttttaatcgtgcgcagccaatcgtcagcatcgaggggatt

SEQ ID NO: 90978 - DNA, 690 bp, Zea Mays
ggatgatgctacagctggagctcccaagcgacaggaaccatattaaactccatccgcacctttccccccaatcaatttcgctagaggtggtctatcatgctctggccacggtgtcaatgcgggtgatcaagtggattaaggtgttccggatcaccgaaggctgggctggctaaattgaagctagggaaaggttcctgggttcaccagagatgacgcacacgctaagctttgggctaggcccgagcaaaaaggtggggcgacggagagggtgtcatggcggtttttgacagcgcacgggtgcgttccggtgatgggcttcggccaaactccaaattgccgcatccaggagcaataagagatcaaagactaactaaaacagggagtaatttggtaattactgcccagaggagcgctggccacggatgtttcttctcggcggagctaagaacagaagagagagggaattggggctacgtgggttttccggtgagctcgagtcaagtgcttagtcgctgatgtgcgaaatgtggtgacgaaacagcgcccgcactcaatttataggccgtcggccgtagtcggatgaggatcggggatctctggatcgcgctggcaagcataccgcgcggcggattccggtgacagcgcggtgatcaccgtttaaccggagcctgccaccttagtgactcgctg

SEQ ID NO: 90979 - DNA, 411 bp, Zea Mays
gtctactgaagttgggtcccttgggtggaaacccaaatgatcgagtcttctggtgccggtcctgctgctgtgcccagagaacctggaacttccttttgagatgtcctttttcttcctccttagccctttcaacttgcatgtccttgttggaaaggtgagagaagttgagaaagtcttggctagccagaattgtcttgagttctggcctgagtcccttcaggaaacgagccatcttcttgctctcggtattgacatcatctggcgcgtagcgggctaactccgtgaacttgtgcacatattcgctgacagatcttccgtcttgagtcaattctcggaactcgtcctccttaagctgtaccagtccttggggcacatggtgctcccggaaagctgcttcgaactccgcccagg

SEQ ID NO: 90980 - DNA, 409 bp, Zea Mays
gggaggggagaaggggaggaagaggtggcatctgggttggcgatagcgcatggcgggaggcggtcgggagtgggaggaggagcaggcggggggcgatgcagtgcatggcgggaggtgtggtgcttcggggtggaagagctggggagggggatcgcggggagatgagcacgagatctgggagttgattgcgggggatgccgcagcgacgccatcgatggaaaggagtgctgtgggcgggcgggcgctcagggcagaaccgtgcaccacagccaatgtggacgtctacaatagagacttatgtagtagtagagactagccagctgtccgtattttgctacggtttttatatatcatatctcttctctatctctaatatctattaagtcaatagtgtagaccacggcactac

SEQ ID NO: 90981 - DNA, 496 bp, Zea Mays
ttcgccttcccgccacagcaaccaaccagaacaaccagacagcgccagtgcaaggaggaggcagttaatgtttccattgtggggaacaaggtcactgcgcgaatcactgcccgaagaaagtagttcgccagtagctagcttttaacacctcagcaagacaaggagcatcacagcaagcaccaggagatcatggccaggcctacgtacaaccgtggaaaggtaaaccacttggaggtcgaagcaatccaggatgcaccagatgtggcagtaggtatgtttccagtcgaatcccatccagcaaaagtactatttgatactgatgccacacatttttttatttctacatcatgcgtaacatccctgtagaaccaatgattccacctttaagagttaatttagttgggggaaaggttcagtccgataagatgtgtccgaatctaaggattgaaataaaggaaactgtaataatcaagatacaagaggaactgctttagac

SEQ ID NO: 90982 - DNA, 414 bp, Zea Mays
agttcaacagacataatcccttttgcttgttatggctcccctgaaaacccacttagattcatattcgtcttaattagttcactctctttgtatcctaatttagaaaacacggatagcggcattacatttacacctgctcccccatcgaccaacatgccccccattggcttcccatcaatgtgaccacgaacatataatggttttagatgagatccctgctcatttgtttttcaaacacagcacactcagcccccaatgttagctcagcctcatctccctcttctgctctgaatttagtaggtaaaacaaacaccatgtttatatccatgtccccttgtgcttcagcgatttcttctttatcagaaccactgctgctatcatcatctttttcctccctggccaatcgtttctccc

SEQ ID NO: 90983 - DNA, 1071 bp, Zea Mays
gtagcgctcaattaagcgactagggaagaatcagtggctagctagggctaccgtgcttgcataaacttggacgaagaccacctagaacgaccggtctacggaagccatgtccgcggcggcgttcccggacaatactttcacgttcactatgctacaacgcggtagagttcaatcagttgagccgatgagcatcacaagcaaaagagggtgtagaaacacgaacaaaaaggactaaagcggacctgtgggtggctggccacgacgcggtgcctcacggcggcacagatgaccgatttggggaaaaatccaaattcgggcgctacagtggatgatttgaggcgagaagcggtgtgttgggcgcgtaacaagtaggcggagcaggggttgcctccagtttatagaccctagctgagcttatcatgaatttcggattgggatcgagttcaccgcggcctggatatttctatggtggcctgttcaccgtggcacgcgagagggaaatggttcacggatggtaaccggttgcttgccatgaccacgaaagtacggtgaaataggcgactatgtgtctttcactgcgatcacggcaaacaccggcggtgatatttcactaaccgcacggcaagtgggcatggcgatgatctagctcaggcctacgttcttctcacccaagatcttttcaccctccatggttatccacttcacacagggcacaaatcgcggcggccggcgtgaatcgcagcgcggagatcaccggcgtgacagatgcactgaacccgtgatcttgtttagtccaatgtaccatcgcgatccttttcagtcgttttgacagagcaacttgtagggcctcattctctaattttcgtgtgacaacccactaacccgcctatatcaaagttgttgcctaatatgccagcttcgactttgttatagggttcttgattagattctcactgaattatgcgcaaattgttcttaaagttcatcagaacacactgtcagtcgagtttcagtatcaggggtgactgacagcccaaatttaggtccatttttctccaatttccatacaac

SEQ ID NO: 90984 - DNA, 732 bp, Zea Mays
gagagttaaaagcatatggtaggatagctttgcaatgaaaagtatttggtaagcagaatgaataggccagtagctggttataatctgaagattctttagcagggcttaatctttgttttatgtccagattgggggtaactagtcgtataaggtgaatatctaaaggtaagatagagtttgtcaagatgagatagactacataatgtaggtcaaaagtttgtttgatgttaggtggggacaaattgattataccattcatcatgactcttatggttagctcttctgctcatggttgagttggtctaatatgctaagttaagttaacacctgtttagaagggtccaagtaccactaatctattttaagcagaccacattggagatcacactagatttcataatctatactactctataagacagtagtgtagacctcacacccatccgtggtgcacggttctgcccctctgctccgcgatcctcccctcccccgcatcgcgtgttgcccgccgtgactcccgccggcgtgatggccatgcttgccctcagctccttcgtaccacgattctaggacccgccatcagctccttcctaccgcgatttcagcagtcagatgcatggtgccttccaaacctaacgccttctatcgccgaggttccatccctccccgtcttgctcccccaggcttcggcctcccgaatatcaaaccctaaccctgaattgctcgagtgag

SEQ ID NO: 90985 - DNA, 670 bp, Zea Mays
aactcggtaacagtctcatcaataatattttcataaaaaattgaaaaaaactaaaattcagaaatttcggtcgttgcgctgctcttttttttcttcgtgatcgggcgcctgctcctccctttgttgtgtcccgcccgtcgtcgtcccgtgcgctctgtgactttccggacagggacctcccaaccttccgatcggggaagctgctgccggagacgtcgctgccgcggtgccgtggaggtaatggcatgagtagtaactagtaagttctcccgccgccgaggcaggaggcccgtctggatatctgataccgatggcgacgcgcaacccgaatgaaccaacggtgtagcaattggcatcgccaaccatcttgtccaaacttgttacggtagtagaccaataaagggagtaggtgtaggtcgaaatatattcttcgcggcatgtcgtacgtagcaccgcgccgtcttgctacagggtgtgctgcggccactgttattgtaagactatacattgaatttcagcatttatctatagtgcacattgaaatgacaccaggatatctttacgagtgatttctcatggatgagcagcagaaaaaggtaccgttgcacaaagcagactatcgtttccaatggaaaatataaataaatgtagatatgtggtttagggaaag

SEQ ID NO: 90986 - DNA, 1560 bp, Zea Mays
ttgaagccaagagacttcattgtcctgtccaacttttcattctaggctcgaggtgcttggtgtagcccatatagtgccctcctcagtttgagcaccttgtgctctttgctagtgaccacaaagcctgctggctactgcacatatacttcttcacccaattcaccatttaagaatgctgatttcacgcccatatgatgcattcccaaccctcatgtgctgcaagtgtaataagcaacctcactgaatcaagcctgactactggagcaaatacatcatcatagtcaataccatgctgttgtgcatatccctttactaccagttgtgccttgtgtttggatattgcaccttgctcatcccttttcaccttatatacccgtttgagaccgattactttgcgccctagaggaagatctgcaagtgtcaaggtctggttatcttcaattgatttcatctcctccatcattactttcctccagctcggactcctttctgcttcaccaaaggagactggttcatcagcacttactgcatgtaactcctcatctagcaacctccttgttgcataaccaggtagagttgtggattcaagtagtccatctatcttgcagaacctgagtggatcatcttctgctcgataggcatctagatattcatcaatatttccctccggtggtgaagcaaattccactccctgcatctcattctcctcttccaatacatgcactgcatcacatgaggggtcagaggggacagacccccagcaaattgctcatctttagattccccagagtcttgctcgtctccagattcctcagatgcttcttcctcaggatgtgtttgcttcctgatggcatattccattataaacacatcctggtcttcattggctgagttggtgtcccatgggtttcctagtcccactgggcctgctcatcgaagatgatgtcccttgaaacatggacgcgctcggtgatggggtcgtaggcgtggtacaccttcatgccttcttcatagccgatgaagatcatcttccttcctcgatcctccagcttcttcaaatgaggtacagtgttgcggatgtagacgatgcaaccgaacgtcttgaggtggtgcactgccggcttcttgccgtgccacgcctcaaatggagtcatcccatatacactcttggttgggcacctgttcaaaacatacacaactgtttttaccgcctctccccaaaaccagccagggagtttctttgccttgagcatactcattgttgttgctataatagtcccatttcagcgctccactacgccattctgttgaggactgtacggcgcagtgtgttgtcggtgaaccccaccagccgcacaatactccacgaactcacccgaggtgaactctcctcctcgatcagtttggagtgtcttcaacttgagtccagactctccttcagcttgcatctgaattattttcacagcatcaacaccttggtccttcgacgagatggcagccatccacatgtatctgctcagatcatccaccaacaagaagaagtatttgttacctcttggt

SEQ ID NO: 90987 - DNA, 376 bp, Zea Mays
agccgaagcaaagcagagtagcggattatggccatggtgttttacttatctaacaacagccattataaacaagaaaaattacactttgtgatgcaattatgattcttttagatcagggaggaaaccaaagtaccagaaggtcacaagactgatgcgaaaaaagtgtattatgtatgcccatttagaaactaagaacttattatgcagcatgttacattttgaaaagaactattaacttgccatgtatccttatacaggtgtattagcaaactcaaaaaccaatgaggaaactgagacaaggcaaactattatcaataaataatccaaaatcagctacgttgtccatggcaatgaacacgagcaagagtcccgaata

SEQ ID NO: 90988 - DNA, 622 bp, Zea Mays
tttttcattctttttgaaagcagtagtaggattgggactggtcttctttcccttgccctttccattgccatgagattgagatctctataccacgttggcactggcctaaccctgaacagttttagatcactcgtccttatctcgagttttatccttaacatcaagagaggcaatcagatatggtacaatatctctattgtcttatgcttgagtgcaatgtaaaaatctctccatgaaggagacaacttagcaatgatgccgccaacgacaaacttgtcaagtaggtcgatctttagctacttgagctcctttgccatgtattgtatctcatgagcctactcgactacatactttcaatcagtcctcttgtagttgtgatactactccatgatatacatcttagcaccgacatctatgttgccatagtcaacttcaagggtgtcccacaattccttagtgtctctatgatgaaggtagatctctaagtgtaccaatcacaacgccataaagagagtgttggcgtctgtataagccttctcctgctcgtgggtaagattaccctcatgtttgtcttaggatacccaaatcactttaatggaagaaagccacaggatcactctcg

SEQ ID NO: 90989 - DNA, 337 bp, Zea Mays
caggtcatacaactcacggtttacacaatggctctttcagcacagcatcccagtaatttgcttgggtgacctctagtttcagctaaagaaaaatgcatcaaattttgtcatgactccacaatctctatcgagtttcgatcttatcgcccgcagatatcgctcatgtgcaaaagctaaaatgtgtctattatttttaacacacatattttctctccagcattaaagagtacaactaatccagtgtgagagggtaaattatatctcggtgtcattttccctgaatcaatcagttatataagaatgtactggatggacagaatatgtactcagtactcat

SEQ ID NO: 90990 - DNA, 344 bp, Zea Mays
ctccaaaccatttgaagcctcttttcttcttcctggtttattcaacgagaacatcgaatttagctttctcggtctgttgggctggccaatttcctcgtgatgactgatgggatcagtgtttgaaactaggtagcataaaatggcatgttcattcagattatatgatcctattatgaccctcaggggttctcggtacaatatgcataccagagtatatggtgtttgtaccgcaacttaaatatttgtctcacaattgaagtggtgctttcatgctgactaaagcaggagtggttaagcgttttttactgttcgaatttgtcatctttgtgcatacctgctcgtgg

SEQ ID NO: 90991 - DNA, 445 bp, Zea Mays
catcaatctgcttcttaagctcaaccaactctggcccagatattctgtaagctctcttgaagatgggggcgattccaggaagaagttctatggcaaattcaactttccgctctggtggcatacctggtaagtcctttggaaacacatctgggaactcggacacaaccctgatactctcagttgggtctgtttcactgctatcgacagccatctgataacaacttcctttcttcggctcaggcgggactaactccgtcaccacttcctctcctaatggggacatcaacttgattgtcctcttatcacaactgataactgcctgatacttatctagccaattcatccctaggatgacatctattccctgagtacccattactatgagattagcgggaaacgctatcccccttatttccacacttacattcaaacaaatgctatcggc

SEQ ID NO: 90992 - DNA, 416 bp, Zea Mays
atcaaattggactgcggccataaaaatgagaaagtccaggggttgttttataaataaccagggccctatcgtaattactttatactcagcttggacgacgggttgattactcaaaaagtcggggactcttttgcaaagaagactggcccgaaagggtatgaagggtacctggtcgtcggatcaaaacgtgcgctccatattagaccagctccccgctcgaatcggtacgcaacgggatctgtccgatccatgcttagcggtcacgatttaaaatacacagatcattctgcgccgctcactacaccatcgacggcccggatgtatctactctcatcactacccccgatcgaatctgagtcgtagatcaaggattcgacggtaagtgcgctctcagtcacatccacctaactccggcc

SEQ ID NO: 90993 - DNA, 460 bp, Zea Mays
aaccaccaatcggtggattgacatgctaaaagaatttgagggacatacctagaattcccagcatcagcaatagccacatttgcatttttctgaccataacctttcttgcccttcctattatgacattttatggctgtgaccagattcaccacacacaaagcaagtcaggtctgcaaggtttttcttcttcttcttaaaattactgttctgcttggcctttggtttccagttcgacttgtttttgtttttcccaccagatttgcattcaaccacgttggcattagaggtaccactatccattggaccagaacagtgcacatccttaaatctcgccttctcctcaacatcaagagtagcaattagactttcaacagtcattgcctccttcttgtgtttgatagccatggcaaaattcctccaagtaggaggtaatttggcaatgatgccaccaaccatgaac

SEQ ID NO: 90994 - DNA, 523 bp, Zea Mays
gttactagggtcattagtatgatacatactatagggatccaagatgttcttatgaatggtttaccactaaactggcaattgattctcatgtggtctgggtagtcctaatggccctttggcccatttcttcacctttgatcttatgcatggcatgtggcaatctaggaccaatgattgtctaaaataatgttttaggtaagtttatttcctctttagtcactttcaatgcatatttatttacctattttagccgactcagaaaagaggacaatggctcaagggagctaatcagtgcgaccagtatggccgatccacgtgattaggccaaaatttgatgttttatttgttgttgatcatcatagagcaattcaccgatcacaacacaccctccctagttggtaggttaagacacatggcatctctggattgacaatctctagcacttagcggcaattagagtcgcattcaggagaggtgattactacaacatcgaatctcctggcttcacattgttggttgcctg

SEQ ID NO: 90995 - DNA, 640 bp, Zea Mays
cactcgagttggggagagaagaaacatggaggggagtcagacgggagagagcagtcaaagatgtatcaatgtccgctataggtcctacatttgtgcagtctaggaggcaagaagcatggggttattgggcctataaatcagattttttggctaggtataaaaagaatttgagctatgacctaggccactgccccaagtggcctggccccatatgtgtccctaagtgaggtggctcatcgccaccttcttgtgcgcatgttggcacgcatgggggattgatggtggtgtgattgcgtgggctcgccctatgtgtcatagcatggtgggtcgcctgcgtaggtgtacgcgccaatgtgccttactggtgatgcatcgccacgtcgtccatggtcgccaccatcgctagggttttgcctccgtggggcgagagagacggtgccaacgcttccccggtgggtttgaatcgacgcacgacaatggtttatctagttcgattgtggggatgttttttgtgtcggccttatgttaggggaactaaagcttcgattgatcgggagaaatagtcgggaggagatgtggggaaatctgggcatagcaatgatagagatgtggggcggtacaccgtggtaggtggggaggg

SEQ ID NO: 90996 - DNA, 770 bp, Zea Mays
gctgtatcgggcgggcagcagcggtctccaagggcagaaggaggggagaattgccgccacaaagaagaatctggcgcaccctcgtctgagccctggcctgtgcgtgccgatgttcactggaggttaagtatgttgtgtgtggcatcttcggtcaagaaaggtgactacggagctggcaatttctcgacgggctttggggaaccgagcgccgtcatgaccgttgcgcaacaacgaacttcatcactagtgagtgccctaattgagtttgcaggattcttggctgggtattaggcgttgtgggtgtgagattggagcactggggtaccgtgacacggtgctccggcaagccctcaaccgtgcggggcggaggagcggctattgccggcggctatgggtggaagatgacctgtgtgttgtgggatcatggacgaacggtggtgattaaatctttccttacctcttcgtctcatatagattcagccgttgcggggtgatcgggtggtggagattggattacgccaaaattaaatctggatcatagatctgaaatccgatgcccctggttgcctaccgatttacatataatctgggcacttgatgagtgatccaacggctcagatcatccaataccccttcgaccgtgcgtaatttgttaaagactccatggatttttatggaaccaacccgtgctccaccgcactagaagaaccatcgccaataggtcctaaactttatgttttaaaccttgaacttggttaaaatagtgtctg

SEQ ID NO: 90997 - DNA, 751 bp, Zea Mays
taggattttcacatattaatgtaacaggagtaacatttcatgtcatgaatgacattagaatcaatttcatgactttgtggttggtccacttcttgctcctttaattgcaaatgttgttgaccattgcaatgagctagttgtacatctgttgtgatccttctcacttgagcatggtgaacctcctaagcgctccttctaggagtctatcttagtgatcttgtcaccttcattcactaccttgagggtgtcccaaatctcctaggcagtctctaatccattcaccttgttgtactccttcctacataaagaaacaaggagtaccatggtagcttgagtgttgtggtggatgatttgttttgcctacaccgaattgtaaccctcactgtcgaaatctggtatctccattcctacctcaataacatgtcaaatacttggatggagtgagtataaatgtatcctcatgctatggctccaccaagaatagtcctcaccatcaaaatgtggtggtttaccaagtgaaactgatagcaagggagtagtagtgtttggaggaacacgagaataattcaaagacatttgaatataattcaatttaactatcttttgttggttgcgcctcttgtaggtggattcattattacttgagtttgatgttgttatgtcactctgtggtagatgatcttcttgaccttcttcttgttgtgctttctcttgtaggatttggaggatttgaaacccgagctaacggatt

SEQ ID NO: 90998 - DNA, 481 bp, Zea Mays
tggatagggggaatggttggggaggaggtgaaatacatggtaagagttacttaaatatgaatagaaagtacaaatgaggatttgggagaaggaactattggattcagccttatactgcccgtgccttacaacaacacaaaattcaataaaatattagtacacaacgattgtctgaaaacgagcaatacctgtctcactcggctattcttgcctcgctgcttatggaggcgcatggcggcggagagtcgtgacaacgattcgaggcattagccgatgagggaaggtcgaagtcttctatggcggtgaacgagggaggcacagacgggaaaaggatgtgaagttagggttaatatacggtaacaacgagaagaatgtggtggttgtaattagggctggatactgagccagctcagctcgactcggtcgagatcgagctggctcgggttggctcgtttagctcgcgggtcacaaaaaaaagttg

SEQ ID NO: 90999 - DNA, 694 bp, Zea Mays
atccttgggatgtgccaaaaaattgagggataactttgctaaggttggggcgtattcctctaaggaaaaaattcatccgcggcgatcctgatggggttgtccagtggatcagcggggaaaccgaagcttttgaggaaattctgagtgaccgaggagacttctgtgccttcgctggtgcgcggggggcatgtccatcttggagaaggctggctgcgaacatgctaaggctgtaatttagccagaattcgccttttcagtcgacttcattaaagatcctttagccgaagcttctgcactaagcggaaaattttattccaaggtatggatgaagggcaaccgtgagatagttgatgaagctattagaaagaatgaaaaagaatctcacgacgctcaagaagaagccaaaagagctaaagaagttgttgaatgtgcgagccttataggtacctttattaagttttagcttcgtaattcgtttttaacttcgaaattaacaaatattttttatgatgtagttgaactctcacccccaccagagccatacaatcccgaagctgacccggccttgaaggaagcgctagatatgatcaaaattgctaatgaagctgttgacgaagctgtcaacagactactaaatgaagccgccgagaaagtattgaaagaagattaaaactttgtatattggagagtttaa

SEQ ID NO: 91000 - DNA, 318 bp, Zea Mays
cgggcaacctactagcaaatcatcttcttccatgttttctactaaaaagctatcaacttctttcccgtcttgtgtcactgtccccctaaaagaagttccagcatcatccatgctataagactgaaatttagtacccatcagacttggatgaccttcaccagagagctgaattggtctgaacctggtgaaagatgcttctttaggcctgatatggtgaaagaggccgaggataaggttcagaaaattatccataatatgaagaaagcacaagctcgtcagaagagctatgcagacacacggcgaatgcccttatatttc

SEQ ID NO: 91001 - DNA, 3532 bp, Zea Mays
gtcaacttttaccgctacaatagcatgcacatccactgaagccaatattttgctcaacgatgagactgcagttgtgaagtcaacttttacagctacaatagatggagacacagatagcggcatctcaagttctacctataaagaggatgggtgcatgtttgaaaagggtagttccaagcaggatataaggatgggttccaatcaagacttgagccagattgataatgtattggttaaggaggtgattatattagaaactaatagtactgatgacatacagatgatcaaagaggtcatcatatctgaagttacaactcccaaacaagtggtagaggggaatatgatggaaactgaattagatgaggcagtccacagttcagaaagcactgcactgggagaagacgaggacacaaaacgacctaatacttttttcaaaaaagatgagggacagagtgcacgagatgaatatgctgcttatgacaatggcatagtgattgaacgggaagaaagtcgcaacaaagaaaaatttaccatcacaggcacagattcactagtggctgagcccaaagatttaccacatcttgacagctcaaacacttctttggaactaagttcagccaatgaaaatattgatcagcttcgtgcttgcagtagtaatgtcactgcagagcgaagagcaggaattgacacatcattttccagctccaggagtcagtcttctaatatctcttgtgcgaacattctaccagaagaatctaacttgataataaaccatgcttcaacttctgtgaatgcaaatacagatacaaccgattcatctcgactggtgctaaagaaaaaaccttttctaccattggcgacatctagtcttttttctccatcatctcccagacgcaatctgcttcgtgctgcatccacagatttgtcctttttttctccatcacaaacagaatctaagcagaactccgttacttctacaagtggaaggggtgattcagatacatcttctgtgcttccaccatttcagctctacacatccctgggatcatcatccaaaatgtctctagtacatcctactctgcgaccaataagaacgatttcatctctaccatcattatcatttggcacattcatagagatgtcaatggcttcttcaagatcacccaaacaccaagagcatgttagatctccctcaataccacaagatcaacatcttcacccaccaatgacagaggaaaatgatctacattcaggtagcttaactttgcctgcttccaaccaatatggccctcaaaccccacacccacctccactaccacccccacatgattcttgcacccaaagttattcgagcaccataatatatgaacctgaacaaataagagctgatggatcttgttcctatagtccagattatagacaaagtgttctcaacttaggtgattcctcactaacttcactctctaatagtagtatagctgcaactgaatgtcccttaggagcctctgattttgtagatgaggaagtaacaagtagacctaatatagtaactgccatggatgtcccatttaccaatgaagatacaaattctttgttgcacatgacttgttcttcacctcccaaaacattacaacgtgctgaaccaccaacgctgccgccaccacctttgcctctagtaccaccaccatcacaactaccactgccaactatatgcagtgatagtggatcagttccactggtatactcaaatccgtcttcagattgtccatataaagaaccaacaatgctaccagaacacaaatctgatgttccagctacttctctcgaaggacatgaagcaagtgaagttcaatttctgcaatctgatactgctgtcgaattatctccatcagagcattctgagtataaagttcagcatgtggttggaagcgctgaagatacaatttcaagtatgtcatcctatatacctgcagcacctccatatccaatgtttcacattgtaacagataattcctcatgttcaatatctgcagagcaagtaaattgtgagcagcctttagatcaaacaacattatcaattcatttgaggccatttgaggtggagatatcacaaggtgaaacaattaacggagtcttggcctctataattgatgataaagaacacggaggcattccaattctgcaattgccacaaaagttgcctcattctggagaacatatgaaatctccacctccacctcctcctcctccacaaccaccaccttgtcatgcaacagttataccttctttgtgtttatcttcaaaaccaccttctccaacagaacattacgaaaatccaccttcttcccctccacctttttctagagaatcatgtgttgttctacctccacttccagctccactcttgaatcatccatctcttcctggaaaacatattaatctatatccacctccaccacctccaccaccaactttacatcatatcgcacctgcatctccgtgctcgtaccaaccttctttctatgcagatatagcaacccaacctaccttttcagaggatattgtaatagttccacctccacattcaaaaggggttaatataattccattgccacctcctcctcctagaacaagtgaaactttgtctcaacctcttgatggtgggcaatcaacaggaccagcttctcttcttgaagttactaaagaaaacccaccacctcctctccttccccctgaaggacaaatgggatctccattgtcaactctttgtggagaaattgtgaatattccaatacctccaccttcacttcctggaggacatggagaagttccactatcaactcctcctagaggatgtggggccattccacctccaccaccctttactaaagggataggaggaattacattgccaattggatttcatagtggagacttgtcattcctccaatctaccagagaatctaaaggcccttcatgcttgccacctccacctccacctccacctccacctccaccaccaccactatcttctaatggacacataggtgatctgccaccaccacctacgagtgtatttgtagaggcttcgatccctctgccacctcaaacaggatgtggaggggatccaccaccgccaccacctactggaggacatgtagggcctccaccaccaccgccacctctaggggaatgtgcatgggatcttcaacctcccaaagcatgtgtaagggctcccccgccacctccacctcctggaggatatgcagaagttctaatgccaccaccacctcccagaggatatgtaggggctccagcaccacctccacctcctggaggatatgcaggagctccaccaccaccgccacctcctggaggatatgcaggagctccaccaccaccgccacctcctggaggatatgcaggagctccaccaccaccgccacctcctggaggatatgcaggagctccaccaccaccgccaccccctggaggatatgcaggagctccaccacccccgccttcatatgga

SEQ ID NO: 91002 - DNA, 408 bp, Zea Mays
ttgggttacagtttaaaattcaatatcgacagggtagtgacaacaaggtagctaatgctctgtcacgacggccagacatgaaacaagattcggtaacaatgcaactgaatgggttatctgtgtcttctataacacctagctggctacgacaagttacccaaggatatatgcaggattcaactgctaagaaattaatagagagtttgaccactggtgcaaaactggaacattatactttaactcaaggagtcatccgtttcaagggtaggatttggctgggagcgaacaaggaattacaccagatggttatgtcagcgctacatgacagtgctgttgggggtcactctggctttcctgtgacttatcgaaggatcaaaagtagctttgcatggccgggcatgaagcaac

SEQ ID NO: 91003 - DNA, 287 bp, Zea Mays
aactgattgcgcacggattccctgctccccgctctctaggttcgcaccaccttcgcccaaatcgacggcatcaaactgctccccgctctccaggttcgcacggattccctgccgaaccaacactgtcatgaacaataaagcagccacggaagttgaaccaaatatcattctcggcgctctcccataatctacctgcgctctgccaatcattctcggcgctctgccaggtacgcccaatatcatttaacttgtgttgttcctcacggttaaacttgtgttgttctctg

SEQ ID NO: 91004 - DNA, 677 bp, Zea Mays
cgtgagaaaggggctgacccaatgatgtgggcccacctcagtgttacaagacaggtcatcaccaaaccacgtctaggccttgggtatagtgtcgaagggtccccgacgaacgtcaaacagtacgtcatcatgtactgtcctaggcaaacccccactgatgtatggggccagtcagccccagtcatatggacctcagcgtcggagtctctatagtgacccgcataccggaagggacgcaacagatacaccatatagttgtatgcctatgcacgccggtaagtgaacaggcccatgatgacaccataaggggctgacccacggacccaccacacactgatacaaagatgtcagcaaggactcgctacaggaacccatatgacggacgagcaagacaatacaccatactaggggtatgactacgcatgaccccatcaggtgcactacgtcaaaccagggaaacagatcaccctcatacctgtagagaacaagtcacccctttaatgtcctacccttaaactatgaaaggtaggttctcctttttcgaggacacatgcacacaagctaaaaaaacgttctaccgcaataatatgatcaacactacactggactaaggctccagcttgaaccagtataaaccccatgtcccaagttcttcgctcgagtcccaacgattcacc

SEQ ID NO: 91005 - DNA, 817 bp, Zea Mays
gtttagggcatgggcctaggcgcctagatctaccaaggataggtgttgaggtttattcgtttggttttgttagtcaccaccttggaggggagtcctatgcttagtaactggagaaacccaatgagcgattataccattggggaatattcgtaaaggctatgtaaagagaccctgccgactaactctaggagtgttcaaggatctgtacaacatgaggcaagtggaaatcacagctcatgggtaaagtgtatctttagagagtgttttttgaaatcgatatatcagtcatgttcatgtttaagagtgacctggttttcctcttttattagagatattgtggtttggttatgatggaacaattcttgaaagttatatttcctgggttaatagttttgggatgatgctaaaaattatttaaagctaataaatacttgtttatctaaaagcaaccactattatcctaattcctcataaagctagcccaccttagccaaacagggcacttgttgcgtatgttaggcatccacccttgctttcacacaaacacccgattgcccttgctacaaccagtgctcaggtgaagaagctgctgaagtagacctctaggacttcgatgagtttgaagactatgtcaatgatctcccccagtcagatgcctatggagggttgcaagaactgaagaacaaacatgagggtgttaaggaggaggaagggaggaggaagtagtgaataaaagactgagttggagttagctgttctgttattgttactgttgatttcagttattgttggtcattgtctgagttgctgttaggat

SEQ ID NO: 91006 - DNA, 614 bp, Zea Mays
caataatttggaggttctagcacaacaatgatggtggtaagaaagaaaataagaatgacaaacataaagaatacataaggttaaattggttattcagctatttgacttcattgaggagagtagagacttaactatacaggaatggaacttcaaagaaattcttatcctccatctgcatgatcttttgtctaaacaacgaacttattggaaacaaagaggtcaaattaaatgggttaccctaggtgatgctggcactaagttctttcatgccaatgctactgtcaagcatagacacaaccttatttcatcactaaaggatgacaatggaaatatggctctttctcatacagacaaagaatctgtgctttttaatgccttcaagaacagattggggacttctcaacaaacatccatggtttttaacttaccatccttgattcagccgattgataatttgtcagaacttgagcaccccttctcttgtcatgagattgatcagatcattaaatgtctgtcctcaaataaatcgccaggtccagatggatttaatatggactttgtgaagaaatgttggccggtgattgcccctgacttctatgaattatgcaaaaaaa

SEQ ID NO: 91007 - DNA, 664 bp, Zea Mays
cataccgatggaagtacataattccctagaatcttgattgtcaaattgttttctattgtccactatcaactcagaggggactccgaagcgacagacgatgttctgctagaagaacttttgtgctgtatttgttgtgatcgttgatacagctcttgcttcaatcaacttggtgaaatattctactgcaacaaaagcaaatttgaggttgccttgcgcagtgggcaatggtccgactatgtcaaggccccatcgttgtaatggcatggtgtgggcgatcagctttgtgaactgtgagggggcgctttaggtgagaatttttggcacgcttcgcacgagcagaccactcggtttgtcgcacacaagatggctggccaatagaaaccctggcgcatgaccttagcggcgaggactctgggtcctgagtgtgaaccacatattcctctgtggacttcttggaggagttcaatgccctggggcactgtgatgcacttaagcataggttgatttattccctttttgtatagctacccatccatcactgcaaagtcatggcttcgatgcttcaatctcttggcctcgacctggtcagtggggtgatagtggctttgagggttattggtgcgcgccagtcttcggtcattattagatttacaattatgtggcc

SEQ ID NO: 91008 - DNA, 305 bp, Zea Mays
atgagcatgtagaacagatattccttatttactaagaacaaaatattaggtctaattaaaggtaagtattacaaaactccacctacacttctatatattatggcatcatttgttcctagaagatatcctttctaaagtgataacttcttacttactgatatagttgactagatggtccaggctatatgggctggcacgaggcacgaccattttggcatggcataggcacaacacagcacgataataaccatgcccaagctgagcttaggcccatcatgggtcgtgcttgggcttgtagacaagcc

SEQ ID NO: 91009 - DNA, 791 bp, Zea Mays
gtttggtgccgtcttcctaggatacttggagaatggaaatccagttgccgtcaagatgcgttcaaagacatcctctcaaggggataaagagtttctagctgaggtaggctgttctcttgtgcctaatcttccatatgtgcacttgaaaactgaaagaagatgttgttgttacgtattcaggttcagcatttgactagagttcatcacaaaaatctggtctccttgattggatattgcaaggacaagaaacatctggcccttgtctatgaatacatgcagggaggaagcctagaggactgtctaagaggtagcttaccattttacacaaatgtaactgtgttaagtttgttctgactatcaatcgcaggagaagcctctgctgctacacccctcacttggcatcaacgtctcaagatcgctctcaactctgctcaaggtttgcaaggctgaacatataacttgaataaaaaatacagtagtaacagaagcctgtatcatatagatcttgcagcatgtacaaacctgtatcttactctgtttcatatacttactagatctgaaaaaacaaggaactttggactggttacaaattgcaaagcaattactggttcctcacttgggtgcagggttggagtacctacacaaatcatgccagccaccactgatccacagggacgtgaagacgaagaacattcttctatccgctgatctcgaggccaagatagcggacttcgggctcatgaaggcgttcgctgacgagttcaggacccatgtcacgacgcaaccagcag

SEQ ID NO: 91010 - DNA, 330 bp, Zea Mays
ttcggatactgcaattcccgggcataatgtttggcttcagaaatttcttcttcggatagtctttttcccgaagcatgtctaacgatataatcaaaaccttcggagagtgcttcgggagtaagggattcggcttctatggccacatttttctcaaaagctatattagtatctggacttattcctttggccccctactcggttggggcaagcttcgtctcagcaggcactgagggtcctgcatcggtttcagcctgggttattgtagcttcaacttctatttgcttagtatcagctttgggttgcgttttgtcagctttggcaaccttccct

SEQ ID NO: 91011 - DNA, 890 bp, Zea Mays
gtggtcactctccctagcctcagtaaggctcgaaacgaggaaaccatgaagcacaaggttatcaacactaaacttctaatgtcatagttaaagttgtgaagctttgttagtgtcacgtaatgagaacatagaaagtggtgtttctatgtgcaccacaagtgcatgaagacttaacaagggccaccttatgcctcctcgactatcgaacttcaccatttgtcattgtaccacccctctgtaaaacctgatacatcctcatggtgtggtcaaaacactctacctcatgtgtggcaaccctagcctttgccttctaatggtggagctttagttttggagcccatctcccttgatcactttgtagtgacattgcatgggcatgccttgcgttgaacggggcaacaagcttgtaaaaggcgaatgatacaatagcattgatgggcatatcacatatacccaaaagcaatttatttaatgacccaaacatattgcatgtttggaactcataccttcatgcacctgctttatgagccattgtccatttgtccacatctctcaccaatcttgacatatattatttacctcttgcgttgtttgctgcttttagcttctctaacttctcatcaaagaacttaaactcaagcattcgagcaacctcctatatttgttggcaaggtgttgaatgcaccatccacacaaagtagattactggcaaggtgctgagtgcaccaacgacggtgtaaaggtggatatcccctctatttgttcccatatagcataaagtatgtcctactgtgtatcatacatgacatcaatctccctaccatggccaagcacatgtattcagatgagctagggatggcaacagggacccatgggaagaaaaattctcc

SEQ ID NO: 91012 - DNA, 382 bp, Zea Mays
cctctaccccacctttggatgacgaagaagaaatgtctttctctaccttatcctcattcttttggaaggctttgttatgaaacccctgagtctatcaccatactccttcaggttgataggatagtttattgaaataagctagatgcgatagacgataaaacagtgtcatactataataataacaacaatgtgatggtgatgtttgatatgtttgagttggatttttgtttgagtgcaatggtctgatggccataagagcattaaaaaacataaacttcagaaattcccctctagaatcttttctactcctcacttttctaaggacttcacctcctaaccaatcagatggtgaacgctcgtcaaggacccaacaacaaccgga

SEQ ID NO: 91013 - DNA, 898 bp, Zea Mays
attatttagttaattctggttttatccgttggtcgtagcggcaactttatctcactttcagctacgcgggagtcggcaccgcgttgttcgtagcaacgtcgcggtcgctctgtatgttcggctggcttgctgtggctttaatttgactatgactatggtttctacagtctctatacccatcagctgcagaagttgaacaagctacacaatccaacacgtgatcctgccagtgggcagcgtgaacctgctactatcctgcagggagtagtaggccttcaagtcaacctgctgtcctgcagatggagatggagtacaagaggccttcacgtgattctgcgcagcgcatcacccagttcacgtgatccggcgagtggtggctgcggagggaggtactccagcgagtggtggctgggaaccgggaggcgctccgtcggtagggaggcaggtggggagggaggcgttggcgagtgctggatgggcagcaggcctcgcaaccgagatttccatgcatcacaacctaaaaattcgttggatcagagagaaataggccccctccgtctttatcacctcagctttatagtcatatactaatttgttgaaaatttgtaaaataactactttcttggaagctattttggaatcttaactcctatatttcaaaataagacctattttgagactctcttggagacgctcttaaatcggggttcaggtaatatatgacaacactattatagttggtatagacttcacacccgtgtcctagtgtgctccagactttgaaatcatgcaccatggctactaattctagctcatgggtcaggtaattatacccatgcttcttcaactatcgtgaggcatatgcaatcactttcccatcttgcatcagcacatatcc

SEQ ID NO: 91014 - DNA, 600 bp, Zea Mays
ggggtctcaaatggtttatctctgtagcagtagcattgttcatctatttatagggtggtatacatcttcctataaaatcacaactatgtcatccttattacagatagccctttgtaattgaggaaatataattttgtcatcttacacccacgacgtgttatatacgacttttgttctacctaaagaccttctttgtctcctttccactcggaaatggtcctaaaggtgtcaaagcctcgctcctccctccttcggttcctcgttgctttcggcttcataacttgtacgaagctttggttacacccttcgtcttcgaagcttccttatcctttggctttgaggccaaatccacaaaaaccgtcgctagatggttttgaggctcaaccatcgaaccttcgtatgtagcatactccatatgcatcccacacatatataccacacacatgttgtgctagtcctcaaccgtgacaacaatatgatccactctaccatgccattgtgcatgctaatgtccataggtgttagaaaacatatatagctagtcactcggcttctccagtccatcagtcaagacctaacgcttgtgcttcaccactcccg

SEQ ID NO: 91015 - DNA, 653 bp, Zea Mays
aacaaccccagcagtcaaacctctatccttcaaaccagcaaacacaactaacaagatcttagcttcagcaaccttagagtcagttggggcctctatccaatttgacacctgggcatcaggttgccttccaaagtgagcaggcagagacttgtttgtgattctccatggtgaacctttgcaagcgccgccctttgatgctatccttcaaaggaatgtcaagatattcagctttcctaccccgacgaagttcatgactggcactgccaaccacttgatgttgccccccgccattccgggtttgtagtggtacaagtacttccacaatccgaaatgcgggctaatcccgaggaaggcctcccaaatatgaacaaagatggcgatttcaaggatagagttgggattcaggtgtgttaagttaagagagtataaatcgagaagaccacagaataaaggagaaataggtaaacctaaaccacggatgaggtaaggaacaaaaaccatagacttttgggtatccactgtgggtacagtaatccctttccaaaccctccaggaacacaattccttcgatgacaaaacaccaatctcgactaagtgaagcaagtttgtcttagagacaataaaagcgtaattaccgtagaagggaagttgac

SEQ ID NO: 91016 - DNA, 464 bp, Zea Mays
ggcgagaagtctccagccaggcgccgactgggctcgcagaaccgtgaatcagttcgtcattatcttgccgcggtcgatcctatctccaatccatctgattccatccaaatctacagtaccactgatatttcgtgagccatggatcttcaccgttccactgaaccgacctcctttctttcccctttctgttgattcttattaagaacaggttaacctctattaataagagttattcaccagataatggtcttcatctttactataggatttatggatcaaaactgcctggattctaagatacagtgctcgcaatctggccatatttcactgtgaccatttcgttttggaattcagtttacagtgacattataatcagtgtgactaagttctgacagaacaactttgcatcactggttcttcaatttctgttcaacaacctagaaagatgactgtaccaaaattac

SEQ ID NO: 91017 - DNA, 865 bp, Zea Mays
acgagacacgtcatcatcaaaccacgtccaggcatacgtgcgcataccaaaggggcgctaggatgtccatgtcgacacgacggaacgccactgtgtacggtctcaagcgtatccccactgccttgtggggtcagtcaatcccattcttggggaacctcagcgacggagtctccacaatgacctgcacacctagaaatgatgggacgatacactatatcgggtgtatgtctacgcacacaggatggtgacacaagtctcatgacaaaagacaaatccacaccacgcacgactttgaagcatactgtaaatccaccctgcgagacatgccatgcgctactatgtcaacatcggacttgctacatggacccgcatatcggacggatgaagcagtatgccataccgggagtacggctacgcatgaccctactagagatgtcagaaagactaacgtcactcgaggtcgagggcaacatgccacaccctcatcagtagagtacgagtccccactgtaaggtcctacccttgaactataaaagggcaggacccctccttcacacacacgcagctgtaacgcatccctcaagcaatactacgatccgcattgcattggactagggcgtaagcctgaatcagtataacctctgtgtcaaatcccctcctcgagtcccaacgattgaccattcgaaatgagtccacgttagcatcccaaccgaacataaattctattgtccccgatttatggaaccacgacaggtatatcgaaccgatggggagaggtatattgaactaaaaatagtttaaagaattatgatactatttcttttagcttatttccgccgtgataagttgatgcagactgtcaatt

SEQ ID NO: 91018 - DNA, 591 bp, Zea Mays
cttcaaggtgctctgtcaggtcaactgaagatgaatgccatggtacagtaactgaagaagatacccagttcatcccccttcgccgccgacgaccgtcacgctgcaattcacgtcggtcgccgtgattcatccgcggtgacttgtggataacggtgaacgagtaaagatcttggcgcccggatcaatttgggtccggccgcggctaggttccccggaccacttgctcatcggccgatcgggataaacctcgccgtcattggccgattaccgccgtgcaccacgtgctaaagtgttagaccacgtcgctgcgaatcgcgtctcgcatgcacggtgatcgcaaggtgtactgccacggtgaaagccactaacccgagcaccagtgatctcccacctctccgacagccgcgcgtctcaagcccaaattcatcggccaccgcttagcaatcctataaattgatggccgggtctgatgcgccatgtaatcacgaagccaacacaccagctattgcctcaaatcattcaccaaagaccgcgaatttcttacttcccccaatcctgtttctaccaccgcagagacaccctcaccgcggc

SEQ ID NO: 91019 - DNA, 636 bp, Zea Mays
gccaagatgcgcagcagaagaagcggaatgcccctcttcggctggtggacccacgccgagatgcaaatgtggcgcggcctagtgcgaagggtatctctccgcctgcgacgatgcctccccccgtggtgtcggccgctacgaaactgcccttgccgccgcgtgtgactgagactatggtgtcggggaccggggggacgagccaggagttgttagtggacgactacctggtgggcagagtcaccatgtttgacgcccagactgggctgccgtctgctggtgagttgaaaaacttaattcttcttagccgggtgattctatattttctaagttggttttgatgtaggggcagaggctgggcaactggcggtggtaccatctacggtgcccgtcggccaagtgggtgcagcaaagggtgacacagggacttcgccggacccatggccaaaattttgcatcgccgctgatggcggaggcgaacttgcctcgacggctgccgctgctagcgtagctgcgtctgtcgtgtggcagttgcgatacgtgtgttttttttgctgagtttggaaaattgtgatgtcaggtgacagcattcgccgaccaggttgcttcgggggcgctgacctcacaactgatttctaa

SEQ ID NO: 91020 - DNA, 417 bp, Zea Mays
ggccacactagtatgttcatggtaagggtaagtcaaaagagaaggggatcacaatgatccattcaatccaaaaaacaaccacccagcttttatcaatgagcatgcccccaatctttgtcaaaatattaaggacaagtttgtcatcaaactacgagcatttattgcaagttgtggtaaggattagcaagacatggatactcagtgttgtgagcctatctttagtgaccccaacatttcaacatcttctgcaccaaaggtaaaaatatcatgatgatccctaccctattgatgttggttacgctaagatgttagaagatcataaggcaattaataatagcaatcttatgatcactattaacttgattatgtcatgtttcaataaattagagggtaatatggtcaattatgttgatgatt

SEQ ID NO: 91021 - DNA, 674 bp, Zea Mays
gcagagcccaacgtaaggctctgatatggggcccactaatatggggaatggatgggatgcttacttgcccatgttagtggcaggtggcgtacttccccgcattaaatgcgtgcgacgcgtccagtctgcagtgtatggtatccactattgccccgcacgtttccaaggcaagggcattgactcaatgcgtcgctttggcacccttcattatgacctccattattcctcgtgcattactgaggaatgaagagacaggcgaaggagactgaatgacaccgcccattgcaccgctatgcatgacagcatatcatgctacgtcgcaacctacaccaagttctgtgtttgggacaaggtaataggataaggatgccaagagatcacacaactgccaagaggagatacgagctcaagaagatctagcaccaccagtcctatccaaacacctcacacttcatattgtaacgattcatgggccctcctgccggggcccagctcccttgtagcaagcccccttggactataaaagggagtgcacttgcattgtagcaggagaagcgacacacacacagactctcgactctcaagcaatacaactcataatggttgtagggtattacgctccagtggcccaaaccactctaatccttgtgttcttgtgttcatccaagcggtca

SEQ ID NO: 91022 - DNA, 682 bp, Zea Mays
taaacggcgacccccgtgccatcaccagaatccgccgcgcggaaagcttgccagcacatctgaaatccacacttcttccccaactccggtcaacggcctataaattgagctcggactccgcttcttctccacattacgcacctcagtgcttaagcaattgacccaatttcgccaaagaacttgcgcagccccaaatcccctcctcctttgttcttgctccgccgcatgggactccaccgtggacaacactcttcgggttggtagtttctcaattactctctgttctagctcgtgtatagtctcctattgctctctgtactgagcaattggaatttggccgaagtccatcaccagaacgcgcccttgccttgtaaaacgctgccgtgaccccctcaccatagacccgctcttcgggtcttgttctgcccaaaccaaagtatgtccatggaccctggtgaaaccgtgaacctttacccagcctcaatttggccatccccgtcgctgtttgatcggaacatgttcatcctcctgtccatccgctcggtcaccgtgaactgattgattcagtgtcccctaggtgaaattgatggaggggaaatgatcggggtggatctaattgtgtccctgtcgcttgggagctccagccgtggcgtcatctggccggaataggctcgccggagtg

SEQ ID NO: 91023 - DNA, 777 bp, Zea Mays
ccaagatgctccaacaacaaagatgttgacttgtgggcctgacttactcggactcagtttggggaacttggactcagctaagtaactcagactcggacaccaaggtactcggcccacatgtcagaacaagatcaacacacatgaacagataagggaagatgatgattctagataagggtgatatctttgtaacaacaacatatcactatttataagggagtctatatgtaaagataaagataagtcccctttctttgaggaggggacgttttacaccaatctccatcctatctagctcaaaagctagacaaactttctgtaatcaaccgcacctcgttggactataaggggatctatagctctcatctagggtagatcatcttatcacaattgcataggcaataggtatcacatcacataggatgtagggcatcatctcgcatcgagagcccgaacctatctaaatcctcgtgtcctttgtgcattaaccttcagttctcgatctcctgatccaccctattaactcactaccaaaatttccttgacagttggcgcaccgggtacaggtggtcacgctggtcatagtagatctatggcagcaatgagctttgcatcgggacaagagatctttttcggcgattgtaacaccctacttttgtaatgtgcaaagtcacctaagattatacaaacacatgccaatagatttggaaatggattcaattttttctttttcaaaacatgtgatccaaaaaaatcccaaattaagaaatggtgaaa

SEQ ID NO: 91024 - DNA, 1966 bp, Zea Mays
cgcaggaggagtcctcatgaagtgcattcacttggctaccgggaggcagctattagatgagattcatgtcggacagtgtggcgtgcatgtagcatcaaggactctgatgggaaggcttttagatccgggttttactgaccgactgcaaagaatgattccgacgagctagttcagaagtgtgaggcgtgccagttcctgtcaaagcaacatcatctaccagcacagctgctgcaaactattcttgtgaccttgatgtttgcatgctgggggttggacatgatcgggcccttcaagaaagctcaaggagtttatactcacatactggttgccatcgacaaatttacgaagcggatagagtacaagcctatcgcttccttgacctcagcaaaggcattggagttcattcagaagataatgttcaggtttggaatacctaacatcatcatcactgacctagggtctaacttttccagctcggagttcttcgatttctgcgagccaaggagcatctagatcaagtacgcatcagtggaacacccaagagataatgggcaggtgaaaagagccaacgggatgatacttgatgcactcagaaagaaggtattcgataaaagcgagaagctcgcagggaagtggatcagggaactaccatatgtggtccggagcctgtgaacccagccaagccaagctctgcatggaaacaccccattcttcatggtgtatgggtcggaggcagtgctacctgccgatctgatctttggggcgcccaggttaacctttgaaagcatagccgaagcagaagcaaccaggctagaggacatcgatgtgctggaggaggaacaactaaatgttgtaattcagtcggctagatactagcagaccttgaggcgctaccacaacaaagttgtgcatcatcgatccttcgcagtgggagacttggtcctctgtcgagtactaatgggggaaggacgacacaaactatcaccactgtgggaaggaccgttcatcgttgcagaagtcacacgaccgggatcctaccggctcacttagatggacggcaccgaagtgggaaattcatggaatatcgagcacctcaggaaattctacccctagccatacctcaaaactcttgaggacgagttgtactttgtaagcagaaggtttcatcatcaataataaagcttttcatcttccaaggcattcaagttcttgattgacaactgacttagattgggctcaactcgaaattagcacaactcagggtgatcgctatgccctactaacggagcaatcaacttaagtcggaaacaccttaagtcggtgcgacatgctcacgcttacacaactcagggtgatcactataccctactaacgaagcaatcgacttaagtctgaaactccttaagtcggtgcgacatgctcacgcttacacgactcagggtgatcactatgccctactaacggagcaatcgacttaagtcggaaacgccttaagtcggtgtgacatgctcatgcttgcacaactcacggtgatcactatgccctactgacagagcaatcgtcttaagtcgaaaacgccttaagtcagtgcgacatgctcacgcttacataacttagggtgatcactataccctactaacggagcaatcggcttaagtcagaaacgccttaagtcggtgcgacatgctcatgcttacataacttagggtgatcactataccctaccaacagagcaatcggcttaagtcagaaacgccttaagtcggtgcgacatgcttatacgtacacaagttagggtgatcactataccctagtaacaaaatagccaaatcgaatcaggagcacttcaaagagaaataactcgctcgcattgtcaagggtgttcttagcaccctgctgacggaacaataagttcaaactattacatacacatagaattcacactacactttttctctaaatagta

SEQ ID NO: 91025 - DNA, 816 bp, Zea Mays
attgaagccgtttggagcagctatatttgaccaacttgcgagatgtttcatgtgctcgatgatttggcttcaatagttagataggaaactgactgcgatttggagagaatcgactgtttctagttggaaaatcgaagtggacaagaggttctttagcatcttcttttgtgagagaatatcagacatttaggcttagtgaccccctgagtacgcgggaaaagaacagaaaatagaaaataaaaagcggtgttgccggggatcgaacccaggtcacccatcagtttttcggtgtatgattttccttgggctgatccagctattgtacagttgaattatgtgtacgatgaacccaattgtcgaggggggcaggataaaacctattttagttccctgatgttgaatggtccactaaaaccgatatgctcggaatgctgcggaatggcttgcacttgtaactatggttccgtttgccctagaaaatacaactatgagttacatgttaatttaaatgtctcgtgtttgatgaattttacaatcaacgtatttatattttagtctcttgtacaactctgaaagttgctccctgtttcaggctgtcgtgcttgcttcgtgggttttaggggcagggtgtgtgcgatccttgattgatttagtttaattcgaagcaagatgaacttggagattcctcactcgcgagggggaaataaacgatggttgtgcgagtaataaatttcactcctactacatggtaatacattcacttatgttctacaatgtttgtcggtgtggatatggcgcaattagtttcactaaatc

SEQ ID NO: 91026 - DNA, 538 bp, Zea Mays
gaatagctaatagccatcaagaatcacgtaacaccggtaagaggtaacacagaccaagggggaggtaaggtaacagagttcaagaatccggtaacacacagaaaggtaacacagttatcatatcaggtaacaccggtaaaaagtaacacagaccaagggagagatcgtatggttgcttcgagatcagtagatcacccaaagcttctcatgagtttgtcatgatatacaggtacgaaatgaggatttgagcttgaattaatttaatcacagatcattcaggaggactgtccgggcaattaggtcggaactaccgttcaggggcaaaattagtgttcaacacactttaaaaaaaatattcctctaataactgctcccaagaactagctagatgtcgcagaagtagagattacggtggcctactttgaccgagtacaaccgctagtgaagcaacatgggccaataaccaagaaacaacagctactagcagcgatgaccaaagcccgccatcggcctcagccgccgtctcatgtccacccgc

SEQ ID NO: 91027 - DNA, 428 bp, Zea Mays
ggacgcggacgacccaccggcgtgagcggcctcgagtcgccttttcctagttatctatctatctatcttcctcgcgtgctccactaattaaactgccacgtacgacatgcatgcatgttgtgtaggtccgcgtcgctaaccttgacaagttttagatagtagcgtgcagaccacgtttcttaaccttttcgttaacacgaactgttcccagcgtatcgaggacgactgactggcctgctgcacgaaaacgatgctgacaatatgggccaatacaactagctagtcctgcctttgtctttgatctagataagataagcacgcgcttggatttcttttgatccatctgcctttgtcaatcgctagtcgctttccggtgagctttttcttgctaagataaacgcactgcactcggtttaaggtcgcgacca

SEQ ID NO: 91028 - DNA, 429 bp, Zea Mays
aacaacgccacctccaagtgaaaacacatatccacttgtggcatatatctcatcagcatcagatatccaatttgcatcacaataaccctccagtagtgttgggtacccggtataatggatgcctaaactcatagtaccttttagatagcgccgaactctctcaagagcacgccagtgatcatctcccggatttaaaacaaaccggctaagtgtgctcacatcaaacgagatgtcaggcatcatagcgctagctaagtacatgagtgaaccaactatttgggaatgtctcaattgatccctagctatccttcgatttttcttcaatagcttactaggatcataaggtgttggagcaggttcacattcgctataaccaaagtgactcaaaaccttttccacataatgggattgcaccagtgtgatcccacc

SEQ ID NO: 91029 - DNA, 1467 bp, Zea Mays
ctgacaaccgcgtggctgatgctttatcccgccgttcacaccatgaggcatcctgcttagccatttcagtttctaccccatcctgggtagcccgagtggtggattcatacagccaggatgctcatgccacacagttgttagccaagctgtctttcgacaatgactttgtaccccacttctccttacaacaagggctcctcaggtttaagaatcgcatttggataggtgactgtgcactgataaaacaacaactggtagaggcttttcatcagtctcctctcgggggtcattttggcgttctggttacttaccgatgcctcaagcaagattttgcttgaaagggtatgcgatcttttgttcaagcctgggttcaatcttgcagcatttgccaacaggcaaaaacagaccgcactcgcagtccgggactcctccagccactggacattccttctgcagcctggaacaccatttctatggacttcatagagggattacccaaatcctcccgctacaattgtgtacttgtggtagttgacttattcacgaagtatgctcactttattcccctgacacacccatttacagctgttggagttgctcatgcctttttccacaatatatataagctccacaggctacctgctgctatagtatctgaccgtgacaggatatttaccagcaacttttggcgcgaactttttcagtcagctggtgttaacctccacatgagcagtgcttatcacccccaatcagatgggaaaactgaacgtgtcaaccagtgcttggagacttaccttcgctgcttcgtaaatgcttgtccgagtaagtggtccagttggctctcagcaactgagtattggtataatactagctatcactcttctattggtcgatccccgttcaaggctctatatggatacccaccaaaacacttcgatcttcgaaacctggactcttcttccactgaattgtctgactttctccaggaaaaggcggtcatctccgatctgcttcgtcagcacctcagcagagctaagaatagaatgaaatctcaggccgacaaaaaatgttcaaagcaggtgtttcagattggtgatatggtcttcttaaaactacagccttatgttcagacatctctccaaccacaggcatctcagaagttgtcattccgttacttcggaccttacaaggtgctggctaaaattggtattgtggcgtatactctagatctgccggcgtctgctgcgattcaccccacattccatgtctcacaattgaaaagagctctaccaccaatggctcaggtaacaccagagctccctgattctactgttcactcacaatttccagtggctatcctacagcgacgcgtagtcacccgcggactccgagcaataccccaaggattgatcagatggtcattactgtcgatgtctcttgccacctgggaagacttggagcccttga

SEQ ID NO: 91030 - DNA, 556 bp, Zea Mays
ttttttttaaaatcaacggtgttatatatttataaacagagggagtattttgaatgtattactgtctcagtaaaatggggacaaaaaagtttaaacatgtcacagtaaagtgaaaagttgagagacctagttgagaaatggcttggtctcatccatgtatggtgaaagattgataaaacagctgagaggtttgagggttgatgagagttcatacttcatttgtgcttgattatgataatggctaaatggacatgtcgtgtggtgttgtgttagttgaatgtgtattgtgcaacatgtcttttggttcgtaaaagcgtaggtgttgagtgcgtcaatacggtcgacgacgatggataagatcaagtacgaaattcgtgagggtgaacaagaatgggtgaatgaagggcggagtaggcttggactaaaggacaaagacactaagaatggaccgtgggtggctcatattaggctcatgaagagcaatcatacatgtgtgatcgagacaacatcgaccaagacaatgaggagcacaatggcatcatggcacttggtagag

SEQ ID NO: 91031 - DNA, 298 bp, Zea Mays
ctttagcaggagtgtgggccatgctggcattagcagtttcggtagaggcaggagctgatgaatttacggactctagaacagcatctagcacgctagccattctccttttccttggagtcactgcgggaatgcttgatggctttggcagtcctattgcacatgatggactcaacaccttcaattgttatgttgtcttctctaattttggctcttcggtcagatttgtactagcctcgactggcacaacatgacctagtcctgtggcaggagcaacccctgctcgttcgataagcttcgg

SEQ ID NO: 91032 - DNA, 357 bp, Zea Mays
agaaatttagggctaatttggcggaaggaaaattgtaggggatatagggagaaattgccttactattcaaaataaatagcaagagaattcctctcccattgatcacctcccattcttctcccaccaaactagcccataagaactaatggtgggatccatggggtttcctctcccatatattctctgtaatcctcttgttactaaaccattcgtaattgtacaatagtctttgttttaagtcatcataaactaggtgcacgagaaagacaaatggaattagtgtattcatgattttgcatcataaagcctttgtttggttacaagggataaaatctcgatttaatccgggtctggatt

SEQ ID NO: 91033 - DNA, 956 bp, Zea Mays
cgtggacactattattagaagtttcaggggcctaacttctaataacaggacctatctttaaatactttctaacggtgttaggacggcgggttgattagttaatttcccaagggctcttatataaagtatgcacggcgaagaggtaccgaggagttctagccgccagatctgaatcccgtggcctggattacaatctcatttcgatgatcctatgaaccgatcctacgcgtgggatgcattatcaatggctcagattttaagatgcacacaaccacccggattcgtccgatcacgatcagatctcggtcgcacaagtcgtatccgacggtcaagaatcgtcccctctattccgtctaggcacacggcagagcctccctggtcacggcggatttctcccggagaacgctaaaccgacgccagcgcacacccggactcaaactattagcctcttctcacttcgggcacgacgacggacacgaccgtaagggggcttaccaaagggttagtagcgtaggtgttctggccatggcagaggtcgatccacagcggaggaagactcctggcgagcaattaatggcgttggggtcaggatctccccacgacaacctgtccgatgacacccccacacaccgacgcccaccctggttcccaacaccacggaagaacaacaactatgagcaaccgaggtggcgacgcttcactccttcatgggcggtgtctggtggctagggcgaggcaaggaggaagggtcgacaggaatcaggcgcgcgacttttatagcccggggaacgctgctcctaacaaaccctagctggagccaggttttctcgacgatggttgcaatggccacgatcttcgcgcgtgccgttcgggcgaagctgcgcgcgagaagaagcacagggatgcggtagctgactctgacccggagaccccacacaacagcgaagttagcagag

SEQ ID NO: 91034 - DNA, 534 bp, Zea Mays
tatggtgcggtaaaccgatttgggggaaaaatcaaattcgtgcgctacggtggctaatcggcggtgaggagcggtgtgctgggttcgtaactagttagcggagcaagccggggcgtcaatttatagcgggcgactgcgagtacgacgaatttgaatggagaagagcccacgatgatgagggaatgagtcaccggagcttgctaacgtggcattcactgggcaaagacttacaactgtcgctggttatcctccaaaacatgccacgacgttgtgaaatggcttgaggcgtgtcacgaccgaggtaaacggcggcaaccccggcgacggtcgcatagccacatcgccggtgcaagtgggtacagcgacagagcggtaacagtgtccaagctcatccctcgcgcgagatattttactgccagccgttatccgcgcaccactgcgcattaatcgcagcgtcggcggggatcacggcgcggagatcaccggtggcgagttcactgaacctagattcttgttcagtccactgtaccattg

SEQ ID NO: 91035 - DNA, 738 bp, Zea Mays
caacaagtgagtttccaaggacctacatcaataccaagtggtctcatattcctatcacattttctcaagaagacctttgtctcaaggattatccacacagagacgccatggtgatctcatgtgtcgggggaattatccacaatcactaggacccgacagtcagagagtgcactgaggaaagagcccttgatctctgggacccattagtcagttgggagaggcggatgtgtcaacctagaaacgacccgccctagtcaaaccacgtggcaccgagccgggggtctggcatggcggaacttgacaagagagaccgggcatgttggaagggaaccacacgagtggatcttgtgctcggccccagactgtctcaccatacacagccaaccgtatttaaccatgcctgacactgagccacagcgcggcgctggtccgcttcccacttatgacctacgagcacctcgagcctcatagcattcatgacctacgagccccttagactatggcacattaatggcccacacaccccttggcctataagacacttatagcctatgggactaggcctgagtgcacagacctcccacagggcactacacgacgagctgtgctaagccctagctacgtaggctagaggtcagcgtagccaaaatgatgacatctaggaccacatggcccccatgtcatctaccatggtaaatataagatagccaggcagccccgggcccccacgagtacgtg

SEQ ID NO: 91036 - DNA, 1223 bp, Zea Mays
tggattaggggtgatcccaaatcaccgataccacgtgataaattttggtgtcattctctcactctttacttattactttgcaagtagttagtaatttgtgtattgtctatcatttgtagtattgccataattgcttatcatattttgttagcctatcatagctaggaaatttatatctcttattgtattgattaaatttctctagtgtttttgattttagttaaaatcgtctattcaccccctctagccggtgtcctagatcccacacttgagcggcaaagtctaaccctagtttggtgctacatgtctcgcttgactcagggtgcactcaagccctactttacgaaggcaatcaccaaaggttgcctctgacccacgaacaacattatacactctcgctgtgcctcgacaacacaaactcaattcttacttcatggcacaaatcttcttcacgcatagcaattttcctatatttcttttcatgccatcaaaatatccttaactaacatgcaggttacaggtaagttttaatagggtcttccaagttcaatactcaaaattacatggtcaaacattaagctcgccgaccactctgacaactcgggggctgggttgctgtcagcctcgtcgagtcactacttcgacagctctgcggctgggctgttgcccgcctcgccaagtcattgcttctccggctagggggctggtccatcgccctgccttgccgagtcattacttcatcacctcgtgtgttgcaccgtcgtgtgcctcactgattcggtgctcgccagttcggggactgggacatcacccaactcgtggacttgctgcttcaccggcatgggggctgggccatcgcctgcctcaccgacttgctgcttcactagctcggaggctatgctattgcccaccttgctgactcgctgcttcaccggcttgggactgcaccgtcgtgcgccccgctgactcgctgcttcgtcggctcgggaactaggccatcgaccacctctccggctcgctgcatcactgacttggggttgggccatcgcccatcttgctggctcgctacttcactagctcggggactaggccatcactcgcctcaccgactcgctgcttcccggctcaggggctgcaccgccatgtggcccgctgactcgctgcttcgtcggatcggggactaggccatcgcccacgctctctgacttgctgcttactggctc

SEQ ID NO: 91037 - DNA, 306 bp, Zea Mays
cgagagactgaatccgctcttgtacaaagcgagagaccgaatcccggtaatcatggtggccggaagtgaggcagcggaaacacttttaggccaaggcaagagtgcgagtggagcgagttttggacgagagggaggttgagggtttagaaggggagaggagggtgaattggtagaatgtgttaatacgcgcaggcctaggtgattcgatcgcgacgtttaatggtgtgggcgtggacttttgcattcaggatgtgggtggttgatgatgggacgcgcattagagagggtagacgtggttcgagcagc

SEQ ID NO: 91038 - DNA, 686 bp, Zea Mays
catcaatgtaagatggttaaactgaactattctcgcatgtctttcgataattctcgcattcctcgcaacataactgccccttttctttttgttccactcagcaaaccacaacatgaaaggtcatttatgctcactcgacccaactatttgggatgttcttgaactaggaatggagatcattgatagcgatggcgaggagtacaaccaagtggaggcagaacaaatcattcaccacaactcctagacaccacaatacttctttcttctttttatagggaggagtacaataagatgaatggattggagagtgccaaggagatatgggatatcctcaagacgacacatgaaggtgagaagatcatgaagctcaccaagatgaagctcctagaaggggagcttggggtggttctctatgaatgttggggggccacccttagttcaaggtcctcaaaacatttttcgacaattgtttctaagtttgtttcaggcctaatatgcttatcgatgaaggataccttcgtcgaagcaacatgcgactgatgattgtgaaagcacaagggtgaagcatcaagcttcggctccacaatatgaacatgtcgacaaggacagagatgaaatcttcaaagcttattcaacacgaccacgaaggaaatgttgacaatgcccttgatttattttataactcg

SEQ ID NO: 91039 - DNA, 891 bp, Zea Mays
cagaaaccctccatagtcaatgatcataaggatggaaaatggttggcagaggtccatggaaacatagaattcaaggaagttactttcagttatccatcaagccttgatgttataatctttcgggagttctctcttttcttccctgctggtaaaacaattgcagttgttggagggagtgggtctggaaagagcactgttgtggctttgataaaaaggttctatgatcctaatgaaggtaacaaaacacatcttcttagagaccgttgatttgcttccttcaaatttattgctccttttaaatcattggctaactttgtttgcattgcaggccaggttttgctagacaatgttgacataaagacactccagctgaggtggtttagagaacagattggtttggtaaaccaagaacctgctctttttgcaacaacaatcctcgagaatatactgtatggaaagccagatgcaactattgcagaagttgaggctgcagcgactgcatccagatccaatgcacatagtttcatatctcttcttccgaatggttacaacacaatggtatgtctatattttttcgacatacatctaagtctggtctaataaattaaatactaatttcttcattttttccatccgcaggcaggtgagagaggcatccagctctctggtggtcagaaacaacgtatagcaatagctcgtgctatgctgaaaaccccaaagatcctgctcctggatgaggctaccagtgcattagattcagactcggaaagcattgtgcaagaagctttagaccgtttgatggttgggaggatgactgtaattgttgcccaccgtctgtcgacgataagaaacgtgaacatgatcgctgtgatccaacaaggccaagttgtt

SEQ ID NO: 91040 - DNA, 1010 bp, Zea Mays
ctgatcattgccctttaaccctcaaatttcgagaggattgtaaagggaagcgcagatttcactttgaaggtttctggcccaagctccctggtttcaatgaggtggtggctgattcctggaatcagccaatgttggcaacctgccctttggaaaggctgtcccaaaagatcagaaggcttgctaaacatctgcagtcctgggggcatagagaggtgggtaatgtgagaaaccagttgggtcttgctagagaggtgatgccataggttggaatcagcacaggacaatagagttttgtcaggagatgagttttggctgctaggaaagctgaagcaacattgttttgtttatgcttatatggaaagaacaattgcacgtttgaggtccaggattaagtacctaaaagagggggatgcaaatactaaattctttcatatgcaggctcgtttcaggaagaaaagaaatttcatttcatatctagaggaagagggaagagtggtctctaaccatgaggatatgcaggaggtgctagatggttttttttccggtcttttgggtgctgattttcagaggcaaagcactattaatctgtcgagttgtcacagagaggccgtggatctcaacgatcttgagtgccccttctcagagagagaagtgttagacactattgcgtgccttccgtctgataaggctctagggcctgatgggtttacagggaggttctataaatcttgttggaatatcattaaggtggatctgctggcggctctggctatcatccaccagggcaatgttcagagattgggacaactgaattcctcctacattattttgattcctaaaaagatggacgcttcgtcggctggtgatttcaggccaattagcctaattcatagtgttgctaagttggtcacaaaattactcgctaaccgtttgggccctcgtctgcatgaattggtagaatctaatcaaagtgcttttatcagaggaagatcgattcatgataattttat

SEQ ID NO: 91041 - DNA, 716 bp, Zea Mays
tcgacatgtataattctgctaactgggctcctgagtaagttgtcttcacaggtataaagtgtgccactttagtcaacctgtctactgtgacccatattgaatcatagccatcccgagtacagggtagtccaactatgaaatccataccgatttcttcccatttccattccggtaccttgagaggttgtagtaatcctgctggtctttgatgttcgactttaactcgttgacacacgtcacacagggcaacattagtagccacatctcttttcaaaccgtaccaccaatacttttcctttaaatcctagtacatctttgtgcttccagggtgaatagagtaagccgaatcatgggcttctctcaaaataagttggcgtaggtgttcgatttctagtacacagattctttttttaaaccataatgtgccttgttcatcttccgtgaaatctggggctttacccaacccaatcaaagttttaatttccttaattttctcatcaaattcttctcctttacgaatctcttgttctaaagtagattcaacttccataaccgttgcttccatattattgagcataccaaggttgagttgttccatttcccagcacaattctcgtgacatcaaatgagtagtgatgttgttcacttgacctttacagctcaaagcatcagccactacattttcttttcctgggtgaaattgtatttccaaatca

SEQ ID NO: 91042 - DNA, 533 bp, Zea Mays
ctcaaaagagccaaacttggtctggtctggatcgcacagaaccgggtccgtgggtcctagccgtactgctcagtctcaagaattttattataaaattcaccgaaccatgaatagtacatgtccatgtgcaccagactgcttctccaacggtcgacttcggcacacaccagagcgccaacgactagctgatgtggccaacgatctggtggcgcaccggaccattctggtgccacgcagctatgaaaaccacccaatcaaatcccagactaggggcacgtgaacccggtctggtgctcctacaggaagctgatttctggacagttttacaaagaaggatgcaacgactcataggtcacttggagctacaaaaatagcccctaggtgcctccattcatcacctaagtatcccaagagcatcacaacactccgacatattgcaacaacgcatactagtggttttaatgagattcaagcaccagtttttagttattcttgtgaatttgtgtactcgcgctcttgtcaccgtgtttctt

SEQ ID NO: 91043 - DNA, 573 bp, Zea Mays
gtagtgtcctcgcgtagggcccggtgtagctttggccctggtcttgcgtctaccgcggcggcgtagctgctctacggctcctcccttttcctctcagacagcggcggtgtggatggaagggggcgccgacgatgggtgcgacatacagagtttatttggtagcatggatggcaggcacaacacctgtggatcgtgggtgtgggctcgaggatggaagggggtgcagatggcgacgtggggagaaggctgaaaggtgggcacggatgatgggggcatcgacgacgagggtgatggggcaacaccaatgttggggcgatgttgggcgacaaccacgatggggacattgcgttgctgacgggagggggcggagatggcggtcctcagcgatgtgatgcgggaagggcatgagaccgaggcaccgggcatcatgcaaggtgggagatggggcgggcgggggtaggatggcctcttctatcttcaccgccggcggcggggcttggtcctccttgatcgtgcatccggcaagcgtcggaggtaggcatattatacaggacgtcaccaaccatccgcgcg

SEQ ID NO: 91044 - DNA, 426 bp, Zea Mays
agcgcaccgccgttcggacaccggaggaaggagatgatggtcatccgttggatcggaagagaacggtcgaaaatagaagggaggtagcgtctggccctgccccttggattgatccgcaatgatcatgattgagtttaagggcgatgggcgcgtggccgttggatcgggatcgcacgcgttaaactgatcgcggcacattaaaatctgggccaacggattttgatccaacggttgatagagcagaccggttcataaccaggtataatctaatcctaaccgttgaaactagatctggcggctctagttgcatcttaccccttcgggcgtcatctttacagaagagcccctgcgtttcctcagtatcaacccgcagtcctactgctggctctctgagtcttaggaacatttgtgtagtagcccctgcgt

SEQ ID NO: 91045 - DNA, 471 bp, Zea Mays
aatcattgtgtgttctcgtcgaaccactttactcgtcctatctaggacctctatgcttgtgttgcatacatctctcagaattgtaaatacttatagtcgttgaattgacttgggatagtcctttgactggtatgatatacagtaagccaaatggtaaaggtcaatactgaatggaaataaaattggggtttatgtagccgaactacactgaattacaccctttggcatgcttaccattatctacctctgatctaccagaagtgagaagagtagacaaatagctatgaaatcccacatcaccacagagcttaaagctaaattagacattaacatgtccttggtcctcggagccagaagagtcatatgtcttgaccactagactactagtgatgataatttgtgatagaaatatgaagatcttgtagagacctgttgtatcctctctactccagatgatttcttcgtatgaga

SEQ ID NO: 91046 - DNA, 304 bp, Zea Mays
aagtcacctaaaatagcacatcgttggggtctaacatagagacattaaaacatggcataaactccataagacttacactggctactgaaggacctaaagcacttatgtgtatatcttagcggattgttcttcaattttaacaaggactgacttgtgcacgctacttgcctccaataattattgggctgtcataacacacgtataagacctctaatcgatcaacaagacatttatttatccaaagagaacgaaatgcaataatttataaagctaagcatcgatctgtcataccacaaaaatcatg

SEQ ID NO: 91047 - DNA, 714 bp, Zea Mays
ccaaggtcgtcgctggccagatcgaaaatgagtactcagtaaaggagcctgtgctcatgcaatatctcaccgccgtccgcagcctcgcgaaacaattcaagggtttcaccctgcagcatgtcgactacaacaagaacgaagaggccgacgcgttggccaaagcagcggccaagggcgaggccctgcctttcgacgtgttctaccacgtcatcggcacgccagtcgtccgcaaccccgaaggtttgcaaataactcaggacgccgagggccaccgaattgtcaacctcatcatggccgaagactgacgagctccaataacactatacctgcaaggccactaccatccaaccgaccgcaatgaggccaagcgactaaagcacaagagcaaggactttgcaatagtcgagggtaagctgtacaaaaagggaatcagccagcctatgctgaaatgcataactgagaccgaaggcatagaaatcctccgcgaagtccacaatggaaccagcggctcacactcaggaccaagggccctcgcagccaaagtgatccgtcaaggattttactggcccgcgataatctgcacagccaaccgagtcactaggtcatgcgaagcatgccagaagttctctcctcgctcaggcaacccttcgcaattcaccaagctcatcacacacacatggccacttcaacactgggtgctggacatcgttggac

SEQ ID NO: 91048 - DNA, 326 bp, Zea Mays
agggggtacactcatctaatcgcatccgctcgttcgaggatcaacggcgcacaaagcccccgagcaatcggacactctacgcacgatctccaccgttcatcgcgagataaccgacccaaagatcgtcccctaccttccgctgctaaattcgcccagaaggccccaaccgagatgtccccgacggtggtcaaggttccgcctccctggcgagcaggcgaccaacagtgctaggctacggattggtgcgtggataattcctgcgcataacgcaaacaatggcgaatctgcagagatgtgcccttaccacgatgggaggcgaccgcgac

SEQ ID NO: 91049 - DNA, 589 bp, Zea Mays
cgtctattcttagccgtgcaatcacagatggagggctaagattaaattgtcctcgacccgaaccggtacgcaatcctgaccgccttatcctaatccgacggtacccgttttaaataaacgtgatccgatctcatccactgatctaaaaatcaacgacacggaaccattggtcgaaccgatatcatacgctctaatcacgaccgtccgctacgcgatcgacgatacaggttctttctcagtcgaacggatgtaccaaactactcccagccgtctatttcatgatctatggacatcctggtgtcttcaacctcacgacgtttagacccaaccgactgcaccatactcaattctctctcatctaccaactaatcggcgctcgccactatcccgcaaaggtacggcggcgattctacggcccaaggaccaccccaacctcgccattctcgcccgcacacgacaacccgatgcatcaaaggacgccgcagaggggagaacggatctcgatgtgaagaggagggtgaaccgtaccgaagataactgggataatggccgccggtggacttgaggcggcgcgcaaaatcaccccagg

SEQ ID NO: 91050 - DNA, 528 bp, Zea Mays
ctaacttggggcaggatgattttaagcctcaactgaacgctacttcggtgtcatcagttattccaagttggctgagtcaagtagctcaaggttatgaccaagatccgagtgccaaaaagctactgagttgtttgcttacgggtgaaacaatggaacactacactctgtcccagggcatcattcggtttaagggaagaatatggataggagcaaacaaggccatacaacaaatgattatgtcggaactacatgaaagtgccattggtggccactttggatttccagtcacataccgtagaattaaatctaattttgcatggctaggcatgaagcaacaagttcatgattttgttcgtgcttgtcagatctgccagcaagcaaagcctgagaggacaaagtacccaggactattgttgccactgcctattccagaaaatgcatggcaggtggtcagcatggacttcatatcagggctccctccttctcgccatggcaactgtatacttgtggtagttgacaagttctcaa

SEQ ID NO: 91051 - DNA, 550 bp, Zea Mays
tcttgccccgaacaggtgctccttcgcaattcaccaagctcattgctcacacccggccgcttcagcggtgggagctcgatattgtcgggccactacccacagctcaaggcaatctcaaattcaccttcgtcgatgtcaaatacttcaccaagtggatcgagggtagagcagtctccacaataacatccaagacaacacaaaaaaaaaattggcagaatattgtatgtcggttcggagtcccatccgaattaacagtcgacaacggtaagtagttcgacaaccaagacttctgggaattctgcaactccatcggcatgaaggcaatgttcgcctctatctatcacccacagtccaacggtgtagttgagcgcgccaactgcaatatctttagcgccatcaggaagaggctacttgatgacaaaaagggcaaatgggcggactaactgccaaaacacatatgggcagtaaacacaacagaatccagagcaaccgggttcacaccttttcgcttgatgtacggatccaaggcaatgacgccgcaagagctaaa

SEQ ID NO: 91052 - DNA, 427 bp, Zea Mays
agttgctgtaaggtgatcgtgattcttccagacttgtgcgcacaagaaaagatttatatcaaaatgggtactccaggatggctgtggaccgatgatcttgatgtctatgaacacatattacctcttaggagccaatattgcggaatgggaaaaacaacatatttgaaaaacaacaaatgcttccaaacgcgtcatgtaacttttttaagttgggatctctatgaagtaataatttatcccaacatgttaattttacatattatatttattttagcccggcatatacagttttttatatgagaacgatgaaataattatttgattacataagcaattttgtgcggggttcatgcaatgtgtcagtagacatggccgatctcatgtatcataaactcggcccctggaacacacggtcacttgtccacta

SEQ ID NO: 91053 - DNA, 338 bp, Zea Mays
cagtctttgataaaatgaccagactttccacagttgaagcagccagttgaggaactagggagggcggggaaacgagcaccaggagcactccgctgatttgtagaactgggggcagtggtaggacgaatgaaaacaggctgtttgaatggataggagggtggacgaggcgaagaacgattctgattaaatggtcggattaccaacatggttcgcttctcacgtccctgattggacctgtcacccccaaatccctttgattttccttggcatgtattcttggcttctactgccaacgctgtgctgatagctctgttgtacgtaagatccaggcaggtggc

SEQ ID NO: 91054 - DNA, 400 bp, Zea Mays
agaaagctaaggcatccatcaaaccaaaaatgttgctaatgcttcttatgtaggcaaacaatgacctggtatgttgttttctgcggaagaaaacaaggagttttctcaacatggaaggagtgccatgattaggtcagtggttaccctggagcatgcttcaagggctacagatcaagggatgaagctgaggaggccttccagcatgtgcacaacaagtcagatttcaaaattcgagaagagcctatcaagaggataaaaatatttaccttctcaatcaaagatgtaataatattagtccagtcactaatcattcttttactactttggcaattgatgtaaaatgagtgtagtaatctgttttttaatcatgcctctcggaggtgtatgttcaagctgccgg

SEQ ID NO: 91055 - DNA, 345 bp, Zea Mays
cggcccaaggcgaggtgcttggccggatgtaacatttctctgacaactcatcgatctgcttcttaagttcaaccaactctggtccggatattctgtaagctctcttaaagatgggggtggtgccaggaagaagctctatggcaaactcaactttccgctctggtggcatacctggtaagtcctttggaaacacatctgggaattcggacacaaccctgatactctcaattgggtctgcttcactgttttcgacagccatctaataacaacttcctttattcggctcaggcgggattaactcggtcaccacttcctctcctagtggggacaccaacttgattgtcc

SEQ ID NO: 91056 - DNA, 331 bp, Zea Mays
actatctattcagttttaaatgcatcacactctttcatttctcctcctattttagctcatgtccaaccattttccctattcagtttcctttttacactttaactgagttaattgacttttattcatcagtttttaaagtattaaaaatattatagtatttatattactgtaatacacatttagagggggtttctttctttcccctaaaagagagggaagcaaaggggagccatttggaggaataagtgactaaaagtacactaagaatccaaggaaggggagcatcacgggagccgtcggaggccggcttaggagatcattgctattttag

SEQ ID NO: 91057 - DNA, 770 bp, Zea Mays
caatttgatgtggtggacttcctaggagtctacaatgccattctagggagaccatgctacgtcaagttcgtggtcgtccccaattatacatacctcaagttgaagatgcctagtccctgtgggatcattacgatgtttgcctcgttcgaagcggcttacacctgtgagcaagccaatggtgagcttacctcgatgatggccgccacaagagagctagttgaacttcagaaagtcatcatcgcccaggggggcccggacgctcctaaggccggctccggcacattcaagtccaccatggacacgaagcatgtctagatcaacgccactgatacatccaagcgtgttcgcatcgagaaaacactctctaacaaataggaaagcgtgctcatcgacttcctccgggataactgcgacatcttcgcttggaaacccgcggacaagccgagaatccaaagagaagtcgccgagcattccctaaacatctagtcgacgacaaggccggtcgcatagcggcttcgtggtttcaacgaggagaaacaaaaggccatcaacgaggaggtcgcaacactcttggcgacaggattcataagggagatacaccacccagaatgggttgtgaatcctatgctcattaagaagaagaacgtgagctggaggatgtgtgtcaactatacgaacctcaacaaggcatgttctaaagatccattccatctcccacgcatagaccaagtcgtagactccaccgctgggtgcgagctcctttcttttct

SEQ ID NO: 91058 - DNA, 369 bp, Zea Mays
gacaacttcatagttgaaaagtttgtgcttgagcaacaatgcattgtcatgatttattcccaaggcattctttaacctaataagtttagcagctttagacgttagctcaaacaacttcactagttccttgaaccttacacaattttggaatgtgtgagctcaccatgttggatatttccaatagtgggttgtatgtcatggatgtagatgatggtaatctagatcaaagttttctccacagctaacaaaaaggtaaaacatggtgctcatatgatatctgcttaaggaaacatgcatatatgacctcaagtgatcatagatactagtgaaggccaagaaatgaatccaaaccacacacatcaactggag

SEQ ID NO: 91059 - DNA, 354 bp, Zea Mays
ccggatcaaggacgtccagaagcttacggggaccctggccgcccttagccgcttcatctcatggctggctgagagggcgctacccttcttcaaactcttacggaagtccagcccattctcttggaccgaggaggcagagcaagccttccaagagttgaagcagcaccttgtgtccctaccaatactggtagctccgtagccaggggagccgttgtacttgtacattacagtggctacagaggcggtgagcatggtgttggtcgtcgaaaggacggagcaacattcccaggggagtcaggaggttcccctaggagaaggtggtggtccgaccaccacagaccttgagggcccggg

SEQ ID NO: 91060 - DNA, 467 bp, Zea Mays
gaggagtggtgctctgggcgcataacaagatggcggagcaaggagggcactcaatttatagaggccggttgtggttgctccgaattttggacggggatgaactcacagtgatgtcgagatgagtcaccggagttcgtctaacgtggcattcgatggggtaaagtcacggggcagcaaatgggctatccactatgacctatggtgacgtggtaacctggtctatggcatggcatgtcatgaccgagataatcgatggccaccacggcgacggcctcacgaccacgtcgtcggcaagtgggtacgacaggcttgcttaagggcccaagttcaccccctcggcgatcttttcaccctccccaccgatattttcacgttacagcacgcacacaactcaaccatcacgtggatcacgacgcacgatcatcggcggcgaagtgctctgaatccttgatcttttccagttattg

SEQ ID NO: 91061 - DNA, 497 bp, Zea Mays
gcggcccagttcaaaggagaaaggtgcccgcgcgcgcctacgatggtgggtttacagaaaagccctcgcctttctaaacaatcggaaatagaaccgaagtgttattcactgagtccctgacacattccagaaaaccccttaaacttctaattcttcgcaggggaggtccctaacgacggcagcgcgcggaagagctctggcgagctagcagaccagccgaacggggccatgaccggcgcccagcttcagactacaccaaatccataacctagagggtatttcccctaaattaattgcacaaatggtgacctattctatcctgcccacgagaaccgcgaaggccatgagcgtttgatcgcgttcccgatgattggtggtctctcagttcaaattggtgactcggtaagtatcacagagctatgcaagtgctaaaacgagggagagagagggatgaacagaccggaaagggggctggccgtggtgaggctgttcttcgc

SEQ ID NO: 91062 - DNA, 528 bp, Zea Mays
gaagtccagatggtatctcatcaggaaaaacatcttcaaagtcctgtaagagatcaagaacaacactaggcagcgatgaaggtaaatcgttagtgaaagtaagacctccttttgcaagagcacaaagaatggggctgtggtgtttctcacttctctcagatcactcttgctcacaaagagacactcagtgtggtgtggctgtttaggattggcatgaggctttacatggctagatgggttagaactctctcccttacttcggttgggggtctcactcaattttcttttgtctgattcctctcttttcttatgagtcatatctgaagtatgtatctcctctggagataatggaacaagaaccaccttcttgtcattgtgaatgaaagtgtatttgttagaccgtccaaaatgcactgagtccacatcaaattgccagggccgaccaagcagcaaatggcatgcttgcatgggggcaatatcacaatccacctctccatgataatcaccaatggaaaatgacaaatgaat

SEQ ID NO: 91063 - DNA, 608 bp, Zea Mays
catgtctgacattaggtagatttatctttggagtctttatgctctaaaactgtcatactacggtagtatcactaagtgatttcgatagtacacgctcaccattcatttgaaatcacgttgcgtagttttcttttttaattatttttattgtagatagaagactcttccaaacgatgttgtaggaaactaccggtaacaatgccaactcaacaagtttgtaaactcaatggaaaacaatgtgctttttgttgctaaactcccaacatccatacaactaggaaaggcaaaatgtcttctcacatgaaaaaatctatgcctctagtcgatcgtttgttactgcatgatcaccatctgataaatcgtcactataaattacagccactctagaaagctagttcatgtcaaacttagagaatttataaagacataagaagcaaactaataactatgtgcttgcttcaacaaaccgatgattcatctctacataaattttatcaaccacgacataaacaatctcactccgataatgatgaagattactaacagtgaacactccatgtctctatctacctatgacttgtatttctcatctatatttggcaccaaat

SEQ ID NO: 91064 - DNA, 570 bp, Zea Mays
gcgcatgcgatagtatggacgtgtcgcctgccaatggaatggacaggcacgccgcctatgggatagtctggtcgccgcctaccagcggagtggacagggcacattaaatgctgaggcggcacatcgcctgccagtggaatggacagggctcattaaatgccgaggcggcacatcacctgccagtggaatagacatgtggtgcgccttatccgcaataaatgcagaggccgcgtggcctagaggccttacgtcaagctccgcccgttggcttacgtcacgtgcagtaggccacgtggctgcatcgggtctctgcctggacggggagcggaagcgtatacgatgaggttcggacacgtgtccgctccagacctgcgcctggccttgattaaggcctggatattctttgtcccagaatcctgggaccctgctgtgagtggcccagaccccacacagaggggttcgaaacccatcctaggggtccagtttgcgcccgtggaggtcctggaccttacccggaggtccggtctgtatatacaggggtccggcactttcccatgggggtccgaatcc

SEQ ID NO: 91065 - DNA, 961 bp, Zea Mays
gctcgacctgccgaactcgccatataactggggctctgggagagttgtcgtctcggccgactagagaaatccagtgcgcagtgtcgtcgtgttcgcaccgtcgagagaaagagaaaggggagcagcgagagcgggttgccgcggtgtgggtgtcggcaggccgtccgctatgcgcccggatcttcccggtgtgtacggctttgggcgtgattggacttctcgtcgatgtggctgggtcatcgctagggcctcggtaagctttgttcttcctctctttggtattactgaagctagcaagttgccattaccagtcagtagaggcagggtagggcgtgagcgtgagatcttgacaccacgggtgggttccttgcggtggtctgcgccgctgtagatgcatctagcgaggaagataggggttgaagaaggcgccgtagtcggtgcgtgtgtccgggggaagaagaaataaaggaaaccgttaattggtagatgaacggccgagatcagtagacgtattctctctgctagaaatgatcctggccgctaagtattgatcgggcggatgcgtgtgggggcgcaggtgtttaaaagatggaccgttgagattagatctaagggtagatggtggaatcggacttcataaaatataggttgtagatccttgatccgatggttcctatcacttactggtttgtcccgggcgcgatctaatctggaccccagatttcagatcgggtggctcagatcgcccgataccccttcggccatccgttttgcataagaacccctggaatatctgcgaatcaacctgcagtccactcgtttgggctctgagtcctggaatattttgcgcagagccccttatgctttttagttatcgaggcccagtccagagcgtatttaaaataagtaaatgaattagtaaatgcaattttaatacaaaaacaaatgctagaacttggaa

SEQ ID NO: 91066 - DNA, 322 bp, Zea Mays
tgcatgtttgatttaaaaattataaggagctttttgggtttgcggctggactcaaaggcagataggataaagtcacatggggcgaagaaggtgggtggagcgcatcgatacaataggtcggctggactgtgggtttgattttaaaaaattataaggagctttttgcaaaatcaacgaaggtgaaattattgaaccatgaaaactggtgctttaatatagtaaacaaagaactacagtgatgttgtgtggttgctatccagcaatcgtcgctctagctggttgccacgtgttgagcaccactagtacaatgctcgtgcgctgc

SEQ ID NO: 91067 - DNA, 309 bp, Zea Mays
tgtggctatgtgcgatgtctgtcaaagagttaaggctgaacaccagaggccagatggactgctgcatccactaaagatacccgagtggaagtgggaagagattggtatggacttcattactggattgcctcgcacctcgaaaggatatgattctatatgggttattgtggatggactgaccaaagtttctcatttcattctggtcaagactacttataagggatctcaattggcagagtatatatggctcgaattgtgtctctacacggtgtaccgaagaagatcgttttggatacaggatcacagttt

SEQ ID NO: 91068 - DNA, 338 bp, Zea Mays
accaatcgtgcagctgctgcgatactactctccttgcccacactgcgtcgcaatggtgcaccgatctcctgctccagaagctaccaccgctctgtgcttggcactgctacttcttctctttccctgaaccagctccaccgccaccaccataggcggcgctccaaacacggtggcgccatgcgcgccggcgtggtgcggggacttggccatctcctacccgttctggctcgcaggcacgcatctgcccaagtgtggctacgaccaagggttcaaggttacctgtgacaaagccaaggtgtacctcaagaactcgacctgcacgtaccaaatccaggcca

SEQ ID NO: 91069 - DNA, 429 bp, Zea Mays
gagcttctggttggcacgagagaccagggatgtttggacgtatggttgaagcttgacaaacaccaaatcccccacttggaatgtacgatcggaacgacgcttgtccgcttgatgcttcatacgctgtttggcacggtgtagatgttgctgcaataacagatggatacgctgtttgtcttggatgaatgcagccaaatcagacgaagaattgtccaatgccgaaataccgaaatgtcgtgggacaaccatagagagcttcaaatggcgatctgtcaatagaggaatggtggctagtgttataccaaaactctgctgaagctatccaattagcccacttggaaggacaagagtgtacaaagcatcttaggtacgtctcgaggcattgattcacgcgctcggtctgcccgtccgattgaggatggtatgcac

SEQ ID NO: 91070 - DNA, 497 bp, Zea Mays
aggataacggccagcggtgaaaagatcttgaccgcgtatgaggccgtgagctggccaccgtacccacttgccctgcggccggtcaagatgaccctcgctggagtctgtcacttgccgcctggacaccacatacttagaagtgttaccacatcgcagtagaccgccataggtagcctgtccatcgcctgagacattgccccagtgaacgccacagtagttcgcgccggtgactcaccccctctttggccgccagcttccctcttctaaattcagagccaccgctcacggatactataaattgagtgcatagctagctctgttagtttgttacgaagccagagcgccaacccttgccctcgattagccaccacagccggagaatttcgttcttcccccaaatctgttgtctgcgccaccgtgtgacgccgcacagtggccagccgctctcagttccgtcctcgtccttcttgcccatgtttcaacacccccgttcgttc

SEQ ID NO: 91071 - DNA, 634 bp, Zea Mays
catcatcgaagatcagagatgacaacaggtcgtgtggagaaaaaacctcacatctataaagtctacctaaatccgcccacgatcgaaccagcgggtgcaatttgaaaccagcacccgaacccatcccactgtgggtttttactcaatatacactttcaaacaacaattcagcaataagcaattaagtgttagcaataattaagttatatatacggtcatacagatttaaaccttctcgcattgagcaacaataaaacatttcatgaattattagctaagttgggttgggtgcgggtcaccaataggttaaaatagaaacacgcacccacactcatgaaactttggataggatgcagtacactcacgaataaaaaaatcctcgtttgtacctacaccatcgttttttgggtatacgggttaaatttgccatctctatcgaagatcttgagcaaccaggtgtttgagagtgagaattgggatagggacgaggaagacatatgaaggtggaggaaaacaaaagtatgcatgtataaacagatctagagataagataacaattttactcaaaagcgaataaaaacttggaagcaacaatcctatgcaaaagcaattgatacaattaaactgttaacac

SEQ ID NO: 91072 - DNA, 559 bp, Zea Mays
gggacccccctgtctcgaaacgccgacaatttcagtcaccgaactctagcaggaccgccgaaccaagtcctctgccctaggcgggaagggacagcacaacggcgaccatcaccaggatcgaccccctcggttccagaagttggacttcccaaagtatgatggcaaaactgatccattggtgttcctcaaccggtgtgagtcctacttccatcaacagcgcatcattgacgaggaacgcgtgtggatggcctcctacaacctcgacgacgtcgcccaactgtggttcatccaaatacagcaagatgagggcactccatcatgtgtcacttctccaaactcctgaacctgcgcttcagacccccctgcgttcaaacccgctcggcgaacttgttgcatgtcgtcgaacggggttggtacttggtggtggactaccaggaccgctttcaagctctcctgccacacacgggccatctcacggagacacaacgtgtacagctcttcattgtaggcctccaaccgccactcagcctcgacgtcgagatccacaacccccagccct

SEQ ID NO: 91073 - DNA, 412 bp, Zea Mays
cggaaaaacatctgcatactcacagaccactggaatcttctttaggggtaactctgtcatagcaaaagcacatgactgagtagaatcttgactgggcagaaacaaggtgaaactcccacagattggtgaattgatgtcaacgatgcggctggctacatcaagcattacttggtgtctggtcatccaattggctcccagaataatatccacattctccaaacccaaaacaaggagggtggttttgataatgtggcttcccagttgaataggcacactctggtttaattggttagttgcaattttacccccaggtgtggctatcatgaatgacccttttgtgtgatagaaaggcagttgtcatttagcactaaacttttgactaatgaaactatgagatgcaccagaatcaaac

SEQ ID NO: 91074 - DNA, 798 bp, Zea Mays
atagcagtaaatataaaggtcactaagtcctaattattttttgtctatcatgattttgatatcgtatctgtctccataaatctatactaccaaaaaatcgtgaaattcgaagtttagttaatcttctgaattattgagtcgtgtgtctaattaaaattaatcgattgagcgaaggcagatttagaagcctaactcgtcttgtggttttggccaaataaatttattagaattcatcagttaagcgaatacgaatttggaaatttagttcagtcctctgatttcgtcgcacacaaattaaatagaactcgatgactaaagttttcagtgcaaaataatttagttcatgcttgccaaccgagaaatcatcacgtccgaaatttataaatgagatttgtttctccagtaaattatctatagccatggaatcatgtgtttagatcacagatgaaattatttgatttcaaatcaaatcgaacgcagtgtaaaatgacgttgttgacatcgtcccagttcgttccgattgtatatcgcctagattcaaacgttcgggtacaaatatctgataaaaatttatctgattatgggaatgcctaccaaatcaaacatcatttaaatattatcgccgatctcatttcagtctaatcgatttgtgtatctgttaaatgtaaattcgagcaccgtatttatccataggttattgtaaaaaagagaagaattctaacttatcatctccaccattttgtctttgatttattcaaaccgtatcttcctttcatatgggattttgttaaagaaaag

SEQ ID NO: 91075 - DNA, 594 bp, Zea Mays
acacgcttgccccagtgatcggctaagcatgtctgaatggctctctggtaagtcgctccagcgtttttgaggccaaacggcatggaggtatagcagaaagctccaaatggggtgatgaatgcagttttttcttcgtcttcttttgccaagctgatctggtggtacccggagtagcaatccaagaaagacaacatagaacacccggcagttgagtctaccaccccgtctattctaggaagtctgaagggatcctttggacagtgtttgttgagatccgtatagtcgacgcacatgcgccaatccactttattctttttgagtacaagaacaggatttgctagccactcaagatgcagtacttctctgatgaatcctgctgtgactaagccagccaacttggcacaaatagcttctctcttgtcgaccgtgaaacgacgcaacttttgtcgtatcggtctcgcctggggatagaccttcagtttgtgctcggccagttctcttgggactcctagcatatccgcaggttgccatgtgaatacgtctcggttgtcttgcagaaactagacgagcgcgctttcctatttgtcatccagg

SEQ ID NO: 91076 - DNA, 742 bp, Zea Mays
tctagctctggtcctaaggttgtcggacccgcatgacttataactctagatactaagtccctgtcacggggtggcggagcatgcaggcccacactacgggacctggctgagcggctacacaggctccagaccaccctatggaacggggtcccgttctccagagccgccccccaggctgtcggacctccctacttttgcatcaggggccctaaactgcaagcttggctattcaattcggacgccgccatgtcagacagatggaaaccgtacggtgggttagctaaaaggtattatctgaaaaactacgaggtaggaccatggagcagcaagatggaactatcgcaagagcgcagctgagcggggtagtttctctttataacttgtcgtgcatgtgtgcagaccaatagtacgggttcatgggggcagaccccattgggttgtcgtacacatatgcgttatctagtgacaagaaaaggaaacagactcgaccccttagtcttgctctatggatagaacttacagagatacttggtctcgaggtaaggtgctcctccagtcgtagctagatggttccccttgggtcgggcactcccgttaccttgaagggtccttcccagctgggggagagttgcggaacccctcttggtatggtatctgccgtggggctaagccccgacccagggttcccatctgtatccgacgcgggagcccttgtctctggcagtgatcacttctgcatata

SEQ ID NO: 91077 - DNA, 405 bp, Zea Mays
cttcgtttcttggctccctcgacatgatcgattcctcacgtggtgaagcgctaatacgaggattaatctctgataccaattgaaaatggcctagaggtgggtgaataggccacacctgaaattctcaacacaaacttcaaactttgtgaaaaacgacaattcaacagggcaggccggttcaaccggtcttgaggccagttcaaccgcaattcacctgttcgactgcaaacttaaatgaaactacgcatatctaccaacaataaacgcagcggaagagttgaattaaaaccaactagatagatcaaagacctgagatgatgagagacaaattcacacccacaaaagcacaaaagacacgatttttaccaaggttcggttacaccaccaagttgccctacttcctcg

SEQ ID NO: 91078 - DNA, 696 bp, Zea Mays
ccaccaatgaaggatttcttgtcccaccagaggtcataggggtcaaatcctctatatccgtggatagggtgatgctctcccccgacctggagcgagcaatatgagcccacttcttctctttcttcctcttgtgacagcgctcctagcgcgctgccgccgcttcctccgcctcccatttccacttctccaccttaatatcggtgtcttaaggaagaggaggtagagaaaccgtggcattcccatgcccctacaaaagcgcacaataatgaaaccccgcacaaagccaaaaaaggagaggagaagcaaaggctcactaggtcactcgacctcacctagttgaaaggcagggggcgctttcatccataaagtctaacgtgacattttctgggatagcaaggacgcgggccaccacctcttcctttattagaatcacccgcaccggtgaactgccacatcatcctctagcgagccacaagcggctgaaggcaacgctgcatgaatgcccagattaacctgtcgccattgtggccccacccgcactgcttggcaaaggtggccagcatgcagtcgatcttcggtctaaacctcttctttgcaccatatgtctagtgcgactgggctaccaatatgcaactggtaaacgcaggcacgctccccctaggttccgaacgtagaatcactcgccctcgtagccgc

SEQ ID NO: 91079 - DNA, 397 bp, Zea Mays
ccatacattgtgtatttttagaataattaaccctcactagactttctatttatgcatatttacattgtttttgtatacgcatatataagagtttgtacgcaatatttacctcggctagtagtaggctaaacccgacggaagactgaccaagtctaataatcatcaccacttgtgagttgtgacagtaaggcacgttagcccatagggaaccaaagtatcgaactcgtatacttttctgcatgtgttttggacgtgaagtatgcggttgcctcggttgatcagccactggaatgatgaagcacacgtccagggctttccagcttcagcttccaaacacagcggctagcttgctcatcagctgttcttgcgcaggacttacgtatcgacaggatatggc

SEQ ID NO: 91080 - DNA, 575 bp, Zea Mays
aatagaacattaattagtcaaacgtagttcgaaatcacatagttcaataacatagcaatataaaacataataagacatagacataataaatatgcaatgtaaatgttcgaaagtccacatgcgagctccccctgatttccatcttcccatcttcatttctctccccctttggcatcaatttccacaaaggggcgtcactgcgcaccaggtggggggggggacgtggatacatactatagtagtgggagctgaagctgtcaaagatgaaggtgaattgactgaagtcattatgaagctgctgctgcctctcatctagtgaatgaatgatgtcatcggtagatagagtctcaaattgactagacagagcacccatattgtcttgaaatctttgttgcatgttgttcattctgctcataatgcgatcatgcacattatcttgattatgagtgcgaagatcgacaaactgtgtatgtaccccatctagctaggtgtcaacaacagagaatctatcgtgcagagcagagtattgaccatcaaagtgggattgcatatcatcaaaacaaccatccacatgt

SEQ ID NO: 91081 - DNA, 526 bp, Zea Mays
gttctgactggagaaggacaataggttcatttttctatttcatcaaggactcttttgcaaactaaccacggtgaaagggtatgcatgcgtctcggtcgtcggattagcccaggacggtcgtagatcgggtctgaatcgatacgcagccctggacaccggattaccgttcaacggcccagattttaaatcgcttggcctatccaagaccgcccaatcctagatcaacgcaccagattgatctcactgaatcggtacactgactctaatcctagccgcagatcacaagatggacgccccacgtccgtcttcaaccttcggccgagctaggcggcggtcctcccaccacgaccgacagtgaatcaccagcgcgcggccaatccatgccccgactcgctacacaccaatcgatatactattcatgatgccaggaacaacacgatcatggtggtggccaaagtacccctggggttggcacaaccaacacagccctcggcaaaacacagagccgtggcggcgttcaacaacg

SEQ ID NO: 91082 - DNA, 404 bp, Zea Mays
gtttgagtgtgtagaccattagcagggcacaacacgacgagccgcgccaagcctgaggctacaaaggctaggggtcggcatagcctgaatgatggcacctgagacccacgctacccgtgccgaccaccataaataatatgagacagacatacaaccccgaggcccatgagcatgcgtggctttacctcaggtataatgcttggttttaccctttgcctggtggctctatcttggggaagccaccactagctgaccctccctcgacctataaaaggaaggggttggtctttagatgaacagatacacacacaaggatggaccccagacgagaagccatccaaacggactgacgaataagaggacgctccgacgaagacccagaggctagagccccgcggtcaagc

SEQ ID NO: 91083 - DNA, 462 bp, Zea Mays
cgcggacatgcgcaacaactacatggcgatagggtgaacacaacaaggcggtcgtgacatgttaggcacaacactgacacccacgattctatgccactaacagctagggctctaatccaactagattacaaacacaacatgtacttattcaagctaacaattcacctccttaatcttgttggatgcgtgcaactcctagtcttgacctcagctccatgaatctgaccttacccagtcgcttcattagtatgtcggcaagttggtcatctgttcccacatgttccacttcaataacacctctttcaatgcaataatgaatgtagtggtaccatgtgtcaatatgcttactcccgtcatgataaaccagattcttgctcaactctattgcagacatgttttcaaccaacagggtgaacttctgtacatcttcttttgtgatatttgcaagtaacatgctcaacc

SEQ ID NO: 91084 - DNA, 584 bp, Zea Mays
aaatagtcatggcacagattggtgacaagggtgttcaagtcattaaggaaatgatcaaacaaaaggtggacaaatacaaatgcttccgtcaagacagcaagggaatcctatggtttggagaccgattggttgttcccaagaaccctgagctcagaaagaagatattggatgaagctcacctttcaaaattctccatgcacctcggtagtaacaacatgtaccatgattcagatccttatactggtggaccagaatgaagagggaaattgccaagtatatatccgaatgtgacacctgccaaagagtcaaggccagtcatttgaaggtagcaggcactttgcaaccccttcccataccatcttggaaatgggaggatatttgcatggattttatcgtgggattgcccaatacctcccggcaccatgattccatttgggtcatcgtggacagattgaccaagacagctcatttcttgccggtacacaccacccacaggacggaaaagtatgctgaaatttacattgaccagataattcgcttgcatggaataccaaggactatagtatctgacagaggagcaccgt

SEQ ID NO: 91085 - DNA, 472 bp, Zea Mays
ggatggcggtttgtttccactaaaacacaggggctcttttgcatattcgctcggctgaaggggtgtgggttgtttctggccgcacgatctgagatcaagggcccagattagattgcgaagcggtacgcgatatcagtcatcggtacaacatcggacgatcgacattagatcatacccttacgtgcactagtagcgcgatatgaccacaggatcatgatcaaacgaccaagattaccagtgacgaagagttatgcagtcgtctgatgtacaccgcaggtgactgatccaatggccacacacccatcgcccttaaactcaatcgtgaccattgcagatcaatccaatggccagggccagacgctaccttccttctaatttcaaccgttctcatccgatccaacggctgacagtcatctccttccttaggtcgcccagggcgaaggcactagcgccgacggtgactgacccgccg

SEQ ID NO: 91086 - DNA, 854 bp, Zea Mays
aaatttccatcgatgaaggggtattctcaaatctcgaccgtccaatctaatatcgaaggctacgattaactccctgctactgaaccggtacgtgatcccagccgttcatctgaagatatatggttctgatttaaaacacgatgggtacgtggatatttaacccgatccacccgatcacgatccagcggaccagatcaaccacgcgaagggatgtgcttcacatcgaatcgtggtcgttccgccacgaatcagcaactcctactcgtgccctgactccctctcccaggcacgacgacccgaggcggccgctcgcttctgcggtggagacctcgccggagggtggcgatgttatgctccagtgcccccaaatactaatccttaaggtgcaatatgatgtggggaacatattgaactagatgtagggggtctcacaagtggtggtgtcgtgcagatgcctgaccacatcggcccattggctcatggtgaaccttcgcacaccggtgagcaattctgagtcttctgccttcgtgttcccacgatgatgccgtgaacgccctccacgtgctcccactatcaccttcgaccatccaccacatctaaaatggcgacggaatcaaggattaccggcaacgactccctttcacccttcctgacctctcggttttcccacggtggtggcactctcacagctacttctggtatgacagatgagatattgagatggagccctggaaactcgacgattacatagaggtgggggcatacaggctaaggcggaaccagccgtgaaccacccccgtccagccgtgtgatcgccgtgtctggcggctgtcacccatctattagtgcagggg

SEQ ID NO: 91087 - DNA, 572 bp, Zea Mays
ggaacaagggctatatgcttaatttatctagtctacaaatggaatatataaaactccctaggtcttaaaataaaattcttttagactaataatatattaattaagtaacatgtgaacgtatagtttgcacttatgttgatatttattatcatttgaatgaatgtggatggaaaaaaagtaagctagaaagaactatattttgggatggaggtaataagagaaaaagaagaagagctgtatggattattattgttgcaccgaaacacactttgtacaaatactacatgttattatcgaatcaacaaacggtcgtacatgcggtagagctatgcagtatctagttcttgtggcgaggagctgtgcgtcattaattcatggtttactagctttcacttgagcgacatctatatatatcaatgtatgtatttgttgatataataagcttttcttcataccagagatcagtctgaattactatggagacttgaagagacttgcttgcttgtactcaaaatatggtttcttctcctggaagtgatatggaacacaccatgcgctgttgtaaagaatac

SEQ ID NO: 91088 - DNA, 518 bp, Zea Mays
ggcatttgtttgaagcaatgtgcacatctcaatgattcttgttgtcagttacacttgacagtaataaccatctaagaccccctcacgcagtgcctctaggtgggagaaaacaaaaaaaggttcacaggcagctctggattcttcaatcttgaggggacagcttcgccttcgtccaggtcaccaggttcagcgaccaaaggaactgcgcttctatctgggtcaccaggttcgatcctgaggggatacttcactaggtcctttatttttatacctacaacatatactttctctactatttcgacaaggaactgcgcctctatctgggtcagcgagtttggctacttctacgttgctatcattgtactgcttattgcctctttttcctaaagaaaatgttcactacctgcttagcatactgatttttctactacttagccaaagtcagaaggatcacctgaaggctgagtccctggctgaaggctgaaggcaggcgtggagtccctggctactgatggttg

SEQ ID NO: 91089 - DNA, 346 bp, Zea Mays
cagatcggagatcaacggccacgatctaaaacaccagtgatctaatcatggccctccatctaagatctacggatcggatccaaacccaccgaagcgacatgtttctctaaaaccaagtcctttgatatccgatcgacggttgaaatccaatcccaaaccagtatgaccccggttgaatcgagcggtccacaccagatcgaccgccagggcccatctctcacctctcggctacccaacccggtgacgcccacggtcagcacgatggcgccatggccgtgcccacccacctcacacacacgggttctgagcttcgatcttaacgacacaacacgatgctgggatgacg

SEQ ID NO: 91090 - DNA, 518 bp, Zea Mays
gctccgcctcattaaaaacctcaccccctaggaggaaaagagtgcgggccagaataaaattgttttgcgaattacaagggcgagttggccctgaggagtcaaacaaaaaaatttgcggagattatcaatgttccaggaatgctccaagtcctcgccggatggcgttgcgagcctgtacgcgctgggggacgccttcgtcttgatgataaaagggccctcccacttgggctccagcttgccccaggactctgtccgagttgtccggacgagtacgaggtctccttcgctgaattccctcgggatgactgcgtggtcacgccatgcttttgtttgggcttggtatttgtttagagcctgtagggcgaagacgcggtctccatcaatgaggtccttcgaagtgggctcgtccacgtcggggacagctgacgggactgtccgtggggacccgtgttttatttcttgcggggtcatggcctccgatccgtatagaaggcggaaaggggtgaacccagtcgccc

SEQ ID NO: 91091 - DNA, 323 bp, Zea Mays
aactatttcctgatttatgaaccgctgacacaaaaaccagggactttggggttgtttttgttaatttctagggtcttacagtaattactttacgactagtgtggacgacgggttgattactaaaaagggtggggactcttttgcaaagaagactcgttgaaggggtatcaatagaactctgcctttcgatctacgatggagggctcatattaaatccgcatacacaccaaacaggtatcccctcgtggccctcggatccaagatctacggtcacgatctgacgaagtacattttaaatataattcgtcggatctctaacagac

SEQ ID NO: 91092 - DNA, 494 bp, Zea Mays
gccgacttaagtcgattgttccgttagtatggtatagtggtcaccctaagttacgcgtgagcatgtcgcaccgccttaagtcgtcgccgacttaagtcgattgctccgttagtagggtatagtggccaccctgagttatgcgtgagcatgtcgcaccgccttaaatcgtcgccgacttaagtcgattgctccgttagtagggtatagtggtcaccctgagttaagtaagcgtgagcatgtcacaccgccttaagtcattgctgacttaaatcgattgctctgttagtagggtatagtggtcaccctgagttaagtaagcgtgagcatgtcacaccgccttaagtcgttgccgacttaaatcgattgctccattagtagggcatagtggtcaccctgagttaagtaagcatgcaggttgacagtaaacaatttgagcgcctttgagaatgaagtctttttattgatgatatatttcccggtttacagaatacaag

SEQ ID NO: 91093 - DNA, 294 bp, Zea Mays
tgaggattggggccattgaacactaggaagtcatgtggtgtgtgatcattatcacaaatatcacaacacaattcttccttgcacttcttttcatgatcactagctaacgttccccacacccttagctctctcattttcggaaccctttcctcgagatgaccctgaagacattttttgttgttgatttccctttgtatggcacaatgaaccaaatgcaggaagggccgcatataaataggccgacgtcaagttagtatgtgttctattggactcataagctagatactttaaaat

SEQ ID NO: 91094 - DNA, 301 bp, Zea Mays
caattttgaatttaggacattttttcttgacatgtcccttcttgtggcatttgtcacactttatcacattctttcacaaacatggtcttttgctttacaaagcattctttcctttcttaggtagatacccaagaccctcacgattaagagagcaacgttgacttcccaagataaaatcatgtttagcttttccaccatatgctttctctaagtcatgagttagagcatttactcttcctaccaaagcttcattttcaataatgatgtttgattcatcacaaccaatatcatcattctcaag

SEQ ID NO: 91095 - DNA, 554 bp, Zea Mays
tccaatgcataaaggccatttaggattgcatctttctcggccatgactatttgatcaatgggtcaataggcacaaaatagtcatgctctgcagcccgaataagcaatgagattatacttgtaatacgggttcattgccacactatgtcatgtttgaacaagataatatgtcatcgacgagtaggctattaaaaagtaccatgacatcactagagatggatgaacatacaacatttgttgtgccaccttttaagctatgttttcatcggtcgtgttacttttgtgggtgaccgggattactttgttgaccaaccacgtggaacgaccttcttattgacgtatttggagagtaattgatcaaaagtagggtcacctttaactagccgactagatgccttaaatgtattttgctttcacgtacctacttctagttgtcgaggcttaggtgtgtagatgttgcagtctcttgtcgcagccggaccgtccagctaagtcagtcggactgtccgcgtgggcactagaccgtccgtgcataagtgtcggaccgtttgtgat

SEQ ID NO: 91096 - DNA, 417 bp, Zea Mays
tgacaagagggcgtggatggaagccactaaatttatcgacatgcgagcacatgacttttgaacccaaagttcaacccagaacccctctagggactcaaagcagtagatcagagttccgtgcaaaccagtgtagtttgactgaacaacaatctgtcaaaaatcagagcaacaaacgcaaggaagtccaagcggcaatgtcggcctgaggtctggcagtgctggggtccagcagtgccgagcacacgagcggcagtgccaagcagggaaaaatacctagaatgatctcaaactttaaagatagttttgttgggtttttctcaaaacaaactcaagtaagaatcaactcagatcacgatcaagaactgcactgtgagagcgtacgcaatgatccgaagagtttatctcccccaaatccac

SEQ ID NO: 91097 - DNA, 296 bp, Zea Mays
caaacatcaagaaccaaacatgcacttaccatatgagccaacatgtgaggtaattgagcgcgacgaagcgaggcaaaggttggagattcggcggtatattttgttaaatgggtgaagagtgagaaaccatgtggaaagggttatggtgacgacacagcacgatggacagagcgagagatggagaccacactgcgcatggctcgagggggaggatgttgtacaaacatggaagtgatgacgcatccggagctgcgcggatttatggcgctgctgtccatgacatagagtgtcacccg

SEQ ID NO: 91098 - DNA, 596 bp, Zea Mays
aactatgttccttgccattatattatgtctgtcaagttgttgatgttcttggtgaaacgaacatgaccacatgctcgtatggtattttctggcgagtaacgggttgcccgatatccgcggataccctgcgggtatgggcacgggtcgaaaattttacctgcaagctatcgcgggcacgggtaagcactagaggcgcggatatgttggcgggcgggtaaatggcttacccgcactttacctgacccgctgccatccctaagcacgagctacactttacgtggccgatgcttgcgaaggcactgagaagacgtctccacaaggtgctgagaagacgtcgagcacctgcacccacaggaagtaatcgagatgaaccaatgaacgcgccacacgagagaccaccacacagatccggagaatggtgtcgtgacggagctgatgcgatgaaggcggccacaaccctggtaataaatggacgcctacaccaaggaaaacgagagcagcgacggctctcgcagacgcaccctggcggcggcggattccacacacaggtgaagtgatctgttggaaaaaacaaccgacggcggcggctgaaaaac

SEQ ID NO: 91099 - DNA, 323 bp, Zea Mays
ctagcccaaccccacaagatgaggagctggatcaagagatcaacaacctggaagccatacaccaacaagtggagaaaacaaggagaagatgcttcggttgtctgagctacaaaagaagatcaacaaagcaactgataaaatgcgacacatcgcacaagatactgaacaagggtatcgaccacaacaaagagaccttcgtcacgaaggccccaaccatggagatatgtggtatgaagattttaaccatgacaatattgcttttgatgatgcttctcctctagctacagagctgcatgcagtgccatgaccacctttgtacaagc

SEQ ID NO: 91100 - DNA, 786 bp, Zea Mays
ggctgacggaggagggcgccttgggggtggatgccgaggtattcttggggccattcaccgagttggagtaggcgggtcctggtggcttcagctgcggacagttgtttttgaagtgactgggatcaccgcagtgccaacatgcattcgccgggggttggttgcttgcaactgagggggcatggaaggagctctgactctgctggctgaaccgtgacggggtgggtccagctggtctactgaagtttggtcccttgggtggaaatccaaatgatcgagtcttctggtgccggtcttgctgctgagcccggagaacttggaactttcttttgagatgccctttttcttcctcctttgccctttcaacttgcatggccttgttggaaaggtgagagaaactgaggaagtcttggctagccagaattgtcttgagttctggcctgagtcccttcaagaaacgggccatctttttgccctcggtactgacgtcatcaggcgcgtagcgggctaactctatgaacttgtgcacatattcgctgacaaatctttcgtcttgagtcagttctcggaactcgtcctccttaagttgaacgagcccttggggcacatggtgctcccggaaagttgcttcaaattctgcccaggtagcatctctgatggtgacgttgaaggtatcccaccaagctaaggccatcccagaaagttagtgggcagccagttgaacacgctgattttctggacatccgatggcttacagctttcttttaatcgtgcgcatccaatcgtctg

SEQ ID NO: 91101 - DNA, 422 bp, Zea Mays
atgactagattgattatgagtgatccagagattgcatgagcgaatcgatcgtgatgcagagatgattagggttggcgaggtgcgatcagagagatgtgctagaaaaatataactcagtgaaacacaagatgcaacagagaagatttgccttagcgaagaatgagatgcgacagaaaatagtgtcgaggcagaccatgtgccaaaaagtatttcgagaaagtaagaaaagagtagagaacgtttcaacttaccgatgtatgtaatgcacattttgaatgaccagaaataatatgagtaatatgaaaccccgagtgatctagaactaacctagtagattcatagcatttaaatttacgtggctacgatcctacgtggggcgaagattggttaacgtcttcacgccttggagttcgtcgaagtag

SEQ ID NO: 91102 - DNA, 470 bp, Zea Mays
acggttgaaggccaatacgagctagatctaatcctagccaaataccgctgatccaacggccagaccactttcttcttcccttggccgtacccagcgacggcgcaggggcaccgcgccggtgagcacgcgcccaacgccccagagcaagattcccagtgccgataggtaatacacgttctacggagcatattgaactgattacggtggggcttacttggatagggtggcggtagcgatgttgcccacacagcacagcgggtcaacggtggggcaccaaccccgtcaagaaatccgggcgagccaaggtagtttccccatccgagatgtccacgagcaaatcactggggttcgatgaagttctctgcccaagagcccgagcgatggtacgccacggttccgcccacggcggcgctacacttcccctggttcgacggtggaggttctccgttctccctctgtctatttctggc

SEQ ID NO: 91103 - DNA, 475 bp, Zea Mays
aaccttcaatgaaacgccgataataaccggccattccgatgaaactcttgattcctcggacatcttttggtgctttccagtccaagataattgttaccttcttcggatctataaccaatctctctcgatttataatgtgtcccaagaacaggacttcactgatccagaactcgcacttgctaagcttgacatacagctgacattctcgtagcctctgaagtaccttcctcaaatgctcctcatgctcttgctcattctgggaatatatgagaatgtcatcaataaacaccaccacgaacttgtcgaggtagtccatgaacacactgttcatcaaatacatgaagtaggctggcgcattcgtcaagccgaatgacataaccgtgaactcatatagtccatacttggtgatgaatgctgtcttcggtatatccgaaggtcatactctaagctgatggtagcctgacctcaaatctat

SEQ ID NO: 91104 - DNA, 505 bp, Zea Mays
ctcaattcaatcacctctgaatgaaggttgttcagggccactgtatagccttcgttctcaatgtttttctatgccctaagggcattcctaagaatcaagcatttcttcttgggatagttccttccccgaagcatgacgaataatgtactcaatgcttttgttcaaagcttcgggagcaggagtttcgaccttttcagaagcaacttgctctgtcgccttttcttcaagtacagcaggctctgtcttagtgggcactgaaggcccagcttcggcttcagcttgaacttgtgcagcttcggcttgcccagtttcagtttcggcctgcgatttggtttcagttggaacgactttctttgtgagagtaggactcaaggcctttgtcgtttccagcacaacatccaacacgtttgtcatccttctcctcttaggagttgcagcataagtcttttgtatcttcggcagatttgcctccattggaaggctcagaatctttggcatttttgtt

SEQ ID NO: 91105 - DNA, 400 bp, Zea Mays
tgctattgcactgttttgctgccaaaattttagtcatagccgaagcttaaacatcgtgctcagacgaaacttcagttttggttctgcttcgtcacaagaggaagagcttcgggaaaatcagaaaagtcaacaacaaaaatttcaagaaaatcataatcaaatggctagagttcgctccactgctagggttgatcgcgagggagatgaggccgaagctgctgagactgttccgatttccgaagccatgaggcggtctgggctggtagcaccggaggacgtccctgccgctgaagcagagcaagctgatgttggagtgacggattctgaagatgattacagcagcgcggtgccaagcaaacccagccacctagattttggaaaatccacgatctccgaaggc

SEQ ID NO: 91106 - DNA, 341 bp, Zea Mays
ttttagctttgcaaagcatccaaaattctaatacccagctttttgcgggctcgaagggcagctgagcaggctgcaactatccagaaaaaattgcagctgaaggtacttttattccctattgctttttcttgactacttcgtgcctatgttggcgattttcttctaacttatgtcggaaagtttctaattctcaggcaatgattgaatttaaagaacctgaagcaaagtcgaagtagctgctaccaaagctgaagcggaagctactgaaacagtgaaaaaagctgcaaatgacattgtttggaagatttgtgaacaaatttatgttgaagtgatgcagggat

SEQ ID NO: 91107 - DNA, 787 bp, Zea Mays
cacatagcgtgcaatttcaatcttcatcttcgtccaccaataatgctgttttagatcatgatacatcttagtgcttccaggatgaatagaatagcgactaagatgtgcttcatctagaatttgctggcggatctcatcagtcttgggcacaactatgcggttgttaaaccatacaacgccttgatcatcttttttgaagcagttggctttaccggcctccattttctcatgaatgtgcttcatacccacatcatttctttgcgcatcaattatcctttgtacgaggactgattcaagcttcaagtgatttgaagttccatgttgaatcattcctaggttcaacttctccatttcttggcataacataatgtcagaagtcttcattgtaagacaatgacagaaagccttgcgacttaacgcatctgccactacattagccttgcctaggtgataatgaatttccaattcataatctttaatcagttcaagccatctcctctgcctcatattaagctctgactgggtaaagatatacttcaagcttttatgatctgtatagatatgacagatattccccagtagataatgacgccatattttcagggcatgaaccacaacggctaattccaggtcatgagttggataatgctcctcatgccggtgcaactgccttgaagcataagctatcactcggccttcttgcattagaacacagcctagaccactgcctgatgcatcacaatacacatcaaagggtttttcaatgtccggttgagctaataccgga

SEQ ID NO: 91108 - DNA, 414 bp, Zea Mays
tttagtttttataaacccctatggttacttatttgcaggtgatgttttgaatgatgtattggcttagactttgggctcaacttcaaaaggatgaagaggttataataaaggtggcatgtaagcgattggagatgacgtctatccaaattttcgctcactttggctggagattacgaatcggatcatgtctgtttagatgtcgtcaaagtctgttttatttctcttagttgttttgttttctgttgaattcagttcggtgatttttttatgtggtggtcaaggaccgagccagaaaaaagtttaggaaggactaaactaaactgttgcagtatagaagcccttcgttatattgtatatattttagattagaggagcctctagtgaggctctataggaccggaagcagtagggggc

SEQ ID NO: 91109 - DNA, 571 bp, Zea Mays
agaggaaacttcttcttatcttatcaatttttttcaatagccatttttgagccgggaagaccgtcagatgataaataggttgctcggataacacagatttaactaatgtctctctacctgcctttgagagaagccttcctttccatcctgcgagccttttattgattttatcaactaaaggttgtagctcaattcttttagcggttctgaagtgaaggggtagacccaggtatttcccgggtaacttagcgattttactggggaagacttctacaagatttggccacagctcctctgggtaacgaatcggaaaaatttctgttttatcgaagtttatcttcagccctgaacacccttcgaaagtctctagaatcgattttacaactttgagattttctttatccgctctaataaacacctctgcatcgtctgcgtatagggaacatcgaagctttgcccctcttggcaggacccgccccagtaacccagcctcagctgccctctcaatcatcctctgaagaggatccattgataatatgaatagaaaaggggaaagggggtccccctgcct

SEQ ID NO: 91110 - DNA, 337 bp, Zea Mays
ggcctacttgaggagcatacgcgctgataacattgagaaccaagtccccaatgaccagtttgactaggatgattctatctcctagcctcttaacatctactaccccatcttgaaggctcttgtcgatcaagacgcctactccattcttgtttgctgcagtccccgtgtaccacaacttgaagtctgtaccttccacttccttcgtcttttgtcctttccacttggtctcttgaacgcataaaatatttactcgtctcctcaccgcaacatcgactatttctcgtaacttacctgttaaggaacctacgttccaactacctacacggaccctagttgg

SEQ ID NO: 91111 - DNA, 439 bp, Zea Mays
cttcgggagataaggattttgaccttcgacatttgggtgggcaagaactttccaaagaggacaaatcagaattgaaagagtttgctatatcctgtggttaccagcccggatccatactcttcggcggggtcgacgaagagattttgggatgcattcgcgaccgcgccggggcgaaaatcataagcatcttatccaagagcgttggattttcgaagctagaaacggacatcagttgctatagacagcaacacatttttggcagcttgttctaatgaaacttcaaagtaagacttctctacagctccctgttggtatcttcatggtgatttgggtattctaactttgatttgttttgcatagtctgttactgagcaaggccttgaaaatgcagcaggatgtcgaggacagaaaaaagaaatcattgttgaaggctttgaag

SEQ ID NO: 91112 - DNA, 378 bp, Zea Mays
ttttcaaatatgtgaccaaaggaccagatcgtagcaaaatgtttcttcagaggattcagagcggcgaagatgttccttatgatgaagaaactgatgcaagaaatgaaatcaaagaatacattgacagtagatacctttgtgacattgattcttgctggcgagtatttgggtttgagatacatagacattacccagctgttgaaagaatgcatgttcatttaccaaatgaaaattatataacatataatacttcagctaacatggcaggcatattgtcacaatcatttctcaggaaaaccatgcttactgaatggtttaccactaatcaacaacattctaatgctagaaatcttacatactctcaattcccatcaaaat

SEQ ID NO: 91113 - DNA, 695 bp, Zea Mays
cttgggggtttattgtacagtataaggacataacctgcctacggtggtcgtcacgcactgagcatgggtccacttttgctcggatatttatgacgggcgtcaaaatccgagtgtagtctttgggtgatgcccctttaggtcgatcattccctgagtatttgatccttggtcagcacacttctccccccgaaagcttgctcgaggttcttttcaaggggagggccgccctccatcgacctagtcagcgcgggaaagcaacaatcaagctccaaacgggttatccaagtgagattcaaccaccctcttttgggttaggtcttggcgagtggttccactgggggctcgacctgctggggcatctcattgagtccttccttattcaatcctatatcggccctttggtcactccgaccgaccaaagaggggcctcatggccacccatcaaccgggttaccgcaggagaatgtgaggttcgaccatggacgtggatgcgaggaaatgacctatgggccagtcacctagcttgtggttctctgggagcttgctcggtccacccctctctccgcgtgagaattttaaggtgagtttcaagttttttacttggttgatatgatgtagttactgtcgtagcgtggcaaaggggatagtcatcatgacaccactcggtgcgagcggcttgatgagacgtgaaacga

SEQ ID NO: 91114 - DNA, 603 bp, Zea Mays
cgtcaccgagcatcgtcgtgaggtcctcctcgcctcaccggtatccatcgttcgggaggtagcagaagagatttatgagggttcaaggaaaaagattgtattatcgtcgagtgtgataagcgtgcggatcccgagcaattcctcatcggactttggattccaccgccatgccacagatcacgtggtggagacatgtcggcatcctaaatctaggtaatgtggccctagttatattcgccttgtcctccgagtggtgtagcatcaattggcaccgagtttgtggaactagagtctctatatggcctaactggccatggcgtgccgcggaggcacgggcaccaccgcatccgattgtcgggaggagagagacactgtgtttgttgatctagaaacatacaaccgcgattagatttgagaaaccccttcgatccactaaatctgggtcacatattgtttgatctacatctctaggattgtgtcgaattaggggtgatattgaccattggatggagatcagatggccactgctaaataccgcttcataatctctgaggatctaataaggtttaggatctaggacaccggctagaggggggtgagtag

SEQ ID NO: 91115 - DNA, 540 bp, Zea Mays
attgataaccatagtgtgtcggttcagttttgtaaagagaatgggactgcatggtggctaacctgtgtgtatgggccgcaaggggatgatgagaagctgctatttatgcaagaattaagagatatcaggactgcttgtctagggccttgtatgttggctggggacttcaatctcatctacaggacctctgacaagaataccaatcatttcaacagagctatgatgaatagattcaaaagattaattgaagacctagccctgaaagaaattccctttcatgggagacaatatacttggtccgaccagcaagtgaatccagttcttgtcaagctagatagggtgttctgctcagtggactgggaaatactatttccaaatgtcctccttcaaagtactgcctcccaagattctgaccactgctatctcatcctgggacttacaaataacagaactggaagatggcgtttccattttgaggccttctggacgaaacttgatgattttcaggatattgttgtggatgtttggaactcagttcag

SEQ ID NO: 91116 - DNA, 457 bp, Zea Mays
tcgctggactcctcatcgattcataatccttcgcaagttgggcttactgattggctttccagctctgcacgatgaggaggcttgccagctctgcaagaagacgactcatgagtcatgatgtatccagttttgcatcaaatgcttccagatctacaagagtaagtactgtatgtatgtgttagtttgtcatcatacatgacaattgattgggtcttggcaactagaggaagatggcagatgttgaccgtatacggctgggcttggaacgaggcccgttccacatggatcggcgggactcggattcaatcctggtccaactgggaatggttgttcggttaatttggggatgaattgcagctggttcattccggccgtttttcctgtctcatcatcccattggatcgacgcccggcctcctaccgtctggcctctgggagggaccaagcctacgacgacg

SEQ ID NO: 91117 - DNA, 372 bp, Zea Mays
tgtttaccccgactaccgctatcctctgcgagggtagggaaagaagagaaaagctgctacttcggctactccagacgagcctgtgctgaagggaaaaaagttaaaggttcttacccactggtcgtgatatattgaaccggccgtggtgcctgagtttggcggggaggcttcttcagctgctgaatcaagagaacctgttcctcccacgcagaaggctgaagagcctgctataatgccgaaggcaccttcggttgagctagttgaaacaaaggttgacaaagataaggctgaaaggtcaaaaactgaagaagtaacaaagatgccagggattttaagtccttcaacagaagcaatagcgctgaaggcagaaaa

SEQ ID NO: 91118 - DNA, 811 bp, Zea Mays
agccgcttcaatcagctcagcaagcattgtacctcttttaatgtcgcaagttgatgtttcgtctagttcgcaaggtattctgaaccttgaatgtgttgtgcgaccacctggaaggagcaaggaggcaaccccagaagatgcaaccgttaagactatccttttttgtgctcgtaagtgtgttatgatcgcattccaaaggaaagtctttccagtgcctccatatccagataaaaagaagaatccaaatatgtttgataggacagtatcaactatagtattaaaagcatgcaactgttgatcattcagtttcacacggagattgtatgcagtttgtgataaagtatcgaagttatatgataactcttcctcaataaatcgattgccgtggattgagcccgttgaattagttttttgtggcaagttgtattcttttatattggagccacatttgttgaaaagcacagataatttgtcaattaaatgatctcgcaattctattgttggcatttgataggaaggaagattcaatgtttttctcattctatattgaatatcatctgttagttgtttccatactttctcgaaaaatgcatactcatctccaacctcacaataaagaagcatggtgacaaatagatgtcgcaactgctcggaagtggcccatctgacagcttcgtcaaaggcattgtaccactcattgtcatcgttaagaagacctcgtgctctacatgcttccttaaatgtgggatgtaatatgttgttatatcttctcaaatcctcgtagcttgtagcacctttaacgatcataaga

SEQ ID NO: 91119 - DNA, 317 bp, Zea Mays
gtgatatagagcatcttacggtgactcactgcgacgtggtaaggctttaaggaacgcagccgggccagataacggcaaactccggtgatgccagcgcgatcaaccgcggcaggacacgacaaccggtgataacagtggccggaggttatctatggcacgatatttcttacccctacttcgttaaccaccagcgccggacacgaatcaccgcggcggcacgaattcggcgcatggctcgtcggcagcgaggggatctgaacctaggatctttttcagttactgtactatgagcacttgtttagagtgcctgacagacc

SEQ ID NO: 91120 - DNA, 1231 bp, Zea Mays
attcaaatcaatttcctccacagccccaatagttgagccaagctcacagatagcttggtagtttaaaagttcttcaggaacattttcagccaccacccaagtagtatggagtctggatttagctttagcttgagaggaccaaggtataacactaattttgaccccagatattttcagttttagttcaggaaagttaacaacctcctccaatctttcctgtgaggggaactgcattaaaaatccagatggacatttggtggctttccaagttcttccccagggaaagtggaaactaaaatcttgttccagatcctcacatctaatctctcccacaatgactttcaccaaacctaaaaaactttttctaggtttcttggcaacatttttagcaaactgagaggcatagaaacctaatccatcagccgccataccaacaataggcatggtaggtttactttgtttaggccaaacacatttagcagtgacatgagtttcttttctacaaatctcgcaccaaagtggtttgaaacattccctagcatggtgaccttcatccccacatttctggcaaaaaactcggcgaccaagatctagatccataataacgggggggggggggggtcggatgattcatgttacctggatcaacgccctcgcccgacgatgcagtctgcagatcttgcttggtctccgttttcacctgggtgggtctcaaacgccagctaaggttccggtgtcttccccaaggaggtgagttttgacgttgtggcttagggatttggcgatcccatttcgcgttcttccctttcggatccatctcagtcgagtctttagggatttggattccaatccctaccctcggtcacggatccggagaagggggaggacgaatgggaaccgaaatccaaccaccacagaagctagatttcacagcggaaggcaatcgccaaagggatgagagaaaggcagcgaggtgaggaagagggcgacccccaattaggtcattgggaaaccctagttttccagactgcactaccgcacgggggagataggaagaatgcagagaaggggaggggatacggaaatgacgcccggcctgggccgcacccctccgacacgcctcgctgattcctgatcggagtcacaactccagaagtccatccacgtcaaataccatcgcggggagcggcccaatcctgtagcaccttcctgggcttggagcttttcggtt

SEQ ID NO: 91121 - DNA, 498 bp, Zea Mays
ctggcaccatccttgaggactaggttctccgcaacagccatctctaaggctgaaggactttcagtcacctccatgggaattgaacaaccctgaccaacctcttggctccggagatcgccttccaaggtcgacgaggcacgaaacactactcgggataactctaatcccacatctggaatgtcagaacaaatgtccatcatatcaccatcagttggctcggacaacatatcttcaggaacgacatcctcgagagcctgatcaaagttggctatggataattcttgcagaccaacaagagtagacaaagctggagaaggaatatcgctactccccccactgactctgtaacgccgactgttcttccgagtccctcttcttcttcctcatcctcgtcaacaatacggacaataaatggctcagggtcacacccattgggatcagctctggcagggtcacacccactgggatcagctctggcagggtcacacccattgggat

SEQ ID NO: 91122 - DNA, 418 bp, Zea Mays
gccaagtgggcctgcgagctgggagctcacgacattgagtttcgacctcgcactgcgatcaagactcaagcactagttgacttcgtatcagagtggaccgagcaacaagtgctagataacccagaaactgcagaagtatggcggatgtatttcgatggctcgttgaaactgcagggagcaggcgcaggaatcctcttcattgcacctagaggtgaacaactcaaatatgctcttcagttgctattctcagcatccaataatgcagcagaatatgaagctttgattcatggattgaacattgccatatcactgggcatcaagagactgatggtatatggagattcactggtggccataagtcagataaataaagagtgggattgctcgaatgactccatgggcaagtactgcacagccg

SEQ ID NO: 91123 - DNA, 534 bp, Zea Mays
cttggtttcatggtgcatgagcgagggatcaagatcggacaccaaaagtaactatgccgttatgatgatggttcctcatacaaataaggttgaattgcagagtctaatcagcaaaatttataccatactccaaatagatatgcattgccattactttatagtgatgcaccgagacaagtaaatgagaagcatccatcactagatgaaagggtgacaagaattatgacaccactctaatgtattgtgtgcatcagataaataatatgcgatggattgaaccattctgatttgtatcacaaaattataaagcaaaaatggtgagaatgatctctaccaccagctctaacaggtggtgtgtccttccatcttcaaaccagtgggaaaatgtcttatctacccgtttatatgttcattgtgcattggattactagctgataattctaaatatttacatcactggttcagtgtatgatatggtggcaaagactgacactgtctataacaccagatcatacatcgggccagcggtgaaag

SEQ ID NO: 91124 - DNA, 571 bp, Zea Mays
ccgaaccaagtcatccccgacaacatcctcgggggctgggcacatgtcaacaccatccttggggtccaagctctctgcgatagccacctctaaggctgatgagccctcagttacttccatgggaccaggacgatccaagttagtctcccggccctcgagatcgcgctctaaggtcgatgaggcacgggatgacctcaacccagcatcaaacacatcagcacaaacccccatcgcaccatcatctgctggctccgataacaaatcctttggaaccatatcctcaagagtctgatcaaaattagccaaggacagttcttgcagacccatgagagcagataaggcaggagaaggaactccactactttcaccgctggtgataaactgccgactgtttttccgagttaaaggaacttcattttcctcctcctcgtcgtccacattagcaacgcaggcagcacacccattgggatcagcaacagatggagcacacccattgggaccaacaacagattgggtacacccattggggtcagcgtcagtaaattcagtcacaggcacttcttcagcatca

SEQ ID NO: 91125 - DNA, 328 bp, Zea Mays
cttcggatgacatgggtcccaagtgattcttgcaattgttcccaaaatcgtgccacgaatggtgctcctctgtccgagactatagtctttggtatcccatgcagacgaattatttgatcaatgtagatctctgcatatttctctgtcctgtgggtggtgtgtacgggtaagaaatgtgcagtctttgtcaatctgtccacaataacccaaatagaatcatggtgcctggatgtattgggtaatcccactacaaagtccatgcaaatgtcctcccatttccaagacggtatgggaaggggttgcaaagggccggctgccttcaaatgac

SEQ ID NO: 91126 - DNA, 539 bp, Zea Mays
aaagcattccaagtttgtggtatggtagctggatgtgtagtttggtactcatgccaccaaataaaagcaaaatcagtgcattcactcgtagaagctctaacctttttatcatcagaaaaatcatagcatgcaaatttttcatctaccgacaattcccatgttagatatgcatcaggatcatattttccatcaaacggtggtatggagaatttaattcttcctagagagtcatcattttcacgtacctcacgtcgtggaggtcgaccacccaagccatgacgatcacgttgtaggtgtcgttggtgcctaatagattggtcatcatgctcgatgtctgctgaatactccgtagcatcatctcttgtggtaccaacaatggaaccatggccgtcatcatcaccttgttgcctaccttcacgcccaacttggtccatcctatctaagcgctcaataattgctgcaagagaggtgttagtagcagcaattgttcgttccaaagtggtcaatgtgttgttggtaacaatttgtgttgtttctaa

SEQ ID NO: 91127 - DNA, 548 bp, Zea Mays
attgataatgatttcttgccctagcatattcttcaacattccattgtaccttctcatatctccaaccactgacgtcaatagcttcatcaactcccccttaatctttaagttatatagacacattcacacatccaacagatgactaagcctctgagttctaaacgagatcatattcgtcattcccatcatctctacattgtctcttgctcttcccaatattcctcactttacttgcaatgcttttgaaagacttgcctaagcctttgtccattcacacattatgcatgagaagcactatccaaaggcaattgtaccatagccgaatttattttactatcatttaccgaaatgatgatatacatatgtgttaaatatatatactaggggtatccaagagcaactcaataaacaagactctaataggtgggcttgaggactcgaccacggcaccaaggtattcgatccacatgtcagcaggtaacttgacctgccagaagaagagagggatgccatgatactaccagattagaagataagatagatatcca

SEQ ID NO: 91128 - DNA, 509 bp, Zea Mays
aaagaataaagaggaaccggatgacaaagctgcagcagaacgcatcgcaaggcagtcagcccactacaccctcattggggatgcactgtacagaaggggcgcaacatgagtcctcaagaagtgcattctttcagctactgggaagcaactgttagatgagatccacgccggacactgcgggatacacgcagcatccaggaccctagttgggaaggtcttcaggtctggtttctactggccgacaaaaaagagtgatgcagccgagttagttcagaggtgtgaagcttgccaattcttatcaaagcaacaacatttaccggcacagcaactgcagaccatacccgtgacatggccatttgcgtgctggggattggacatgattggacccttcaagaaagctcagggaggatacactcacgtgttggtcgccattgacaaattcaccaaatggatagaatacaaactcattgattctctgatttcagccaaggcagtggagttcataaaag

SEQ ID NO: 91129 - DNA, 742 bp, Zea Mays
gcaagggtggctcctccaaaggtagttttcactgggatgaagtgggctaccttggtaagatggtctattattacccagatagagtcgttccctttttgcgtccggggtagtccggttacaaaatccatgcctatttcctcccacttccattcgggcactagaaggggtttcaataggcctgcaggcttctggtgctcggctttcgttcgctggcaagtgtcacaccgggccacatactgtgttatctctttcttcatccctctccaccagtatctggttttgaggtctaggtacatcttggtggttcctgggtggatggagtaggctgagttgtgagcttcatcgagcaagacttctcgtgcctccccttttggtacacacagacgattcttgaaccaaaggactccttgttcatttgtcctgaggtccagaagttgttctttgcgagctttttccataagtcttactatctccgagacaaggcgttgagctttgcatatgaggtcttctagcattggcttgacttctaggctgccgttgtttcccagacatgcattcagctgagctgattccttcttccaatcttctaaaaagctgatccccttcatcccgaaaggttttcggctgagggcgtctgctaccatgttggcctttccggggtgataatgaatctcaaggtcataatctttgatcagttccagccatcttctctgatggaggttgagatctagctgagtgaaga

SEQ ID NO: 91130 - DNA, 748 bp, Zea Mays
gattcatagtcattcttaatcacttttgttctgataattaacatggcaagttgtcgccctcctaattcttgcaatcaccgcgtgtgctgctgactcctccacgaccatagtgcacccagattgttgtgtctcatccccctcactctgcgcctcgtcttgattcccatctagtcctttttttatagttgggcgacctctttttcttggagttcaacctacagttttggcacttctctttttgtccttgttctcggccgctctgcttctgtttgggttctgagggcatgttgtgctatagtgccccctaacatggcaggtttggcactctcttatgccctgacccccacaatatgtgctgtatggattagcaggttccacactatttttagcacatttagccccactcgcagacttcctacccttcgtgcgcgacactggcggttcagtcaatgttagatcagcgaggcagtttgcagaacctggattgaggcccgattctggtggtggtgtaggtccagtgggcatcacaacaggttccatattgttgtcagaactttgttgtgttggtgcaatgggaccaatattctgccgtccatctgcatcttgctgcaactcagtatttgttgcttcatccggaccaatctccgctgttcgtagaagctcaatcccaggagttatcatgtcgatgtgcctgatagtttcagtgtatgctctgtcagatttgcttcccgctcttcccaggcgcatt

SEQ ID NO: 91131 - DNA, 536 bp, Zea Mays
tagcgtgcgtggcatatgcgtacgcgccgatgggcggcatgcatgcacatgccgccgccctcccgcccgcttttgcactacgtcgatttcctgatgcaaggcgcgcggagtataaccaacttgttgtcatagtatacaaggacaaaagacggttggtaagctagctaggccacacagtttgtatatatttatgccgaggcaaatcaaattatccattggcacaggcgacacgtacgtacttgaaggagaagcgctgcagcaaacaaatacacatacttacatatatgtgtggctagttttgcaggggatggtgggcaggtaatttgagtatcataatatggttagtaagacgtactgtgtcagcgctgacggagaggaagctatttatatatgcggagtcaaaccctggcacaatgagcacgcacagtgcaagaagcaagggagacaacgtgaaatgtgccaatcgctccacccacacatgcatgtacacatgacatatgcatagctgcctctcgcttaattgatgaccaagtcac

SEQ ID NO: 91132 - DNA, 298 bp, Zea Mays
agcttcatctagtatcttctttctgagctcagggtccttgggaacaactaatcggtctccaaaccatagaattcccttgctgtcctgacggaagcatttgtatctctctgccttttgcttgaccatttccttaatcatttgaacacccttatcctcaatctgtgccctcactatttgctcttgcaatgtgggttccaccgagatataacttaatttaccggaaggaacaacttccaggttcagcttgcacaactcatcgcacagggtggtaactcttatatctatgcttatacaattg

SEQ ID NO: 91133 - DNA, 720 bp, Zea Mays
gggggcaaaactgaagtcgattagggtgttcatactcactatagtcgtgtcggtgttgctgcccacgacgcccggcggccccgccgtagatccgcgattctggtgagcaatcgccggccacgagagctttcttttcccccgagaaagtggctgacggctccccgtagacacgacgaagcgattcaggggtcgtaccggcgtttggggagatagcagaggtcaacgacggcgcacgcaggggcgggcatagcggtgacccattgctccaccggccagatgactccgcggcaaaacgacgacgctgatgattttgtggtatggtggctctctctctggtcggcaatggcggtgctcgtacctgttggtcatccttgttttgatgggagagaagtagtgtatgtgcctcgtataaatactcaagggtggagcctgagtcaaggaacgacagccgtatcctaacaaccccgccctagatcgtaacaaaccaatgctaatttcacggcggccacaataaagaagataaacaacgtcaaggggccccactagccatcgactatttctgacaatgctcggtaactagtctagtgaggcccacacgtcagatggagaaacgaggagagcaaacacttgaatcgaccatcccagcgtgcatggcacataatcagttcccccctgcggcccacatgtcattgagggcagcagatgtcatcgatgacgtta

SEQ ID NO: 91134 - DNA, 615 bp, Zea Mays
gcgagagtagtggaagcaggtgtggtggaggctaggggcgcaataggtgtggtggaaggctcaagagtggcggaagctgtcgtagtggaggaaggtggagtggtagtggtgactggggctgatgggtcaaagcgagcaggagtggagcgagtccgagacgagaggcgacagaccctgaaggcaatctgatcagaagcaatccttagctcacctccctgctctacctaatttgttgttgttgctattgttgcatgagtggctctgtccaatttcctcttcttcttgcctcccttctgctcaaggtacacatccttgcccttgtcttgtctaaagggggtggagggtcctggtcgtcttctccccgtaacagtgtaatattcttcgtcctcaccatcctacactgactgctgatacgctgcacgagaatgagaaaagataagcaagataagaaagcagtacataagtatagaaattggaaagatttgctacttaggcacgtttctcgagagaagaaccaggcatgaggggagtctcgcaaacgggcaagtaggcacactgaaatgatgaaagaggtgagcacgtattagccacatagtcataagcatatgaaatgtg

SEQ ID NO: 91135 - DNA, 756 bp, Zea Mays
taataaatttcatttatcttcgaacttatttcagaatatcaaagtaacctttcgttgggaagtaagtgaaccttcgcggtcgagacttaaacaaagcaccaaggattaattgaagcgagcaaccaggcgacgaaggaagatttaagcggtgtgctcaacacgtttcatgaaggaaaatatgacagtaccctcgacatcctatgtaaattgtatgtataaggcttggggcgtaaatgtaattttatatgcagttgtatgtctcatagtttctataaataggggtacaatgcccatgctcatggtatctcctttggaaggttcatgtgttcttatgctcttagatgactctgcatttgaagctataaggcggtaacatttttagacatcctttgaacatttcatcattccgaaggtacgcataaagatatttctggtcagaagagaaagaataaaggatcaagcttatggtgtataattcatttacatttatgctttagattgttacacacatttgcatctgctttgatcttctctcaatctctctcttctttatgaatagattaaaaggggagggaccttattaccttacttttgttgccttgatttcgtttcatacaggaatctgaacaagttatcaatagagactagtttccatctatatccagatatctagaactaggaatttggattttttttattttcaacatttataatacttttaatttagtatgagagattaactttacattcatgaat

SEQ ID NO: 91136 - DNA, 413 bp, Zea Mays
gttcaacagctagggttactcgcgacagagaggaagccgaaggtgccgaaactgctccaatctctgaagtgatgaagcgttcagggctggtagtatcggaggatgcacctgtcgctgaagctaagcaggctgaggctgaggaagttgagtcagaagatgattacagcacagtgccaactaaacccagccacctagagtttgggaaatccaccatttccgaaggtgacatggcgaagctgatgaatttgggctatttcagtgaagcgaagaaggagctggttcgtttcggcggggaggagattactccgaagctaggaaaggatgaagtagtggtcttcaaaagcttctttaaagctggtttaagatttcctttaaacaagatgattgctgatgttttgaagaagtttgggatc

SEQ ID NO: 91137 - DNA, 537 bp, Zea Mays
ggacggagtgcctcgccacgtcgtgtgtttaggtttaccttgcaaggataaaaactgtggtctgtgttacctacgcgacaatctctggtgagaacattactaactggatcgtagtagacatctcgttgtttctgcccaagcatgtagaggatagcgctgtggggagtactcggcggctatggcgccaccgcacggggggtgcgctctgcctgtgagtcagccggggtggagatgacgaccgggtatcgttaatttggtgatcaacggtggagatgggattgggggtaccgttttgcgatgcagtgatccttaccgttgatcaaccaatggagggatcagtgctgatcgcggcacgggcgtagcgtaccggttcatgaaagttcataagttaatccgatccgttgaactctaatcggatggctcacgatggccgataccccttcggccgtgacaaattcttaaagagcccctgtccttttatcaaatcaaccctccgtcctgatacgtgtaaagaaattataaaacaggcccggaatt

SEQ ID NO: 91138 - DNA, 620 bp, Zea Mays
gtggttttatgttaaaatgatctgatattaaaagggaagttatgtgcttcggccttcaaaggccaaatgtcactattgaaagtaatgacgaagtatgccagaaggccttcagcaatgtttgcgccatcattggcacaagggatatagtctaggagcacataacttatagggtgtggccacttgtggagagctgggatatgccataggagacaactgccgaatccaacgaaaatggcctagttcgattaaaatataccttcagattcagggagaagtttggtgaaccaaatgatgattagttgaaatgcattgaagctactagcgacgaactgattgggacatactccaaggccgaagatgatgcattgtccgcagccttcgggggtcggggcaagaagagattgaacagggtatttgatgcaattggtttcgtgtaccctgattatcactacccgctatggaggcaaggaaaaaaagagaaaaactgtcgctttggccaccactgttgtgccgaagggcaagaaaataaaggttctgacccaccggccgcggtatattgaaccggccatagtgcctgaatttggcgaagggacctattcaactgctgaagcaaaaccagc

SEQ ID NO: 91139 - DNA, 502 bp, Zea Mays
tatatactttgaggcaaatgggcatgggactgtggtattctcagaggatttcatctcttagctagagtcattaagcaatgagctctcctctcaagctgacattggtacgctcttactatctgttttacgtccttattctccctttcaacagtttatttgatgcggttggtctaatgccctttctaggttcagcaatcagcacagtaccacgctgtaatgagattgttggcagcgagtcagctgatcaatcaggcagtaggtgatgctctgagtggtttgcttttagtagaggctattttacagtataagggatggtcatttcaggattggtgtggattatatagtgatttgcccagtagacaactgtggggaaaaggggttaatctactcattgcattatgctatttgatatcatgagtactggattgccaatcaagttaccagttaaaatatgctcatagcactgagtacagtatggtagatgataggaaattagaaccag

SEQ ID NO: 91140 - DNA, 492 bp, Zea Mays
ctacaactttcttataatctacaaggactgattcaaatattaacttaagcaaacagtacagtctctgaaatctgtacagaaattggacagattcagttactgaatttgtaaaaagcataactcctaaactgtcagacctatggctgtcaaattttaacacaagtaagataatagagttgtctacaactttcttgtgaacaccaataactgatttcaacattaacttaatcaaccattgcaatttctgaaatctgttcagaaattcgacagattcaggtgctgggcttgtgaaaagcacaactcctaaacggtcaggtctatggctgtcaaattttagtacaagcaagataatcatgttatctacaactcttatatatgacttttctacagaaaacatgatttggtttatcaaacaaacagcacaacgaaaacaatgcgtgcagcctaaaacagcaatcaataaatttcagcttctataattcaagagttgcc

SEQ ID NO: 91141 - DNA, 654 bp, Zea Mays
aaaattattattgggaaaaaggttaaccctatttccctttcattcatgtcagctatgatggaacgcgtcaccatcaagtcatgtccggatatgtgcacatcacaccaaatgggcacaggggtctctacaatgacttgtacatcagaaggacaaagcagcgcgccacaccaagcgtgctcgtgctcacgctggcaggtgacgaagggcccatgacgaccggagaagccacaccacgcacgaccacactttgagtccgtggaactaattacaaagacgtcagcgttagacttgttataagagccagagcaacgagaaaggacgacgccatgccaagagtacgtctacgcacgaccctacgaaggaccaaccacgccaacccgacgagcagatctatctctctctccaatagaatacaagtcccactataaggtcctacccttgagatataaaaggaaggtccccctccttctcctagacacgaagacaccaattgtaacaggccctcaacaatactacaatcagcactacactgaactaggatgcaaacctgaaccaatataacccaccatatcaaacccattgcttgagtccaagtgactcactattagagtgagtctgcgctagcatccccaccaaacacaaatcttattgtcc

SEQ ID NO: 91142 - DNA, 559 bp, Zea Mays
tttttgtgaattggaaaaaacatgacaatgcaatagaaacaatactgatttgaaacattaaggttctaaaacattttggatatgaaagtactacatacaggctactagtttgttcaatcagaatcacaatctataagtaactcatcttcatagtcatccatcgcgcaatcctcaacgacaacctcgttccacttgttgtcctgcatcacacttttcagcagttctcttgtaatagttggcttctgcttcatctacagtttgggtgaatagctgatcctcagcctcagcctcatcacacttctacttgtaataagcggcctctacctctttagcggcctgcgacataaactcgtcctccttctcttgagcacgtaatcctgcctcagcgagtgcgatgagctcactcaaccttgatgtgttgtcctcctcttccccatgtaatcctgcctctgcgagagcgataagctcactcaacctagatgtgtcgtcgtcctcctccatcagctccaccgtcgccattttttcctgaacgtatcttgcatgtgcctcatctgcgata

SEQ ID NO: 91143 - DNA, 470 bp, Zea Mays
tgtttctccctatttgtctttaagaatgcatatctttagggggagcctatttctatatcttgattatgttgagactaacactttatcttagcaatctcatatagtctcaagtatgagaacaagtttctcatgaagtatgctactacatttcaatccaacttggtaaagtaatgtcatctttatcaaaaattgtaactttcactgttaaagtagcatatttactggattctcctggtttaagcttgtttgataaactaatgcatatgttgttcttttgatcgcatatgttatttgcttgatcattgaataacttcaattatcacttatgtttcttagtgcctcatataatttcaatcgatatctctcttgatatgcactaagttaaaaggagaattcatgatacatttatgcaatttgtgatctacttgatatataataacaatgacttagaaaaggatcactagttgtag

SEQ ID NO: 91144 - DNA, 800 bp, Zea Mays
gtataaaaagggggcagcgcggctcaggctctcttacctttctgtgcgccgcaaaaccctagcattttgaaaccgtttgcccactcgcctaccctccttgctcctgttcatcggagatctggcccacgtgaagcagaccacgcgccgccaccgatggtacgtagccataccgtcttcttcttcatccgctgcgaatacaccgttgggcgaatcgtcgtctgaggggaccttcagtgatttggcggcagtggagctacacccaggccacacggtggaatccggcgtttcgaggatctccttggttcgcgtgcaagacatgcagcagttggggtcttttgggaatggagttggacaagttctgggggtggaagagattcctgagccggagggtgagatagttgtgttcgaggcatttttactgccggccttcgattacctgtgcatcgttttgtggctgaggtgttgcagagctatgacgtgcagatccatcaattgacacctaatgccgtggtggccccagcaaagtatgtctgggtagtgacttcgtatggcggtcagccctccgtagaggtcttcgccaataattattgtttgcactggcagaagagaaaagttggaagcaagattgcatagtttggatcatgcaccttaatgtcgaggactgggaagacttcagcggaagttgtggagctagttccctgcgcccgcaacaagtggggcaactagtatgattattggttttatttggcgggaggcgaagtcgaagacctcccaggactcccgacggccgtgatgtgctc

SEQ ID NO: 91145 - DNA, 704 bp, Zea Mays
actttcatagcttcgacaattttcttaggtgcagggctcagggccttcgtagtctctataacagcgtctaatacgctggccatcctcctcctcttgggagttgtggcaggaattttttgcatctttagcaaatctgcctctgtcggtgggctaaggatttctggcgctttttcaccatttccacctgtggttcttcagccttatcatctctagcttcagccggcccgactttaggcaccttcggcaatacaatcggctcttcagcactctgcacaatcgaagcagcttccttggcctcggcagctgaagaggcccccgcaccaaatttaggcaccacggtcggttcaatgtaacgcggccggtgggtcagaaccttcatctttttgcccttcggctcagctgcaatggccgaagcggcagtcttcctctttttctcttgccctcgtagcggataatggtaatcagtgtatacgaagccaatagcatcaaataccatgtttaatcttttcttgccccgacctccaaaggctgcggacaaagcattatcttcggccttggagtatgctccaagtagctcatcactgatagcttcgatacacttcagccaatcatcgtttggctcatcaaacttctccctaaatctgaaggtatacttcagtcggaccagaccaccctcactagaatcggcggtggtctccttcggc

SEQ ID NO: 91146 - DNA, 372 bp, Zea Mays
gccgtctacacccccaagaataaattagattgacttcaaaaaaaaatacaggttgactgcaaacctacacttttcaattggggaagtcatgataaatgcgtgcaacaaaaactttaatccatgcacagaaaatcattaagattgatgaaagtagctgagtaaacaattagtcgcaattacaggaaacatattagttctaatcaaacatggtaggcaaatgtagagacatcacagctgaaaactaccattctcgattgagaaaatcatgctaaacgggcatgacaaactttgatctaagaacgaaaatcttcatgattaatcagcattaattaatccagcaaactgaacaagtttcaaaacccacaaaacaac

SEQ ID NO: 91147 - DNA, 476 bp, Zea Mays
ctagcagccaaaatatccactctctttgctcagcaaaacagataggggagggagcagataaggcctccacggagggtatacactatagtccaaggttgatatttcttacagcgtgaggccactaaatttgctgctgtctagctcatcccatcgcaggaccaacagacaaagcctcccagcttatcttccccaaaacagtccacagttgattttcttttgagtagagctgaggagaatctagatccttcactgtgtacctcgtccataattccctttgcacacacaagtgagatcagcagggacaggatcttcttcagttaatcaaacccaacactgaatcagctttatcaaccattactgccctattgcacagctctctgtttgatcccctttatctcacaaattcacttagcaacaaacccatcatccttaactaaatttagtcactaactacagccctaccaacttggtatagc

SEQ ID NO: 91148 - DNA, 512 bp, Zea Mays
gtctagcaagctggcatcgtcctacagagctaggccttcgccaataaatattgcatgattggggagagaagtattgagtggtactttcttggccccctcgtcacttcggatggggttttggtgcctattagtcttggctggcggctctggagtgtgatgactccgtggggtcctaggatcttcatccacaagtataatccatggattgctgctttgaaggcattaatgacccccttcctaggattgcattatgcggatacaccatgtcaatgacgtcgaaggtggtctgttttgtccgcgcgtttgggccagcagcaaaggatagtggtaggactattttttgagaggtaggtggccttaatttcgaatccgaacagaggattatctactagctgcaactattttggattgatgcccatcccgtcgaaggtgtggaggaatataatgtcggcctggctgccgttatgtttcaactgacgatcattgcgtcggtgtgtggggcgtttcagagg

SEQ ID NO: 91149 - DNA, 558 bp, Zea Mays
gtttggttagagggaggactgggactttctggcgtctagtaaagtggagtcgagctgagaagcttcaggttgtgaagaggttcaaagtatctgcggtggagtccgtagctaccttatcactagttgcgttgcctgcccaagctcgatgccttgttgtgcctgtgaacctgcgtggtgcctgggatggaagccacatgctcaaacccaagcagcttgtggcacctttggggtcattccttatcgtggaaaaatcgagcttggccagcgcctgtttcttatcttgttgcttgcgggcatagtgtagtgaagctctccactaccccactcgctagtcctgttcaccgtgtgcctctggggttcacatcttcacgttggagttaatcccagccacgccgtctattttgcttagtcccctcacatcgtcgtccctatgtcctgtggccacaccaccggaggtccacctcacctcggccagggctcttcggaggttgtctcagctgaactgtgcacgatccttgttcctcacaggtcagtgaagtttctaaagttggttttcgg

SEQ ID NO: 91150 - DNA, 513 bp, Zea Mays
cggcagtttgtcaccatagtaagttgttgtgaagtttgacacctcctccagtatgtatgcctctgcaatagaagcctcgattttgcatttattctacatttctttcggatagtctttagacatctctcgattggatagcagcaacgtccctgcacgcccccccattcgtgcctcatacgggagatgaagaatcaaatgctgcatcggattgaagaagccgggtggaaagatcttctccagcttacacagtaacacgggtgccatcctttccaagtctgcaatcatggtccgagctaactcttttgcacaaagctggcggaagaaatagctcaactctgcaagcgctagccagacatgctcagggacatagcctcgaaccatcgccgaaagaattcgttcaatccatatgtggaagtcatgactcttcatccctaagactcgcagagtagataagttcaccccctactaaggttagctgcatacccatcagggaacattaacatcttgatccac

SEQ ID NO: 91151 - DNA, 502 bp, Zea Mays
gtggttttatatcaaggacgatgagaagaagagggataagttgaagatgatggtcatgagcccactatgtttaagcttcggtatgaccagacccttgtgcaacatgaagccagggtcaccatgccagctggccatagcagaattcagagtggtggctgaacacatcagcaccagggatctagtacaagaatacttggccaacaaggtatctccaacgttgagtgaatggagtatgccaaagctgaaaggaacaaagaagaagaataaacttgttcaattgccctatcgcttcaagtttgagaaacaattcaaagagccttgccaagagtggctagagatgattgagactatgtgcaacaaaattttgggcaaatataccaaaaaagaagatcaactaatgagtgcatccttcagcacccgaccaaaacgaaggttgaatcgggtaatggacgctttaaactttgaataccccgattatgaacgactaaacaagggtgccgat

SEQ ID NO: 91152 - DNA, 459 bp, Zea Mays
ttagaagtgtggatcaaatgacacgaaaaagcttcaaggttgaactagaataagtatagacgatgcatgtctatcttacaactagaataatctagttggtaatggttataggaggctacaatgtaaaacattagacatagcattgcaacgaaatagaagagcaaggataatgcgacaatttctatgtgtgataacgactatgaggttctcagtatcatgtgtgtaatcaggtttgactgtggtattgaattcaactagttcatttcatttctagctagaagacacatgcttcaaagatccagacatgtgttagagttggagaggaatctaaattttacttgaaagtttatggtgataaatgagaaggtgcatagctataggtgaaatcatggagtatagagttgtggtgatagcgaaagctgttatttgaggtgggtgtgtgatgagactcaacacata

SEQ ID NO: 91153 - DNA, 449 bp, Zea Mays
tacaaggtatggacaaagtttccaaagtaaaatttaattacattattctttacaaaggttattacaagagttttttagagttttttctatagttgtctattcaagcttcattggtatccattaagctccggcttcggcttcgtcatctgttaagcttcggcttcattttcttactcttccgctccggcttcggcttcgtcatcctgtacgtattaaagtattgtaagcaaaattcaagcttgaaggaagaggtaagcacaaggtttgattttgttaccggcttaagatgactgtgagcttcatcaccagctttgcttcgtccaccctttgtccataccagttttataaatctatttgctatgcttcgggcaaggttgggaatgttatccaaatctgctggtgataagctgaaattgggtctattgataacttttccatgttcgcagcca

SEQ ID NO: 91154 - DNA, 949 bp, Zea Mays
tccagaggctcagaatagatcgtgaagcgatacacggcaggcaccacaggatccaagatccacggtccaaaatctctcccttgcattaaaccgttctagcctttggattttcaatctacggccgatacaacccctcttacctcaatccttcatcgcggatccaacggtcctccaccatcttcttcacgcgaggcactaggcaactgcgttgtggctgttcctagcccgcgacggtgtccaccggccaggagcccgagcagccccggtgatctccaccctgcccgatccgcagccgccccctggctctacagcgaagtctccgctggcgagcaacaaaccgaggccattcctccctacttcatgcgcctgaggaagatctgcacagggtgttcttactctctctccctcacctctctgctcaatggaggtgctcgggtctgatggagggggaaggaggggtggaggcgcatatatactcctatagaacccagcgatggccgaggaaatcggagtccgttgtggagtttgctgtggactttgttggccgagagctcgggtgtcaatggagtctttcagccgcgccgttgaatccgcagtattcggccagaggagatctcggccctctttgttgctgcagattccgaaccgaacgggtcccacctgcagaccataatggacgtgcgcgcacgagcgagatcgcagatcggcctggtgtggagggatcccagtgcttaggattgggggaaaagaaatccgagctagaggaaggacctgtcgtgcaggccccacatggtggtgacacagaagccaacccctggcgcgcctggtgtgatcccgaccagtgggccccacgcgcaagcgacccaggaaatatagaaaaagaaagggagttgagtgggccgcgcgggatgagatgtggagatgggccagaaacgagggtcgcggccca

SEQ ID NO: 91155 - DNA, 1023 bp, Zea Mays
attttcacaaccattgtcaccaccgcccaacttctcggtaccactagccctagtgtccctacaatccccaatctagcacctccactagtagccctcagcgcggccaccaggtacaacgttgctcaatttagcaagctcgatttcaccttttatgatggcttggaggatctcctgaattggctcgtccattatgagcatttattcggggagaaacacatgtttgcacctgattacgtctagttcgcatcataccatcaatgcaacgtggcacagacgtagtactacatcctcgaacatagaggtcatgccttccttggagcacaacatggagctatgcaacttgtgcttcagaccatgcattcgtactaaccccctctttggaattagcatgactccatttcacctccatggtataagactaccaagaatgttttagcgacctagtttatcagacactttggctagatactatttagaagaccaacttgttcatagggtcctctcagaacacattcatgtggaattccaactatgcacaccctaggacgtacaaagggccatgcttttgtctaggcatacaagcaacatgaggaagcaaccttgctggccctaggcttattcactgtaagcctccgtagtgccaaatggggatgctgactacactacctgggttgccttatgcctagggcgtaggaaccaccatgccaggagtggtagcaccctcactcctcatcccatagcgggccttggcatagttgttgttttgttgcctatcatgagctgaaatgctagaatgccgccatcaggggttatgatgaggcctatgtgtggagcccatcaatgccaacgattgtttctacctcaaggtagcaaacttgttagacgatgatgtcactgacgacgtggttgttgtggagaagccgcctaaacctccagtcatcttcccccacaccatcatcgacaatggaactaaggagactatggacctccctatctacgtatcattgccctcctcgatagtgc

SEQ ID NO: 91156 - DNA, 400 bp, Zea Mays
gtgctcaggacatgtgtttctttgtagccaggagcccaggagagtctgactatcattcaacggataagaacggaccagcatgggttcccatgctaatggcagcacctgtgcaggtgacggtcctccaccaatggagaagcggaaagaaccggcttttcctcttaaaacaatgccactgcatgctaacggctggttgaacaacatgaagctgtcctcgcctactgctgtccctgtgaacattggtaacagtgttgcttttgatcccatctaccgagcttggactgtgagtctacatcttacctactaactgagacccacgtagtcgtagctgtaagagctggcattgacagccagtttccttgtcatttgcagcagaagtatccttcagctctgaacgcgt

SEQ ID NO: 91157 - DNA, 385 bp, Zea Mays
tttaagggaaaggttggctgtacaatatgcgttgatggaactgcttacgtgtcccttactgcatctaagaagatagtgtacatgaggcacagggagagagacattctaacggctggtctcggtaaccctgagcatcctggtcgtgtacgaggaatctcatctaaggaaggatggaaggaaggattcggaccataatgggaaggtttgtacaagaaacgtgatcaatacaaggaagagatggcgaattattttaaggaggaggccaagaaagagttcaaaggcctgatgtctgaaatgctatcgaatcctcctctagaattgatgcagcaattggcgatggcgagtgcgatgtctgttcaacagatgaccactccacagatgcaaa

SEQ ID NO: 91158 - DNA, 562 bp, Zea Mays
tttgtggtcgtgcacgaactgactgacactaccaacctttcgctcgcgcttaagcacttgctagagataaagcaagaggggttgctgttaaccaagctcgcggggattaaaggaagccggcggaaatggccggtgtggtgtggggtgcaaggactcggtggctgcaagcaacatgggacttgtgagctaccgcccaagaccaccaccctttttccttcggggcctcctcttccctctttccttgggtggggcctctcgcgccactcccgctcgtcatcctcgccgctttattcttttttcaaatcattagtgtgctgccgctctgctctgttctcctctcatcggcatataattctctctctccttttgttttctccaagccagcagcacctcatctcctcctccaagaaccttttttttgtttttctgatcatctcactttccttgccagctcccacttagaatctacttgtcgccctccgctcgatgcgtccagccaaatattttgtgaacaatgtgggaggaaaagaaaacatcccctgtcaattggtgcttagcatca

SEQ ID NO: 91159 - DNA, 440 bp, Zea Mays
attaccacagggatccagttgacctaagcgatttataatctcctttctccgaaagggaggttcaggatacgattgcaagccttcccaatgataagcacctggccctgatggtttcacagggaggttctacaaatctgcttggcacatcattaagacagacataatggctacaccggaatctcttcgttttggaaatgctcacagtttgggactgctgaactcagcatatcttgtgcttatccccaaaaaagtggatgccttgttagccagggatttctggcctattagcctaattcacagtttcgctaaattggttaccaagttgctggctaataggcttggcccccaccttcagaaggttgtggctgctaaccaaagtgcttttgtgaaaggaagatcgattcatgataattacatgatggtgcaacactctattaaat

SEQ ID NO: 91160 - DNA, 368 bp, Zea Mays
tatgcacttcgatgtagcgtgcaaggtcgccaatgccaccatcaaaaggtgggtccatagctaccaggcaggttttgaggaagatattgggaggcttagctgataaaactggtgatggcgatgacttggcttccgtcattgctgattctaggtacatcctctgcctccctgtgccttcttggtgtttacaacatagtctgaatgccactgttatcaaataggttttagatttagttatggccttctttgctcacttttcttttgcctctgaaaaaacgttgtttagttgtgatgggcaatatttaaattagcaatgagctaaagtgacaagctgcatccctttcaaaagggagttacgatgctaggcc

SEQ ID NO: 91161 - DNA, 663 bp, Zea Mays
ttagagttatacctattagtgagaagcttttcatattatatctcaatgggcatgtaggtacgagtgcatatttcaaggcgattcatggaggttttgggtatggtagtacgaatcatgagggagaaagttttggacttcatggtaacttttgacctgttgatagccaacactttctttaggaagagaatcccatttagtgaactatagtagtggccactactctagtcagaataacttcgtcctcacaagaacgaagaataaacgaggatgtctggctttgcaaggtgatatatagggaatgttgcctctcaacataagcttatggtggtggtttttgttttcaagcctacatgtagggataaacaaagccaagattgcgagaacaaagtggtgattggtgaaaattaaaaggggacacgacagaagtcttcaaagaaagggtcatcaaagagggcacttggaagggagaagatgatgcaaacatgtgagagaagatggcaacctgcattcgaaagatggcctcacaggtgtgtggagaaaacaaagggagtggaggcgaaactaaagatacttggtggtagaacaaggaagtccaaagagctattaaggagaagaaagaatgttgtagatgattgtaccatggtaggagtatggacatcatag

SEQ ID NO: 91162 - DNA, 524 bp, Zea Mays
ctttccctgtttccacactgcccaatgaggtttgtataaaactgatccactgctgctgccttttcgcagtggttggttaggatacgatctccatcaaccagcatggccacaaaattcttcctcttacgatgccttgcatgaatatggaaaaatcttgtgttcgcatccccctctttgagccatgaaattcttgaccttaatcttgccattgttcgcttgaaagatgacagcatcaaggattgttttttgagcctgtttataagccagatctctgctggggtaagtggtctttcatcatgtgccatctccagtctatgcagcaactccttagccaaagccaactgcaaccttacatgcccaacctgcttgtcactccacccttgcagtcttcttgctgtcatctttagcttcttctccagggtctggaaagggcatctgacagcttcgactgagttccatgcagaatgcacttcctcctgaaaaccttcaagcttgggccaaaaggattcgaaatggaaccgccg

SEQ ID NO: 91163 - DNA, 413 bp, Zea Mays
aatctaaagctctgtactgttcctgatctggaaacatggatgcaagaaagagaattgttgtctgaattggttaagcagcagttagcacgtgctcaacaacgaatgaagagccaggcagataaaaatcggtctgagcggagttttgaagttggtgatcgagtatatttgaagcttcaaccacatgttcaatcatcggtagctctgcgatctaaccagaaacttgcattcagatattatggaccctacactgttcttcagaaagtaggacaggtcgcttacaagttggaccttccagacagctcaaaaatatatccagttgtccatgtttccttattgaagaaatatattcctcctccacatgacatttctgctgatctttcttctgtgtgcacggatccgttccagatattgac

SEQ ID NO: 91164 - DNA, 431 bp, Zea Mays
gtcgtcgcttccttagtggcgcgctacatcggcgcccagatgtagtgacaaatgtgcaagggtcttcgcatctgtctcaacgggtgcaaggggtaaggaagctagttgagtcgactaggattcgtgtaggtaattggaacgtaggatcccttacaggtaagctaagagagttagtccatgcagcaagcaggaggtgtgttaatatcatatgtgtccaggagacaaaatggaaggggcaaaaagtgaaggaggtggagaacactggtttcaagctttggtactcagaaacagtggcaaacaaaaatggagtaggtatcctggttgataagagcctcaatgatggagtggtggatgtcaaaagacagggagataggattatcctagtcaaactagttttggaggacgtagtcatgaacattataagtgcatat

SEQ ID NO: 91165 - DNA, 420 bp, Zea Mays
aatattttcaatgacatcttaggtgtcatatttagacaaatttctgaatcttgatatttgtcatgcattaaaatccttatagttcaggcatagagcaggaaaaatgaacaaatcaagcatatctttcatctgtcatgctgtagaacatacaatattgtgaaaacgactaactgaactgaactctgaaactactgaaagtattgtgaaaatattggatgagtgcatcacctcaagccaatgttatgtttcaataactgagaaagctggcgagaggcagtatgctcccatgagcgcaataatttttagtgatagttacactattatcactggaaattattgtgctccaaatctcccttgaaacgaactgattatgtctactacaccatgtatttaccgtagtagagattggaaaataaaatg

SEQ ID NO: 91166 - DNA, 690 bp, Zea Mays
tagatcctcatcatcatcggaagaagtatctgcaattgcaccctgatcctcaaactgtcttatggcctcatcctcaaccctgatttgtgatgctggagatagagctagaactatgtcctcaggagctaggcgatagaagccgaactgcagtctggaggcctcgagggtggactggaactgaggaggttggatcaactgagcaaatatgtggcataagtagtgagcgtacggcagctgacatcgcacggagaccatccaaaactgtgtcctcaatctcacaaatcagaaaatcgaccacgtcaaactcagagtgtgagatcaaggcaccaagtagccaaagctggatatgagtggtggtctctctgtatcccatcctcggtagcagtgtgcgcctcatgagctcatataggaacttggttgctggagtgaagtctgctggagaaagcagcgacccatctgtggacagaggtcgaaatagggcggcgacgtgagcagtgggaggggcaactccgccgtgagggtgacgaggaggatctgacgtgccatagcacaagctgtggagcctcatcgacgactcaggaaatccaaacaactctctgatctgagttgcatgtagagtcacatcctctcgctcaaacctaaacctcatccactaatgatctggatctatccatactgtggcatagaaga

SEQ ID NO: 91167 - DNA, 519 bp, Zea Mays
ggtgatcgccggatgaagcgccacggtgaaagccacccatcccgagcaccagtatccttgtttccctccggccgccagcacaacctcggggaattggacaccaccgacgatgggaactataaattgccacctccgcccgctcctttaggtaactgcgcagccggtgaagcaatccgcaccttgaatcctcccctagaattcaccaattttggatttccccaaatctgctcaagaacaccgtaatagcaacctctccgtggccagcgctcctcagtttaaaacatacccaattacttaatgttctagcctctgttaagtcccttgttgctcatgaacctatccaattgcgctaaaccaccctgggtagtcatgaacacgagtgaatgtcctcgctgcccgctgtcattgtgggcagagcaaggtagatcaccaatcgtgaaattgattgagggcaaaccctcgttaggtcttggattcaatctctaccaaagtagggcgtcggtccttgagcgattcggc

SEQ ID NO: 91168 - DNA, 460 bp, Zea Mays
cgaaaatgtgaagttagggctcagaacccagaagcgcacggcgacgtgatataaatggggttttactaggttgggcaccgtttctaaaaagtgccaagtcatcacttgggaaaacgagatttccaacataactcggttgttacctctaaaacaccgacagcatcaagcaccactcggcggttacctctaaaacaccgacagtgtctgtcataactcggttgttacctctaaaacgccgacagggtcaagcgtaacttggatgttacctctaaaacaccaacgtcgtcaagcaccactcggttgttacctctaaagcgccgacagtatctgtcctaactcggtagtgatctctaaaacaccgacgtggtctagtataactcggctgttacctctaaaacgccgacgtcatcaagcaccactcggcggttacttctaaaaaacaccgacagtgtctgtcgta

SEQ ID NO: 91169 - DNA, 385 bp, Zea Mays
gcacaaagaatcagtcgttgtccatctatgaaaaggaatttttagctctgatcttagcagtggagaagtggaggcaatatctgcaacgtgcagaatttgtgatcagaacagatcatcgagctttgagttttttggaggatcaagtattgcattcagatttgcagaagaaagctatggcaaagcttatggggctgcaattcagaattgtatatagaaaaggtaaagagaatttagctgctgatgctttgtccagagtgggtcatgtgatggctctgcagtctgtttcagaagtgacaccagtttggattcaagaagttatcaattcctatgtcacagatcaggcagcccaggatctgttgactcaattaagtgttcatagtccaaa

SEQ ID NO: 91170 - DNA, 406 bp, Zea Mays
tcagatgattccctagccaacatactaagcacaacatctatctctgcatcgtctgtactagctggcatctcaaaatgagtctacctctcatcatctggaagactccaaagaggggcaatcagagcctcaatgtcctcgggagagggtcgcactctaagacccaggctaccatcactagtaggagggttggacacaaattcagaaaatgacctatgtggcgtcagattctaggcagaataggcaacaggagcaccaacatttgacactctatcccttagaatcatatccagtcggctcaccagatcttcagtgggattctcttgtttatgacttgggtagagtcattgatgccactgtacagataagccgggtacgccctgtccttcaaaggttgtatattcttgaa

SEQ ID NO: 91171 - DNA, 531 bp, Zea Mays
gacaaataggaaagcgcgctcgtccaaattttgcaagataatcgagacgtatttgcatggcaacctgtggatatgccaggagtcccgagagagctggccgagcacaaactgaaggtctatccccaggtgaggccgatccgacaaaagttgcgtcgtttcacgcccgacaagagagaagccatccgtgctgagctagctcgcctagtcacggcaggattcattagagaagtactgcatcctgagtggttagcaaatcttgttcttgtactcaaaaagaataaagtgaattggcgcatgtgcgtcgactatacggatctcaacaaacactgtccgaaggatcccttcggacttcctagaatagaccaggtggtagactcgaccgccgggtgttctgtgttgtccttcttggattgctactccgggtatcatcagattagcctagcaacagaagacgaggaaaaaactacattcatcaccccgtttggagctttctgctatacctccatgccgtttggcctcaaaaacgctgga

SEQ ID NO: 91172 - DNA, 422 bp, Zea Mays
ggaccgtcggtgtcgtcgtggaactctagcgacctcaattactccacgccatagccctttaccacgtagtaataaccgtggcatgcccggacttgccatttcgaagccgttgcaccggctggcaccacgacggggccaccagtgcaatgtcttgttacggccgtgctccactctctttccaaattcggaataaccctggccgacctctataaattgagcacctcccttgcttcgtcttctcatcatgaacctagggcacccactctcgcgcctgatcatccaccatagcgccttaattcgggtttttccccaaatccatttcctgccccgccgtgagcacccctccgtcgaccctccatactgtccctccacccgcctacctaattgtcgttcttgagccctggtacgttgctaaagcttac

SEQ ID NO: 91173 - DNA, 371 bp, Zea Mays
tttaggagccggacgcgggtggcgatcaagtggtgggcaccacggcacctcaggtgaaaccatctgcccagcctcggttagttcttggtgcggtggagatggaggtgaagaggagtgaggataggtgggagaaaatgatggtggttgtagaacgtctgataggaaaggttgagaggattgaagaggtgcagcaaaggttacttgggcagacggagctgactgcttaagttgctgggcatgctgcagaagagagagtgataatagcttgtcagatggaggaagtagggaaggagatggctaggatgaggttggaagcaatggcaagagatatggagggtttatcaggaggatcgatagaggaggatggggaa

SEQ ID NO: 91174 - DNA, 768 bp, Zea Mays
aagccattatcggatactacatataatgaggcgattcaattaatttcgaatcaattgaagggatgtagaaggggcggggcgaacctgatggacattagcgactgaactatgtaaaagaatgtggggaactcgaaagaatgagaggggaaacgaaccaggggaggagaacgacggcggtgaatcgatgaagcgcggagattacggtgggtggaagcggtgggggcggtcgtcgatggcgatcgcaggagcgaatgacgacgatggggaggagctgatttttttagggtttgggtggacccgagctgaattaattgaaaggggtttgatgggtctggctcgttgaccatattggctcggtcggcccgcgggggagcggcgagggactgtgggtccactagtcagcgcacagtcagttggaaggtttggttactgcgtgttcataataagaataaatagctgtgcaaagtatcgtaaacagtttacaaaaaagaattaatcaagacccacgccaaagtacgtaatataataaatcccaattgatacgcagttgttaacatcgaattatacaaacataaatcccaaatactacaccacaccaaccaggccgcatcgctgtgtcaatttatgtaaccgttggagtcataatatgcatgtataaacgcggtcaattcccacgcgggacgacaccacgactccggagaacccacgcggaacgagcggactcaccgtggcagttacacgtttatgcatacggaattcgaatgaaac

SEQ ID NO: 91175 - DNA, 687 bp, Zea Mays
aaccttaagttgagttaatcgaatgtggcttacttaaataggttagttaatgctggagaaatggattagaccctacccctataaacatgtgttaacctaaaccagtaacctagatcaactcagccatacacaaacaacttgacctacataatgggttacataacctatccaaccaatatagaagcaaacaaccaaaccagattctgactaatctcatttaactcataaccgcctactaccctactttgggtacctacgaatctgccttagctacatgtccttaatttagagaacaaacctcaagaacgaagatcgaagatgattgccatcgtccaatcaaggaaggataagattcaagccagatcttcaaaggaatcaggatccacaatcttggatggagtctttccttaccatactctttcttacataaacctctctatgctttaaagacatcttttaccatacacaataaaatggatgtacatactcaagctttcctaatcatcttctactttttgtaataaaacttaaaaaatcatttgcaattaaaaccacttaaaaaactgaaacatagactgcaaaccaaacctattgcaaccgcttttcttacaaatctcgaggacgagatttctgttaaggggggtaggatttgtaaaccctaaaactgagctaagagttgggtattcc

SEQ ID NO: 91176 - DNA, 722 bp, Zea Mays
gtggggtgctcctatgatgcatggtcaaattgttagcttagacatttatcgccgcttgggtttaaccctagtcatattatatctatgtgtttatgcatagaatgcatacactccattaacttttggaaaaaaattaggttgtgatttttagggatgttatagtctcccccctcacaagaatctcgtccccgagattaagatcttacccggtctcgaagagatgggggtacttgtcccaaagttctgactccttctcccatgttgcttcctcgacggggtggttgctccatagcaccctgcagacggggatcctagtcccgcgggtccctttctctaaccaatccaggatttgcaaggggtattcgatatactctagcgtatcctgtaaatcgataacctcgggggcaatttgtttctctggtagccttaggcattagcggagctgggacacatggaacactgggtgcactctggctaagtgttccagtagttcaagcctgtatgctaggcctccgattctcttctcgatgcgaaagggtcccacataccggggagctagcttaccacaaacgtggaacctcttggtgcctcgaaggggcgataccttgaggtacacatactctccttcctcgaaggataactccctccgacgtttgtcgacataactcttttgacggctttgtgcaattctcaaattctccctatccttggccacattctcc

SEQ ID NO: 91177 - DNA, 606 bp, Zea Mays
gagaactcaaactggcaactcagcttcaacacacactccgtactctaaacagagcttgaggcagagagaaaggtccactgaaacaaatctgcagcagctagcttaaaaggtagggcaggggaaaaaggtcaccgagctcactatggctaaatgaagaaggatcaccaagggtgccaggacctcaagcactaggacacctgtccacaaacacaccccgcgccagcccacaattccatgaatctgctttggtttatttagtcaaggcaagtagataaggatgccttgtaataatgcacacaaaagtctaaacttgatatttctctaccttcaactatgcaccacgaccttatctccatccctacacacaagtacaaccagcaagggcacaaagatcttcttcagttttctcaactcagcactgcactaactgaactagccactgctatcccagttgcagacctccccgttgagaccctatcatttcacaaatccctatggcaacaacccaatcctccttaacaagatttactctccaactctagcactactaacttggtatagcaacccaagacttaaaacacacagaaccaaagatgtgatgtgcca

SEQ ID NO: 91178 - DNA, 372 bp, Zea Mays
tccacttccccaagataggaatcaacacatataacatgctcgaacaatgccctcaacatatttcaaacaacaattcttataaattatttcaatgataaacacattcgatactacacataagtttaagaacatagcacataatataaccgaatgatataaaccatcattgtttttacttgccttcaccggtgatttgggaaagtactaagtacgatccggaggtccaccaactgttttgacacacaacttagtgcacatattcacataacaatcgctaataaacaacgccgcacctacgcacaattccaacccgtcgcgagtaacaactctccccatcactcaccaaactgcagcagcgctgtttgataattt

SEQ ID NO: 91179 - DNA, 587 bp, Zea Mays
actccgcgcaaaagtcgcctaagggtgcagccagaatagcacaacaagtgcattaatcgaagtctctcattaaaaagacactccgcgcaaagtcgcccacgggcgcagccaaatcaacacaggcgtacgattacggccaacaagccacattaccatacaaattatagttacatacacacggcgagggcatcacatattacatcggctcaaccttcgggatgatacccatctccctgtaattgaacagcattatcctcaattcctcaccctcaaaaagattccaaagatctccctcacctatgctcgccccaatcagcgaggacagcaattctcgtttaccaacccggtctactcggagacggccacgctccatccccatacgacggtgcctaccacttcgcgaaaattcacccacactatgttttcccaccacccttcgccgcctatacccagtactcacactagcaagatccctggcaccctccacacgcggtgaagtctccgctgcagccacatccaacgcaacaaaataatccaaaccttcatccgaggactcctccgtccaaggaaacaaactcccagattca

SEQ ID NO: 91180 - DNA, 679 bp, Zea Mays
gtttgttagtcacagtttgtcattaaccatgttttttgtactctgctacgcataatacacatatattgtggttgtagcaatggcctagggtgtgcatgaacacatttgttgttgtattgggctaattgtgtcaatatggccctccaagctagggctgggcagatttacatcaacagtgaagaactgaaccgaaccgacattgaatcactgaaaatctcgattttcttggtgttcggtgatcagttcgattggtgatcctgtgaactttggtatttgggtgtggcttcggttttcataccacgaacatcgacaaaccgagccccctccctccgccccgaatttgacctgcaccgcgtcaatccatcaatgatttagcccattatcctagggcctaggagccacttattccctcagcctgtgacttctccatctgtttcatttctccacacgacgacatactaggtctgtaagcggcggccatgcatggcgagtgttaggtgagcagcaaggggctgatgtgtcggccatgtggacgagcagcgtgggcgagagctgaagtacacacagcagcggtgcaggcatgcagagagctagggaggcaacagccatgcgaggtgtgctgcgtgcggcaactgcatcaatttgcttccttatttactttgcttgatttgggatttct

SEQ ID NO: 91181 - DNA, 433 bp, Zea Mays
gttgatttgcgcagctcactcgttggctgagaccgacggagggaacagagcgaactgaggtccggacgaatgcgagcccacagaataaaatgatccgaaacattttatttgggtgttgcttggaaattaaattctcgtgcataagtagaataaaatgaatcaagatcgataggcttcgggttcgtaatcgaaataaagcgagtcggattaatagaaatcattgccgatgctgattttcgaatttagattggacacagagattttaagccgaattggagaaaaatttattagaggacaacacattggagattccgcttgagagtacggactcggattaattttttagacatagatcgaacatcgataaattggattcaaacacagctcgactagcaattgtcgagcgcttgattaaatgagttttgaacgagat

SEQ ID NO: 91182 - DNA, 760 bp, Zea Mays
agcagttgcagcttcagcagcatgcgagggcagggagtgggagggaggaggcgctcgagaggaggcgggcgatgatggcgatggcagcggcgtgccaggtgaggagccccgtgccgagggcggttgaggcggagcaggtggccgtggggtggccgccttggctcgtcgccgtcgctccggaggccgtgcgcggatgggtgccacgccgcgccgagtctttcgagaagctcgacaaggtaggaccttctccgttgcttcgccctgctactttgttatcttcccattttgctctcgcttttcgcctgcactggaatctcagaacagtggtaatctgcgaaattatgctgtaaattttaagttttttttggatatctagatgtgaagataagctgaggtactgctctctgtgaacagatgggagcagtaaaattgtgcggtaaatgaggaaatgttacattttacatgtatttccagcgacgcggaaacagttttacatcgcgagatctttccatttcttggattcgtttttgtctatgcttggcgatggcagctggggacgataggaaatagttacattccgttatcagtgggggacgccttttgtgttggatgcgggaatgccgtgtcatttcctttcttttggacatttttgttagtttcagtggaccgtggaacctatgaatagtaggcattggcaacaagcttttggtaagaatgtgccaaagtttggtcttttaccaggaaagaaattaaatacctt

SEQ ID NO: 91183 - DNA, 711 bp, Zea Mays
ttgggtttgacctaccaggaattttaacttccaatgagcaattacaggggctagatcagccattttccaaactggaaattgatagcatcataaagctccttccttcagataaatccccagggccagatggttttaatacaaacttcatcaaaaagtgctggcatgtcattgcccccgatttctatgatctgtgtgataaattctttcatgaccaggtttgcctcagaagtatcaacggatctttcattgtcttgattcctaagattgagagtcctatgaaggtgggggattacaggccaatttctcttctgaacaatagtataaaaatcttaacgaagctactggcaaatcgtctgcaaccgttcatgccccggctagttcacaagaatcagtatggtttcatcaaggggaggtccattcaagactgcttggcatgggccttggaatatattcacctttgtcactcctcaaaaaaagagatcattgtactcaaacttgatttcgagaaagcctttgacatgattgagcatgagttgattatccaggttcttatccacaaaggtttcagccccaagtggatcaactggatccggagcattcttcactctggcacttcctcagtgttacttaatggagttcctggtaagccttttcattgcaggagaggggtgaggcagggcgatcctctttcacccctgttgtttgtcctgg

SEQ ID NO: 91184 - DNA, 703 bp, Zea Mays
gccgacgcagcacggtcggtcgccgccacgctgcccgctgtcgccgcgcttcgctgggccatcctcgcctcaggtacgtacaacacgtacaaaccgtttgcgtgcccacacgctgtcagatttccacgctcctcgtcattcgtctgactactgttccacttgtgttgtaaggattgacgtcactatggtactacgcgtcgacgacatcaaatatgtgatggacggtggattcatgctgtgatcgacaactgcccttcaaacaacagtacacaccacctagagaaagacgatgcgtttcaggagcttgaaacgatcgaatttcagaacccacgatcactatccatactggtttatgtttacaatcactcgtaatggacaaaaggccaaagacgatcatgtttgttgtagcaaggatatttttcccgtttggatgtatccctttatgtcaacagactcgtttggatgtgagttttgtcgcacattagtagctgcacgatgttgtacgggtcagtcggctgtatactgacgatggtttgatggttgatggacatatggttaaacgtagcgtccgagctgtttttgcttttttacaaagttttcattaatataacaacgagagctaattcatttgtcgaaacataaggcatcggtgacaccggctagaggagtcggtgtaagatctaggacaccggctagaggaggg

SEQ ID NO: 91185 - DNA, 398 bp, Zea Mays
ctggcagagttatatatggctcggattgtgtgtttacacggagtaccaaagaagatcatgtctgatcgaggttcatagtttacctcaagattctggagaagctttcatgagactatgaacagtaagttgaattttagtacgacttaccacccttagactgatggacagaccgaaagaactaatcaagtgttggaagacatgttgagggcttgtgcacttcagcatggaggaagttgggatagaagtctaccctatgctaagttctcatataataatagttattaggccagtctgaagatgtcaccattcgaggctttatatggcaggaagtgcaggactcctctatattaggatcagactggagaaagacagttctttgggcctaaacttattcaaga

SEQ ID NO: 91186 - DNA, 514 bp, Zea Mays
cggctgggttggatttatccgatgatgtggtgatatgacctgcagagtgttcccggtttcaaatttggtgcgatacattcctacctctacctgttagtctgttactgttgtgagtagcacggtcagtttgaagattcacgcccgtgtcggttcataggggtacaaaaatgtgttgagagccagctgctacgtactgttacatttggcatctgctgtattatgtgcatgcatacaatcatgatggtttatcagttcaaaattcgcttatgtaaacaacaacacctagtgcttcttgtcttgtcaggttcgtttgggtaagcctaggctcctcacttttcagtaacagtaacggttcttgatttcttcctcttaaaggaatatgtgcttcggcatggccgccaaaaaaaaataaaaaataaaaaattcggaggttaatgttgctgtcagaattttttttttgaaaactgcagcacagttttttattctctcaaagtttcatgctgttagcatgtgc

SEQ ID NO: 91187 - DNA, 513 bp, Zea Mays
ctcctcaactaaattgccgagattatcgaccgattgcattgccccgcccctatataacccagccgctcccgctccttatccatctagccgagaacccaaccaccaccaacgggaaccgtagacggagagagagttagagaccagtggtgcggatctgcttcgcgcgcgaggtattgggatggatagactcggttcgggggggcttcaccggggagcacgagagggtggagatcatcgggcggacaaggccactggtcggcagacaccgccgcaggcggggagcgaccacaactttgtctaccccgcgtgaggaagatgaaggaggaccgttggatgcgcgatgaagaattgaggtaagaggtttgttatcggccgtggattggaaatccaagggttggaacggtttaatgcgggggagagattttggaccgtaggatcttgatccgatggccagatttgcgtaccggttcgcagggctcggatttaatctgagcgcttgaactaggatccaac

SEQ ID NO: 91188 - DNA, 756 bp, Zea Mays
actcatcatcaacccgaaccacaagggacaagtcaaccttatgtttgcaatctccaccttaacaagtgcattgtcaacaccaccatggaacatatatcagcagaagaaggaagaagaagagaagctcacttagatgaccaaaagccagacaaaagctgaaataggtcatctggagtgagcaaagcctggtccccaaggaaatgggcaacaactcatcacgacaaagcgagaaaaatgactagtcctcaagaagatgcagaaagggctcaacaccactagccagtagtcaaaaccaaattggagcgtaaaatcagcacaaaagctgaaatcaaaactagtaccctagaaagaggaaaaggctcaacacaactagcataaactccccatggctcaataactcctccagtcaaaaatgtctctccctaaagcccatctcaaaaacctcacagaaggtcaggcatcctcaacaaaatgatgtatatgagaaaaactccccaaaatctttcccaattggacatcaccaagatccccccaccccaaaaggcaacctaaaaacacaattctcacaaagacttctcccccaagtacaaaaacttctccccatgtaccatgtatctgaaattatccccttgttgacaagtacactcagtaagcatcaaaacagggtaaaaaggaaaagaagccaactcccccttagagaatgcaagggtcaaaaagagaatgtaggaaatgcagaggatgcgggagcttcaggag

SEQ ID NO: 91189 - DNA, 499 bp, Zea Mays
gccggtcgcctggtcctcgtcctacaagctacagggtcttgtcctgccttctgcatggcaggggcaggccaatcttttgtcagaaagctagcttaaacctgcagataaacggataagcatcattaccactttccagcacgcataatgagcttgtaattaaacaacaaataagaggctaatgctgctgtcgacaatgttttggtagggaccaaagagggcaaagcttttgatcccttttttaagtgaagatttggcgatgcattgttcctgatcacacaattgtactgggagtacatacacgtacacacttgtatctttctacagaaagtcaatagccggatacttacagttggcactctgcataaataatgcctttattgtgtgtcttcttttctctgggccggccatctcttttatattccttttttttaaaaaaaacttatttttattctctcccttttgtttgctggtgcctcactgcctctgcagaacatagcgc

SEQ ID NO: 91190 - DNA, 579 bp, Zea Mays
gccattgccttagccttttctacagactcctcgtgctcggccaaatcaacagtacgtgacatgaggtcccgtccaatccctttcaaaaatcgagctgtgccagcagtagtagctttactcttctttttcttgaatgtggacaccaattttggtagagggaatttagatttctttgattgtcgtgaatcccttgatggttgtggagaaggtgatggtgtcctaaatgttgatgcttgtggcggagatggtggattagaaagaggatgaggagcagcatgggaagattgtggaggtgatgatggatgtaaaggtactaaagttttaggaggcggagatgggtggggatgaaatgacgacggtgttggtggatcaaccaattcgacatccctttgaggccaaaggatgaattttttgatggcttgtccaagtgtctcgattcctttgggcccagggatgtctagcatgtcgtcctcaaatccttggacaaccatcctcatttctaccctgcaataatcatctggtatgtcgcttccgtgaaacttgtgtcctgggatcgcaatgcatgttcctactttcttc

SEQ ID NO: 91191 - DNA, 285 bp, Zea Mays
cttaacatgagatgttggcacattgaaagaaagatgaacacgacgaccgagctaacacgcatgacataaagtgctcatatctttattacaagactggatggcagaataatgaacaagtttggttagtgcctcgtggctgggatgtatgagatgtctccagagcggggatgaggtgcttttgcttttggtagcttggtaagaagagtacggattgcataaatgatgctttagcggcatggctatgctagcgctcagacgtctaatgggtgctaacgtttgaacact

SEQ ID NO: 91192 - DNA, 287 bp, Zea Mays
gccggaaggcgttactagcctgtacgcgctgggggatgcctttgacttgacgatgaatggaccctcccatttcggctccagcttgccccgtgattctgtccgggtggtccggacgagtacgaggtctcctttgttgaactctcttgggacgaccgcattgtcgcgccaggcctttgtttgagcatgatatttgttgagggcctgtagggcgaggacacggtctccgtcgatgagatctttggatgttggttcgtcgacatcggggaccgctgatgtgcttgttcggg

SEQ ID NO: 91193 - DNA, 514 bp, Zea Mays
tatcttcataccccaatgtctgtttaagacatttcagttaacatgcccttgaccacccttgtttcttaatgatccatgagtgatcattctatttttcacatccttggtgatcttgttgtttccttataatttccctagtaatgaatgttttatttttacttcaacccttccattcgaacctttcctatcttacccttgattttcctctccatttcgccacttcacgaggtttgccttaactctatccttgattatgcttttcatcattatcaccttttccattatcgcctctatatcttaccttgatgtttatcaccttttcctcttcctcgtctcttgcgagttctcaactccatccttcgttgtgctttcgtttgttgtcgtctttacctttcccatttgttaaccacaccttgttgattacatcatatctgttatctaaaatatccaatcttctatcccaatttgtgagcggtactttacttatctcacccttggcaatatcctcttcttt

SEQ ID NO: 91194 - DNA, 1775 bp, Zea Mays
gacgtctcggatctgggggccggcgtcgtcataagctacgaccgccagtgcacgcgcgacggcagggtcacttgcctcgtcgcgccgccgcggagctaccgggttcccgtgcgatggcccagcggcaagggcttcatctggaaggacaacgtgcggatcagcgggcaggagttctcgtccggaagcctgttcaagaggtgcgcgaacaaaacttgctccgtcgctaaaattccaggtggtgggtttggtgtactggttgtgaatttggtggttgctcattgataacaggatgatggtggaggaggaccagatctcgttcccgtcggacgcgcacatggccgacggtgtggaggattatgcccatcaaatcgctgagatgattgggttgcggaatgaattcaatttcaatgaggctggggtgagttattgccatatgttcagtttaacctatgctattactagtaattacctatttgacttccaaatctagtgaaggcatacccagaagccagaactagctgaagtatgcaactgaaccaatgatatttctgtcaacgaggtgtcattcacccattcttttggcacaaaacctaattattaaaagagtcactcgctcttggtagtgctctttgtcaacacaacaccctacgaatttgctggcttctgccaaaattttctgtccactttgttttttttttcttttcaggattcaggacacctgtactttatagtggttccataagtaacccttgtgatttccgttgagcattttctttgggttcgatgttttttaaagtatttaaaatttctacttcattattttcgataaattcatggcacagttttaagcacataattgttttttttaaaaaataagtagcaggagctctgctattcatataagatcggagaagggtttcaaaaacataggtaggttaagcacataattgttgatcagttattttggggcaaatattctatttatttgggaaacagtatttcatttcattcataagttgtttccctgtctgatttatcgtttaaaatgacccttcacatcatgatttgttattcagcaacacttgtctgtcgtggtctttccacttggcggtactttagaaatcttgcatgttgagtgggctggctggaaagtgccggtctatttctacttaatttgacttgggaaactctgcatgcccaatgtgctggaaagtgtatatcagagcttactactgtgcctgcaaaagtatgttggcaggaccttaggatctccactacgatatattattaaagcacagttgtttttaaagatcatcatacaaaatacatctggacatactatgtagatcactttatgctctgattggctgaagtaagactttgggtaattgttatgtttacaggaactcttatttctgatggtgtttcttgctatgccattttcaggttaggacagtccttgacatagaatgtggatttggtacctttggggcgcatctttttgagagagatctcttgaccatgtgcattgctaactatgaagcatcaggtagccaagtccaaattacactggagagaggcattcctgcaatgattggttcatttgcaacgaagcagcttccgtatccctatctttcctttgatatggtgcattgtgctaaatgcaatattgaatggtacaaaaatggtatgtgtgaaagtcttctttcacatgccctggccctcattgacgattataatgttattcagcaatgtcttaagttggcacttcacat

SEQ ID NO: 91195 - DNA, 448 bp, Zea Mays
cagccgggataaacctcgccaccgttggccgcttaccgctgtgcgccacatgctcaagcgttgtaccatgtcgcagtgaatcgcgtcttgcatgttctgtggtcgctggggagcttgccacagtgaaagccactaatcccgagctccagtaaccttcttcctctccagccgccaacgcatcttcacgaaattggatgccaccgctgtgggagcctataaattgccaaccccgcctgctccgctaagtaattgtgcacccagtaaaccaaccctcacctcagatcggccactagagctccccaatttgggatttcccccaaatcaaccaagaccaccgagcggtgtgacctcgtcgtggccaacgagtttcaggtccgttcatgcccactgtcctcttgtttcagcacccttacttgctcctgatactcgttgacccattcaatttagc

SEQ ID NO: 91196 - DNA, 650 bp, Zea Mays
gggttgtgtagcatccatcagccctcatagctagtgaccattcttcgggcaatttctcatcggcgttagtcgggccgtggaatccgacctacagcgtgagcaggcaccgccgctgcgtcataggcaaccgatgaacacttagacagttcaccacacaagtagctatgcatagtatcgtgtttcatcgaaggtcgtgctcgagggcgcgttaatgactttttcggcaagggtgccactatctgctacgacaagcattgccggtccgcgcgcagacaataggagaattggggagaaattgcactagccattgatttggaaatggaagggtgagattagagcttaggatacactttcgatgcatatgtccagaccgttgctcggccggtgggcatatcagattaaagataggcgtggagagtttctagccgtagataaaagattgaggggttttgatagcatactagttcgggtgagggcagatttatttcgtgccctccgttttaaatcgaatggttcataatacatgataccccttcgctgtgcacttcttacataagaggccccgagaaaaataggaattaacctgccgtccaagcttagtcaaaataaattagatttaggttctaaagtttacgtgtttgaccctgggg

SEQ ID NO: 91197 - DNA, 286 bp, Zea Mays
caaggattctacgctacggatatgatttctagaaagcacagggacttatgtgctaaaaacaggacctacatgtactcatctttgagctatgtgggacggtgcgcttatttttaaaatgtctaggatcactctaataaaatgtcctcggctgaaggggtaccaatccatcacagtcgtccaatcagaaccaacggtcctgattatatctccttaacatcgaatcggtacgcagcgccagccacacgatcttcggcccttaatcaacacggtgaagcgttatgccctt

SEQ ID NO: 91198 - DNA, 688 bp, Zea Mays
ccggatcaaaccttaacctaacccgcgcagttttgggcatgaatttggcttataaacatacaaagcggccagaccgcattcacggcgtaactctagctccgcggtcctagctcggccgatttgagtaccggacccatcaaattaagggcacagggggcacgagtgagacacgggcagcacgacgctcacagcaattgacaccggattagtaaggttctggtgggtcgacaccagggcagtccatatgttgtcgagctcgtgttccgtccaagctaagactgtaaagatcaaacggacctctggttgagcttcaccaagcttataagggtgctagaacataaactgtaggggttaagccataccacaatcgcctggccacgtgaagtcgatgtgtgggcggggtgatcaccagacacacgcggtggctagatcagtggaactggacatgtccagaatatggttttggggaagcagtactgctaatggaagctactcactgtggttaatggtcgaagcacggatcactgaactggctcctccttctttcctccccccggttgctctttatatagccagtgaaaagatcaaggggggctggatttttaaactgacagcaaggacaactatgagcaggaggggtagtcatggctcacacaggaagatccacgcaggttcacagagcatggtc

SEQ ID NO: 91199 - DNA, 629 bp, Zea Mays
acatttctagggacaagatcaaaattcatgattttcggcaacccaccaaggatgaagcccgagatcttcatttatctgagtctggtaaattttgggagtccacaaatctgcataagttttatagatatattaattctctatgcagaatgaccctcattcccaaagggggtaatcagatgaacatcctgggagagagcaaattcttgctctcgtttatgaagcccaatagctcggaaagcatcaacatttttgacatgatttggcaagaagttattcatgctgcctgcttccctcttaagggatgtcttcacgcccccttcatcatgaagatgattgaagtggtcactcaatttcactatgagaaaggcacaagacatctatcttacaccccattctagattgatccaaacaatctagcagagcgtctgaggaaagcgccctccagctctcgtggacctgctgatgtcggaccctcgcgtccatctcctggtcgcggatctcccacactacgtggtcgtggtcgtggtcaaggtcatggtcgtgggatgggtgctcgtctggcccatggcattgcagcattcttttccatgtgcagaaatatatcttcagatgtacatgagctggctcgg

SEQ ID NO: 91200 - DNA, 801 bp, Zea Mays
cttaaatcttggcactgtagtgctcgtgtagtataacaacttttgtttactatttacatggtattcaaatggcaattttatcctaactgatagatctactaaggcctagtcccctttaattttctaagctctgtgagtccatctaattacatgtgtgtacatgcacctgccaacttcaatccctttcaaagattattatgcatacatgagcacacccatgtcctttactggatctgcgcctgcagtaaggtgtgctttgcattgaatctttgtagcccttctattcttcatcctccccacagtggtggcatttggataggcagtgcaagtgggatcaggatatgtgatgctgagacagttaaagttatgatgaagaatcaacagaattgcagtatgattgggaaactggtttcagaagttggactatgggttagcatctcaataacttagttttaaatggtctacgttgacatgtctttgtctaaaatttcattggtacttgcattatcaacctaccaagaaataaagtttgttctgttttttctgctcctttgatctctttgctaaaattcatgcggtgatttgtgttccaggccaatcaagaggttgaacagagttgtgcatgtgagcatgcattcattatattcccacagttgatattctttgtggtactacatctatggcagatttagtcgctgctgccatacaccagatgcctagatcttctttaggcccttcgtcggcgaggagtatcacaaggtacgccaatcgcttggtcttatcttcttgctctgcgaaaac

SEQ ID NO: 91201 - DNA, 569 bp, Zea Mays
agcgaggacatgtgatttgattgaatttctcggctcgaagactatgtggtatccagagagttccactgcccacttgcctattctggttgtagcttttgggctattgaacaggtcgttgaggcttcggtctgtggccactcttatcttatgtgctttgaagtagtgacacagctttcgtgatgctatgagcaaagtgtaagctattttctccatttccatcatattgcatttggagctgctgaggacctctaagtctaaatatacatgctactactctagttttccatccttggccttctcctgcactaaagctgcactaactgctcgatgtataggagtagggtggaggcaggctctgggcttgttaaggttatcatttctgagagataagctttgagtgaattgaaggttgttgactgcttggggccccagacaaagtttttttctcccctcagggtcttcaagaaaggtaggatttgctctgcagatcgcgaaacaaacctgtttaatgttgccagccttcctgtgagcctttggatgtcttttgctgattgcagaggctgcaaatc

SEQ ID NO: 91202 - DNA, 459 bp, Zea Mays
aaggcctttggtactgtatgcttctttattgatacaagggacctaattcaagaacatatagcattcagagtatggcctcttgcagagaattgggagatgccgaaggaaactgtcaccgagtctggcgaaggtgacctggttcgacaaaaatataccttcagatatggagataaatttgatgaaccaaatgatgactggctgaaatgtattgaatctataagtgatgaattgcttgggtcatattccaaagccgaagatgatgcattatccacatccttcggggaccgaggaaaaaagagattaaatagagtttttgatgccattggctttgtttaccccgactactgctacccgctgcgaggacggggaaggaagaggaaaaccgctgcttcggccaagactgctacttcggccactgtagatgagccggcgccgaagagcaaaaggttgaaagtcctt

SEQ ID NO: 91203 - DNA, 447 bp, Zea Mays
gccctgagttctgtttaactattggaagctacgaccacaccactgaccacgtgtgcagaccgcaccgaacactttttgtctttttgtacctaacttcttacgtcaaattataatacgtgttatgctaatttgtgtatcagtttatacacttatggtatgcgcatgttccgggcatccgggcccacgagaagattgtgttcccgcaatctgggcagtcgtactagtccccacacaaatattggtattacgatgatttatgtttccgtttacgaaacagtaatggacgtgtcggtctatggacctttgcgtagatttcttcccgcagattacgtgtctcgggcccaggattccatccacttctcacggtagttattccgctcacctcacccgaaacgcacgaggcgatcgaaccctagcattatcgcccgctgtcaccttgttcttctc

SEQ ID NO: 91204 - DNA, 550 bp, Zea Mays
tgttcgtcgtcgtcttgattaaccgcaccagctagctaggtgagcttagttcactggtgacagacagacagcttgcccatgcgctcttgatccatcctctgatcacacacgagcaggccgtgatgggaggcgggcggcggttttcgtggcgggcgaagacgcaagaggccggccagaacgaccagaaaagcaacattatcgactgtactatatgcctattctattcacatggaagcatgaagcatgtacatgacacgggggcccagcccaggcatagtttagtactaggtgcaagaggccaaatcggcgagcgaaggctaccaaccacactttagttttgttgtgtgcaaatgcgcgacgcaatcagcagcccatcgtcgaccgaccacggctgttcgttcggctgttgacctcttggcttagcagaagagccgccaggccggggttctcagcagcctccagaggtcaaaactgtcctctgactccgaagggggaaattttctgtacaaccaagatgcaaacgctctcttttacggcccctcatattcat

SEQ ID NO: 91205 - DNA, 350 bp, Zea Mays
gagagatgtggctgcacatgtggcgatgtgcgatgtatgtcaaggagttaaggcagaacaccagaggccagccggactactgcatccactgaagatacctgagtggaaatgggaagagattggtatggacttcattactggattgcctcacacctcgaaaggatatgattctatatgggttattgtggatggactgatcaaagttgctcatttcattcccgtcaagactacttataagggatcactagcagagttatatatggctcggattgtgtctctacacggtgtaccgaagaagatcgtttcagatagaggatcaaaacttaccactagattttggaaaagttttc

SEQ ID NO: 91206 - DNA, 464 bp, Zea Mays
tcgactttgagggttgagcgaggcacaaccagacaaaggggtcagacgaaccgcaaggaagccacccacgtgtggccaacatactcctcttgccatcaaaatcgtgcatgccacatttattaattttttctagcaccgagtcacaacgcagtaaggaactggtcctcctctcactcatggcctatgagtctttgacctgagccccactcatgacccggaagacctaggcatgagtcctcggacgccctacgaagcatgcaatacaacgaagggaagcacggctggagatttacaaagcagagatatcgacgcatggcaaggcttttaccggggtctccactttaccttagcacaacgatctcaagccatctgtaacagaccctccttggcatataataaaaggaggatacccaaaccgagagcacatacgcgatatgaaatcgttctagtcttttggacagtat

SEQ ID NO: 91207 - DNA, 471 bp, Zea Mays
ggaaagtgatatagggggaaaattttagaggtaacaattgcggatagacttataacatcggaagcgaatagctgcttgctagcgtcagggtggtggggccagtgggttgcaaggccacctggcacaggggagaagtaaagcagaagcaaagatggaaaacttctcgtgaggcgtgacaagattcaagagaaggagaaaaggtttgaaaaagcctgtgagagcagaaaaactggctacatgtggtactctttgcttggactgtagcaggtagcagtgatacactcactgatacttgagttgcaccagcaacagtccagagcctctatatcttcgataaattgtctctcctataacgcacaaccatatcacctataaattgtctcccctataacgcacaagcatatcaactatattccaccttctacttttatttctctggcagcgatttctcctaaattttctttatatacc

SEQ ID NO: 91208 - DNA, 601 bp, Zea Mays
agcctggtgatggatcctggttctccatagcggatcctcttacggggaggggataacgccatggcagggacttgaacttcagggggattccgtccatcaagctgagcttccagggctgcgatccttgcgtgtgcatcctccagctccaagtgtaccctagagaagtccagggtagcactatccaggtcggtgttaagacctgccaccacaccagctagggtgttgaggcgatcttctctagctccacctagaacaatgctggtctggctttctccatgaatacgtagaggaagatgcttgtacttcgtgttgtgcagctgctgccagtaggtgtggctgagggaccacagaattcacctagcagcatcgctgatgaagcagcgtaggtggatagcggcgtcagagactcttgagctgacagagtcctgaaccctctatcacctgcatccatcaccctgacatgaatgcgagtgatgtagtagcaagccctaggaggctcatacgctcgccttgtctcatacaggggtcggacatagattcccaacacatgcagaacatcctgcagcaggttagggaagtgccctatctcaaacattgaggt

SEQ ID NO: 91209 - DNA, 588 bp, Zea Mays
gttggtgcagagttaccacaacattcattgccattgcactgttgtgatgttaaaaaaatttaaccatagccgaagctttttcactgcgctctcaagcgaacaacttcgtcaaaagagtgagcttcgtcaaaactacaaaaagaaacatcaacttcgtaaaaaccgcaaaaagtccatcagatggccagagtgtcttcgactgcaagggtgactcgtgaaggagaagagaccgaggtcaccaagacaacaccattttccgaagtcatgaaacaatcaggtctagttgtgactgacgaaggtacccctgttaccgaagctaaacagaccgttgctgaagaagaagatattgaagaggatgaagaagattatagtattttgatcccaacaaaacccagccatctagattttgagaaatctactgtgtctgaagctgacatgcccatgatgatgaagctgggctactttggggaagctgaaaggaaacttgtccgatttgccaaagaagagaccagcccagcaccgaagaatgatgaagtagtggttttcaagagctttttcagagcaggactgcgacttcctctgaatgag

SEQ ID NO: 91210 - DNA, 381 bp, Zea Mays
ctaaaggtgtcaccaattcggggtatgaggagatttaaagttaaagggatgttgtcccctcgctttatctaaccctttaagatcctaaagcgagtgggggaagttgcctatcaactggagctgcccaaccacctagcggatgtacatgatgtattccatgtatcccagttgaagaagtgcctcagggtaccagaagagcaactgcctatgaaggaaattagtgttcaaggtgatatgacttacacgggatatcctatcaagatcattgataccttgactcgagttacaaggaataaagtgattaagatgtgcaaggtacaatggagtcatcacggagaagatgaatccacctaggagcaagaagatgagctacgagtagaa

SEQ ID NO: 91211 - DNA, 454 bp, Zea Mays
gggaagtaccgaattcgcgggctatggtggctaattgggggagagagttggtgttctggcttcgtaacaagctaacggagcaggccgcacactcaatttatagcgtccgcaagtggtggctccgaattcggagaagataagctggcggccggagagaaggtaagtcaccggagcaaaactaccgtggcgctcaccggagcaaagtctcaggtgacagatgggctatctatcgtgatctactgcgacgtggtaatgcctccaaatatgtggcatccttgcatcaagcggcgaactccggcaatggtcatctcgaccgatcgcggggcaagtgggtacggcggccagctcacaatctcatacgcggtcaagatcttttcactggtccggtaatatccatgcctcgccatgcacgaatcacggtgcgggttcaccggcaccgagttcactgaacctg

SEQ ID NO: 91212 - DNA, 684 bp, Zea Mays
aaattagagaatgaaggcctctaactagctctgtcaggggttctaatggtacagtactaaagaagatcgcaggttcagtgtatctcaccgtcgatgaccccgcgccgtgatcctcgccgatgctacgattcttgcccggtggcgcacggataatgacccggggtaaaagatcttggtgctgggatgagctcggacccggccactggattattccccgtacccacttgttgtacgactaaccgaggtgtcctcaccggagttcgctgccttcgtagccatgccacgtgcttaggaacgttaccacgtcgcagtgaaccgtaatagggagtctgtccatcaccggaagctttgcctcagtgaaagccacgatagcgctcgcgctagtgacttcctcttctctccggtcgccagcgcttcccttccaaattcagagccgccgctcaaggcctctataaattgattccctagcctgctccgctaggttgttacgcgcccagtgcaccagccctcgcctccgattagccactgtagcgcctcaatttgggattttacccaattcggttctccgtgctgccgtgagccaccgcgccgtggaccgccgtctctaggtccgctctcatcctccttaccctcgtttcagcacccttgcatgctagggatgcttatcggcccaaccaattgaac

SEQ ID NO: 91213 - DNA, 489 bp, Zea Mays
atagtcagtttgggtcaattagaagaaaaaggctttaagtttggaggtggaaatggaaaattatgtgtgtatgatcaagaacatatgctgttaatagctgcacctagaactgcaaataggctctacaccatcaaatttggtctgtcagcacctgtgtgtttgctgttaaataccaaacacaagtcatggcagtggcatgctagatttggtcacctaaatttcagagccctacatgatcttagtagcaaaaacatggttgatggcatgcaaactgtgaaaaaggctgagcaagtatgtgatggttgtgttcttgggaaacagcataggaaaccttttccaactgtgtcaagtttcagagctgagaaagggttagaactagttcatgcagatttgtgtggtcagattactcctaaaagtataggtggtgcctcatattttcttttagtagtagatgaccatagtagatatatgtgggttgagatgcttaat

SEQ ID NO: 91214 - DNA, 502 bp, Zea Mays
gttataagtctattattttacttttttcaaccaacaagctgccatagccctttttatttctttgaaccgctgtgcaagcacgcacgtttgtttacggccatgcagcctcgcgaccaggaagaagccccatggaaaatcgacctcgatcttatctagccaaaatggagaggaaagaaatggtccacgcgaaggacccgctcgtgggaaacgcccacgccatctccatctttcataggctaacggtacagcagtacaggcacataggctccatgtgcaccatcgcataggcttcgtacggctgcaaattcatatccgcatgcggccagccatggtgaagcccacaagcaagtcgttgcatgacacaaattagctttcctctttttttctaagaaagtcaaccgccatgcaagacacgactctaaccgccatgcaaggaaacgttaatcgcccaaaagccatgcaagcctatttttttctccgtctctaaccgcccagccaccag

SEQ ID NO: 91215 - DNA, 366 bp, Zea Mays
cgcacctgtcgtcgacacgctgccgcacggtggtagaaaagcagttgaaacaccttccgtgaagatcaccaggaacaaccctgggaggtggcttcgagggacgagagcgtcgccgccgagctttttcgctttccaccttcacccaaccgtcgccatcctcttttttgttggggcaaaagacaggagacttggtagataacaaagcgtctttgaagaaatcccgctggacaggacaaccatcaatggaggaagcagggtagtcgtccctccatcgctgggctttggatcgactagtagccagagaaggggatggagtggtccccggcgccagggaaggaaggtgggtggccgccgggcttggagcag

SEQ ID NO: 91216 - DNA, 477 bp, Zea Mays
tcaaaaggcacccttaagcatgacattgtactcctatttatagtggtgagatacaacttcgtatgaatttacaaacatgcccacaaatcctatacatatgagctacaaatcttgtaaggttaatgtcgacttttcctctctcataccacgtcaaccaatgttctagaatcttctcgtccccttctgctttgtgtgttagagctttagaggcgaagcttcttctccccttcatccatgctcactagtcaattcatcaaggctgaagctttttagcttcatcacttctttatatgttggtgtggacaaaggtcgagtctgctacctgttgataatactaggaacatgcttaactattagcacaatgtttcaatgaccttcggttatgaacgcccccaatagtaccaaatcctttgattgcgatatttgagtcatcatcaaatttgatagtgccatggatttccatgacgatattgatga

SEQ ID NO: 91217 - DNA, 684 bp, Zea Mays
aacggatgaacttgatgctttccgcttgggcgccatctcaatcttgctggcgagcggaacggaagcagtatcgcacgagcgcaaggaaggcttggatgcagaaaagcaagaattagggcacggaaagcagaggcgcgcaacaatgcagtacatatggggtttttccaggccagataccgtttccaaaaagcgaccagtcatcacccggcggttatttctaaaaacgctggcgtgccatgtcatcactcagctgctattcttaaaaaagctggcgtgccatgtcatcactcggccgttatttccaaaacggtcgacgcgacccgttctaactcggctgttacctctaaaacactgacgccaccatcagtcactcggtcgttacctctaagacgccgacgtcacaatcaatcactcgcccgttacctctaaaatgccgacgttgccatcagtcactcggtggttacctctataacgctgatgtcgccagtaaccactcggttgttaattttaaaaacaccgaagtggccctgctatcattcagacactacttcagaagcgccgacgttgtcaacaataactcggccgttaccccaaaaagcgacaaggtgatcccgaatgactcggccactacttccgaggcaccaacatccatggaatcgtcaactgaccgggaggcaaagtaat

SEQ ID NO: 91218 - DNA, 537 bp, Zea Mays
ggttttggacttagaaaaattttgatttttcttttgtgctcaaccctttggtgaaccttttggggtttttctgaaatctttttggggttactttcttactattatttgtagggtattaagtgcactacatcttttataattggcccaatacatgatcaagtggttttcatagctttttggtcacacttacctctagtgctccacttgtccaaaggggtttgaattagggtttgggcaattctcccccttatatgtgcatgataagccaaggtatgacttctaagatgggttgcacttacttaggatcttgagctccaactttggtgtacttttcccaacttaagtcacatgtgatgatgggcttacttgtgtattcttgagtgaaaaactctaagtaacacctggggtgttacacatccctcatccgtcgatattagatctggtggctagggcggatcacgagtttacataacacctaggttttaatctagaccgatcggccaagatcgtgcggctgtaacgcgcccgtaccccttc

SEQ ID NO: 91219 - DNA, 575 bp, Zea Mays
cacccttaggcgacttttgcacggttttgtctttgagtaaagacttcgtatagcgcacttgttgtgcttgtccggctgcacccttaggcgacttttgcacggttgtctttgagtaaagacttcgtatagcgcacttgttgtgcttgtccggctgcacccttaggcgaattttgcacgtatttcgtcgcacgcgagggtagtctatgatacctgttgcggtgacttcaaatctgtcgaatgccgaaggccgtcaaagcggtcgttttcgacatggtgatacttgaatatttttgcgggggcttttcactgctatattacatggctccgcctcgttaaaaacctcacccccgggaggaaaagagtgcgggccgaaacaacaatgtttgcagaattacaaaggcgcgtaggccctgagacttaaacgaaaaatttcatgagattatcgatgttccaggaatgttctaagtcttcggcagatgacgttgccaacctgtaggcactgggggatgccttcgacttggtgatgaatggaccttcccatttcggcttaaggttgccccgtgattatgtccggg

SEQ ID NO: 91220 - DNA, 608 bp, Zea Mays
ccgccacaccgagccatgccagatcagccggcagaagatctgctattgtacatctcctgcacgactcacgtggtgagcactgcgttagtagtcgagcgggcagaggaagggcacacatatccagtacaacatcccgtctatttcatcagtgaagttctgggaccctctaaaaagaagtatcctcaagttcaaaaactattgtacgcagtacttctaactgctcgtaagctccgtcactactttgacgaccacaaagtcatagtagtcaccgggtttccaataggggatattcttcacaacaaagaagccattgaaagaatagccaagtgggcctgcgaactgggagctcacgacattgagtttcggcctcgcactacaataaagactcaagcactagttgacttcgtatcagaatggaccgagcaacaagtaccagacaacccggaggctgcagaagtatggcgaatgtatttcgatggctcgctgaaactgcagggagcaggcgcagggatcctcttcattgctcctggaggtgaacaactcaaatatgctcttcagttgttattctcagcatcaaataatgcagcagaatatgaagctctgatccg

SEQ ID NO: 91221 - DNA, 377 bp, Zea Mays
gccctacctatcaatgactttagaatacaaaaataaaaaggaataaggtgtaagagtatcaactagtgaaagaacactcgtatgagaagtttgatagtagatttaggacttggaaaataatattgatcagatatacatacaccatacgatgtatttggactgacacaaattgaatgtgttgcagttggatgatgaaagaaacttgtagcaaccgggagaaataagcttatatagtggatgcaataggttgtattctcaatcttatctaaacttcatcaactagttccaaaatgtaagataaacataaataggattacaaaaaatcatggtgacatggtgccaagaaagttgaacacatacaacttcagaaccttgtc

SEQ ID NO: 91222 - DNA, 343 bp, Zea Mays
ctcgcaaaaatggtgtgactaggttcagtcaattgtctctggaggacatgtgggggttaaagttaatgatgaaattggccctttcttttctactcacaagggtctccgtcaaggtgatcctctttctctgatactctttaatatagttgcagacatgatggcaattctatttttaagagcaaaggaaaataaccaattcacgggtgtggttcctcatctagtggatggtggactttctatcttccactatgcggatgatactgttgtttttctggatcatagcttggatcaagcgcgaaatgtgaaacttctcctgaccgcttttgagcagatgtcaggtttg

SEQ ID NO: 91223 - DNA, 343 bp, Zea Mays
tggtggtgcacatcaagaacggggtggcaacgagtgacgacgagtacgaagcatcgggacggattgactcgagtggtgttgggaagaatggggccaaatagatagatacaaggactgggcaagtaggaggatgggagtcaagaggactaagctaatccgaggagggggcctaggacaatatttttttagcccacctaaaagttcaatttttttataattaacaacaaatgaacaataggtataagaggttacaaataattgagagaggcagggtctactttgcccccaggtctacccctaaatgtacccaagcgaccaggcggtataaaaactttgtgttact

SEQ ID NO: 91224 - DNA, 971 bp, Zea Mays
cgacgacgagcgagtggctgtggcacaaatgcaacagctatatcgcacacaggcacgcggtaaaagaacaacgtcgtcgtcgtactacaatttatacgctccaccacacaaccactattgcctcggttttccaacagtcacatctagtagcagcccctcgaggcggtccaccagatgaccaagggcagcgttcgtcctcccttcggacaagggacttcgggattggaccatcaggatgaaccagtccctcggggggctagtgttgggacggaggccaaactggccctcgatcaaaaaggcgaagtcatcaccaacccttgactaaccataacgctgcaggtaatcagagactccgtgtgataacaacttcatcgacattggccattgactggtggagacgaaggcatgtgagtcctcgactcgtcttgaggaatggggcatctggaaacgagaagccttcgccaagacgccatcatggcgaggaccgataggagacgcaaaagctcttccggacgaaggctgcgggagcgacaaatttgctcatcgaagacgtgggcccgcagtgatgacgggtggggcccacctttcaatctaattagcgggtacaattgcccgtgcgtgtaaccaggaggggctgcaggactataattacccgttgtacagttcgtattgtaagaacgcgaccgttgactgagggcgcggtggcgtactttagactacctaccctcgaacgtccctataaatacctccgtcctatagcgggacatacacgtgtaataagaagttacagttccctgtcgtttgtcttgccgtgtacctgagctctctcccaccttctctaagtgtttgggtacgctgcgtggcagcgcgtgtcactgcccaacgatcagttctttattattgatgcttgatgcttccgcgttagcttctaggttataataaagtttaggttgttgcttattcttaccaaa

SEQ ID NO: 91225 - DNA, 516 bp, Zea Mays
gaggactagcattgtggaaaaaatactaacctgaatgccttaggacaacatagaaaaatggttgtttaatttaccaaaaaattatgtcggctcatggaaagagctggcataacggttcatctgtcatttagcaccgcatgtggtcgaacaccaacccaacaagatcttaggcaagtgatccaagaagaaggcgagtctcttctcagatatacctagaggtggtgagatgtcaaaacaaatatctccaacataccagacaagatggctattcacattttccatagaggactcaacaataatagcttgcctctctagttcgagcacaatcctcccaccactctcgcctccatgtcctaggttgttagcaagtatgctttaaaggaataggtgcttcgacatgaaccagtgtctccacaaaacaaaactatgagagaggaggaaactaagtctgaggacaagaagagaaaagcataccaacaataccaacagagtgaaaatgctccataaccgaaccaa

SEQ ID NO: 91226 - DNA, 468 bp, Zea Mays
ataataagtcaaaggataacgtaaaggcaagattggatctgacagcattatgtgatagaccaaaccaagagatgaagctgcctagtggtggaaatacatggagaaggcctaaggctgatttcatcctaagaagggcccagagaaaggaagtactagtgtggatcaagatgttaatgttccctgatgggtatgccgctaacctgagtagggggtgaacttatctgatctgttagtcttagggatgaagagtcatgacttccacatatgaattgaacgaattcttctagtgatggtttgaggctatgtccgtaagcatgtctggctagcgcttgcagagttgagatatttcttccaccaactttgtgcaaaagagttatatcggaccatgattgcagacttggaaacattggcacccgtgttactatgtaagctggagaagatctttctacccggcttgttcaatccgat

SEQ ID NO: 91227 - DNA, 387 bp, Zea Mays
gcaaccattttcccatgatgacaatggtgatagaaaagatctttatcatatttcaattcatacaaacttggatgaggtcaattgagcttaatcgaactaaaagatcaaagctcaaagaacctaacctcatatgccacttccaaatctaagaggaagatcttggcacaagacatcgagaagagcgaaaagagttggaaaattagcccaaacaagtcgtccaaatggggaaatccgataaacaagatctcccttgtcatccaaaatacaagaaagtccctttttaaagcacacttcgaaatcgtcctcaaggagttccgaaatagagagcaaattaaaatgcaaattggaaaccaaagcaacatccttgagtacaaagctcccatttac

SEQ ID NO: 91228 - DNA, 361 bp, Zea Mays
ggataagtggaggttctaggaaaaggaaaaaggactgcatccatatttcttagctttccagcaaagattagtggtgtacccgcctgaaccttcttgcaaagctctaggctctagctccgtggccatgaacacggacacacagacaacaccaactttcccaattccttcacgtctgcatacgaagacgaagggattgtgaaccttccaaaatcccgctgcggtagcctgtcctttaggggtttcttggcttagaattcaggaaatgagaaacctaacgagccaagaaacaggcattgttggaaaggggcgagaagcgagtagtaatccttaaacttgtaggacagaagaacaattggagaac

SEQ ID NO: 91229 - DNA, 579 bp, Zea Mays
tgggcagcacacaagaggagaggactatgtccagatttgcaactatagaagcaggaaagaaagtgcatgataccatccttttaaccggattttggagctcaattgaggattgcttgagagtttcacaaccccttattgttttgttgaggatagttgatggggataagaggccagcaatgccagaggtttcattttgtatggaacattggaacatgcacagaaaaagattaagaaaatttccctactatggcaaaggcaaacatgcttaagcctatcttggaaattattgaccggtattgggaagatcaaatggaccaacaactatatgggcagcgctatatttgaacgcaaacaagtattttgagctgaaaacagatgatgttcatgctggtaagctaaggtctgcatttagacaaaattgatgaccaagctttggaatatgaggacctaagggctagcttcagtaacaaaattgcaatcaacatcatcaaaattcaaaaccaagacttttagtaagttcttcacagatcatacaatctgaattttttagtctttccaaatttctaacaagaatttttt

SEQ ID NO: 91230 - DNA, 475 bp, Zea Mays
tggaggtgcagcatgtaagcactgaagatcagctcgccgacatactgacaaaaccacttgcaaggattcgctttgcagagatgcggaggcagctaggggtggttaacatttgacagattaagggggtgaaatgttgcattaatctctttgtaatcgtgtcaaatgaacacgtatctcattttgatgcatgtaggtagtttgttttagtaacaaatcatgcatatttggcgtagaatcgcgggtgagctggagactgcccaatctcacgccgtgaccgcatttttgtcaggaaagaaccaccgcagcagatttgccgtgcatgtcgcactgggcgttccggaaataacggcgcaccgtgcagcgatctgttgcggtggggaacacgggggaatccctctataaaaggaacaaggattgcattggtgctgattgcacgcatttgcagagaaatctcgtgtcctctcttgtactctcg

SEQ ID NO: 91231 - DNA, 1031 bp, Zea Mays
  misc_feature (967)..(967): n is a, c, g, or t
acactattcacaaccacactgctgtctctagtacctaagagtctaggacctatcgggccaccctcggtgatccgaattggcacactattatggaagccaagtactcagcttgttgtccaatctcacgtgggatcttcttcctcggccacctcggtccaatgtagtggcaagaaaatgggtgttcaaacaaaaattcaaagcaaatggatcctttgagagatataaggcgcatagggttcttcatggtttaatccaaagttccggtgttgatttttctgagacatttagctcgatcgtcaagcctactactatatggattgttctctctttggttgtttcacgctcctggcctattcatcagctcgatgtcgacaattcctttctacatggtactttgtcagagatagtttattacgcttagccatccgaatttgaatataccactcatcctgattatatgtagcaccttaattgttcactttgtggacttaaggaggcacctcgtgcttggcacaagtttgcttttcaccttctacaacttgattttattgaagccaaatgagacatgtctctatatgtttatcggcatggagcagacatggtttacttcctactctatgttgatgacattgtaccactctgctctgaggtaccattggtgccattcaacatgagttacctatgaaggatctcggtgctcttcataacttcctaggcatgcatgttcaacacacaggctcgagtctcttcctctcccagcggtactatatgattgagatccttgagcgtgatgaaatgcaagccatgctcaatgctcattgatatcaatccaaagctctcagtagatggcaaccatgtacctgatcaatagattttcgtagccttgctggtgctcttcggtatctgactttcactgggccagacatatcttatggcgttcagcaagtctgtctccacgtccatgatnccctaggagccacaccttgacactctctgtaagtagagggactctaactctcatcaagaggatg

SEQ ID NO: 91232 - DNA, 554 bp, Zea Mays
ggaggggtgcaagccattgacatgtccattggacatgtaactacttcctgttggaatacatcacatgtcttttctttctaacactcccccttgatcaattccaacttcatttgataatcattcagctgttcttccaagatattattctccttaaaacccctgtgggaaaaataaggagtataccattcttttggattatgagtgaaactcataccaacttccaaaagaaagtatgcttgtaatcaccattcttaaaaacccccgtggggaaaataaatgatgaatcatatagcttagttgatattacctcgttaaaaactttggatgagaaaacctcaacaaagcaaaatcatacaaaaaagagtgtaatatgatggaccaaaacaggttaaacatcatggagagttactccccctgaaccttgcaagtctttaagtcttctcataccaatcccctcaacacatttctaaaacatggagtatggtagagattttgtgaatgaatcagcaagattatcacaagactttgtctgcgagatgtttatatctcctttt

SEQ ID NO: 91233 - DNA, 571 bp, Zea Mays
atcatgtagtatgtggttctagttctggctcgggcggattccagcatataccgtgagctaaaacagcgtaaacgagtacgaaatttagcgtaaatcctatatctgttttgtaacagcaaacaaggcctaaaattacgacgtgaaaatcgcgtgcagccgatcgtgcgcgggtcctggctcaggcctattccagcgtaaaacgtgagctaaaacaacgtaaatgagtacgaaatttagcgtaaatcctatatctgttttgtaacagcaaacggagcccaaaattacggcgtgaaaatcgcgtgcagccgatcgtgcgcgggttctggctcgggcggattccagagtaaaacgtgagctaaaacagcgtaaatgaatacgaaatttagcgtaaatcctatatctattttgtaacagcaaacagggcccaaaattatggcgtgaaaatcgtgtgcagccgatcgtgctagggttctgactcgggtggatttaatcataaaacgtgaaccgaaatagcgtaaatgaatacgaaatttacgtaaattatagacctgtttcgtaacagcgaatgagg

SEQ ID NO: 91234 - DNA, 338 bp, Zea Mays
atttcagggacaatctagcttcttgcctgcgtattaaggtgctgccttcctatccaatatgaaaaaaagtaataagcccctgggttatgtaacttatgattgcttttaagttcttacacattttatattgtgcccatagccccatacccatgttgaaatataattatgcccatacacatgctaaaatattttgttgttgggatatggccagtacttgtttgttacttctggttgactctattcccctaaacactccctttccctcaaggtacccccacagttctagcgatactgggtttgtggcctaactagcttgtcatttatgtctagcaattgta

SEQ ID NO: 91235 - DNA, 434 bp, Zea Mays
agactctcatacctatcggcgtcgatgggatcaacgtggacttcctcattttctgcatggttagtggcaatcaggggggcgtagggtagccggcagagttgagcacctcccacaagatggaaggaaaacccttgtgagaaaagaaattggaactgaaatgcgtgtctcctccattggcgggggtgggtgaagtcatctgtagaagaggatcagatgtaaagcttatggtagaagaaggaaaaatatgtgagcccgagttgttaaaaggaagtgggttagatcaaaattttaccccttttatttctaatcttttcgtgttttaaaaatgcatgcatgctgaaaaaagtgtctcctcaccgaatcagaagggtgctttttagggcatccttgaaatcctaagactggcccatagggcctacttatttagccacatg

SEQ ID NO: 91236 - DNA, 649 bp, Zea Mays
ctctaatccattttcctacaagcttttcgctcttatcgaatacctttttctgagtgcatccagtatcatttcgttggctctttccacctagccattggctcttggatgtgccactgatgcgtacttgatctggatgctccttttctcgcagaaatcgaagaactcagagctggtgaagttggatcctaggtcggtgatgatgctattcggtatctcgaacctgaatattatatcctggataaactccactgcttttgctgaggtcaaggaagcaattggcttgtactctatccattttgtgaatttgtcaatggcaaccaatatatgagtatagcctctctgagccttcttgaacagtccgatcatgtctagcccccagcatgcaaacggccaggttacaggaatggtctgcagttgctgcgcgggcaagtgctgttgcttcgacaagaattgacacgcttcgcacttttggactaactcggcagcatcactcttcgcagttggctagtagaaaccggatctaaaagcctttcccactagagtctttgatgcggtatgcacaccacactgcccaacatgaatttcatctaacaattgtctcctagtagccaagtggatgcatttcatgaagactcctcctgcacctctt

SEQ ID NO: 91237 - DNA, 800 bp, Zea Mays
gaacaatcaatacctctatgatgtatgtgcatcgatcatgtagccacacatgcacacatgaagtgtaccatgaagtacaaaaggctccactgactaccaactatatcataccaaacagcacgaggttggatgtttgtagacacaacatatcatacctacttctacgttaggtacgaaaactgcattgggaagtatatctctgacactacaccacaaccaagggatggacatagtacaactaagaataaaataagagtgggataggtgtgtattagttgacatatccaaggtttgtgtaacctctctatttccttggactataaaagataggggatgagcaacatttaaggggcctggcatcctgatataaagagaaactaaggatattcaatttgatccaatccaggtagtttgggtaagaggtaaccgagcttactatagtcattcttcacctagaaggaaattaggctaaaactcccaccacaactatgaggtgagagggagctagaaagtcttgatgtcacgagtgtgtgtcttttctattttgtatttatcaatcgatgattagctagaggatgtatgatattacaaatagctctaatgctctgcgtctagtctatcagttgtgtctaggtttaacacaaccaataatttgtaccgtgcttactctaatctctccctttttgatacttttagtatgttgatgttgttacataacgtcaagctttaacaataatgtgtacaactttatgagttactagaatttgttttttaaaacattcttttaaaattgttttaac

SEQ ID NO: 91238 - DNA, 792 bp, Zea Mays
gtgcagtatagcggggacgggtactacttccagcctgtccttggttagtagccttcctcttttctccaagctcaaccctcttgtgttccagagtgatagctttgtctaacaatctctagaatgacaggaatatgtgcgacatcagtttgtattgtagtggtctgatcaaaccttccaaaaatagctcctctttttctcatcgtcatcaacttcaccaggagcatatcgagatagttggatgaatttgtctcggtattcacttactgacatgcctccctgttttagggataggaactccttcttaatcttcataaggccagcaagaatatggtaattcctgaagtgagtggagaattctgcctaggtaatggtgttggcagcagcgtgagcagcgcagtatgcatcccaccaatccacagcgagtccggtgaggcgacccaatgcatatagcaccttctctctgtcagtacattgggctatgttgggcatcttatccacgaacttcaaccagtcatcagcttgcaatgagtcagatgagttagaaaatgtaggtggcttgtgactcataaactcccggtatttatccctaggcggagctggaggtggtagttgctgtcgttactgccgttcttggtgcatttcttggcattcttgcttcatctcctgtcggtcctgacggatccgtgcttgcatttctatcattatgttggccatttgctgtagtagtcgtatttgaccagcaaccacgtcatcacaaggcgggggatttgaaggacgattcatttctggttc

SEQ ID NO: 91239 - DNA, 583 bp, Zea Mays
gcgagttgacccaagcgatttatcctggttcgggctatgaaagaccctacttccaatagagggggtatgaggcttatattactcgcacctaagtgctagcagtagggattacaagcagagtgggagaggggaagaccccaagtcctaggagagtggaggagaagacttgtgaagcgttcgcctgcccccttgagaagttgtagactaccctatttataggcccaagtggagtgcgaccttgtagacgggggctgccttcctgttgtggagagtgtctttgtgtcctgtagacagcatggccttctactttgtcgttgactagtgcatgcttgatttctgctgagagtcgaggccgaggctgagggcttggtcaagtacccgagccccctctagcgaggggctgcccataccgtaatggttgacacagtgcttagtatggggaaaagctttttaagggatacgtcagctccaccgtatttgatggcgttggggacgttttctatcacaaatatcgagggcagaatcaagctagggcgaggcggaggtccgcccaaggtcgcgactgaacctgtcttaagattcg

SEQ ID NO: 91240 - DNA, 329 bp, Zea Mays
atatacttagcaatttccctcttcattctggtccaccagtacaaagatctgaggtcatgatacatcttgttactaccgggtgcatagagaatttggaaaggtgagcttcatccaatatcttctttctgagttcggggttcttgggaacaaccagtcggtctccaaaccatagaatccctttgctatcctgacggaaacatttgtatttatccaccttctgttcgaccatttccttaatgacttgaacacccttgtcactgatctgtgccatgactatctgctcatgtaaagtgggctccattgaaatataactcaaggcaccggaggaa

SEQ ID NO: 91241 - DNA, 480 bp, Zea Mays
cgaacctatacatacaattctacaaatatcatattctaaccacagatgaaaagatcctgcgcattaatgttgcagcggcgagtcaaacgcctaatcttctcacacgcacgagtgcgtccaactaacaatgcattaaagcatccaaagcatccttcaaaaactaaaagaagcgttaagcttaaggacttgtttaacctattagtttgaagatagtggactcagagtgcaggcatcacattaatcttccttttaatgctagtacgaacccaggagtagactactgcaagaaactgacacgttgttagagggaacaaagcattaacccagttgcttgaagatactgccattgaacatcatagcccaacttgaataaacaacacagagtttggagcctccataataccaccacaagtgtcattagttcaagctacagttctaatgtcaacccataggaccactctcgattttattcaatttttt

SEQ ID NO: 91242 - DNA, 348 bp, Zea Mays
tctggctgcgcccgtaagcgacttttgcacggagagtcttttggaaaagacttcgattttgcgcacctattattccggctgcacccttaggtgacttttgcacggagagtcttttggaaaagacttcgattttgcacacttgttgtgctattccggctgcacccttaggcgacttttgcacggagagtctggctgcacccttaggcgacttttgcatagagagtcttttggaaaagacttcgattttgcgcacttattgtgctagtccggctgcacccttaggcgacttttgcgtggagtgtctttgacaaagactgattatcgcacttgttgtgctgttccggctgc

SEQ ID NO: 91243 - DNA, 370 bp, Zea Mays
gcagagttgagggctataaagataaatttgggtgcaactttattgcaaaagtcatggacaatttccaaacttttccaacgcgtgttcgttgtagttttaaattgagtatagcaggagttataagattttgaactttagttgtccattgtttctatcctatcagttttgcaacaaagcagttgcattgttttatcggtttggaaactaattctgagacactcattataataaaagttttagggaatgttataatctttccagtgagtttatatttgcaaaattttgttagatgcagagattatgaggttttgaatttatgggtcatgttccgtcaggttctggtggcagatcatgtatgtcaccttacaag

SEQ ID NO: 91244 - DNA, 444 bp, Zea Mays
ggatccaatgattgtgggttttatgttatgggatacattctcttttatgactgcgtcgaaggatctctgcggtcagacatagaagcagtacgtataattttatcagttaattctatagttggcacaaagcaacatatggtacacatgtataactaacacaattttattgtcttgcagggcaacactagtgagatacagtctcttgcgctgcattatatcacattccatccgaagaacaaagcattatcgctgcttgaagacatcaaaagattcaaggtctaatggatgcagtttagtttagatatgtaatatattgtgtatacaatggttccataaacttcagatgagtcatgtgtgtataatatgggcaaagacggtagacgtttcttatgttatgtcaatgacaacttggacaacttggggatcagcgatgtctaaactgga

SEQ ID NO: 91245 - DNA, 457 bp, Zea Mays
gtgcagagcagaggcggccactgaatccgagctacttggcggtagcataaagcagctagccagatactaactaatgatggctcagctctaagagaatatatgcagtgagcgatggctcacagtcactgcaaaagccattactgttgtagattgtactagtgcttaaacaattgttttaagcaggagacaagttgactgtatagctcactggtggtgcgtgcgctgaaaccagaaccaagcaagacatctctgtacacaaaaagctacagaataatatattcttctttttaaaacctaacagtgaaatataatctactaaaatttcaacacaatattctccctttccagttgaaaacaacgcagaatactcaatccagaatctccaattccacagggcaaggcccaaacacaaataaaagattcaagattcggaagtatctctagtcacaatctgtct

SEQ ID NO: 91246 - DNA, 523 bp, Zea Mays
caaggcttgtaaactcattattgacatatcatacttcaaaggatttgaccagctgctcttcgaggaataatgcacgatgaaatatatgtagcaattgcagaactaggtaacttctttcagcagctatgcgctaggacccttaaattagatgttttgcaccaaatgaaagagaatatcccaattgttctatacaagcttgagaaaatatttccctcatcattgtttgatgttatgctccacttgtcggtacatttacttgttgaggcaatacttagaggaccagtccaatatggctggatgtaccccgtagaaagaaggttatacactttgaaacattatgtgaggaacatggcacgacctgagggttcaattgcagaagcatatgttgctaatgaatgtttgcatgcatgttcgaggtacaattacgagggaaggaatagagagcatgttgatatgagtaagggtgacttatctgttttccagcatggagtagaattacatagagtcccgaggattacttatt

SEQ ID NO: 91247 - DNA, 471 bp, Zea Mays
gccactattcagcaagagcctgtcagcatcagcagccccctcttcgccctcgaaaggccacacaacagaaatcagcggaacaacgaaagaaacagctttaacttttaatttaggaacccaacgctttgagtgtggcatccccatctcatggcgcctgaagggggtggaagctctgaattttccattcgagctgatgcagtcagcagtcccaccccgacagcgcgacgaacgaacccagccagaaaggttgcgatgtcgacgagggccgcgtcttctaccatgctgatactcatcatcatcatcttgatcccagtcccggcgaaccacatcccttccacgacgtacacctggatactctcttttctcaccaatggaatcagggacaccataggtccattcaaactctctgcgaggcttacggtttggaggtcccccctattgtccctcccgcgcaagaacgagagatcttcc

SEQ ID NO: 91248 - DNA, 853 bp, Zea Mays
atgatcgcaatcaccgagaccaaatccaggcgttcccaacgagtggatgtcgtcaagctcagttagttgagtcaataagcatcacaagtatgtgagggtgctaaaacgtgaacatggagggtgggtgcggacctggaagcagctagccgcgatgaggtgattcacaacggcgcagtcgaccaatttgggggaaaacccaaattcagcgactgtagtggctaatcgagggcagggatggatgctttggctcggtgataacttagcgaagcagaccgtgtcgtcaatttataagggctctaagtggtggtgtccaattttgaaagggggagactggcggccgaggggagaggtgagtcacttgcgtgaactatcgtcgcgtcccccggggtaatgtctccggcgacgaacagacctcctacgaatatctactgcgacgtggtagttcttctaagcacctggcgcggctacgatcgacggcgaactccgacaagaacacgtctatccaatgcgcggtaagtgtcacagtgaatagtccggcgataagtctctactcctttcctgagttgagatctttcgttgtccacggttatccacaagccacgacgcacgaatcgcgatgatcgacgtcaatcgcggcgaagggtcaccggcggtgagattcaaggaatctgtagatttttttgccactgtaccatcagaggcttcatcagttggtctgacaaagcttgtttggggcgaattctctctagattttgtgtggtgactagatcaatactctgcatcaaagttgtagcttatcaatctagttttaactttgtcacaagaacttttgctaaacatccattaaaccgag

SEQ ID NO: 91249 - DNA, 442 bp, Zea Mays
ctgtgtttgccattttaacttgctttggtttttcgagcttgattgatttttgagcttcggcatcaacgcgaccttcgtctaaatggctgaagagaagaagatcactgaccctgcgctggccggtttttacgaagccatggagaagacaaacacagagaagatcgccaatgagatgctagctgggatatctaaaaactctagctatagtgagagctttgatgtagaaagtggaaatgaagatgccgaagatcggccatggagaccgagccatgttgtcttcggaaaatcgactattaaacaagggcagatcgaagcaatgagagggaggtactttcacgatatttcgatcgtgagagccggaggggagaataatgttcctcttcccgaagctgacaaagtggtaattttcagaagctttatgaaagccggacttcggttccct

SEQ ID NO: 91250 - DNA, 413 bp, Zea Mays
ctggagtcgtcgctagctgacttctgacgtgagagggctggtgacaggaagaatgagtcagcaaaaggtccaaggtgttagcaatacgagtgaacgagtggcatgtcgttcgtcacaaattaaaagaaggcagtgctggataagtagacgacacgagatcagagacgtgggatttgaaaatgacgcacgcactagcatcttttgcatgtacctgtaccgttgatgcatcaggtcaggtggaaataatgcatttacaattggattacttctaaacgaacatttatgggagcgagagcgaccgttgactcgtgcattcacatcgttctcacgcatcttttatgctcgttcaggctaggaccagagttttacatcccacatagagcgatttatactatactactatataattcaac

SEQ ID NO: 91251 - DNA, 376 bp, Zea Mays
agagatttgggcactcggctcgaaaacgatcgctcgaaacggggaatttggtgaaaataaagcctggaatctcggattggcgtgaaatttggcaaatgagttactggggatgttgtgaaggtgcccgaaaaatttgggttcaattggagcatttttggctggtttgggcatttcaccgagcacgtgacgtgcggagttctagggtttcggtgaaatggctatttgaggtgggaaaaccctcccgaaggagctaagaacctgcaggaatgctcaatacacacagagacacacataccacaacatggattcacaagatttcacaggatttggaattgggcaaaaggggtggaaacagaagtgcttcactgcctctcag

SEQ ID NO: 91252 - DNA, 307 bp, Zea Mays
actacattagagacgaaacttgatcggggacaggagcaccgcaggatctctgttgggcagataaaccacaaagaacatcctatgattatgaaaagataagcaaaaaaactagttagccagcaggaacagtaaaagagcgaaagttgattcacctgaagattggagaggaacaagggaagacccaaagcaggaagagttgatgcattgcttgatgaggggagatcagcaggaatgatatcaaaggcatgacttagaggaacttcagtcccatcagcaggcgataggcacctggcgtctggttcactgg

SEQ ID NO: 91253 - DNA, 794 bp, Zea Mays
ccgatttttgagaacggacccatgaaaccattgctaggtgattttgaggaccaaccaccaaaccactgcagatagtgcattccatatgcgtctccataacctagacatgtgtcttgctagttcttaaccgcatcggtaacatgatctgctctaccatgtccttgcatctgctaatgtccctaggtgcaagccatcatagttgatcacccgacttctccagtccctctgtcaagacccaatgctcgtccctcacttctctcgatctattggcacaaacctagatggccttcacctttgttgttgaccactgcctttaaactccacacttgtgcatcataatctacaagacatgttacacatactcacaccctggttagtccacatgacttaagacactactccgttgataattagtcaaaacaaacttgaaccacaatggcacatatcaaccttatattcacacattggaagctacatagttcacgctattgagtacaacacaattggtaggctatatggttggacatcctttacagtgcttatggtatgcctacagtcctagtatggcgatagtggttcttgtacctgcacgcataacagtgttcatagatacagatggaacctcaaccattgagatagtctttgttttaatcataacgtcacccattgtaataaatgtgatggacacgagctttatattatttgtcttgcacacacacaccgccttgaccagaagagcatgtgatgttcggggccatgaaaaatattgaggaacctttgtagggctctaggac

SEQ ID NO: 91254 - DNA, 306 bp, Zea Mays
aaaaggctgatacacttgcttgagaaaaagcacgcagctcctttcttgggggagcgagctctagtgtggtggttgcacagctggaggcctctctcgtcagggctcagaaagtgggtgctgaattattgggctcgtatctgtagtagtgtttggtggtggttgagttgtaagtacgctctgcttctctccacaagctcgaatcaccagatgaaccgcatgtgtagtagtatgtgacatgtcctcactcacctctttaggcgcgtaatctgtcaattgcatagaccctaatctgagcagcaaggaagc

SEQ ID NO: 91255 - DNA, 997 bp, Zea Mays
agtacataggcagaggcagtcaccacaccactcgccaaaacaaatctggagccttggaagcctggttacagcaagaaaagacgtgctcgttgtcctgtcatcgctgctgctcatcgtgatctcagggcagtggatcgatctcacggtggaggcgaccttcttaggcgcgccaccgccatccgagccgagccgcagcgatccagatccaggtaccccttttggaccacccttgcccctctatccctcgccccatcggcgtccgcgtgtcctcgtcccctgagacgccaccggcgtggagatggagtgacgatccgatcagatctgattgctcgttttctccgagaatctctcccccttttgtcggttgtgagctctgaaagtcgaatatgccatgtttccctccaatccatccagttggcagcttgtttgccgcgtggtggagttcgtactgatgtaggtgatttggtccaacttttcgattttatatgggtgttcaactgagcctcttatagccctcgttttatctgcccgccgctctggaatgtaatacactccgatttgatgtgaacacaaactctgtgaattctgacatgtatttatgatccgtttaatagcagtgttggggctgccttgtgcaccgaatcagtgattgggcagcgtaatacaaagagggagcgcttgatcatatgagctggttttgtacagaatgtcaggtatagccaggtgctcgttgtcgttgcttcagttttaacgagtcggtcaggcaatgcagctaacgttatggcgtcggtcatgctctgttgcagagagtaatgtggatagcatccagatatctgttagtaacgatgagaggaggaatagggcagatgccgagatctcggaggacgagccgaggcacaccaggatgcggaggctgaagaagaaaaccttgcatgcatcgacaagactcacacactccctgaagaagagggggaagagaaaagtggactgcagagtg

SEQ ID NO: 91256 - DNA, 401 bp, Zea Mays
gaactccaaccatgttttgcaaggatctccattgccaccatctctaaggattgacataccacaagaatctcttggtgagcttcttgtttctgcaataatctccaaagtctgagccaatacatccccctgaaaagaacctgcaaaattgatggtattggtttagaattaaaggccacatcattgcggcacaaccaaatagaccaaaacattgctgccactccaattaaaagttttttccgatgagttattcccttgttagtagcccaattctcaattatatgattaatattgatgggtctctctatgttgaaagcaaagtaaataattctccaaatgttcctgataaggtaacaataaaaaaaatatgttgaatagtctcattctgattacaaaagcatcat

SEQ ID NO: 91257 - DNA, 444 bp, Zea Mays
acgacgattgagcagtaacagtgccccaagttcattctccgcgcgagatctttcacctcacatagatatccgcgcaccactaggcatgaatcatagcgactgcatggatcacggcgcggagatcaccggcagcgagatgccttgaacctggattcttgttcagtccactgtaccatcgcgatcccattcagttgttctgacagagcaagttcaggagctcttttctcaaatttttatgtaacaacccactaatccatctgtagcaaagttgttcttctacaaaccagctttgattttgttatagcaacctcgataaaacagccactggatcctatgcaaaatcgatctcaaagttcatcctagtttagtgacagtcgaatttcagtttcagtggtgactgacatcctaacttgaggtccatttttctccaatttccatacagtt

SEQ ID NO: 91258 - DNA, 963 bp, Zea Mays
attttgtatatcttcaaaagaaaaatgctttcatagcatacgtccaatatttctgagaccataatgattaaagatgtcactaggagagtagcatttgctcacatatgagtttgcatagaaatgcagcagcccactcctcctttaagtgaccggcaattatgtcgagacatcacaaattaagtgttctaataaaaccaacaatgttttcgtccactgatgctgctaactgcatgcgaaggcaataagcttcattttattttcagacttgtgtctccgagctttggtagtgccagtagtgtgttcaacctagtgaagctgtccaaggacctttcatctccactgatatttgattcactcccatcatctacatcttcaggtggtacactagtatggagcctgggcttccttggctgagcttgtgatccagttcccttgctagcaacagatgacgacactgacaagccagcagccttgtcctctacgtcgagaaaaagacatatcgttgcacagtcatcagttttggaagttgggtatttaaacctccatgcctgatttgctagatcaacgatagaacgagctgcagacgaacgctcagagcatgaagcaactacgtccatgacttcctgattggtcaagacatcccacacctacaggcatgcatattgaaatcagtaggttagtgaatctatatatatattggaagaggcacatatattaacatcaaaaaaattccattattaattattaccccatctgtagcaaggataatgaattcatccttcttactgatttgtctataggtgacttcaggcacacagattaacccaaaatccttgagacagaaatcgccaaaagctcgtgccattgctagaccgggggagttacaatttggaagccacaagcgagatacgtctggttcatcctgatgagcaaaaacccttccgttacatcgcctgattctcc

SEQ ID NO: 91259 - DNA, 451 bp, Zea Mays
ggaattttagcttttagtttctaattagttcaaaaatcaagagtccttttttcattagtgagtgatttggagagcatgggtatccaactacgtattatgtaggatataagagatggataggttagggcaagaatagccagaggtaagaaggtttatggtgaggaagaattccgtgttgggtggtaatgcatctaaagatcaagtttgacttctctcctcccttgacgaggttgatcttttctcctccggtcttggtctcattgattcgcggtgagtacatatcatcaggggtggggaatatggctaggatagatatggatgagatagaatacatgatgtaggtgaaacccaagatagtccagttatgtaattcatcatgactctagtggttgagttagatctttttgctcatggttgagttggtctaatgtgcgaggttaagttaatgcct

SEQ ID NO: 91260 - DNA, 615 bp, Zea Mays
gttactctcactaaagtcaatttagctaaacgtgggtggacagggagtatgaaatgttgtttttgtaatcagaacgagactattcaacatttttttattgttaccttatcaggaacatttggagtattatttactttgctttaaatatagagagacccattaatattagtcatataattgagaattgggctactaacaagggaatagctcatcagaaaaaactcctaatcggagtgacggcaatgttttggtctatttggttgtgccgcaatgatgtggcctttaattttaaaccaataccatcaattttataggttcttttcaggaggacgtattgtctcggactttggagataattgcataaacaagaagctcaccaagagattcttgtggtatgtcaatccttagagacggtggcaatggagatccttgcaaaacatggttggaggtctaatgccagattaaatgacacttgattcgaggacaagtacttttcaagaatgatctttttttaatgatgcatgttttattaattttcaaactgtaataccgtatgtaggaaactacaaaaggctgaaacattttttgattccattatataaaaaaagattgttt

SEQ ID NO: 91261 - DNA, 553 bp, Zea Mays
gaaaaaagagatagctcagtatgtggcccggtgtgatacttgtcgatgaactacgcagaacatcagaggcccgcaggcctactgcaacccctttcagtgcccaaatggaagtgggaagaaataggcatggacttcataatcgtactgccccgaacccaaaaggggaacgattctatctgagttataattggccatcttactgaagtagctcacttcattcccgtaaagactacctttggaggagccaccctcgcccggatatatctcaaagaaatagtcagacttcatggcattccgcgaagaatagtgtcagacaggggaacgcaattcacctcaaaattttggttgagccttcagcaagctatgggcaccaagctagacttcaacaccgcctaccacccccagtcagatggacaaacagaaagagtcaacaaagtcctcaaagatttgttgagagcctgtgtgctgaccttcgacagagactgggagtccagtttgccgtatgcagaattctcgtacaacaacagttacaaggccatcatcaagatgtcac

SEQ ID NO: 91262 - DNA, 372 bp, Zea Mays
caacaacctccagaatcggaactagtatgttcccctgaaaaggaccggtataattgatagtatgggtttaaaagcaaagaccacatcattgcgacaaagcaaaatagaccaaaaaattgctgcaaccccaactagaatctttttcctaaatgcaggccctttgttagcaacccaaattccagttatatggttgataatgttgggtctctttatatgtaaagccaagtaaataattctccaactatttctagcaaggtaacaatcaaagaaaatatgttgaataggctcgttttgattacaaaaactacaatgcaaactacatttccacccacgtttagctagattgtctttagtaagaataacacccctccc

SEQ ID NO: 91263 - DNA, 279 bp, Zea Mays
tgagttgtgagaggttcgggcgaggcagagacttgcccgaggcggagattttggagggtcctcggggaggggtctcggttaggatgacgcttttatggggaagacccctgttgtgggcctcgggtgaggaggtgacctggtctcttgccttcgggggttgcgcctgggcaaataacctttcctgagcgcgttttaggggtatgatccgggtacccctagttatcacatccgacagtatgcgccactagcgtcactagttgaaaccattggaccctcaac

SEQ ID NO: 91264 - DNA, 435 bp, Zea Mays
gtgaagactaaaactagagtatgtacaattgtacatacaggtaaatacgtctacgaacagagcaaaacagaagcggggggaccgtgtacctggatgtgctcaccaaggcaagaatcaggaatgcacacgcttatgtacgtgcagttgtactatactcgtctcgcctttgcttgcttctctgctgcctttcgtttccttcttatcagtgtggtccggccgtatacacatatgtagccgtttggtcccaccaacatgcatgtgtgcgtatgcatgccagaggagcagatgaatttaccttgcattttaaacacattttctaccttgcagcacaccgaggcggatactccggtcgttccgtggaaatgttcttctcttccttcgcgactgttagtgggttcgagggatagtaattaaaacgctcacgtgtgttcttcc

SEQ ID NO: 91265 - DNA, 1040 bp, Zea Mays
cccagatggtgatttgagttgacacaagcgatttatcctggtttggactacgagaggccatacttccagcagaggtgggatgatgcttatattactcacacaaaagtgctcgtggtaggggttacaagcatagcgggagaggggtggatcctaagtcccagctggtgattgaggcaagtcccaataccaggtaggggagaagaatgatcaagtgttcgcctgccttgtgtctccctgttccttgtggagccgtgaactatcctatttataagctcggggagagttgccttgtagatgggagccaactacatgctgtgaaggggtgtcttcataacctatagacaatatggccttgtactttgccgttgacttgggcttgcttgttttctgctgagagcagaggccgaggctgagggcttggtcacgtacccgagccccctggcgtgggatttcccataccgtagtggttgacatagtgcctgtcatgggaaaaagcttcttatgggatgcgtcagctctactatttctgatgatgttgggaagtcctctgccataggtatcgagggaagaactgagctcgggcaaggcggaggtccgtctgaggttgcgaccgagtcttgtcttgagatttgatgacgtgtgccacactcgatggagtggccttccacgggattcacaggggacaggtagccgaggctgggttcgagcgaggcggagcctacgcccaaggtcgagttctgtattgggcgaggcgaaacttgcgcccgaggtcttggtccgcatcatgtcatattacgcgtcccatcaagggttatcaagcggcatgcacatgcgtaatgatgttggtgaatctttgataagaccgcggtcctgttgaacgattcgcctgtagcccaacgtgaggtaggtgtccgcattgaatgcggttgtctcccaacggccctcgggaaagttttgtctttatcgcctaaggcgggcacggacaaggtggacatggctgccctaggatgagggagcctcagccgggacgaagattctcc

SEQ ID NO: 91266 - DNA, 399 bp, Zea Mays
gtattgagaccgagtaacgaccagggcgtggttgaccccgagccgaaacacttcagcctccagctcacgaatgcggccaacgataagcgccattcgggatgttagggcgaacaaatccttcgatcacggaatctcgagacggtcgtatggattccacaccagacctaggactgaccagccataagtgaccgaccatattaactgtgtctggcaccaagccgcagcggaagagtcggtccattttccactcatgacctacgggccctaggcctgcggcccactaatgacctatcaaccctaggcctgagtgcactggttgtttgcagggcccgtaacacgatgagacgcaccgagaccaggctacggaggctaagggtcggcgtgacacagaggcgacaa

SEQ ID NO: 91267 - DNA, 693 bp, Zea Mays
tgcaaagccctagacgtataaataggaacccacagcggcagcatttgatacgccatttctgctgtttgcgttattttctcaattttttaactcttgcttaccagctcttgcttgatttttgagcttcggtttaaagacatgcttgctccatatctgaggagaagaagatgactgaggagaagaacaaaactgaggagaagaagttgtatgaagagaagaaagttgtggatccttttattgctgggttttatgagtctatggcaaaaacgaatatagacaaaattactaaggagatattggagggtttgtctgaagattctgatgacaatgatagttatgatgtggaaagtggagatgaagattctaaggaccggccctagcggccaagccataccatcttcagaaaatcgaccattaaacaaagtcatattgatgccatgagagggagatatttttgcgacatgtctattgtgagggttggaggagacaacactgcccctgctcctgagaaaaatgaagttgttatttaccgaagcttcttgaaggcaagccttcggttcccgttgagcaaatttgtggttgaagtgttaaagatattccaaatctttcttcatcagattaccccgaagctataattaggatggggatgtttgtctgggctgtaagaagtcaggggctggagccaagcacgag

SEQ ID NO: 91268 - DNA, 272 bp, Zea Mays
attttccatgagttgttaggaaacactgtacaagtctacattgatgatattgtagttatcatatagctgatttgcgcaaagcctttgataaaatgtgtcggtatggtttgaaaatgaacccacgtaaatgtgcttttgggtgtcggctggtaagtttttaggatttatcatccatgaacatggcatagagatagaccctgaccgaattaagtctattcgaaacgtgggacctccaacctgtaaggtcgaagtgcagaagtttctcggcaagg

SEQ ID NO: 91269 - DNA, 540 bp, Zea Mays
aattgtccgagctttggactcttcccttgcatcacattgttgctgaatttggcgctgcccttcaggccgttggttgtgggacgaagttggagccatgaccggtgattgtggcaaggcccatgcagctagagagtggcttgccgaagctactgaaattatgggttgtgaaaatggccattgattgcccacgtactcagtaatgtacggggaatagcacgaagcagtatgtaggacttgtttcggctgattttgtcgtgcttcggcctcagctatcttcttttgcttctgtattgtaacttggcaggtcctagttgtgtgccccttatcctctccacagaacaaacagaacaaccttcttggttgtgagttgaatcttcctctgaagcttcatccccctctgcctcttgggctggtggtctaaaggagctttgttgtgtcccagttgactaagagttgtgttgatgctctttgttgtgattgcctctgtctttgcttgggctgggattatgtatcgtcctggcatgccttgggcggagcctt

SEQ ID NO: 91270 - DNA, 434 bp, Zea Mays
caacctagtagtggaagcagtcttgactggggcgggcggtggagttggctcgagagcaacccaatcggtggcgttgtgctcctcctccataaagatggtctgtcccatctgatctggacctgcaggctcaaagacaggggatggacaaggtgcagtctcatcgaatgtaacctcataagtctccataatgcggttagtctctaggttaagaacacgataagcatgagaatgtaatgcataacccagaaaaactccatcagaagaccgggactcaaacttgtccagattacctttttttccacaaagcatctgcagccaaataccctgaaatgactgaccttgggtgaccgtccaaatcgcagttcataagaagttttgttcagaaaagcccgaagaaagatgtgattggacacatggcaagcagtgttgatcgc

SEQ ID NO: 91271 - DNA, 626 bp, Zea Mays
caggtacttgaggacctattggtcccgagcatcccactcctcgaacgccggatttggcttcttcttgccaccagcgtcgacgatctcagatactggatgggcaatgaggcgacagtaagatactggtgtggtaccggtaagatgacctatgaggcgacaaccacacatggctgcacgaacatgagcttcccatatagcatgatttgctcgggtatgcttctcaaatactggatgggcaatgagaggattggaggaggaattcgacatgattgttgtagggtttatgtggctctgaataccatgtaaatattcagagggcaggtgaagcgtcttaccctgttagggggccgcgtgcatgtttatatgggcacccagtgcacatggctatagaacagatagacttgagtaacaacctttatctaatcctagatacacgcgagcatatctagccaagcaagcatatctagccaataaagtagcggaaggcttttacatgagtacaatgagtacatgatatacatggatatagaatatatacagtgcatatctattctaataatttttgcatccactcgtgcaacccacgtctgccacatgttggcaaccaaacaggtgctcacataaag

SEQ ID NO: 91272 - DNA, 288 bp, Zea Mays
ctggaatatctgaaaactccagcgatagtgaaagtttcgatgtagaaagtggaaatgaagataccgaagatcggccctggagaccaagtcatattgtcttcggaaaatcaactattaaacaagggcagatcgatgcaatgagggggaggtattttcatgatatctcaatcgtgagggccggaggggagaataatgttcctcttcccgaagctgacgaagtggtggtttacagaagcttcatgaaagcggggtttcggttccctctggataaattgttggtcgaagttc

SEQ ID NO: 91273 - DNA, 642 bp, Zea Mays
ctgtatcgactccatttctgtagtcatggcttttctccaacactcctctattagagcctcattaacactccctggctcttctccaacaacaaaacacactccactatattcaaacccatgaacctcttctgttgaatcattgatatcttgcaaggtgcgatatctcaatgtatttccctcagagtccactgctcctccagttggaggtgttacaaactacacaatcggtgcattcagagttacaagaggtgttgatggctctggtgactgcggtgttttgctcattaaccgtccatgaactgcctgagccactgttctaagtactgttctgagtgggagaccctgcatccatcactgaaaaccttggtgctacagctggctgtccaactgaatctactaaatcatcttgtacattgtctgatattgttgttcttccaagaatataatagaactccacttctactcctgtttcagtgcttctgtcttggtttttctcaccccaactccatccacgatgttcttcaaacaccacatcgtgtgacacttgcagttttttagtcaccggatcataaacctgataaccttttgtgcctgtttcataacccacaaaaaccatttgtgttgatctgttagacaacttag

SEQ ID NO: 91274 - DNA, 495 bp, Zea Mays
aaagagtggatcccatgggatcttgattccttcttggcacctaggggacaatgtgaatccccaccaaggcagagatcactaggaaatggtgagggatttgtgtgataaatgaggagagtagaagatgataagacgagagtaactgcccaaatgcgtcactcaagaggggttcacgagcaccagactggtgaaaaggatggccacgatgttcataggaaaaagtaaaagagttatacaaaataaggtgtcctagcactgacacgtggagcccagcactgacgtttattacatattttcaaaaataacttttgaattgctctgtctccattctcctataataatatatgccacacataaatattgcttcataaaagttttcaaaaggtacttagaagcaaattttgatttttgaagaccttcgaaaactaattgttgcacaaacaacattttctagattttcaaattttaagcaatgctacgataatcaatgatatt

SEQ ID NO: 91275 - DNA, 390 bp, Zea Mays
ggtagttctcattcatttcttagttcccgggtggcccagcaccttacaggattaacccctatgaccaaggaattgtctgttcaggtggccaatgggtgtcaaatgcagtgtactcaacagttggtaggggctgtttggtcgttggggcagtgcgagttccagtccactttacgtgtgttaccactcgtgacttatgatcttattgttggtatggattggctggagcagtttagtcctatggaggtgcattggactgagaagtgggtggtcatcccttacaggggtactcaagttaaattgtttgggttgcaatcttctaaaggacattgttctctgattgaggtgtgccatttgactgagttaaatgagaaggaccagactatcatttct

SEQ ID NO: 91276 - DNA, 516 bp, Zea Mays
cccatcctcatcctggagaagatagcagcccttccattgctgctgtgagtcgagctagctgttggattggactcaaatgttgttgttgttgttgtttatattataaccaaccctctgaatgaattgaaggttgtggcttcccaagactggcctgaggtgacaaagtatgctggtctagtttctgctcagtctcataggcaagagctgatagaggatctctacaacgtcacacacgatcctcagaaaggaaccgtttgtggtggcatggtcaggtaatatacatgctgagctccacatttaaaaaaccgttttttagcgcaagtaatacattacatgttgagctccacatttgcagggagcttcttatatccttcaaaaaatcaactggtcaaaagcctcagaggatactattctacaggtgagtgtgtgtgcgcgcgcgcgcgtgatttcttacaatactttgcatgccgccggctagttaccttacctctgtctgacagggatggtgtgagtgaa

SEQ ID NO: 91277 - DNA, 481 bp, Zea Mays
aggaaagaaaagaaagattgctacttcggcaacttctagcgcgccaaagtcaaagaaggttaaatttttgacacatcggcctaagcgcattgaaatgaccaaagggccgaagctaattgaagggtctgcttctatatctgagccaagtcgctttatgcctgttgaagctaagtcaagaccggctgaagagccaaaactgaagaaggtggcagagaagccgaaggccttgagtccaccgcgcgaaacagaattgccgaaggcatcaaggatccctgtagcaactccgaagaggagaatgactagcgtgctagacactgtcatggaatctgtaaaggcatcaactcctccttctcctgaagcgcctagtggagaaggtgaaattttaaagaaatctgacaaaattggcacgactcaagctgtttctgaggctggaccctcagttgttggcgaagtaagaccttcgaagactgcaccattaacc

SEQ ID NO: 91278 - DNA, 333 bp, Zea Mays
cggagcaagacggatttctaggtcacaatcaaaccataccttacaaggataaagtgcatatactattctgatttctaagatgatacagaaacatcatactaccaattgactagtggtgggcattttttcaccgacaccgaaccgaagtttcagtgttcggtgtcaggttcggttctagtttctgtatacttcggtctacggtgtcgggttcggtttttatgatgtaacaactgaaacactggaaaatcgaatcatgcattgctcgttgctcgtcccgccgtccactcatgacgcacctaacctgtcaacgtcgctcggagcccagcccataca

SEQ ID NO: 91279 - DNA, 396 bp, Zea Mays
ctctgcgctgacaccaggccatgcaccgcggatcaacatggatcagcagcacacgttcatagtatagacacacaggatatacagaaaatgcagatgcagaggcagtatagacagacacggatcagttagcattgtttttcttttaaaaaagcagagctgaggcatcaggatttgagtgctccatagtctgacatgtaataacatcaaatagtcgtatttaccagacaaggtcggttccgttttatacagcatattcaaatctactttgttataatggaaaagaaatcacattttattctactgcatttgtgaatgatattcaaaatcacatttcacttctcacaatttgtgatatccaaaatcacatttcatttctcaccatttgagatacccaat

SEQ ID NO: 91280 - DNA, 956 bp, Zea Mays
tttggttgtagtttagcttcgagtttttttaagtggttttaagcacacatgttttcatatttttttaaggaattgattaggaaagcatggatatcaagccatctaatatgtaggataaaaggtgtctttaaagcgtggatagatttgggtaagaaagagtaaggtaaggaaaggctccatccaggatttgtggatcgtgattcctcttgaagttggatttgactcatctccttccttgttgaggtcgagctcttcttttcagaccttggtgtcttcatccgtgttagggacaagaggttaggatagatttgtaggcaacaacttagtaggaagtgtagttggtttagtagtcagctatgggttgaatgagattagttagaatctagtttggttgtttgctattagataggttatgtaacctgttatgtaggtaaagttgttgggtatggccgggttgacctaagtcaccaatttaggcttatgtggatttggagtatggctttatccttgtactagcattaagtaactcacactaggttggatcataatagattagataaaatctagattaggttggatataactagattagactagtttaatttagataaatccaccagggtaggatatatcttattagaatatgttagaatctgttgggatagtatggatcatatggtgtaggtaggttagaagctctattaggttaacacagagggattatgcaaccatcggatggttaggatagttgcatgaggccgagttggtataagtcatatacatgcaggtccttacctctcggaagcagtgtctaacccatatcaccatattaactaacatgttaataactcactttagattggataatattagattagatgggatctagattagatcggttaagatatgaggtcagttagatctattaggataagataacatcttttcaagataag

SEQ ID NO: 91281 - DNA, 469 bp, Zea Mays
gtctagttatgcgatgcatcaataatcgagatggataagggaaaagacattatacaaacaatgtatattcgattatttatgtcaatatctcttcgatcatatcgcttatgagccatttcgattccacgctggtagggccggatccatagggggccaaaggtggccatagtcttcctcaatttttgtaaaaccttttatatatatgatcatttaatgttaagtattaaaaaaagtttttggtgaactaaatcagctgtgtcctactaatcttctcatcagatcggtctaatcctcccgacttctcgttctcctctttggtctagtcctcatatttatctgtttggtcctattctatctaatgccccatctaagctagtctgccctaatgctgtccgccaacgcgtgacgccgctcgacctcaaaccctcccaacaccctcactccatttatcatcgtcatgatgccaaca

SEQ ID NO: 91282 - DNA, 370 bp, Zea Mays
tactctttcgactttttcagactcatcaggttatggaagaagctaagaaagccgaggctgcagagctagaaaggcgcaaaagtacacgctttttctgctattgagctgacttcgtaattattcatctttgtaatttgtaaatgaacggtttctttatgcagcggaactttctccaccaccgaaaccatatgaccccgaagccgatccaacactaaaaggaattctcgatgaattcagggtggtgaacgtagcgatagacgaagctggtaatacattgttgaatgaagctgcagagaaagttctaaaggaggactaggattagtaggaaacttgttcttgactgtggtcttgagagacttgtaaaaacatt

SEQ ID NO: 91283 - DNA, 540 bp, Zea Mays
gtggaagttgggataagagcatgccatatgcggagttctcttataataatcgctaccaggccagtttgaagatgtcatcgttcgagactctgtatggcaggaaatgcaagactcctctatattgggatcagactggagaaagacagttctttggacctgaacttatacaagaggcagaagaacaagtgcgaatcataagagagaatttgagaattgcgcaatcaaggcagaagagctatgctgatacccggagaagactactggagtttaaggagggtgatcatgtgtatctgaaggtgtcaccgatccggggtatgaggaggtttaaagttaaaggaaaattgtcccctcgcttcattggacctttcttgatcttaaagcgagtgggagaagttgcatatcaattagagctacccaatcatcttgcggatgtacataatatattccacgtgtcacaactgaagaagtgcctcggggtacctgaggagcagctaccaatggaggaccttagtgttcaagatgatcggacttatgctaagt

SEQ ID NO: 91284 - DNA, 426 bp, Zea Mays
gggtttaggactctatcagctcatgagtctatgaacccgctatccacctatgctgcctcggtcagcgatgctgctaggaaaactttgtagtccctcagccacacttaccggcagtagctgcacgacacaaagtataggcatcttcctttgcgtcttcgtggagaaagccagaccagcattattctaggcggagccaaagaagatcgcctcaacaccctgttggtgtggcaggtcttaacaccaacctggacaatgctacgctcgacctctctagggtacatttggagctggaggatggacacgcaaggattgcagccctggaagctcaactagaaggaagggatccccctgaagcccaagtccctgccatgactttgtcccctccctataagaggatccgctatggaggataaggatccatcacca

SEQ ID NO: 91285 - DNA, 672 bp, Zea Mays
attgtttgactgcgtatcagtttgtatactctgtgaattatgctcattatgacagagatataccaaatttctgctggttacgtgcaggcaatagggaagccagtgaataatgttaaaatggcaacactggtgtgaaacttatttgtctatgtgtgggaacctctgtatttagtgagtgaagcatctttattctctctctatgcagtgttgttgcattcgtcacagatgagtcttcagttacatgctagggaaatttcgctatgggatgttaaacaaacatgatactgtattggtcagttcacactgctattaccgaaatttgctaggttccattatgaaatcatgtttatttgtcgtaggacactgcaacggttatttttgttattttctcaggtctatggagtgaaaaagtaggaaaaatgtcctttttgccttgtcttcatctcctttatgttactcctctcacgctgtagacctgtagtctctccaccacttggtgtgtgggtgagctgctgcttgtgtgactaatctgtcaactgcaacaaattcttgtgattaaacaagcatcaagctgagttgatcttgccccaggtccaaacattagcaaatagcttgagtaggagcgtcacatttatgagctgcaactggaagttcagaaattatttggaatct

SEQ ID NO: 91286 - DNA, 570 bp, Zea Mays
gcaacattccccaagtaaatattccttagtgggcctgtagagcgtggccccatgtaggccagtcttcaacgcacacgttggctagggacctagtgcacaatgccctaggaacatggtattatatgtcagtgtttgttgtccgaccgcacaccctagggttacccttgtggtgcttttgagtaggacggcgtcgttgattgtgaatcgatggttcgtgtggtagcacggtgagagaaacacacaggcttgagcatgtttggcccacttcgagaggcgtaatacattacttcctatagtggttttctgtattgtggtgagtttacaagctgtgactatgagaatggtgggctgagggtgagatgaaaatggtaggggtgcctctcggccttatatacacaactagagagagcccccctgcacaggtgtcgattacaatatccttgcttatctcctgatttgtagcgaacatccttcctttattctagggaaatcttgcgctcccatgcccgagttatcgccggtggtttagtctgtcgggtgggcgcaacaaacccggcccgacatactcgc

SEQ ID NO: 91287 - DNA, 517 bp, Zea Mays
cttccaaccgggcagccgattagctatcttgtccacccactacaagaggtccctcctccccaacttcttatcagaaacagacaaccccaaatagttgcatggaaaagaagctggattgcactgcaaaatgttacaactgtcctgaacagtctgatcatcacaactgagagggatagcacaactttttcgcaaattcacaactaagcctgaggcctctccaaagcaatccaggatcattttgacacaaataagatcttcaactgcaggcttgacaaaaagaaccacatcatctgcgtaaatggagagcctaaatttcacgtttctgatggccaggtcatgcagcaatcctctttcctcagcatgcttgaataagctactaagcacatccatcacaattatgaaaagcataggagataaggggtcgccttggcgcagccccctccgatgtcgaatataatcccccggagttcggttcaatagcacttgtgtggaagaagtggataacaaattgaacaca

SEQ ID NO: 91288 - DNA, 575 bp, Zea Mays
ggccttcagccacctccatggaaccaggacaatccaagtctgcatcccgaccctcgagatcgcactctaaggtcgacgaggcacgggatgacctcaacccagcgtcaggcgcggcagcgcaagcttccgttgcatcgtcatccactggctctgataacaagtcctctgggaccatatcctcaagagtttgatcaaagttggccagggacagctcttgcagaccgatgagggcagacaaagcaggagaaggaactccactactcccaccgctggcgatgaactgccgactgttttttcgagttaaaggtgcttcattttcttcctcctcatcttccacggtaacaacgcaagcagcacccccattgggttcaacagcagtttgggaacacccattggggtcagcgtcagtaaggccagttgcaggcacttcttcagcagcaggagctaaggtaccggcgtcctcatcaaagctggatactcgccggaggcgtcttctcttcttcttttgctcataagcagaaggctcgggctgactggttcggctagggcgcctcgggcgagtactgacaggtttc

SEQ ID NO: 91289 - DNA, 665 bp, Zea Mays
aaaaagtcgggagagctgaaaaaaccgagttaacaagctcaagcctgccagcctgggagagaagggcagaagtgcatgatagtctcttttgaatcctctgaatgagtggtaaaaagtggcagattttaggctttgaaagacccagcggaacgcccagataggtaaagggcattgaacctatctgacagttaagagttcctgcaaggatcgccattttagcaggattgacgttgatggggtacatacttgatttgttgtagttcaccttcaaccccgttgaaaaagcaaaagagttcaggacggctcttaaaaagaatagctgtctagggcaagcttccaaaatcagcagtgtgtcatccgcgtattggactatcggaaaatcttgaccacaattctctggcaatggtaacttgagcaggtcttgccgccgcgctttatttatgatgctctgaagtagatctgccgcgagaacaaaaagaagaggcgagaggggatcaccctgcctgaccccacgcttgcagtgaaaggttttcccagggacaccattaagaagaactgaagacgtgccagaccgaagaatatccctaatccagcttatccatctgggcccgaagccattgtgcagcaatacctgaagaatgaactcatgctctagagaatcaaaa

SEQ ID NO: 91290 - DNA, 348 bp, Zea Mays
cagttgtgttgtttgggtgccatgaaggataaaaatgcttccacttgtatactaatccaacagaatgtgattcttctcttcaccatctagaattgtagttttgattccttcagctacatgcctctctccatctctccaagggagagaagcggtgaatggatctgagaggaaaatgattagaacatttatatccttcctgattgttaatatgaatccttcaatggcttccacctgaactctcttgtctggacatgtagcttgtggtcagcctccacaaatacaaggatctgctccatgaacacaaatgcacagctggtgccatggttgctacccttctggctgctgctg

SEQ ID NO: 91291 - DNA, 545 bp, Zea Mays
ggcagtaatgacccgattggagacctggaagcctgggtagagcaacttcggtcaaagttacgccacaggaatagggcacgtgagcaggacagtcaccgtatagcggaattgtcagccgaagtcagtcgcctgcagtacgaaatctcggaacgggatacaaccattgattgggccgtgaactcgcgctctttcgtctgtgactgcgaagcgagagctctagctcgtgtggcagagcttggtgcatccctcgaaagcctgcaagtgtactgtaatactttacatgaagaagtgcatgtattgtatgctcgactgcacccaggcgtgcctccagacgttgctgcaatgggagctagaatcgggaacagctaatgaaggacctgattgggagctggacctttttaggccctctccttccatgaaccttgctgacgaacagtctcctgcagcaggaaatggagaaacaaaagatgaagaagactagagtagtatagtttaggtgttatacttatgtaaaataagtaatgaagtcaagttgtacactagag

SEQ ID NO: 91292 - DNA, 414 bp, Zea Mays
catttgtctctccgacgtggtggatctctcacgaccacatacaatctctgagttaggtcactaacaaagcctccggggtgatcaccgagctccaattgccactgagtcgtctaagtgatgctgatcaccaagagtaataagccatagactttcacttaaacaagagaagcctaatgcatgcggtgtgtgctataggtggctctcatgtgcactaaggaggttctaacacgagattatgactttgttaatcacctcactatgcaatgtggacttgcaagtctcaagcaatgaatgcttggtggttggggcagcaagacaatgaatatgggtgttggaaggggtataaatagccaaccaacataaactaattgttactctgtcttttagaggctgaatattcttgaaaacaaagtc

SEQ ID NO: 91293 - DNA, 690 bp, Zea Mays
ttgctcgctctaatgcaagctacctggtgccaacataccggaaaagatggcccggggcctggatggaggaatggttttatgttaaaaataatctgattgaaagagatgatattaaggaaattatccagcgccccatctggtctcgcttcggcctccgaaggccgaaggtgattattgaaagtgacgtcgaagcatgccagaaggcctttagcaatgtttgtgctttcattggcacaagagatataatccaggagcacatagcctataaggtgtggccacatgtggatagctgggaaatgccgaaggagactactgttgaatccagtgaaggtggcctagtttgattgaaatataccttcagattcaaagagaagtttgacgaaccaaatgatgactggttgaaatgcattgaagctaccagcgacgagctgcttgggacatattccaagaccgaagatgatgccttgtccgcagccttcggggttgaggcaagaaaagattaaacagggttttttacgcaattggcttcgtatatcctaactattgctacaccttgaggaaaggaaaaaagaggaaaactgccgcttcgaccgccaccgctgtgccgaagggcaagaaaatgaaggttttgacgcaccgtcctcgatatattgaaacggccgtaatgcctgaatttggtgagtggacctc

SEQ ID NO: 91294 - DNA, 455 bp, Zea Mays
ccacggtgatggcgcacggcagaggggtgagatgttgtgtcctggacctcgcggcggcgctgggcttctagacggatagagagtcaaatcgtgtggtgaggtcgtctaggatgtcgagtatgctttcgccgtcgtcctggttttcccactccgcctcctcttcatccacttgctgtgtggcggtggtggtggtggcaagtttgcataggcggcggccgacgagcttgaccttctcgacctgttcttcggtagcggcttttgcgaaggaagaaattagaaacattaagtagattgaagggcgaggaaaaacaatgaagaaagaagagacggtcgtacagtacctgggggcggaggcggtggcagattggggctagggttatggttttgggtggggcgctggaggctgcgggtgaagcggaggaggtggtcattgaggccgttcggtgtaggggcag

SEQ ID NO: 91295 - DNA, 338 bp, Zea Mays
tggcctggatttggtacgtgcaggtcgagttcttgaggtacaccttggctttgtcacaggtaaccttgaacccttggtcgtagccacacttgggcagatgcgtgcctgcgagccagaacgggtaggagatggccaagtccccgcaccacgccggcgcgcatggcgccaccgtgtttggagcgccgcctatggtggtggcggtggagctggttcagggaaagagaagaagtagcagtgccaagcacagagcggtggtagcttctggagcaggagatcggtgcaccattgcgacgcagtgtgggcaaggagagtagtatcgcagcagctgcacgattggt

SEQ ID NO: 91296 - DNA, 559 bp, Zea Mays
ttgccgctctcatgttatgcaagtctgaaccattaaatatgctagcataaacacgagtaggaaccaactacccgaccagcgaacacgatgctgacccaccttcgtatatcccaactcgaccccaccacgtgcgcaccttctgtttacgtaaaatataacacatgtttacgcatgcataaacgtgctccacaatcgcgcggactcacatgccccactggcccgacctgaccacgcgcgtgaccactaccctggctggggcttcccatgtctatcggaagcccagagcttctattaccaacagcctatatatatatattacatattcatcaatatcagtttgtaaatatatagaataaaagtctctaaacactttagtaccagttggtggcttcattcagtaataaaagaaccctagagggtgtgcccacgtggttggcaccaaaaccagtagtaaaggtccctcttttgtaacataccatacaaccggaactaaaaattggcacatttagtttcggttgcccagtattagctaaacatatggtgctgtagcaagtttcca

SEQ ID NO: 91297 - DNA, 601 bp, Zea Mays
gtaatgaatgccgtcttcggaatgtctgaaggtcgaatcctgagctgatgataacctgacctcagatctatctttgaaaacacgttggctcctctcaactggtcaaacagatctattctgggcaaggggtacttgttcttgattgtgacctcattcagagctcgataatcaatgcacatccttctagtgccatctttcttctccacgaacaggacaggggcggcccaaggcgaggtgcttggccggatgtaacctttctctgacagctcatcgatctgcttcttaagttcagctaactctggtccagatactctataggctcttttagaaatgggggtggtgccaggaagaagctctatagcaaactcaactttccgctcaagtggcatatctggtaaatcttccggaaacacatctataaattctgacacaaccttgataatctcgagtggatctgcttcactgctatcaacagccatctgacaacaacttcctttctttggctcaggtgggactaactcggtcaccacttcctctcctagtggagacatcaacttgattgtcctcttatcacaactgataactgccggatacttatcca

SEQ ID NO: 91298 - DNA, 383 bp, Zea Mays
gttcacttagatctgtacgtggtatcaaggtttctaagacccccttccaactccttcccatttctagctctttcctgcaccgtcgatccctagacgcgcatcaacctcctctctccatgcatgatatctctatgtcctttgcttcccatttgtgtgctcatcgataacggcacttgttggtgtctcgtaccccgaccccctgacactaacattgtggtaggtacatggataccaaagcacaaatttcattttgatagccctcttgcccaccacaacaatcgatcgattatttgtggcttctctcgatatcatggcgttgactacgacaatatttttagtctcgttgacatacatgttaccatccatgtagtactctacatcgc

SEQ ID NO: 91299 - DNA, 772 bp, Zea Mays
ctctggtcgagtggcggaatgcatccgcctttgtcctcggatgaggaggggggctagaggttcgcctgactgaatggatgaatacaacaacacaagggtttagagtagtttaggccaccagagcgtaatatcttacatccactatgagttgtattgattaagagcttgagtgtcgtgggtctgaatgtgagccccatgtgtcgcaagttccctcccttttatagtccaacgggggcacgctacaagggagctggaccctgacaggtgggcccagccgttactataatacaaggtgtgaggcgtcgagtagagctgacggtgctcgatcttcaggacgtgtatctcctcttagttgttgtgtgggctcttggggtcctaccctcttgcctcgtctaatcagaacacatgtgtaggccttggtgtaggttgtggcgtagtctgatatgttgtcatgcgtatgggtgtatgggcggtgtcgtcctgtctcctccccctctctcttgattcctcggtaacacacgaggaacaatagaggtcataatgaagggcgcacaagcggtgcattgagtaaatgctcttgccttggaaacgtgtgggtaacagtgatccaatacgttgcaggctgggcgcgccgcgtgcatttaatgcggggggtacaccacctgccactgacgtgggcaagtgtgcatcccgcctgcccctaatgctagtgggccctacatcagaggcttacattagacaccgctcggtggcttacgtcaggcacgcccgg

SEQ ID NO: 91300 - DNA, 857 bp, Zea Mays
ccggaggtggcgaaaggccgactatagcgaagtatatgataatcagggttcgaagccataaacaaataataaagcaaaagggcattaaatggaagtacctataattaatgcacgttcgacagcttcttcagcttcatttgcttctactcgggcatcatgggattctttttcattttctttattgcttcgtccgctatctcgcggccgcccttcatccaaacatcagaataaaatttcccacccatcagagtagcttcggctgaaggttcccttgtatcgtctacggagaaggtaacttcttcctaggctgcagctttaacatgttcacagccaactttctccaaaactactgcaacccctcgagcaccggcgaaggcgcagaaatccccacggtcgctaagtatttcgtcaaaagcttcagcttcttcgccgatccattcaatgactcctttgggattgcctcgaataaatttttgctccgatgagtatgcacccacctttgcaaaactatcttttagtttctttgcgcaatccaaggatttctcataacatctctctttcaattcatgaagctcatccacattcttttgtaatcttgaactagtccattcgcttatttcttgctttgctttcgccacttcaaaatcttcattcatttcggcaagctttttctttaggccttcgacttcggctttatgagcttcgaattgtgcattaaattttgcttcgctgctcttcagcctatccactaaggaaaacaatattttatctttttcgagggcttcattccttagcgtaataacttctgatcgaaggttcccaagggccatttggcagctttcatcttatccgttctt

SEQ ID NO: 91301 - DNA, 437 bp, Zea Mays
ggaaattcgccccaaacttgggctgtcaggctgactgaagaacaatcccatggtacagtaacagataggatcaggttctgatcccctcgccgccgacgagccacgcgcggattcgtgctatcgccgtggtgattcgcgctcggatcagttggatagcaccggggatccgtaaatatcacgccgtggatacgctccggccactattttactccggccaccgtacccgagtagaccacgattgtgttggaagggttcgccggagctagccactgcgcggtcttgcgccacgtgccttgacacattaacctcaccgccgtgactaattttagcttgtctggtggtcgccggggagcttgccacggtaattgccaccaatcgcgcgtgccagtaaccttcttcttctccgaccatcgcgcatctctctcaaattcactggc

SEQ ID NO: 91302 - DNA, 413 bp, Zea Mays
gcaagacagaacggcgcaaggaggaagaacgaccgaggaggattcaagggacataacacaagggtatggtaagcgtaaacagacccaagcacacccttcctttatttatgcaagatagaagggcatgggcgagacacgaacgacagcggaggaaccaccccctcaaccaagggatgcctcggatgccgagcaaaaagaacgtatgttttgcaggtcctcgccgcctagggcagagtgccaagaagatacgccatgggagaaacgccagtaacgggcggggaggttaaccagaccagcacgccacctaagtgtgacaaccaaaatcttgttttggtgaattaaagagtcctccaaagatttgagaataaaattacttccaataatagatctctttctttagaaggaatattttc

SEQ ID NO: 91303 - DNA, 517 bp, Zea Mays
gctgaagaagaaaatgttgatgaaagtgaagattacagtattttgatcccaacaaagcccagtcatttagattttgagaaatctagtgtgtccgaagatgacatgcccatgatgatgaaactaggttattttggggaagctgaaagcaaacttgtccgatttgtcggagaagagactaccccagcaccgaagaatgatgaagtagtggtttttaaaagcttcttcagagcaggactgtgatttcctctgaacgagatgataggggaagtcctaaagaatttcgaaatatatcttcatcagctgacccctaatgccattgttaggcttagcgtcttcatctgggccctccaaagccaagggatgagcccatatgccgaagcgttctgccgagtgcacgagttgcactatcacacaaaggccagagcagatggtcttcacgaaaattttggttgttaaaattttgcgtatcgtaaggatacgaaggcaccagtcctcaattaccatacaaagtggccgt

SEQ ID NO: 91304 - DNA, 406 bp, Zea Mays
ctaaagtttcaaggaaaactgacgacgccagcatggcccagactatttctgaagctggaccttccgaaagtgctccgataaccctggagaaagagagtgcttctaagaaatcaaaatctcctgctctcgaagcacctgctagagagctggaattcattgttcgacatgcttcaagaaagcagttatcagaagagcaggttgccaaagtgcaacattatggcagggatatgaagcacccctgagggtccttggtgtatggtggtgatgacgaagatgactttctttattgtttgctagacaacaaagagatacatgtctaccgggaaatgacggataatataggatatccgaagcttgaacttgccttatctgcaatgtcaaaagatcagcttgcagacaaccttgc

SEQ ID NO: 91305 - DNA, 411 bp, Zea Mays
tttgagtaagccggtatgatcctggccgagtgacctctaacacaatgaacgacccttcccatagtggtgacaacttgtgccgtccttcccccgttagaattcggtgaagaaccaagtctcccactacaaaggaccggtgtcgcacgactttatcatgatagcgcctcagggtctgctggtatctagccgactaaattactgtgtttaatcgttcttcctccagcacgtcaatatcctctagtctggtagctttagcttcagctatgttcttgaaaactaacctcagcgccctgaacattaggtcggcgggcagcactgcctctgacccataaaccattaagaacggggtgtttccatgcagagcccgactgggttgagttctcaaactccaaaccacatatggcagttctc

SEQ ID NO: 91306 - DNA, 853 bp, Zea Mays
gcaacaagttcaggagattcccgtccagtctgcttcaagatggcatgtgcaaagctttatcccaagcttctgcaacagagttgcgggacgtgtcccgcagattgtgagccagtatctgcttgttcccctgagctacagattaaaacgatcataaagtgtatcagatcaatcttatagtaatgataggttagtttagagtcatgtcttttagtatatattattttcaaagaaaaaaaaacagttcaacaaaaatgtaggcaagtggagcacatgttgcagcaatttgacctcaaattaacttaacagcatatctaagtaatgggatccaaggtctaagttgtcagctacaacctcatgctctctgcatgaatatgctagcacccatttgctaaaatgttcctccttttagctgttcggctgctggctgaacagctgctccacagccatccttcacacatggccagctgcggcagcataagtacagccgaacttctctccaaggacgcaatagagttgtgcgtcattccaataaggaaaatgcaaaagagaagcaaaaggcctactcccacacacccacacaatgacacaaaagcttataatttgctgagtgagtattcttagaaactggaggctttggctgtcttaataagcaacaagagaaatgcctagatcaagggaagtactttggccctgaactgtttttttttatcaaaaaccagaaaccgcaggtcagtttaaaatcagcaaatctctcctgttgacaaccatgaatacagcttgtgttctggtaaacaagtgttgccgtcagctccctacaaatttatgcagaagcagggtgtagcaaaaaaaaaaa

SEQ ID NO: 91307 - DNA, 967 bp, Zea Mays
ccgagccccatggggtgcctaagcatcagctggctccccgtcatgaaggtagcaacaatgacagtaatgatccaataggagacctagaggcgagagtcgagtaactgactgcccagctttagcagggcggtctggagcgagcacgtgctggccgccgcattgttgaactactggggaggtgggatgtcacaataggcgcttgctaaacgagatcgtgctatagattgggtagtgcagtcttgaagtgaagcttggtctcgcgaggcggcagcccgagctcatgtagagaagctgagctgggctattaatgatctgcagctgtacaacactactctgcatgaggaagttcatatgtcgcacaaccatttacacctgtatgagctgcccgaggaagccgagatggaagcaggtgtagttgaagctgatggcggggaacttgatgggggcttgacaaatttggaatcccgcctcttggtcctatggaagaccaccctctagaaggtagtgacgcatctagagcagtgacaagctccgatgactagggaatgtaggagtgtgttgtcgttttctttcctagacttagtaggggtaggaaattaggcagggtctagacttatgtaataaataagagtcagaataatgtaatatggattgtgtaactgctattgtataataataaagtatgattttcttcagatactgatgtgtacacatggacatgatgaggtcggcacttctcagggtagggataccccaattccaccacccgtgactccaactttagtagatgctattacagctctggtgaatgctattactgagaatacccgattcctccaagaaatgatggtgaaccaaaacaactagcccgagggttgtgggcagaacaatcaaccccagagataccacttacatggagttttctgagactcgacctcctatttttgtcaacgcagaggaacctctt

SEQ ID NO: 91308 - DNA, 523 bp, Zea Mays
gcggaacttgaagcgaagtttgccagaagtaaccttttctaagctatcgacgatgccctatttattgtcttatccccactccgcaagaagttttgttatggatcccctcgatctattatttgacttcttggttaggttgataggatagttctatgttattaattttttcgactagatcggtaaggacgatgttatattatattatagtggttttctaatccataatgttgctataaaacccttgacttcttatacttttgtttccttgccattgtattgccatccttaggcaatatctaccttgatatattaaacttttgcctctctacttttctccttaacaatgctttctccctattaaattcttatacttttgttttcttaccattgtattgccacccttgcgcaatatctaccttgatatattaaacctttgcctctctacttttctccttgataacgctttctccctaactcacttcatatccttggttgtatcatttatcctcactttaatagttca

SEQ ID NO: 91309 - DNA, 447 bp, Zea Mays
ggagaatctgcttggtcaaacgaccccaaggtgtggctaaataaactaatccgtgccggtaccgtccttgccattagatcgagggtatacatgcatgcagcatacggtgtttggcaaacaatcaggtgctggtattggtaaccaaggtgatggtttgatggatgaggtgcgtgggaagaactgcacgctagtggtttctcttccaagtttcaatgtactatacaaataaaaaatgagattctatcgtgtggaaaggacccggccggcaggccacagtgacctacctaccagggagctattaatgaagatgctctaccatcattaactgctaatgattagcttatgacaaagttaacacgcctcaccgcgcgcatatgcatgcagtcggggtaacatgcagttcatcacgccggccggcttctctcgtgaggcacgcgcgcgtacggc

SEQ ID NO: 91310 - DNA, 274 bp, Zea Mays
caaactcgggatgtcagttagccctaagtctgaattctgcttaacagtgaagttggatgaactttggattcaattctagatcaagggattaagcaaatgagcaagatctttacagcagaattgtagctggattatagggctacaattttgttacagggatattagcacattctcacacaaaaatctaatattagggcgctgcaaaccatgctgtcaggtgctctaaatgactccctgatggtacagtaacagacagatcccatatttagccccc

SEQ ID NO: 91311 - DNA, 490 bp, Zea Mays
ggctcagggagctgtatcactagtagaaaaagctacctgtgaacatgccaaggctgtaattcagccaaacttctcagtttcagtgactgacatcaaggagccgtcagccaagctatcaccctcagtggaaaattctattctgaagtgtggatgaatggcggtcgagagatggcaggcaaacccattaggcgaaatgaagaagagtctcatcttgtcttagaagaggcaagaaaagctgaagaggccgctgagcgcgaaagacgtataggtacgtttgttatttttttagcttcgtaaatatgttagcttcgagtctaacaaaagcttataatttgatgtagctgatctgactcctcctctggagccatacaactccgacgacgatccagccctgaagggtactcttgatgaaatcagaatagcaaatgcagcaattgatgaagcagtggatatacttctaaacgaagctgctgaaagtgtcctgaaggag

SEQ ID NO: 91312 - DNA, 523 bp, Zea Mays
cttaagaatgccggccccgacgttcttagttgtttaagtacgtcgactattgtatgttggttaagaacgtcgacctattagagtaagaacgttagttcctagccgacgtttttcctatttttcctgtagtggcagggtagaagtgtcaatagtcatccaaggatacgaggaagacgtgctagacatccctaggcccaaaggtattgagatatttggacgagctatcaagaatttcatcctttggcctcgatgggatgtccaattggttgagccaccaccagcatcatctcatgcccaacccctaactcaatagtcatcacatgcagatcctattgctaaaccatcctcacctcctaaatcttcaccttttgcccaatctattccttttcatctaccattgccacctcctcgccctctttctaacccaccatctactccaccagcatcaccattatgggctccaccaccttctccagaccctactcatcctctttgtgacccaatgtctccgccactagcatca

SEQ ID NO: 91313 - DNA, 675 bp, Zea Mays
gcggtccatgcatcgtatgtatggaaattccactggaaatctcatgcggttgatcaaatcaacccaaatccgagactttcgacccgaagaagattacactcatgacgtcgatctgttacgtcaatctgctggttgtgtgcgcagttagccccgatggtgattccagccggtgaggaattgaggataatgttgttcaactatagggagatgggtatcatcccgaaggttgagccgatgtaatgtgtgatgccctcgctgtatgtgtgtaaccataattatgtgtgatgaagctgcacgctttcgttgatcaggctgttcccgtaggcttctgtgcgaagttctttaggaaaagactttgatttttcgtactagtattccggctgcacccgtaggcgacttttgcgtggagtcttttggaaaagacttcgatttttcgtgcttattattccggctgcacccttgggcgacttttgcacggagagtggttttgtgcacttattgtgctagtccggttgcacccttaggcgacttttgtaggattacggggaggctacactagcgcaaaacaaaattttcaaccccataataccaagaactactgcggttataggtcatggaattaccactagacgagcagagcagcggaagacgtctcgatgtagacgaacgcgtcga

SEQ ID NO: 91314 - DNA, 685 bp, Zea Mays
aaaacttgtcgaccaaatgaccctctaccattcctccatagggaccttaggcttaaaccccttggatcacacaaagaagctccaaaatccataggaagacactgaaccaaaactcaaattactgcatcagacctgcacttcacatgtctcacaaaggcagtttgaacacctttttctccctattctaaacaaggatagctcaagcattcctaaacaaacttgttcactaactaaccctctatcactttgctatagggtccttggcttataaccacacagatcaatggttatggtgctccaaagtttaacaaacatactgaaacactgatttcagctaactgactgtaacactcaaaattgtttacaaggaataaatagtgaattccctattgtatgtgccataattgcatcataagaaagagcatacataaaattatgagggattaattaaaacaaatgatactaaaataaaataaagtacatcttgttggagttttatgttggtgcattaaataaaaataataataatataaaaaaactagaaattggattaaaccctaaatggaaaattagggtttgaaagtaagaagagaaatgatatgaaaatataaataatataaatatatttctaaagtttgtatttttcattccataatatgatttgataacaaatttgcacaaggtt

SEQ ID NO: 91315 - DNA, 740 bp, Zea Mays
tttggggattagaaaaactctccataaaagattttaaattaaaatgttttgtaataaagattttcctttaattaagtagatcgattattacataagactattcctattggtttacatatataaatagaagcatatatatacatggataaaatgataaataatataactaaacctttcatatcattctagggtttttgtttgtgcatttggattgaagttaaaactccaacttagattaaaagggatttaacttttgagttcaaatatgaaaatagaattagcaaatagaatagaaatgagaaaaagaaaaaaaaatctccatccgttgggccatctccttggctcaaaccagcccacacgtccttgccatacatgattttcccctttctttattcccttgccaaaaatgacatcaccatatcatcatgggtgacataagcaagctaattcctatcagcacctgcgtaacaaaccgagtcggagttgaggttgaatcgctcgtaactgccacacgagacccacgttccagccgtatctccttcgtcgaaccggttgctaaataacactggcaccgaaacaaactgcagaccgagtctaccgctgagattacctcctagtggttgtaacagattctgttggagctctcggcgttgagcatatatacgagcccctgagcctcccccctcatctgcccgtcttggcgagtcctgccgcttgttctgaagacaccttgtggcgga

SEQ ID NO: 91316 - DNA, 338 bp, Zea Mays
cctagtttactaccatgaactcacagatggattcccatagccagcacatggcatttcctcatgtcgttgcgaaaacatgtcccaaatgcaataatccaacatgtacaccgctggctttggtgaacctcttcgcaccgacgtcaagttggaggccctaacgactctacaacgtgctatgcacctagacaagacatatgaacgatgcatgtccaccacatctgcctgcaccaacccgacattgtcaacctctccctcaatcatgaagacctcgacatcatttgtagcaaagtatgtggcctctactacaacaagccccatttctatcgtctcttgcccaa

SEQ ID NO: 91317 - DNA, 349 bp, Zea Mays
cgacgggtatatccgacccattttcacccctatgcatcaaacacgcacggataacatgttttcaacaactccacttgtcttgttgaaatagtggtagatgtgatgtttgatgagactaatggctcacaatggcacatttctagtgatgctgcaagaaatgaaagacagccttgtgaggctatcaagaagctagcaattggtgaagtaagaccactcgagaaggacgatgatgatgaaagggtttggatgaccaatggggctactattgggggtacaaaggtggtagatgatgaatcttccactcaagtaaacccaacaacctcaagtcatccaactcttgaggaacttg

SEQ ID NO: 91318 - DNA, 979 bp, Zea Mays
gaatgcagtaattcagtcagctaggtaccagcaaactctaaggcgctatcctgataaggccatacgacatcgatccttcgcagtgggagacttggtccttcgccgaattctaacaggggaaggacggcataaattgtcgccactatgcgaagggccattcatggtagcagaagtcactcggctaggatcatatcgacttactcaaatggatggcacggaaatagggaattcatggaatatagagcatctcaggaagttttacccctagctagatttcaaaagctattggggtagcactgtattctgtaatgggaaaagtacatcatcaataaaaagacttcattctcaaaagaactcaacctattgacaatctgcacggttacttaactcagactgaccactataccctactaacggagcaatcggcttaagtcggcaatgacttaaggtggtgcgacatgctcacgcttacttaactcagggtgaccactataccctactaacggagcaatcggcttaagtcggcaatgacttaaggcggtgcgacatgctcatgcttacttaactctgggtgaccactataccctactaatgaagcaatcggcttaagtcgacaatgacttaagacggtgcgacatgctcatgcttacttaactcagggtgaccactataccctactaatggagcaatcggcttaagccggcgatgacttaaggcggtgcgacatgctcacgtctactcgatccagcataaacatgcttaagattattcatctcagggcgatctctatgcctcatgaaataggaagaagtttcaaaaccatcacactgcacttacttctgttgtcgtaacaactgttgaattcaaacaacagagaagtaataatagcgtttaataccaggaacactttctgacagaatattcaagcacattgaccacatacgcatacaattcataaatgcattcagtgtttctactt

SEQ ID NO: 91319 - DNA, 808 bp, Zea Mays
ctgtcttgcaagtagtggagacaattatgctaggggctatggagatatagtgtttcctccatctattgttccatcaatgcaacctaggggtgatgctcctcaaccatcttctattcctagcatgagggaggagaatctgagtcgaaggaccatcaaagcatctttaatgctgattggcacccaaacctcaccttctcagaggaagtaagacccatttgtgtttcctacagtcgagacatcattaggacctaggcttagagaatgtcattattgactagatcccaaggcacacccataagaagtggggcctcttagataaccatagtgaccactaaggggttgcctttgcctccagacatcacccccctttcaagctcaaatggtcgctaagggggtctaaacttaagtacccatcaagtggatatgactcaaagaagagttggaggtcttagactagatgtggtcctgctttaagggcgacaacctagaggcccagctaggtgcaaccgttgataccctctagaagacaaaaatggaagagaacgtccagaaggcagaagaagaagaagccttagcttccaacacataaacatcttaggcccaggaagaagctaaggaagtttgggactgggacatgtttagacaacaacaagagaaggaagggctttagattaatgggaattgtattctcctcatctatacaaaattgttttagttcttcaattaaagggcgcatgcagatgtttagctttggccctagatgtcgaggcttagaatgacaatgcaagaaacatatattgctctttca

SEQ ID NO: 91320 - DNA, 687 bp, Zea Mays
tggtggattctgtgagttccatcaattttattagtcaacatatggtgcaaaagttggggttagctgtgacatcttgtccatctgtttcagttaaggtggcacaatggggagtccatgatcagccaggctatggcgaagaatttggaatggtgggcacatgggcatttttatcacactgacatgagaattctacctttgggggcttttgatgctattttgggttatcagtggttaaggcaacacagtcctatggagtgtgatgggtcaataaagtgttgcagtttaaggatgaggatcaacaagttactctatatggtgatgggaattagaccagttctcaggtagatcttgtttcaacattacaagtgcaaaaatggatctcagggaatgatgtttggtctttggtattagtagaaaaagtgcaggaggagcaacctgagactgctgatgcagatattcaagggctgttgaaggagtttgttgatattttcacagttcctactcaattgccacctgctagacagtttgatcatcacattccactggttccaggagcggtgccagttaattctaaaccctatagataccttttcacaaggatgaaatagagcgtcaggtgattgcattattgcaagctgggctgatcgttcctagttctagtccctttgcctctccagttcttttagt

SEQ ID NO: 91321 - DNA, 521 bp, Zea Mays
agataagaaaaaaaggtctagaaaagacccagtacaaaggtgccaagaaagcaccctaggaaataaaaccaaaaatcaaactacagccaaacctgcctaagagcaacagccccaccaagaccccataacaaggcctcatcatggatggacagcaaaattgcgtgaatatttggggaagcattgtcaaacacacacgcatttctatgcttccaaatctgccaagctactaaaattacaatagagttgaaaccttttttcttatgcttagacaccaatctttctgcctcactccaccaatcttgaaaccctgtagcatcagacgtaggagcaagatgttgcaaacccagcctgcttagcgttctaaaccatacttccctcgtaaagacacaagccaccagcatgtgatgcactgtctcgtcctgctgatcacacaagggacaactatctggatgatccattccatgacgtgccagtcgatcagccgtccaacatcggttgagagatgcaagccaaatgaaata

SEQ ID NO: 91322 - DNA, 401 bp, Zea Mays
acaagatactccaagtacatgatagcgaactaacattaactagtaagacacataaacatccatacgttaacgctagctacctatacgtcattgggcacaacaagtcaacattactggaaagacgacgaacatttcctatatttaaccaacacaacacgacatcacgagcacaagcatttaccacgttcactttaatcatttattagttactctattattaaactacttaagtacacataagtttacgatgacttacacatagacaaacttaacttacacatagacaaacttagttaaaaaggaatagttacttaatcaggtttcacaatcattcacaacattctactgcaagcatacaccccagagaacacacatgaggagatagtttaatcacaattaca

SEQ ID NO: 91323 - DNA, 293 bp, Zea Mays
tggagatgaagattccgaagatcgaccctagtggccaagccatactatcttgggaaagtcgaccattaaacaaagtcaggttgacaccatgaggggaagatactttcatgatgtctattgtgagggttggaggagatagcaccgcccctgcccctgaagaaaatgaaggtgttgtttaccgaagctttatgaaggcaggccttcggttcccattgagcaaatttgtagttgaagtgttgaagatattccagatctttcttcctcaaattactcccgaagctataattaggatg

SEQ ID NO: 91324 - DNA, 635 bp, Zea Mays
tacaacttgagtattacaaatcctaccccccttaaaataatctcgtcctcgagatttaagaagatctagggaaaaggtggggaaaatctatacgaagctcttcttctctttcccaagttgcttcatcttcaccgtggtggctccattgaactttgcacatctttatgaccttattccttgtaactcgagtcaaggtatccaaaaccttgatggggtactcagcataagtcaagtcctcttgaacactaaggtcttccattggtaacttttcttcaggcaccctgaggcatttcttcagctgagatacatgaaagacatcgtgaacatccgcgagatgatccggtaactccaattgatatgcaacttctcccactcgctttaagattaagaagggtccaataaagcgaggggacaactttcctttgactttgaatcttctcataccccggagtggtgacactttcagatagacataatctccctccttaaactcaagcagtctcctccgggtgtcagcataacttttctgcctggactgtgcagttctcaaattctcccttatttgttgaacttgttcttctgcttcctgtataatctcaggtccaaacaactgcctttcaccagtttgatccaaa

SEQ ID NO: 91325 - DNA, 643 bp, Zea Mays
ctgcaaaccttggaaaaactcctctagaagatggacgaatacatcagggtcaacaatgagttccggtagagaagggaagaggccttcagatactcagagatgattagggggcttcagaggaaggctccaccctagacatgttagaacaatccacaatcccatctcaagtgacgatagaggaggaaacctcgctcaagggcaccagcaaatctcctagtcttcaggaatgcaacaaagttcttacaggccactagctccgagaggcatagggggaagaagcttcggaggaaggttcaactcccaacccaggaggttgttctgtttattctgcggggaggataaaggacatacaacaaggatgtgccaagtcacgattcaaaatcagaaagagatagtttaagctgaagcaagacagaattagcagaagcaggtcctgcatactgcttcgtgctattctccatacattcccgagtatgtgggtaatcagcagcccacaacatcggttgcttcgacaagtcacactcaagcagcatggaccccactacctcctccaccacccatggcaccaaccttgacccacaatcagcagtcagaagggcaccaccaagcacagcaacaacatgatacacgtgaagaatccgaa

SEQ ID NO: 91326 - DNA, 752 bp, Zea Mays
tagcctctcgcacagaaggccccatttgcgctacttggtgaacatgtccagtatatacgatatctttggcttgaacttcttcactgcgtcatagtcccatttgggcttggccaccgggacaagctagtgaacgcaagcacactgccttcaaggtttcgaacatagaaccaccccctcatagccatgaatgaaggatgcaaggggggttggaaggtaggacgccatccgcgacccgcaaagctgaacgttgaaggaaccaacaaacgactgaccacctcggccaaggcctgcccgcgggctgaacgaatgtttcctgagcttcaagtggggaggcatgccgagataagcttcacatagcgtgatgaaacacactatgtggaggaaggtgtttggatgaaggtttaggagctccataccatagtagaagagaagccccaacacgaacggatgtagggggagcccaaagccacgctcgtagaaagaggcaagcaccacaactttgccatcatgagtccttttcttacaaacgctagcctgagatcgactcaaggggaaggaaccctttcacctccaagtcctcaagtcagctacgagtggtagagcacaggggaaatgcggccataggaccaacagttggaaatcgcaagggagcaaaaagagcagaggaacacaaggctttctaaggagtaagaagaaagcgacctaagtgcaagaacatggtaagcgtaagcagactcggaagcctcccattc

SEQ ID NO: 91327 - DNA, 414 bp, Zea Mays
ccgggccttgcatggaaacaccccattcttcatggtatatggatcagaagcagtattaccagcagatttgatctttggagcacccaggataacatttaaaagcatagctaaggcagaagaaactaggctagaagatgttgatatattataggaagaatgtctgaatgttgtcattcagttggccagatgccagcaaaccctgaggcgctaccacaacaaaacagtgcaacatcgatccttcgcagtaggagacctagtccttcaccgagtactgacgggagaaggatgacacaaactgtcacccccatgggaaggaccattcatcgttgcagaggttacccagccaggatcctaccggcttacccaaatagacggaaccggagtggggaattcgtggaatattgaacacctcag

SEQ ID NO: 91328 - DNA, 382 bp, Zea Mays
ctcaggaggaggcgagtgggtgcattgtcttctatcccatatcatggtcagagtttatgttttcatttctcgcttttctactgcattcttgactactatggtctttagcattagaatcttatgcccaatgttgttattgctctttctaccttcacctacctctatggagcctttctcgaggtgaggccatgtgtggcgtagttctgacatttcttcctagcctagacctcgagtgaccacaaaccctttgggaaagtttatttctagctcaccctaggccctggtgttagtccccatacattgtcatggaggaccttcttgatgcatgtcttggttctcttgagctcataactagagatgtcagtgggtgagccagaggtcg

SEQ ID NO: 91329 - DNA, 356 bp, Zea Mays
tcggcttccaactagctatcgattgcttggggtgccattccctcctccgtgggtgctgtctcgctttcccgggtatcgcaccttgagcactaggtccgggcgtgtcttcctgagcacctcaaggtacttgacttcagcttgttctaagttccgcaactgctgcaccctacacttctaggtgtggctgaggccatctggacaccttcgtgggtcagtgataccgatcttcttcttcatcaagacccctttcaagttgcggtctagtctgttcaccttggtttgtcatcgggcctaggaggtgaaacactaaaacatcattggcctctctcctccatagtctacagtctgggttgttg

SEQ ID NO: 91330 - DNA, 320 bp, Zea Mays
ctttttggcagtctctgtttctgaagtccctatgtcgggcagttgtgcagccctttctaagaagtactttttggctggtgggttagaatctttgctttctttggcttcaacacagcggcagaaacccttggcacacttttcgtttttagccccctcttttgagcagggaagcagtaatcaggataaataaatccaatagcatcaaagaccttgttcaatcttcgtttcccttgagcaccaaaggcaacatacatagcttcgtccttagccttcgtatagctccctagcaattcatcacttgttgcttcaatggcatcaag

SEQ ID NO: 91331 - DNA, 289 bp, Zea Mays
tgaaaatctcaggttgcctgacatcattttgttagctttcctcctatggatgtttgatatgtgtgttaggtgtcctattaatgccaccacctcatgccctatatatctcaggctctctagtggccgaagaatattcagctctgcgtatatgaggtggcatggcatgtttataataggatgccgatggggtgagtagtgctgttgtgatggatgcgggaaatgtgcatattacacagccattggttctgcgtaacagtccgggcagtctgtgactgggccgaatggtctg

SEQ ID NO: 91332 - DNA, 363 bp, Zea Mays
gggaaatcgaggcatgggtgacaccacggcggaagtgaccgagccacggcgaccgccggtgggatatctccggccatgcacgactgagctcgcgggatggtgccacgtccaaagttacttctctacgatcaaatccccaccgattcatccgagctcatccgattcaacagtgcccagatctttgtttcagatatttcagtgcactggatcttcaaagtttgtctgaactgacccccttccatccactcaatctcttgattcttgttaaggacagagcaaacttcattaataaagtttgttcacctatcaaccgtcttcaaacttactataggatatttgggtcaaaatcgagtgaatccaaag

SEQ ID NO: 91333 - DNA, 544 bp, Zea Mays
ggcaaatggcttaggcttcggaagggggcgaggttgcacccttggcatcatcgggggccatcgcagtcgagtaagacccaacacctagtgaagagacctggccatcgcagtcgagtaagacccaacacctagtggaaccacctcttcttcgaagtggcaagccagcgccgcgctcggtcttttgacgacgtcggcaagcctccagacctctacctcggcaatatcatcctcatcgggcaggatatagcccttgctcacctgctcgaggtctacctcgtaatgggatgcaatgacagccaatgcccgcttcactccggtgtgaatggcctcatggagttcgctccacttatggccacttagggccagcatgcggctccatagggatccacctgaggggatgtcttcaatgccaaaggttcggctgaagtttgccaccgccttggacaaggcattgagctcggtggtcttctcgtcgacggcttgggagagtgtccgagatgtattgatgaaaatatcgaggtcccgcttaagctctaaaatcgat

SEQ ID NO: 91334 - DNA, 493 bp, Zea Mays
taaaattagcatagaacaggctaccggcgatatgctatcgccggtatctacagaggtccgcctcaatcttcggcaggccaacattctttgagaaagtcctaacgacctttgcctcggttcgattccgaaggcacctcaatttcccttcattgactccgccaaatagcaaagcccctggtttgtacccacaggatacagcatattttttcagttcttccttttcagtttctgataactcttgccctagtatatcttgaaaattgaagttttcctctttcgaagtatcttcaatctgctcttttcctttctcaattgttgtgtccaccgcggccgcatcagcttcttcctcagccatttttagaagcatgttatcaatatcaccaagagtggtttctagatcagaagcttcggtggtttcggctttggcggcttcagcttcggcagcaccagcgtcttcagcaattggtatttttgacgctgatgccagcggtgg

SEQ ID NO: 91335 - DNA, 420 bp, Zea Mays
gcgggattgcgtttttccggtgaggtcctccgccgtgcctccctgggttgctgcgtcgcgcggccggagggagaacaggagaggggaggcgagttctgcaccgttggatctagttgggtggctaagattaaatcgctggaataccccttcgatggaatggtccggatccgttgatcttggatccatcggctgtggctctcgtgctggtgctttaagggaagaccgttggatcgggatccgaccactaacgttggataccggttcagagccaggacttctaatctgcatccttgatttttgatctgacggctacagatggcccataccccttcgccatgtcggtttcactaaagagccctcggcttatttagaaatcaacccgccatccaccgcggggtagatctgtgtcttgggactttt

SEQ ID NO: 91336 - DNA, 553 bp, Zea Mays
ccgtgtagatgtagggtagccgtagttcgtagttgtagggatggttcttatgaagaaacacttgtaactagtacttttcatatgaatgaactacaattttaatgatgatggcccaatgtgttctctgagtgttgatgatttcacctatattcgttgatgatgtcacctatatttcattgtttgtgtaaaccactgccaaataatcccctatgctatttactagaccatgtctaaataccatgactcgatctttggtgaaaatccggcttttctggcccaagtaagcatttgttgatgtaaactcgccgtgaaaaccaaaaaccatgacgcgaacaccatcattcattatgttaacaaggttataattgaaacatggatcgatcccattgtatttgacatcatcaattcctaagaatattgacgcccttatttgttccttctactcaaagccttgttccctagttttcctcgtttttagcacaccgtcgttcttgagttcgaaaccccccaacttcaactgcctctagattcagccgtcgtaacactccaaaat

SEQ ID NO: 91337 - DNA, 330 bp, Zea Mays
gttctaactatgattcatggtcatctagtgtactaaatgcttttagaactctagatcctcgattagaacaaattatagacaagagtatcattccctctaattatgatgcttctgaggaagatcaaagatgtatacgcttaaatcatctagctattgacatcttaggtaattctcttagcgaagaagattatcatgccttcattacaaattatgatgaacatattcctaatgcgcatgatatttggactagaattaaaaataaatttgatgagtccaaatatgatagttcattttgtacttctacttcctttggtatttgtgatactaacc

SEQ ID NO: 91338 - DNA, 835 bp, Zea Mays
aaagtgcatgtacgaggcacataaactcctttgtgcactcaggatgacgtatgagcatatacatgcttgttcgaagggctgcgtgctatttaggaaagaatacgcggaggcaaagtattgtctgaagtgtaaatcatctagcttcatggaggtaaaatctggtaatggactgaagaggcagctcgacatccccgtgacaatcctacaacaccttccgttcataccgaggatccagcgtctatacatgaccgaggaatccgcgaaacagatgacatgacacaaaaatggaaaacgatacaatactgacaagatggtgcacacatccgatggtgaagcatggaaacactttgatgccattcaccgtgagaaagccgaagagtctcgtaatgtatgtgttgcgttggccacagatgggttcaatccctatggaatgagcgctgccccgtacacatgttggcccatgtttgttatcccaatcaatctccccctggtgtgtgctttcaaaggcataacatatttgtgtcgttgataattcccggacacccggggaataaaatgggcgtggacatggagcctctgattgatgagttggtacgtgtttgggagaaaggggtatggatgtatgaccgagctacgaagacaaacttcaaaatgcatgtttggtactagtactccatgcatgacttaccggcgaatgtgctattatgcgcctggtgtgttcacggtaaattcccatgcctagtttgcaaggaagctcttaggttcatttggttgaagaagggtgacaaatattcgtcgttcgataaacatcgacaatttctccctcctgaccatc

SEQ ID NO: 91339 - DNA, 929 bp, Zea Mays
agttggactcctcgcacgttggcgttccctgtttcggtggtggttcttcgttcggatggggattcagattctggtgaggattttccttcgccacccccttcgggctttgccgatgaagacaatgatcatgaacattatgagcgacggccaaggcggccggtgcgccctgcgccttctgctcgggttccaattcatttacgactggggcaacgcagtcgttctggacaggtgaatgacagtctcagggctatttaggctgttgacccggatatggtggaggtgggatcagtggatgccccggctctctcggtagctccggttgaggagctggaggcgcccggtcaccctccagggttggcgttggatctgacagaagatttgggtggttcgacgcaggatgtcatctcaccggttaggccatgcttggaggttcctttggaggtggtccatgtgaatgatttggaggtggatgtctcagctgggcagcatggattcgggtgctcccatttggtggttgatggtagttccgttattggctctgtcagggcgagaaggcttgggtcttgtcagtcttccagggctgatagatggaaatctaagccacctgtgtttaaagtttattccagaagaagattatctcaggctcagattgttcaagaagaccttttgttgcaatatgtggtggaaatgattccacctttggaagagttcaagtctgcggtcactaagccttctgatggcctgttaccaccacctcccccccgaagtaccaaaagaagaaaaaaagcaatgccaagtgattttcgaccaaggaggagtaggagagtggctaaattcccccggagtttggttcaatttcggctgctcaagtgtgtaggcgtctgggtttttgtgatgataatgagaatatttctctccaggatgccagc

SEQ ID NO: 91340 - DNA, 607 bp, Zea Mays
gtcaaaatgatgtgtgggaatgcttggtgagtcttatcaaggtattggagtcccccggagatatctccgaatgggaatggagaggtctcatctccgaagtggaacacagttggaggaggggacccatcggatcatactggcatcgatgtccgggttgtgtttcagggagggggatctgcgggctctttttgacggcgaagagttgagactgatgttgttcaatttccatgaagccgaccttatcccaaaacaagagccaatgtaatatgtgttttgctattgccgttctttggtgaatttaaccgaaaacactgcccttgccccctttgccaaaggatggctatcgggacacttgtatttgaatgattttcctatgtgtattgtgtatcttggacttgaaatatgatgttcctctcgttgtggtatcgttaaaatgtatttgcactatctcagctgcatcctttgatgacttcacactcttaggtgtcgttaacacgtttgtattgatccggctgcgcccttaggcgacttgcgctaggatataaccgtatgtcttggcgaggacttcgtacctttgtgatgcatctgatgtgttgatccagctgca

SEQ ID NO: 91341 - DNA, 473 bp, Zea Mays
cagacttcaaacatgcggtagatattggaggaggactggttttcgggctatacgatcttttttatctagccgataatgactttggaatcagtcttgactatgcatgtcttaacaccgagcaccctgagcttgcggagtccgagaatgattgcttcatgctctgctatgttggttgtacatttgtctgtcttgagagcaaagctcggtcggacaacatatttgtacttggcacctgatggggttgtaattactgctgctgcatcggccgccgcatgacaccaggcgtcgtggcagtggattgtccagtgtgtttccagtctgggtgacgagaaggcgaaggccctgtctagtctactataatgtcagcgagaacttgtgaattgattgaatttcttgactcaaagactatatggtaccctaagagttccgttgcccacttgcctatcctggttgtagcttctaggttgctgaat

SEQ ID NO: 91342 - DNA, 342 bp, Zea Mays
tagcagggtcccctctaagcacctttgtcatgcctaaaaactcaactgtcactctcgtcttctttctctacttccacgtcccgggctgctcaggcctttgatcttgtccactatgatctctggacttctcctgtctttagcctctcttgttccaaatactaactggtcatttttatttaacataaattggacaggttctattgcagagataggaagcgaagggtacttcgaccaggtatcagagtcgaggtctttgtccaggaactgccgaaggcattgaagcaaatggatctaccatttaaagtgggggctcctcatgattttgtgaaggcgacccgccgg

SEQ ID NO: 91343 - DNA, 437 bp, Zea Mays
gctccagcgagcctgtactagccaaggcacgtaatggtcggtgctctaacttggttgatacttaattcaacatctaacaatcgtttcccctcgattaattgcacggttcgagctcccaacctttctgctcacggtgaccgcgcaatctggggacaattcgaagtgttcccggtgatctaatgggttctagcttaatcggtcgggtcgagaagcatcaagggcacataagggtactgaaaaaagagagcagaggacatgaacggaccagtagcacgctagccacgacgaggtgctcacgcggcggtatttagatcgatttgggggaaatgggcaattgggcggctctggtggacaattggaggcaagtgctggtgtgttggacgcataattacctagcggagctccctgaggcttcaatttatagcacgcaacggcgg

SEQ ID NO: 91344 - DNA, 310 bp, Zea Mays
cttgctgtggtgatggagatggaagatgatctttcgttgatggtgggttactggggtcgcatgttcagccacccaatgagactcatggcggtaaactgcatagggttagggaatgacccaatagttttatgagtgatgtgtacatataccaaattaaggtatcctaatatggccccaaaagcccattctaagagaagagcacaacctaatgtggtcctaactaggacaaccctcgactaaaactgctttgacctagtcacatctaccaggtcgactttgaccagatttgtcccgacctgatcattccaac

SEQ ID NO: 91345 - DNA, 435 bp, Zea Mays
aataagggcgaggacggacctataggtggctggccacggagcgacgtctcacggcggcgcatacaaccgatttgggggggggaaacgaaattctccggctatggtggctaatcagaggcgaggagcagtgctctgtgttcgtaacaaactagcggaacaagccgaggcatcaatttatagagggtgaccatgagtaggacgaatttgaacggagaagtgctcgcggagataacggaatgagtcaccggagttcgctaacgtggcattcactgggcaaagacttacggccgtcactggttatcctacacaacccacgacgacgtggtgaaacggcttgaggagtgacgggaccgaagtaaatggcggcacgacggctgcagtcgtgtggccacgttgccggtcatgtaggtacgaccactgagttgtaacagtgcc

SEQ ID NO: 91346 - DNA, 432 bp, Zea Mays
cggtagtgcgggtgcaacgttgaagggaggggcaaaaatagatctggtgaagggaggagaagagggggtagggattcacctaagttgatgacggcgaagctcctcacgacaccggctagatggaggagtagagggaggtgctcacagaggaagagctcctcacgacaacgatagaatgtaggagcagaggtaggtgctcatagaggaggagctcctcacggtggcgacgagatggaggagcagagggaggtgctcacagaggatgggttcgattttgcgagagagggaagaacgggagcgctcgtgcttgattttggcgagcgggctcatcccgatttttgcgctataccggaacggagagattccaggagccgcttcactcttcctccatagctaaccaaacacccgaaaaataggaatagaacagttcca

SEQ ID NO: 91347 - DNA, 717 bp, Zea Mays
tttgagcgcgaggatgtcactctgcatgccactcagattggacagctctttggattttctaagtcgacgaccaggctccatagcttgtgctacgacacatcgaatcctccccgtcgccctcacgacggagttgccccggctacagctcacattgctgccctgttcagacctccatttttagatgggtcgcgacgttctcctgcagcgaagttttttatgagatgatgagacggactttgctactcaggatgggatacagagaggccaccacacatattcagctatggcaacttggtgccttgatctcacacttagagttcaacgtggttgattttcttatctgtgagatcgaggatacaatattagatggtctctgtgctcgtcgtcagctgccatatgctcactacctctgtcacacctttgtgcagctgatcaggcctcctcagttccaggccaccctcgaggcctctcgcctctagttcggattctatcatccagctcctgaggacccagttccagcgccagatccagtcacagacatcagggctgaggatgaggctatcagacagttcgagacctagggtggcatagcagattcttcttctgatgatgatgaggacctggggatcctgccaccacctcctgtgccacctcgctcacatgatcacaaggccgatagttctagtgttgctcctactgcacctctagctattcttc

SEQ ID NO: 91348 - DNA, 654 bp, Zea Mays
aaccaaaattgtttagtcgacatagagtattccaggaaaaaaacaacctaaaacataaactcatgtgtgaattgaggacctacaatcaaggagggaggggtatcttactgcaacagaaagtttagaacagcgagtaccagaacaccgcaatcaacgatgaggtcgtttccacttctccgcatagaatatatactttaccacgcataatatattaatcaaccacaaagtaacctatatgactttatacttgtttggaaaaatacataaatgtatatagtgtcaattaaagagacaggctttagagcttacctgcaaaggaataaaacaatcttatggaaaattgtaaaatgaataagtgtatatccacgtgaatcatcgatgcaaagacaaataataaatatatcggtgcacatataagttttttgttgttctgataacaacaaatggactgtgcgtagctattagtctgtatgcaaacatacaattgaaaaaaatatgacctgagcaacaacaaagatgtgtgaagcaatcgaacaagaaatactaatagatcacatagaaataatttgtaagcgtaaatgctgttggtcaggtagatagtacatacaactcacctgtaggggagcaagataaataaaaaaagccatgctaaca

SEQ ID NO: 91349 - DNA, 406 bp, Zea Mays
ggtccggcgccctattcttttgtttcgctgacatgtgcaccgaggccctccgttttcattccatttacaaacgccagtccacgatcaaaccctgacgagctccggccatctgctgcatcaactcgccggtgatgtcctcctccgacgaaactaagcactcggacgtaatcctcgagactaactggttacgtcccctaggttaatcgatcccaaataacctagagcatctccgaccgtggcggaggcagagagccgagctccggcgagcctgaaccagggtctaggatactgtagctttcgatccatggttatgacgagtctcagtgatctgtctagcacacgctggccacatagatttacctagaaagagcatggtttaaccaatccacgcgaagctggtccgcgg

SEQ ID NO: 91350 - DNA, 283 bp, Zea Mays
gcgtgcaggagtagtttgttagctgtcgctagatgataggctaaccccttttggacagtgttcctaggagtaggacatatggtgcaaggccaatgtaatgatggcttctgacatgtgtgcgtgtgggaaaaactctcttatggatggttgtgcatgcgagcggaacacctggcttgtatgtgcatttaaatattatgacatatgtgatgaaaatgttgtgtgtgttgggatgtggttcttgccttatgatttttcacatgaagttttcttctatgagatcttg

SEQ ID NO: 91351 - DNA, 458 bp, Zea Mays
gataattcctgtcttcaacatatcagcgacttgttgttctatctcagtcttgagggcaggagcatatcggtatggccgcatctggacaggtcgagcccctggaagcaagggcaccttgtgatcacaatcccgaacaggtggcattccttgaggcacctcaaacactgtcgaatactgatgcagaagctgctgaatatcatcagggagtcctttaagaattgactgctccttatccaacaggtcttgaatactgcagacttgaatcagggcagtctgcatgaccgaagcttggattcctcgcaacatcacagtagaattccgaagaggaatgcacaaccatttatgtgcccaatggatccacatgggactatgagcttctagccaatccataccaataatgatatcataagtgggcaagggcaacaccttcaatgtggatgaaaaggaaacaacactaa

SEQ ID NO: 91352 - DNA, 558 bp, Zea Mays
agaaccgatggatcaacgacggtgatcctacagcctcgacatcgggcaagtggtgctacgacaagcttgttcgagggccaaagttcacccccttggcgatcttttcaccctccccgccgatatttttacgctccagcacgcacacatctcaaccattgcatggatcacggtgcatgatcatcgacggtcaagtgttctgaatccctgatctttttcagtcactgtacccagccacggccatttcagggtgcctgacagagcgactttagggcccttttctccaatttctatgtgatgagccactaatccgactacatcaaagttattctcctataaacctgcttcaacattgtcataaggatcttgagtagttactcactagatcaagcacaatttggctccaaagttgatcaaataccactaaccgtccaatttcataattctgcttgactgacagcccaactttcagggcgttttactccaaattctacaccattcatgggctaagtaacttaatctaatttttacttctatagtatctctacaacttcgttgtgg

SEQ ID NO: 91353 - DNA, 791 bp, Zea Mays
cttgtttgcctctgttaaatgtggctttatactgtttgaatgacacttaatatgtccttctcggatgaatctcatgaatttttgtttactaatacccaaagctgcacgtgcatcttcttgtgttgttctatccttaagtgggatattgtgtaatggtcctaaatctaatggaacttgcttacggccagctgtaccacgctttctattacaaatatcaactgcaatgccttgatcaagggagcttttacctcgctgccataattgttgaaccgtgcgtaaacggactccaaatagttcgacaacttcccaggtaacatgtcttttcaattttccattggcgcttcttgccaacaaagcttgatatattagtcttcttaattcattcggagtgtctttcctacctaaaaaataaatgtgcaaaatcaatagtagtggcgataaggcacaaaatatataaaaaataaacgtgttatttctatcgtaccttggacaacattgtcatcttctgcaggttccaagttcaagttaaatccaacttgaggttcttcaaaattcagatcaaattcaacatgtggtgcaaccaagttcaaatcaaaaccacctaacaagaaagtagcatggacactgtgtcatgagataaaaagaaaagattaaagtcatcctgttatttgaatccaaccttgggcaacgttgtcatcttctgtaggttctaagttcaagttaaatccaacttgggatgcttcaaagttcagatcaaatccgacgtatggttcttccaagtttaaatcaaa

SEQ ID NO: 91354 - DNA, 1165 bp, Zea Mays
ttcttggtttgggcaccatccaagaacacaaaaacctggttcagataggcttgactctgagcatacccctcctcagcgtcagagcaccgtcgagttagagctggaagggcaagaaggaaagcgtacagggagtaaaacgagggagcaacgaacaacgaagaaagctatcaacccactaaccgatgtccgaagcttttagatcatctatttgcttctgaagcaggagaggattccactgcagcaaggaaaaaacttgatcgggaacaggggcaccgcaagacctcaactgagcagacagatagctcagaacattctaaaaatacaagaattagcaaatgagtcttttgtcaacaaaagtaaagcagggaacaggtcagctcacctgaaggatagaaaggaacaagggaaatcccaaagccagaggcgccaacgtgctatcgaacggtggggtactagcagaagccatattgagagcagactcgagccccaaaggaggattaaagctcgcacccaaggcaacacttagtgggacctcagctccgatagcatgcagcggattcctagcgcccgaatcactgacctctaaagtgatcggccaacaagagaagtaggaagacttgtcaacactggctcctcagactgaactagtggcgatctgacatgaatttccatagacaaagccgaggaggagcagagctcggcaccctcagaggctgggtcatcctcaaaagcaccctcgagggccgggtcatcctcagcaccacccttgggggctgaagcatcctcaattgtgcccacaggaaccaggtgacccttacatgtaacattaggaaccaaggtgtttccatgaattaggccaccttcaaaggtttaagaagcatgggaaactatccgggttatttcttgcctgactagattactagctgagggggtgtcatctatgacctctgcaaggatggcagcactctcagtttcaggaagctccaataaaaaatcttcagggataatctcctccggtgcatgatcaatggcagacatcgtcaacctctaaagattaaccagccctgacagagcctgaattgagacatcatcgttgtttttgctacggcaattcttacgaatcaaagggaaaacttcctcttcatcctcgtcagacacatgtcca

SEQ ID NO: 91355 - DNA, 499 bp, Zea Mays
gtcgccatcgggctcgccaccgaggggtggcccagcgggatgtacgacggcctcggcatcgtgctcaccatcctcctcgtggtcatgatcaccgcggccagcgactacaaccagtcgctgcagttccgggacctggacagggagaagaagaagatcgacatgcaggtcacccgcgacggctaccgccagaaagtgtccatatatgacattgtcgtcggggatatcgtccacctgtccatcggcgaccaggtgccagcggacggcctgtacatcgacggctactcgttagtggtcgacgagtcgagcctctccggcgagagtgagccagtgcatatgtccagtgcaaaacctttcctgctcggcggtaccaaggtgcatgacgggtcggccaggatgctggtcaccgcggtcgggatgcgaactgagtggggaaacctcatggaaacgctgagccaaggcggtgaggacgagacgccgctgcaggtcaagctcaacggcg

SEQ ID NO: 91356 - DNA, 617 bp, Zea Mays
ctggcaggggatggacgcgagggcctaaacgctcgaagaaagagcaccacaacgttcgcaacatccatgaacggtagcgcgacacccagtagccgcggcgacaaacaggacgacgacggaccccaactcgatggagagcattgaacagagcgatgaaagtaccatgtcgtaagtcgattctagccattttggaacttgtcgtggtggattggaggccttcgtgcctcctgttcgttgtcttgtgctcaatggagagcatatgtatctaataacatgtttgagtgtgaatgtaaatgaaaggaacgaatagaagaactatcttgcattgatctgctgttggaatatatatacacggtgaagggttgcactgaacgggtgtcagttgctaagaggcaaccgttcatgcactatgccaaaggacatgccctttagttacatagtaaactgtctaatctatctttaatcctgttgcttgaaaatgtgtcttgtggatgagatcatcacatatatctcttggttagagacatcgtttcacaacacttttatcttacgcatataggtatgagtagagtatctagcgggtacgtacctgttaccttccctaccataactctcac

SEQ ID NO: 91357 - DNA, 493 bp, Zea Mays
aaaacgtgagatagatgaactaccaatagttctactctttggataagttcaaaataccccgaggaacgtattcaacacttctagaaaggttggaaagctcaaaatcaacatatcgctattttgaagctagtttaagcaaaagaagaaatatgagtgaaataatcaaaatgtttataatccatgacttagactagatggaaaaccacttgagatatttttctaggtcataggatctctctcaagtttagccaaagcaacttggagaagattgttcaaagatcaacgggaagtcagaaactcaagttctgaaattgcctagcgcggaccgtccggccccttctggcggaccgtccgcgacaccgtttcgacttcggccaggaactaaaaatcgtggatagtccgactaaaccgtgaaatgtccgactatatagcgcggaccgtccggctataattcacggaccgtccgcatgtgaagaccttgttcagcccgaac

SEQ ID NO: 91358 - DNA, 289 bp, Zea Mays
gccataaaaaatttcatcctttggcctcgaagggatgtcgaattggttgatccgccaacgccgtcatcatctcatccccaaccatttccgcctcctcaaactttagaacctttacatccatcatcacctccacaatcttcccatgctgctcctcatcctctttctaatccaccatctccaccacaagcatcaacattttggacaccaccaccttctccacagccatcaagggattcacgacaatcaaagaaatctaaattccctctaccaaaattggtgtctacattcg

SEQ ID NO: 91359 - DNA, 357 bp, Zea Mays
cggatatggatcgccagatcataatccaagggttcggatctaaagtatctagcgctctcgctcacccactcatcagcggatcaacggtcgcgaggagccctggcacaaggggtatccgcccatacggaccactggatcagcgacgtacgatgtggattaaaatacctgagcgtcgaaccagtattcaatccaagccgaccgatccacgatcaatgatccacgtttaatgagacacggtccaagatcttactcgttagtgatccaatcaatggattggattgattcacagaaaagtaccctacgatctatccacaactttcaaacaccggatcaacggtggacatgtctcctccccaa

SEQ ID NO: 91360 - DNA, 445 bp, Zea Mays
aaaagttatccttggggcatgctttgttaaggctggtgaaatcaatgcacatgcgccattttccattcctcttctatactatcacaacgttggcgagcgaggttgggtaagctattggctcgatgaatttggcttccagtaagaggtgcacctcggcctttttcatcggacatcttccttagtcgttgcttttttggacgcaccgaggggtcgatgccaagctgcgttagatgattgtgtggctaacccccactaggtctagagcggaccgggcgaagatgtccttgttgtggttgagacaagagagaagtctttcctcgtcatgtggtgacatgtcttcgttgatcatgacgattttctttggggttatagggtcgagggggaccgtcttcgttccgtcgttgcttcgcaactgggcgttgatctttttgcttttggttgggtg

SEQ ID NO: 91361 - DNA, 421 bp, Zea Mays
gttactcgtatccttgaggtttctcccttaattaaaagatggcatgaaaacgttggcactgaatcaagtaaatgtacttggtacaatgctaaaatagatgtaacttgattcagtgtttaactgtttataaatggcttttccgtgcctaagtgtatatatgttgtttctttagctttgaatatgagtgacgatcgaagaagggcgatgtacgatggattcgacagtgtcactcatggtcactctgatgcatgggtgagagttgcagatgaattcgtggcactcgcatttgttggtgatgctcgtttagcgaggtgcccgtgtataaaatgtcagaactcggttcagttgaaaaaagtggagctctcgtatcatgttttcaaacatggctttatgccgaactatctggtatggcatgagcatg

SEQ ID NO: 91362 - DNA, 401 bp, Zea Mays
gtaagcaggaaagcaatcaggtaatcacaccacattagaaagcaattaggtaatcacgtcgcatgaactaggtgccatgctatagtagttacgaatttatagttgctacttgctaccagttgcgactcctcgtggtttgttgtggtaggtactccgaaagtttcacatttagctatttcagttgtgattgagggtcaaacccgtgagctagaaccatctgcgaatatgtattcttttgtctcggactctaggtccattagcatctttcctagaacatgttacaattcaaatacactagtagatggcaatgctttactgttattttattgcaacgagcttataattgctatatactattggacacataaacaaggtattacctccacttctgaatggcaatt

SEQ ID NO: 91363 - DNA, 362 bp, Zea Mays
gaactataatctcatctaggagatattctctctacataggagagtgatcattcatcaggaatgtattatctagtacaagatttatatgttgcatatttataattcaaagatatgagtccttgtaggatctcatgcggatcttcagaatcctattaactgcatattttaattcatgccatttgccagatatattacatagcagaacaatgtttattcaacacatacgtgggatgggtctctcacaagaccacttgaaccatcacattcaccacacattatttcaacaatgcccataaatgtccgaacttcaagctcgcgagctaggtgagtgccatagagttaggtagttgggttctctcccg

SEQ ID NO: 91364 - DNA, 673 bp, Zea Mays
agtgcatgttgatctgttgcacttggatcataatcatgaatttttcaagaaggatacagaaaagaatcaattacaatgcaacaagacgcatgatcctgaatacatggagttcataagttcaatgcaggagagtcgaatcccacaacattgcattatggattatgtttcataaatgcacggtggtcttgagagcatgcctgtaacagcacaggacatgtataacctgtaagtttataatatttttagattctaattcagaattgaaatttgcatatatgttgatttcgcccaatgctaaatattgacaataattacaggaaaaaggcaaagcaacgagagagaaatgcaaatgatgtggctaagctactatctttttttgcattatgcaaaaagaataacccacaatttttctctgacttccaattggataaagaggggaagattttgagcatattttggtcacatgcaagccatcaaggggactacatggattttggtgacgcagtcacatttgacacaacacataagactaatatgtatgaaaaaccactaggtatgtttgttggttcaaaccaccacctccagtgcaccatatttgccttcgcattattgggggatgaaatttttgaaacatttgaatgggtattcaatgccttcaaaacatgcatgggaa

SEQ ID NO: 91365 - DNA, 301 bp, Zea Mays
ccacaatgtgcctttactctgcacctacattcacttgagtttggtatgttgctctatgatttaacaacaccacttctattggcaatttcctctgcagcctaccttgggtgttatgttgggcttcatagagacatatattatctttgatttctttggttagcaattaaaaacattttgtatcccttattttctcgcattcatatttattactctcgcatcctctttgtagagccctagcacaacattgctattgaagagctagaagctactagcttggacttgacagggcgttgcgagtctc

SEQ ID NO: 91366 - DNA, 473 bp, Zea Mays
ggtatttcgggcacatcatattccaaaagcccttatggaaataaagttcaatgagttcttagatctgaagcaaggcgaagaagagagtgtaatggaatattttgagaggtttactcgtctatcccagtatgtcttggattttgtgaacactaatgagaagaaaaagttctatttcgtgcgtggcctcaacgagaagctccagtgcttgatggcagccaatttggctaaaagatataatgaggtggttagtcaagccgttttgggtgataacaagattcgtcgtcatcaggaatctaaaagaaagaaacttgcggaagaatcctctaatagtgtcaagcagtgtcggaggattttttatcaacctgtttatcatccttgtccttttctacccaagttacccagctcccaacagttatgtgtagggcaggctgttgttcctttcatcccacatcagccggatgtcctagacattc

SEQ ID NO: 91367 - DNA, 454 bp, Zea Mays
cggatatctctttattatccgggagacaatacaaaaacttttcttccccactgccattaaacactaatgccccctcgtgtattttaatttttgggcatagtgtagtgcttctagcttttcttcttgagaaagtatcttccccgaagcatgacgaatgatgtaatcagctctttcttttgaagctttggaggcaggagattcaaccttttcagacgcaatttgctctgtcgccttttcttcaactatgataggctctgtctcagtaggctctgaaggcccagcttcggtttcagcttgaattgttgtagcttcgacttctgcttgctttgtttcagcttcgggttgtgctttggaagcttcgacaatttttcttgaaggagcaggactcaaggtttttgttgtttctaacacaacatctaacacatttgccatccttctcctcttaggagttgcg

SEQ ID NO: 91368 - DNA, 488 bp, Zea Mays
ctcgcgatagtgctcttctcactctctggccgccaccacgccaatccaaattcactagccaccgcttagcgcccctataaattgatggcatggtctgctacgctaagttatcaccaagccagagcacccgctcctgcctccgattagccaccacaactcttaaatttctctttctccccaaatctgttttccgccaccgtgaaagaggcctcgccgtggctagctcgtctcaggtccgttcatgccctctattcacttgtttcagtgctttgatatgctcctggtactctctgacccagccaactaagctaggacccaccaggaacacattggattgtccgttgatcgcacggtcaccgtggacatagcgagttagagctccgctagtgaaattaattgaggggaaacacttgttagggcttaaattaggtctaagccgaagtagagcaccagtcatcgcgtgtcctggccagtgcaggctcgccgga

SEQ ID NO: 91369 - DNA, 392 bp, Zea Mays
attcaagaatcgccgcgttcgagagacttgaattaccctaacactttactatttattcgagttaagacaatcaaattagaaccaacaagtcgacttgcaaattttattcaagtcatttagtgcactaaaattactacaatcaattaacaacgtattctccacgataatcacccaacaatttgcgttttaaattagacatcacatgagcactactactttttacccgcgaccgtaaccatacacatttagaccacaacaagcaatttaccgtgattacgagcttaaccaagtcatctaacaattcggctaattagagcaacaatataggccgctatacagcacacacgtcagctagtctatcattttcgaaatccgagacaccacacacacac

SEQ ID NO: 91370 - DNA, 581 bp, Zea Mays
tgatgtagagatgtagaatttaaagccccaattcggtaaaatggtcgagtcctaaatagtgtgtcgagtatgtaggctttggggctacatgcatgaagttggtgacttagccagaagataggaaaaactgagacacagattaaggcgattcaagagaagagtctcatctgcccgagtcaatgacttaggcaaacaagacttaggggctgctatcaacagtatataccaggggtacctagatcatgatcaaagacgtacaaatatgctcatgagggaaaatatctcataagaataagagatatggtaaagatctcattggaatagaaggtatgttaaaaatcctaatggataaggaagatacacttgtaatcatggagttggattcatgaactagctaaccaacttggtaccatcatggacttgttaaccaacttggtatccaccatttaaccgctatctctcaaactataaaaggaggggcaggagagccccctagggcattgcatctcacgtcgcaacatacaacatcagatccatcgcatacatgatacagagtattatctcacatcaagagtccgaac

SEQ ID NO: 91371 - DNA, 419 bp, Zea Mays
gaatgactgctgggtgattggccacaagaaacgtacccatcataaccggctcttcctccggtgtagtggccacttgagtgtaatatattcacccagtcttcttaatattcttgcccgctgaattatttgccatgtttcccttgccttgatttgagctccctgagttctgctgattgttggatttattctgcctcggatatgggcaatctttgatgaaatgactagactccccatagttgaagcagccagttgaggaactagggagggcggggaaacgagcaccaggggcactcagttgatttgtagaagtgggggcagtggcagggcgaatgaagacaggctgtttgaatgggtaggagggtggacgagatgaagaacgattctgattaacaggtcggattaccatcctggttcgcttt

SEQ ID NO: 91372 - DNA, 616 bp, Zea Mays
gccttttgcactgtcagtagttctgccgttgttggtggactcagaatttctggcattttcactgtttttccaatcttgattcttcgaccgcatcatctttggctgacccgactataggcaccttcggcactacaatcgattcttcagcgctctgcatgatgggggccgcttgttttgcttcggtagttgaagaggtcccttcggcaaattcaggcactacggtcggttcaatatatcgcggccaatgggttagaacttttattttcttagtcttcggcacagccggcacaacagtggtggctaaagcgtcagtttttcttttccttccttgccttcgtagtgggtagtgataatcagggtatacgaagccaattgcatcaaacaccctgttcaatcttttcttcccccaacccccgaaggaagtggacaaggcatcctcttcggccttcgaatatgtcccaagcagctcgtcgctggtagcctcaatgcattttaaccaatcatcatttggttcgtcaaacttttctctgaatctgaaggtatatttcaatcgaactaggccatcttcactggattcagcagtagtctccttcgacatttcccagctattcacgtg

SEQ ID NO: 91373 - DNA, 476 bp, Zea Mays
agccaaagaaggatgaagttatcgttttcaagagcttcttcagagcggggctgcgattcccccttaatgagatgataggagtagttttaaagaactttgaaatatatcttcatcagctgactcccaacgccattgttaggctcagcgtctttatctgggcccttcgaagccaagggatgagcctagatgccgaagctttctgccgagtacacgagctgcactatcagacgaaggccagggcagatggcattcacgaaaattttggttgttacaattttgcttatcaaaaggatacaaaagcaccagtccttagctaccgcacaaagtggccaaccgaatggaaaaatgaaaggttctatatgaaggctgacaagaaaaggagggagaagctgatgatcatggtcatgagtccactgagtttgagcttcggaatgacccagtccttatgcaatatgcaactagggtcaccctgtcag

SEQ ID NO: 91374 - DNA, 498 bp, Zea Mays
tgaagttagtatccctatcaggagaagaagtgttagtagagttggtcttgtcaggaccaaggaaagggagttgtcaccaagtcatcgctcatattgaggagattaaaccatcagaagctgtcaatgtagtgtcaaaattcccagatgtgtttcccgaggagttaccaggtatgccacctgaaaggaaggttgaatttgccatagagcttataccaggcaccgcccctatttccaagagagcctatcgagtgtccggaccagaattggtggaactcaagaagcagattgatgagttgtcggagaaaggttatatcagaccgagtacctcaccttgggcagccccaatattgtttgtggagaagaaggatggcacgaagaggatgtgcatcgattatcgagctttgaatgaggttactatcaagaacaagtaccccctgcctagaattgaggatttattcgatcagttgagaggggctagtgtgttctcaaagatagata

SEQ ID NO: 91375 - DNA, 509 bp, Zea Mays
ttgtaatcctactagaacttctaacttgtaaccctattaggtctcctgtattgtaactgactagaaaacttgtccatatgtaatcgtactagaacttctaacttgtaatcttgttaggtctcctatattgtaactgattagaaaacttgtccatgtgtaatcctactaagacttctaccttgtaatctactagaacttctaacttgtaatcctattaggtgtcctacattgtaaccgactagaaaacgtgccccttggactatataaaggaggacatggctttctagataggcaacgggacacacaacaaaccttacatctcataatccaatgaacccagccatgaaccctgttcttcgtgactgcgtcgagctccacccccaggccggccatcacgtgcccatcacgtgcccggaccccttgtcttccctcaggctgtgatcacctccctggcaatcgagccccccaattttccctcccctcctattggccctgttggagcaccttcc

SEQ ID NO: 91376 - DNA, 446 bp, Zea Mays
taaaaaatgaagaggaatcggatgacaaggcggtagtggaacgcattgcaaggcaatcagctcactacaccctcatagggaacacactgtacagaagaggtgcggcaggagtcctcatgaagtgcattcactcggccgttgggaagcaactattagaggaaatccatgccagacaatgtggagtacatgccccgtccagaactctggttgggaatgttttcagatctagtttctattggatgacggcgaagagtgatgccaccgagttagtccgaagatgtgaagcttgccaattcttgtcaaagcaacaacaattaacggcacagcagctgcagaccatccctataacatggccatttgcatgctgggggttggacatgattggacccttcaagaaagctcaggggggttatactcatgtgctagttgccattggcaaattcaca

SEQ ID NO: 91377 - DNA, 1428 bp, Zea Mays
cttgggggggatgccgaggtattcttggggccattcaccgagttggagtaggcgggtcctggtggcttcagctgcggacagttgttcttgaagtgactgggatcaccgcagtgccaacatgcattcgccgggggttggttgcttgccactgagggggtatggaaagagctctgactctgctggctgaaccatgacggggtgggtccagctggtctactgaagtttggccccttgggtgggaatccaaatgatcgagtcttctagtgccggtcctgctgctgtgcccggagaacctggaactttcttttgagatgccctttttcttcctcctttgccctttcaacttgcatggccttgttggaaaggtgagagaaactgatgaagtcttggctagccagaattatcttgagttttggcctgagtcccttcaggaaatgagccatcttcttgccctcggtactgacgtcatctggcgcgtagcgggctaactctgtgaacttgtgcacatattcgctgacagatcttccatcttgagtcagttctcagaactcatcctccttaagctgtacgagcccttggggcacatggtgctcccggaaagctgcttcaaattccgcccaggtagcatctctgatggtgacgttgaaggtgtcccaccaagctaaggccatcccggaaagttggtgggcagccagttgaacacgctgattttctaggcaaccaatggcttccagctttcttttaatcgtgcgcatccaatcgtctgcatcgagggggttgcttgatccgacgaacgtgggaggcttgagtctcaggaaatcccccattctgtcttgcggtcttccaccatttggccgttgattttccagacttcgagtgaggacctcgatgagtcgggttttattggctagaacttgggctaggtctaagggtagttgtggaggtgcggggaggtgggtttcactttcctctctaatggcttccccttaagctctcaggggaaaccctgctccaatcccggaggcggtaggcgtggttttatccgaagccatctgccagggaagagagtcactattatgcacatgcaaattgttttcaaccaagttattttattcattacaccagcacattacaagcatatgactactacaggtggaactacatgagagcgttccccgaggtactaccgaactctttctctaaggtatccccaaagttccttgagaagatcatcaaggctcgctagagatatatcctcggcgtcggaccaatcatctattctggggggaggtggggctggaggggtcttcttcttctctgtttggcatcctcggttggtggtcttcttctggattttcttcttgggggcgagcttccttagcttcttgtcatagtccatctttaaggttcgataggcctcgcgggtgt

SEQ ID NO: 91378 - DNA, 402 bp, Zea Mays
ttttgagccatggtgggctagaactttgcgccgagatctcaggactatggttaaatttgtttctattgtgggtctagttcttccttttcttctaaagagatggacctagcgaaagaagaatcttgttctctaggagtgtccttgagggatgacctagcatgtggtggattggactaccatagagattgggcttctcctttggcatggatgcttaaaaactttcatggtgctagtttcagcgtttccgtcttgcttttgccatctttgatgcacggtcacaacagcactgtacatcacttcgacgaccacgcgtatttttggcggccagggcttagccgccgaaaataagtctttttaaacagccgtcgagctcctccttcttctctctgtttcaatctcacg

SEQ ID NO: 91379 - DNA, 1105 bp, Zea Mays
ctgagatctcaccactcgtaatcatcatgatgggaatcgaccaacatctcggtttgcccaatatcaagctcggactccaccgcattgaagaaaccttcatgttaagttggatcgccaccgccactaatagagtcatgataattctaggcaccaagatcatgagtatggtggatacgaagtagaacacgaagtttttagctctagccgagtccatcgagataaggctctagagggcctcttggtttctataatgaagttatttacagtatgcgtgactaaagtcaactagcctaggaacttcaagccttcagtcaaaacatatgatggtcgcactaatccatcaaactggcttgggatctaccaattatccatcataatagcgggaggagactcttcagttatggctaaatatctgcacttgtatcttggctctatatattatagttagggagtggctattcattattcctacaaactttattgactcatgggaggatttgaagaggcaattaatcaacaactttatcatgacttttgattaagaaaatgctcaatacaacctcaacaagattattcagaaggaggatgagtccttgcatagttaaatcaagcagtggcgtgacatggagattaacatctccaacatgccagaagagacatccatctaagtctttcataagggccatagggatcagggattattctagatggttgtatgcaaggctccaactactcttgcctttctattccaggttgccgacaagtatgatttgagtgaaaaagttcctcatcacatgtcatcatcttagaaggataagggcaataaagagtaaaagacagagctaggcaaaggccaatatagagagtgcaaactagagcaccgagtcgaaataactatggaacatgggactcgacaacaaactttctctccaaggaagaacatgtttcagtacatcatggagggatgatgcatctatcatctagataggcaacataaaactcatgattgttgtcataaaaggggtttgcaaaaaagttacttagggacatgagcctgagtcatagaaacttgtggtgagcaagaaaaatgacttagacagagatg

SEQ ID NO: 91380 - DNA, 291 bp, Zea Mays
caaacgtttatttcggcagatcagaagaagttacaactgtatgttttccttctccccttttttatcaatattatatacactaagggtactcaacaaacggatttcatcaaaaaataataaccactaactgatttcacaatggagcatttatttccttctacagtgctgaccataaaatgcaaaccgaaagaaatgaaatattccagagcataagagaatttttaacgcagtggtttgaatcaaaccaagcagggcttgacgtttttaccacaaagaccaattttgataact

SEQ ID NO: 91381 - DNA, 496 bp, Zea Mays
ggttgttgcgtcggtgcctggtgtcatgttttgcttgttcccgcccatgatcctgagcgaggcagtgatatcgacaacgagagtttcatcgttcatggagcactctatcatcgggagtttatcctgctttagatgcctcgttccgagacataggctaggcgaggtcctgttcctcggccgcatgatgatgtcgaacattccatcacttgttctaacacttgtgtgcctcatgctgcgggggctcttctcccggtaggatgggatcttcgtcggatatggggtagtcctctattcttccatggataaaaagaacatccgggaaataagagtgtggagccgtcttttgtattccggccatcgcccatgtgggcgggggcagccgagatggtctttggttttcctcccaaggctatggtgacactggggcctcttgctcctttcttctgagtgatatgggtccacacctaagtgggtgatgtggacaatggagtcctac

SEQ ID NO: 91382 - DNA, 505 bp, Zea Mays
tattgggatgactgtgtggtcgcgctaggccttcgtttgagcttgatatttgttgagggcctgcagggcaaagacacggtctccgtcgatgaggtctttggaggttggttcgtctacatcggggacgactgaagcgcttgtccgtggtgacccatgcttgatttcctgcggggtcatggcctccgatccgtatagcaggcgaaagggagtgaatccagtcgccaacattcggtcgtgttcagcgcccagactgcttcaggtaggaggtcggccatttacccttcttgtcgtcgagaagcattttcttgatggcagtgaaaatcttgccgttggcgcgctccacgatgccgttagattgtgggtgatatactgaggcgaaggcaagcttggtgccaatggagaagcaaaagtccctgaaatcctggctgtcaaactgtttgccattgtcgactgtgagctcagacgggactccgaatcagcaaataatgttttgccagaagaattt

SEQ ID NO: 91383 - DNA, 365 bp, Zea Mays
caaaaaccaattcagcataaatttattgttaaacggagacacaaatttatactattcaacgtatcacacgtttatgcaatttacaatactgtgttatgctgctttgttgacaaaattatgatatatacatcaatatgttatgccataaatatctcgctgttcaatttgggtcagcacccacgaaatatccatattatacattaattggatgtcgcatatgagcagattttttattgatccattaagtttttttatgtatatgtgttgtttgatttggctcgaacatcatatatgaagaacgcagcagcgcgtctccctatccctacctccaaacccttcctagtgggccctagcagtgcaccccg

SEQ ID NO: 91384 - DNA, 351 bp, Zea Mays
gtcgcaggtcagctcgccacgactgtggacacgcactcacacgcaccagtgaactcttattcctccaaccgccgtgcgtcgtcgctcaaattcgcggccaccactcgcggactctataaattgaccgtgcccccagctccgccatgtactcaagcagctgctgcacccacctgcatcccaaatccctcactagcgagcacaaattttggattctccccaatccggttctagaacaccgtgaactcaatctcgtcgtggccaacactattcaggtccgctcataccatcttcttccccgtttaagtacactcataggtctacgatgctctccgacccacgtaattgcgctag

SEQ ID NO: 91385 - DNA, 579 bp, Zea Mays
cgcccccttcatcatgaaaatgattgaagtggtgactcaatttcgctatgagaaaggcacaagacatctatcttacacccccttctgaattgatccaaacaatccagcagggcgtctgaggaaagcgccctccagctctcgtggacctgctgctgccggaccctcgcgtccatctcctggtcgcggatctcccacactacgtggtcgtggtcgtggtcgaggtcgtggtcgtgggatgggtgctcgtctggcccatggcattgctgcattcttctccatgtgcagaaatatatcttcagatgttcatgagctggctcggcgacaacgggagactgacgacaatcttcgtcgtcaagcttcctctatgggtatgccatttgctccccgttcgcctgatgtgcctctccatccacctcctccagaaatcaatgagtggcaccagcaggcatatggggtgtctttcatgtctccagaagatgaagaatactttgatgatcgtgagcagtttgccccgcctccccaccagggggatccgggtcaatcctcttctcatcctccgccccaggatccttcaggaag

SEQ ID NO: 91386 - DNA, 323 bp, Zea Mays
caggtgcgctactcttcgggggagttcacgaagaaaggttaggatgccttcgggaccacactggggcgaaggttgtcggcactatatcaaagagtgttggcctcccaaaggttgaggcagacctcagcaggtaccggcggcaacatatcgccggtagcctattttatgctaactttaaggtaaaattcttaacttttcattgtttcgatatgaagattgttttatgatgaagcttatgttatcagagcttactgctaagcaaagtcctgaggatgcaacaagacctcgaggacaaaaagaacgaagttataattgagggcctg

SEQ ID NO: 91387 - DNA, 606 bp, Zea Mays
caattgtggactgaatgttcgtcttcagctgtcttcagcaacagcgactcaactttgatgctagttatgtcctctagcagacacatgagccacacaacctggcatgctcgagcggtctagtcacacccgccatatactctacttcacaagttgagaggaccatcgtcttctgtttctgatgctgccacgcaacaagcatgtctcctagaaagaagataatgttgttggtgcttctcctctcatcaatatcttcccaagtcattgttcgtgtacctgattagcatgtagcctgccaacctgttgttagttttgcagcactttgggtagatagggttgtagtcgactgtgacgacaacgtagcgtagggtgagccccatgctcttgtcgcggtctctccatgaagtagctcacaaaacccaccgcaaacgtagtgtctggcctggtataaactagatagcatagactctccaccaaatttctatacatcgtagcatcaacctccagtgttgagctctttgtcaagagcttcagccagacctccattggtgtgtgtcatgggtaataggtccccatgccggccttctcctatagcgtacgagtgtatgc

SEQ ID NO: 91388 - DNA, 301 bp, Zea Mays
taatgcactatctgcggcctttgggagccgaaaaaagaaaaggctaaatagagtttttgatgctattgggtttgtgtaccctaactatcggtacccgccgcgggggcagaaaagaaagggtgcaacttctgagaaggctgctgcttcagctgctccaagcgagtctgcgccgaagaggaaaaaactgaaggtccttacccaccgatcgcgctatattgaaccggccatagtgcctgaatttgatggtgagacctcttcggctattgaagccagaggacctgctcttacgcagaggattgaa

SEQ ID NO: 91389 - DNA, 419 bp, Zea Mays
ctccaataagttggttctaattgccttgccaagaaggaatgtgagcacatgacctaggactccataacgtcttcctctctcgtgttgctaaggttgagcgtgaggtcactcttgcctagattgagcatgatgttgtggatgcttgcatccatgttgctcttgatcgcattgctcgtacatgtgctatatccgagttgcctttgatcaacccaaccttgatggggaggaccttaaggacgacgactttgccatcgatgtgccacacatccatgatgacattcttgtcatgaggctgccactcgcaatctctacatctaggtggttgttgtgtagaacatttatgtgttcatgcctcacatcatcgatgtcacctcaacattctaagcttgttggcctgaggtgtcactcctccccgtcgg

SEQ ID NO: 91390 - DNA, 328 bp, Zea Mays
gtccttctcaaggaagaaagcagcagggtatgcttttttaacttattctttagccatagttcattcatggaaaggatcctgtcatcctgagcaatctccaacctatgaaggatttccttagccatggctaattggaacctgatgtgtcccacctgattattactccaggaaataagacttttagctgtcttctttaacttcagaaaaaaggattagaaaggaaacatctccccattaacagaatcccaggcggtctgaacaagacccatggattttccatgaaatgtgtttcaatagtacatctatttaagcttgtatgtattatttt

SEQ ID NO: 91391 - DNA, 370 bp, Zea Mays
catcggtcgccgcagaaccgcgcaacttcgggggcagcctgtctcgcctatcgattggaggtgagcaactactcatctggtttgccttgctctcctctccgcataggggcttctggtgcgcggtttggggctcggtgatggctggatacgtctacatctatggcgccgccgctgggttcctgtgcacagccgtgttgttcgtcggggagagaggaggggaggaagaaaggatttagtccgttagatgtcgatccggcggccatgatcgcgtgtagcgtatcccttcgtcaaatgtatctgagccgtaggatggtagttcaaagaccgagattagatcctgtcctcgtaaaaattctagccgcaagatttt

SEQ ID NO: 91392 - DNA, 281 bp, Zea Mays
aattggtatctttttgtgatgaaagtgatagagtatgccttgaccaaggtatggtgtgatcccctctagttctgaggaggctagaatgtgcaaagtgtaagtcattcaaatacttgacgcacaacttgagggggagcacacataacttgtgtcttttgagactaattgtatcttgagcgatcttgtgtagtcttatggtggaaaagagaagatgagcaagaaatggagcaatcaggactggggtacctctgtaagtcaaggaattggtatcttaagtcgtg

SEQ ID NO: 91393 - DNA, 517 bp, Zea Mays
ccagaatgcctagttatgctatctgtgatgaacttctatgccttacatgtccagattgtcagattgttaatcgtttcggtccaatgtttggcgtatttctattatcatattatccttaatattcaagttttatgcaacatatatacttccttattttatatacattaggttccttttacaaatttaccatgttaaatatgctaactgtgtccagtgtctatgctactacctttctggtttagatgaagtgtgaaacccgaagtatgtaataccaattgtttagttatgttaagtgtattgagtttatataccattcctgtccagattggccgattgttaaacgttccatgccaatttttggcatatatttagtttcatattttgtgtaatggtctagttttacgcaacatattatagtattatatcaacgcattatataacccagtcatgcaaaatattaatttcctcaaccaaaacataggtcattgtgctattacaaatttatactacatcaacc

SEQ ID NO: 91394 - DNA, 477 bp, Zea Mays
tcttttctaaataggtatagattccaagctaagtttcatataaccacctgtcatctgtctttgagtcattcctgtaaaaggtgcatcagggggatcttggcaaactgtctttttgtgtggaatggattgtactaagtacatattgaatctgcatctgccttctctgtttgttgtatgggcgaaactaaggtttcttagatagcagcggcagcatgggttatgtgtttttgaatcgatataatcattaaagctttctttcgtattgtatccatgatactgcacatctcttaggtgtactgtcgtttgcggtccttgcatcctggtcttgtcttgtgtgccttgcattctctgtattgttatccactagcatcttgttatggacactgcagttcttcccttttggagtcttgtaagcaaatgaatgtagcatttggaaccatatatgattctttttcttgtagttgacactcataaaag

SEQ ID NO: 91395 - DNA, 730 bp, Zea Mays
aatttataggggcactaagcggtggccagtgaatttggtttggcgtggtggcggccagagaggaagaggggcactggcgcatacgattggtggcctcaatcgtggcaacctcaccggtgatctctggataggtcagtacgagtcacgacagcatggttaaagtgctgaggcacgtggcacaagaccgcgaggtgtctaactccggcgagggttgattcaaggcgatcggggtagagtggacacgacggccggacggaacagtgccttaagctcatccgtggggaagatctttttaccgcgagacgttatccgggcaccggtgagcacgaatcacctcaccgacatgaatccactcacggggtcgctggcggctggttcattgaaccaacagatttttctggtcactgtaccatcaggatcttcttcagtcagtctgacagatcatgtttggggcaaatttcctcccgattttgtagggtgactagatcaatgctctgcagcaaagttgtagcctaatagaccagctttaactttgttacagtgtgcatccacaaaaagtcgtaggatcttactcaaaatcgagctctaagttcatccaatttcaatgttactgaaagttcaaacttaaggtgacctgacagcctgacattggatcaaattttctcaaaatctttcatggcaccaaggcttaatccctatagcaaagttgtcctccttacatagctctaca

SEQ ID NO: 91396 - DNA, 823 bp, Zea Mays
cacgaatatactctggccaatagtttactccgaccaccgtaccgggttagccgcggcggattcggatgagctcgccggtgatagccgcctcacggccttgcgccacgtgccttggcacatccatcgaatcaccgtgactcacagtaatcctctgttcattgctagggagctcaccacggtaaaaggacaccaatcgcgcgcgccagtaacttcttgttcctccggccgccgtgcgtcatcgtctaattcaccggccaccgctcgtgggctctataaattgagcacgccctcggccccgccatgtagtcaagcactcaacacacccacccgtgtccctaattagtcaccagagagctccaatttgggatttcccccaaatcactcaaaaacaccgtagaactaccctcaccgtggccagctcgtctcaggttcgttctggtccattattctcttgtttcagcaacctcgcttgctcctgatgctcgctgacccgcccaattaagctagggagttctggatcaccgggaacacgtcggttccttggactgcctgcactgcctccatggaccggatggtttagagccttgttggtgaaattaagtgaggggaaagatttaggaagggtctgatttggtgtctgccgctcgggagcaccggccgttgtgtgaatcagccggcacaggctcaccggagttcgtccccgcgctgttcgttgtcgaggatctcgggcggtgaaggaatagaacttgggggaggtttttgtaaactgtgagcgactcatagcaatagttcagtgcacccagttcaggttattcaaaacggc

SEQ ID NO: 91397 - DNA, 343 bp, Zea Mays
tttgtatcctcagtaagtttattataaaaatataaatcagcgatttatataatactaattctgcactgtatatcttaataattgctcatgaatattcggtcaaagctaaaaatgtgtgagaatgacaattatattaggagatggaaggattaagttggagcctcccaagcataaaagcgttaatatcagtgctacaaaagttggcgccaataacggctgacatgaccattagcaactctcatcaaacccagaattacataacatttcccagatctcactcttttttgcggatgatgtgcacattcatggtgcacttcttggtcttcagtggctcaaagaggca

SEQ ID NO: 91398 - DNA, 439 bp, Zea Mays
ggtcttctccacttgtcttatcacttcctcgataaggcacaaggaatagttgaggttattatgaagtgcgcccaagctgcgtaccgagtcaacgccctcgtcttgggaaagtgcggggaatagtgaacgccatatgctacagattgtgcgtgtcgcgtgtatttaatgtgagggaagtgtgtcgcctgccactgacatgggtaagtaggcatcccatccattctttatattggtgggccccaagccggagccttacattgggctcttcccgacggcttacatcaggcgtgtttggcatcggatctctacccgggcagggagcaagtccggaatcatgtggcatacctggacttcccataacctgaccggagaggcccgaatcatgatgggggtccaggctccgtctgtaacgggacggacacgtggcgacaccggaccc

SEQ ID NO: 91399 - DNA, 331 bp, Zea Mays
cccatacgcatcatacatctcttgcatgaagcatcatgtatcctcatactgcatccatacatcacactggatcactagaggaagtactagtggggattgtcgaggagctgccagggattctcatggaagagggtgaacccaaagctgaagctcaggagtgtcctgatcaccaactagttccttcgagaaaggcgagccccgacatctaacttcctatatttgcaatactttaatttattcacttcctacctatattgttgcattaggtataggagttgactaaaaccaattgctgcatataccctttatctactgtttaccctatccttgc

SEQ ID NO: 91400 - DNA, 678 bp, Zea Mays
ggaaaactctagtaccttcaactttggtggcgaggacatcctgtcgatctccttagggtacgacttggtttaggtggtcatctttcactcggggaagatgcccaagtggttatacatgaagtctactagctattcttgtatgcgagtggtacttgctcttccaaaaaaatggggcctgactgctgagagcttggccattgccataccttgcttaccaatcaagtaactcctgctcgttggctttgctcttgtctatgatggcgtgtgttggctgctaacgagattgttcctcctcttgtagcggcctatagcgcaatctgcccatgaagccctctgaaatgtatgttggaggctagtcgtagacgaatggggctttagggtgtagtgcacatttttcacctctcgttcgtgtcgcagagcaggaagtctcaacactggcagaacaaacagcagcggcttcggtgcttcgggtgtgggagaacgacgacgaagttttagttgacgtaaggagcggagacgggtgactggagcagggacggagtcgcggtgcaggacatcagatagagctccagactcggttggcgttgctgcataggggaaatgcttcgtcgaaggggcgggcatgcttcagcgagggggtaccaggagcgacgactccacatgtcgggtatgataatt

SEQ ID NO: 91401 - DNA, 547 bp, Zea Mays
gttctaagcgatcgtcgattggggtctcgggtgaatcgtgactcatactttcgtgagctcgaggaatgtgttttgcggtagtttaggggttaagtgtaattaggagtgtgacctaccctagttacgataccggacaaaatctaacgtgtagtagctccttactagagagaggatagtacgacgcacaaaaggcgcatgcagagaggcttcaaaggctatggttacacctcggcactacgacaaccttggctttggcttgtactggcagctggtgccaagtgccaacagctcttcaggggtggaaactggaaagtatctatacgtcgttctgggtggaccttggcctgctttcattcgtctgctgtttcgaacttgtacaggcattggtcgtagccgtagaacttgtggttcatctcatcaggttgcagaaatcaaagggggaatctatgcctcgttttaatttagcccggacgcaaaaagcacacgacaggccttcagcttgagaaaaccctacgggcatggcttgcttcagctttctcaaaagtcg

SEQ ID NO: 91402 - DNA, 453 bp, Zea Mays
attcagtaaagcgcggggactgatctacaaaaattccttagactcagtgtaacccgagatggactgcgggttgatttctgtttctctcggggtctctttagaaattaatccctgtgaagtggtatcgggtgactacaaccgaccgatctactctggacgcaccagattagaatcagccgccgctcgaaccggtataaaatggttgtcgtaggatcggggatctacggtgcatgttaaatcctacccttcattgaatcggagtcgtacgattaagatcgacgacccagatctgaccacgcgttgaggtatatgaactctaatccgatccgttggattctaaaccagtgaatcagattgaatcgggcgaacgggtaaaggttgctctaatcctaaccatccctggatagatcgacagtcgagatcgaccgcccctactggcgacgaaacgcgacg

SEQ ID NO: 91403 - DNA, 391 bp, Zea Mays
ttcaggtgccttaagttatatctcggtggagcccacattacaagagcaaatagtgagggcacaaattgaagacaagggtgttcagattatcaaggaaatgatcaagcagaaagcagaaaaatacaaatgcttccgtcaggactgcaaaggaattctctggtttggagatcgattggttgttcccaaggaccctgagctcagaaagaagatattggacgaagctcacctttcaaaattctccatgcatcctggcagtaataagatgtatcatgatctcagatccttgtactagtggaccagaatgaagagagaaattgccaagtacatatccgaatgtgacaccttccagagaatcaaggccagtcacttgaaggcagcaggccctttgcaa

SEQ ID NO: 91404 - DNA, 1483 bp, Zea Mays
ctccgtgtgacctagaggtgtcgtacgggtgcaacgtcttcatactgtagaagagggtacccctgattcagggtaccgacacaatcgacatccgatcagcatcacccatcttctccaaataaccatatgagcgaggtagaaaggcgtcccttttcagcacaacattcacaacaagctcacaatattgctttcctagagcaactcctcctagcactgatctagaattagttaaaataattgttcccttagccaccggttgatctctcaatatggcatataagatcacatcctttccaatctgaagcaaaaatgaaatcagaagaatataataaatgtatagaaccactagcaaatgagaattagaaaccgtgaaggatggacgataaaattacaagatcagtgtcaagaggcagaattgctcgggtagctctaatactgttgccttgacaggactgcactactaggatggcattggtagggtttccttgagatggctgcactactgggtagcattggtcgtcttgctagagggttgcgttgctggggtaccattgatagggttgccttgagatggatgtattgaaggggtaacactagcatgattgttgccaagcaagttttcaccctcatcagagagttcatcttccacataagctttgtcttcatgaaactaagcaatattatgtgtttcatcaacatgttatccaggcctagtgtcctaaaataaatatgagggtaataagtaataaatatgctctagtttcaaaatgactcttatgatgtttagctactttaccagatggtgtcgtgtagtagaaccatcatgcgagatgatttccacatcttttatttcatgagccatcctttgctccagcattttctcctccatttctgctatgcgttgttctagagcagctttctcacgttcagcctttttgtgggctatgacttccatttggagtcttgtgggtgtgtagcttctcaggcccgaggtaccgatatcttggggagttggtcctagacccaaaactcggacttgaaatccttccatttccttccagtagtggttaaaaaccagttaaaggcagcagcatctacatcgtagattttttgatttcccaaacaaaaaaagataatcagaacttaggctaatggtctaatgttcagaaacaaattcaacataagaaacgataataatgcacttagtcaaataccttcaggtctctccagacttcatacttcttctcaccatccaccagcctctagtcaaacactgctaactgacaacttttttctcacatgacaccctatagcactagaaaacttctttgaattgtttccaaaaggttgaccaaattcattcagttgtatcttaattttttccatcccagatccccttgcaaatatgtcctccaattttgtaatacctcttccttttctcttcttttgtgggctatgggattctattaatttaagcacatga

SEQ ID NO: 91405 - DNA, 363 bp, Zea Mays
ttcaggttaggtcatatacccactatgatctttgtttgtctgttgctttaccatacttatcatatcattattatcttttttacttcagtttccaatgaggccataaacttttgatgaagacccaaatcaacatggccgacttccaaatataatcatccaactccctcttatgcaagacctgatggcaaataagatttagatgcttcctgtacatcaacgccagaagttccaagctacgttgattgattatgacttagaggttggcaaaatatttgcctctatcaagcaatgtttgaatactattggtacaaagcagtccaatctagctgctacatttggagatttgattgatggggttctttg

SEQ ID NO: 91406 - DNA, 534 bp, Zea Mays
tgagcatgtcgcaccaccttaagttgttgccgacttaagccgattgctccgttagtagggcatagtggtcaccccgagttaagtaagcgtgagcatgtcgcaccgccttaagtcgttgccgacttaagccgattgcttcgttagtagggcatagtggtcaccccgagttaagtaagaaagcaagtcaatcgtgaacaaactgagtatctttgaaaccccttttttattgatggcatatttccactttacagaatacatcgtcgtcctgatagcttctaaaatacagctagggataaaacttcctgaggtgttctatgttccaggagttcccgacttctgtgctatccatctgagtgagacgatatgatcctggccgagtgacttctgctactatgaagggtccttcccataaaggcgataacttgtgtcgtccttcccccgttagaattcggcggaggacgagatctcctactgaaaaggatcgctgtcgcacagccttgtcgtgatagcgccttagagtctgctggtaccgtg

SEQ ID NO: 91407 - DNA, 762 bp, Zea Mays
caagtggtaagccattgatggtatcccacacctctctctcagaaaagggagcatccagcttagacaggtcatgggaaggtaaaccaagtgcatctaaatcattagtttagtacatgtccacattagttccaatcagattagagaagaacttatccaccgatgcagccttgtcaatatgacgagaaagaatatcgttgccatccaccaagcttcacacaaagttctttcttttttgatgcctgacatgcaagtgaaagagctttgaatttgcatccccctccttgagccaagatattcttgatctcaaccgagccattgttcgtttcaaagatgataatagtaatgaatgttttttagcttcttcttcaaccaaaattctattggcgttaagggtatttcatcctatgcaatttccagtctgtgaagtatttctttagccaatgccaactgggaccttacatgtcccacctgcttatcattccaggcaactagcctttgggctgtcttctttaattttagataaaatgtttgaaaaagggcatgtgtcatataaaaatttagccaatattctcaagatcatcactcaagaattgatctctaaagctcaagagatttctaggcctcaattccaaactctcctctcaaattccaagatcctcaaatttcatgttctaatggtccttctgattgatctaacagactgtctactagaacacttatataacataccaatttagatgggttgtcctcctttgccttctc

SEQ ID NO: 91408 - DNA, 410 bp, Zea Mays
ataatctattttcaagttcatcacttttgtaccttcagattgttgtacgcaaggctgtctgcgaggtcatcttttgacatggcggagaggccagcttcaagcttcataaatcccatatttttggccatctcccggcagacgaatatttccttgttgtctggaagacagtataggaaatcatcttcgttcgtgccaatgtacaccaaggcccccttcgggtatttcagttcccgggcatagtgtttggcttccatgatttcttcttcagatagcttctttcctgaagcatgtcgaataataaagtcagaatcttcggacggtgcttcgggagtaggagatctagctttttcaggcgcattttccttctccagagccatgtcggtacctggagatttttgctcagctctctc

SEQ ID NO: 91409 - DNA, 298 bp, Zea Mays
tggaggaatgcaacgctctgagccaaccagagccaaattctgatgactggagggagccaatcatcaggtacataaaaaatgaggaggaaccagacgacaaaaatgcagcagaaagaattgcaaggcaataagctcattgtaccctcattagggaaacgctgtacagaaggggcgcatcaggagtcctcatgaaatgcattctctcagccactggaaagcaactgctagaagaggttcatgctgggcaatgcgggatacacgcaacatccaggaccctggttgggaaggtcttcaggtc

SEQ ID NO: 91410 - DNA, 376 bp, Zea Mays
gacgatttggaattcgtgggatggtcaacgacgacgaacatcttatcttgaacgcctttgctcatactcagactcagaatcggatattggttctccaacgagcaatgaggacagacccctagtggcagggagagcagaggttgtgccgccctcatggccttgatctccccaacgtgtgactcccgctcctcgaaagaacaaacgttgctaacggcgtcgggaagtgagtaccaaagaagtctccaaggtagttcttttgctagagatcccccgtagttcttggcaagagcgagtccccactccgattgtaacccttaacaatcgtcaataaagtgcaatttcgagacctttacctgagtcaggcgtatgaaataag

SEQ ID NO: 91411 - DNA, 370 bp, Zea Mays
gccgaatccaataaatcgtctcaatataatctcatataaagatgcaaatttctcactaatctcatacaaatatgatcgcattttctagagagaaaaggatcattttttcctggagatttgtaaaagtagagatacgctaataaatgtcatcaaggtctttccactgtgctttccaatttgtcttcgctagcgattattccgccaagacgggtttacgcaagttctcaggtccctcggttccactagtgaccattgttgtagccttcgaggcataggtgatcgcagtcgcgaccaacttccctgatggatccttgcattcgcgtcacccatcccataggtcgcttctagcgaaggtttgaggcaggatcac

SEQ ID NO: 91412 - DNA, 486 bp, Zea Mays
tcacgattcagcgtagcagaacttaaaataatcaccgcttgatgcgtgttcaagtatttttgggacaaagatataaacaacgtatgactcatatcctaatcaaatctaaaattcatcgtagtgaaataagcaaaactatttaaatggaggtagtgatccacgccatccggtttgaaataagtactcttcggattctgtagaaatcttgcagcttcgaaactgaaaagaaaataatagaagttagtgatcaataacattaatgtttcatgatgttctatattgtacccgtgcataaatttaaatggaggtagccaattctacacaagaatcaagttaacaacaatatcattgttattggacatccctgcgagatcaattgcccctgacgaaacaacctaagaactggatgtgctactgaatgtgtatagactagaataatactgtactcaactccaaaccactccctctccccaaaaccgatctgca

SEQ ID NO: 91413 - DNA, 497 bp, Zea Mays
gccaagcaaacaggctaacttccatcaagggatagactgaaagaacgaagatccaatgcttctaaattgtgttgccccgttttgttccctcacaggaatctcaacaggtgaccaacagacggccatggcgacaatttggggatttagcggcaatagagaggattaggtcaagacggtgcttagaaagacaaaggagtagatacgatatatgctggaaagtaacaatgcaaatggatgacccaagaagtccaagcctgcgagatgatcttttttggagcaggctgcgaaagcttaagcgtcgcagggttttttcctttacgaagcgactagagaagtagaagtgacgcaaagttgcataatttgaatcgccggtctgataaagtagtcgagtcttcaacagtaagctgagtctatagactcagcgggttgcatgacatagtttgggacttgactagaagacagaagaactcgaacatagcaagatcatgaagattcaa

SEQ ID NO: 91414 - DNA, 504 bp, Zea Mays
ttggcttgtggtatgcaggtgtggagcacagaggcagtggttgacgatgaaggtgaaggtcaagtgcgtccatgccaatggattgtgagtggtggaggagggacgccaaggcttggaccgagggatagaagaagctagagaaatgaccgtggtgactgacaccttcagacatcaacaagtgcaagagtacagggatgggtatatcatgttgacaaagtcaagatgacgttgatcatgtcaagtggaggcatgggaggacttggtgatcgagtggtcaaggacttgtagtgacatacattgagatcgtgaagagagcgtatcgaatatactactcacaaaggatttagtgatttgggactcaaaaacatcgtgtgaactatttattgagtttgggcctctaaaccgggatggagttttagtgggaactagaaatggtacatgacgttattgaaaaacatgcgtcgatgtgaagcaaagtcgtaaagagcacgtggatgacatgtc

SEQ ID NO: 91415 - DNA, 393 bp, Zea Mays
gtccaatttagttaagaatacgcggaagcaaagtactatccaaagtgtaaatcctctaggttcacgcaggtagactctggtgatggccagaagaggcagcttgacatccccgtggcaatacaacggcaccttccgttcatatcgaggatccaacggctatacatgaccgaggaatccacgaaacagatgacatggcacaaaaatggcaaacgatacaatcctgacaagatggtacatgcatccgatggtgaagcatggacccactttgatggcattcatcatgagaaagctaaagaggctcgtaatgtacgtgttgcgctagcaacagatgggttcaatccttatgaaatgatggttgtcccatactcccatacacatgttggctcatgttcg

SEQ ID NO: 91416 - DNA, 690 bp, Zea Mays
agaggtgacccacatattttttccttatgttattttttatgatctatcgactttaatccagtcaatatcatttccttcatccagaataccatcctctatccatttttgtgcatcactatctaactttgcctcctcctcttttttagaagagggtgcaacagtcacagactcacccctcttcccatcctgaattatcatattagacctaactaattctagggatttgatatgacggagactactttcagcttcgctactattttttcccaaatccacattcagaatattagctatatctattaattcagactctgaggaattcagaacggagaaagggttatgcgaattacctttggatagaaaagcatctttggctgcagctctagaaatagctttctcagtcacattcatctcttcagaggtttccagtctgggactccttcttggaccttcagcctgctcacctactttttgcttccctttcttttcattctccgcttgattatacttcttagtaactgcatcctctcttttatcatccacctcttcttgtggtgtgcttatatcaacccaacactttttgctagagcttccaattcttgagaattgagcaagtcttcttaactatcttcgagattcactttatcatcatcataatctgagccctccaccagtccctcggacacacta

SEQ ID NO: 91417 - DNA, 387 bp, Zea Mays
gtggagatgaaatggattgacatacatggaaacaaaaaaatctgatttaaatgcttcatttgccccagaaatataggatctctccaacaacaatgcagctagctttgttgcaaccagtttttgccatataccgatactaattctgtgaatgtagcaggtaactgagggtataatggtatttagatcacctacaccaccgattacctataaatacccccgttctgtacacggatggaacgtataacaagacactatagtttcctacctaccgtttggttgtgcatgtgagcccctaccagtttccaagtgcttgtgcccacggcccacctgtccatgtgtcagcaggtccaacaatatccaattttctttttctcttttcttttttct

SEQ ID NO: 91418 - DNA, 1578 bp, Zea Mays
attgtataaaaggtctatttaggtgacccatgatataatttctcagatgagtttttctactacaatagttttattgcctaggtgcagcaataatcagtattaagcaatacatgatcaagttcagtattgctacaattaactcttaaatgtagttttgttttacatattatatctcaagttaattatcctatccatgttgtcttgtatttttgcgttgaagagatggaatgttggcagagagaacatgcagagaggtacaaattgaggttcatcgagatagatttgaaggctttttatttcagtgaaaattgatgctgaccagtcacttttttgttttggacaggactgcaattcattggtaggaatttctctgttgatgtgtacgaacaagtcaattctcctataggtttcaacatcacctttactggtttgcttagcctcgccaccgatatatgtttagaatttcatataatacaaactaatttctgtgggattcttcacggctattccattattcagttagtaagtaatatacaattagtttgtcagtttggtggctttaatttgcatattcttctaccatgttttgggaatattactaatctatattaactctttgaagcttgttgtaacagaaaatattccactaaaattatcttggtcttttttgtaaacaattaatttctaaattgtcacacagttttgcatggtacatactttcctggcacaaagtttcttcctgtcatgaacttatctttttatattaattttagaaatataccacctgcctgtaaccctcgggtcagtccgtccgcagtaagagaattgtataaaaggtctatttaggtgacccatgatataatttctcagatgagtttttctactacaatagttttattgcctaggtgcaacaataatcagtattaagcaatacatgatcaagttcagtattgctacaattaactcttaaatgtagttttattttacatattatatctcaagttgatgatacaatatgtggctcccaacagtatgcttagttttgcatgtcttgtgcctgctattttctaccaaccatttaagtgtgtttgtgatgaataatttttaaggcatccttacagaattctgttatttgaaattgctacaactcataatgctatgcaaactagcagaatgcagtggttaattttgtatagaaatgagcaacctatgttacatcaattattgtgtgtcagttctaaatttcacattccactaatatgcatcgtcttcttttaattttggtgttccataagcaacctattttgttgttatttactaaatatgagcatatcttttgattcttattaatcatgatttgacacctgtgtattataggaaaaactgttgggagtttggaagacatgattatttctatggtgtttgcatttttagattagtgaaatttatagaaacgttgaagtgtcaagttatttctgtgtgtgctttctcgtcctttggcggtagagtatagtgcttgcttatttggtgcaaacgccatgaagtccctattgagaaggtatgcaatttctggttctg

SEQ ID NO: 91419 - DNA, 421 bp, Zea Mays
atttctctatttgagccgagacaatttctacctacaacgaccaaacattcatgtcgagtacaccttatttttaccttgtattgcatacaaccatattgtggcgtgcactcgagacattaccgtttaatttaacgctatcactactacaacgcatttcgacatacacgtttgacaacaccgtgcttagaccaaaccacacttccaatctacttctcacatccacccaacaccacgtgcccactgcactcctacgaccaaatttcagcacaatcatttatgacaacatttatcgactagatgcgtgaaacaccaaactgattattcgcatatctcgccatcaaaacaccaatcacatgttgcataatttgtattttcaacccactctaacctacatcaacgatgaatacataattataattac

SEQ ID NO: 91420 - DNA, 688 bp, Zea Mays
gtctgagcatggaagccggctgcttgtcctgcttttgtagacgaggctcggtacaggagttgtgctgctgctgcggacaattaagactgccagtaccctgcaaagatatccccactggttctatactggcacaaggcgatttggacttcctctgagtgcctctacgagggcaggacctagcccggtgcccaggaagaaggcagaaccaacaacgcgacggagccgagcagcgaaaggcaagatggccaggagcgagacagttgtagcatttatcttgaagcttcagtttgaagagactggatgccttgtcaaccaaaatctgtgaggatctcccaggatctgcagagcttttacgccaccagtactttggtttaactacagaccaaccaccttcgtccagtcgcatcgaggcagactcgcggccattgaattggagctgactggacggcccagaatcggcgccgcccgtcgcaggcggatggaataggccactgcttgcattcactgcggaagaggagttgaatttctgacgcagactcgacgggtcgtctgccgaccatttcatcttctcagagcaaggaatccgctgtaaaggatctggaagtagaggctgagaagagcaagtcccgtcaccgatggcagatctgaggacatcgaatcccagcaggcccccaagagcagacgaaaa

SEQ ID NO: 91421 - DNA, 299 bp, Zea Mays
tcacaggtatgaaaagcaactataatggaaccgaaagactttcaagtctatcccatataatggcagtagatgtgtgtcatatatgtaaggaaacaaccgaactacatattcatgaggaggtcagtggtggtctttggttgacctcggtcaagttcgtggacgagagcctcgttggtggtgccataagtgaaggcacttaccacgttgatgtcgatggcgtcgaggagttcgttccttgtctgggagaacctccggatgtaatcctggaggctttcccgctcttctgggtacacttcttg

SEQ ID NO: 91422 - DNA, 2384 bp, Zea Mays
caagatcatggatcatacacaccaggagcacatctcctgcttaacgacggtaaaaaaatgatacatgcagaacatcagtaatggtgtgatccaaaacctatcccccccccctgtttttcatagattactttgttagtctttctcagtgtttttgtgggttactaatatcatctacaatcttaatgtggacagttacgccattggtttacactaccatcaaacattgacagaaaccagtacaagactttcaagaccagcatcagtagcctcaataaacaaatggatgatattctacagaaaggttccgaactaggacttcaagcaatcaaccaggaagcccagagtgggagctctgaattttcatggggggtgatgcccgatgatggtactctgggtgacattcacaatgagaaaaataaattgattgacgtattgacagagaggaagagtccaaacaaagtcgtgataattgttggggatagtggaatcggaaaaactacactggcaaggaaaattcatgacgatcatcgcaccagaaatgcattcaccattgttttatgggtgagtgttttcagtgacttggatgatattggattactctctgcgattgtgaaggctgctggcggaaatcccagtggagaagaaaacagggtacaacttgaggccatgttggcagccattctcaaaggaaagagattctttatggtgcttgataacgttcgcagcgatcaaatttatgagaattccctagaggctcacttgcatgtgtgtggtcatggaagccggattttgatcaccactcgtgatgggagtatttcgacacagatgacggatgcttacatctaccgcgttaagaaactgacctttgaggattgttggtccttgctttgccgggcttcttgtctaaatgagagcctacatggcgacattttaaggaatatcggaatagcgattatccaaaaatgtaacaagcttccaatggctgtcaagattataggggctgtcctaagaacaaaagaaccgacctgcaaggcctggcagaaagtgtatgaaagcgaaggatggtccttctccttcggggagcttcgagactatgtccatggcttaactggggccatgtatttgggctaccatgatttgcccttgcatctgaagcagtgctttatttatttgtcactgttccctgaaggctttgtcatcagacagcagtttgccagtcaactgtggatttcggagggtttaattgatgcaagagactactgcagtcttgaaaagactgcagagcgttattacagggagttgttatcaaggagccttctgcagcctgaaattgggaacgacgatatgacaagatgcacagtgcatgatcaaattcgatcctttttgcagttctttgtcgatgataaaatttttactggcgatctgaagacgcccagggaaggactgcgacatgtgtggattagaagcaacctactaagaactactgtgggaaaaatattaggagtgaaaagcttgaagacagttattctatacaaaaacccatcggggaatcgcagcttagacgagctgtttaaggagctcagatatttgcaggtgttggaccttagtggtactgaaattaagtatattccaaggacattagattttctatgtcatcttagactgctaaatctttcactaacacgaattacagagcttccagagtccattgagtacctaacaaatctacaattcttgggtcttcgatactgcaattggctacataaccttccaaatggaataggtaaactgcaatatttgcgatatctggatcttcgaggaaccaaattgcatcaggtcctaccaagtttggtcaacctgaagcagctctccacgctacatggtttcgtagtaaaccgtagacccaagcgtgaggatgatccaactgggtggcctttggaagacctaaaatctctagaagcattgagaagcctgcagattctgaagttggaaagagtctcagatcctttgagggtgcaagaagccatgctggaaacgaagtcacacctcaaggaacttgaactatgttggagcaatgatgatagacagtccgaagtacaagaagaaaatgctggaacacttaagaacgtatctgattccctttctcctccacactgcttggaatctctcaaaatagtgagctattacggaaaagttttccctgattggctacctaatctctcaaacctccagcgccttgttcttactgattgcaaattctgtgagcatcttcccaacctgggccagctaaccgaactcaagttcctgactataacagcctgttccaagttagttacaatcaagcaagagcaaacaggtcaggcgtttccaaggctagagcagct

SEQ ID NO: 91423 - DNA, 632 bp, Zea Mays
acctttccatgcttctcattctcgtgcgtctaataagtttgatcttatacactatgacttgtgacatctccagtggttagtgtgtctggctacaaatattatttggtcattcttgatgattgcactcattacctgtggatttttcctcttcgtgttaaatttaacacttttagcacgctcgcaaccttcattgcctacgcctctacccagttcggcgccactgtgaaggccgtctagtgtgacaacgggtgcaagtttgaaaactccagtgctcgtacctttcttctcagccagggcatccaccttcacatgtcctgcccctacacctcacctcagaacggtaaagttgaacgcaacattcggtccattaataatgttgtttgctcccttctgttccaaacatctatgccccctcatattgggttgaggcactctccacaacaacaagactacttaacatcctgccaaccaagacccttgccttctctaggccgcaccttgccttgcatggcactcctccgacgtatgatcatctacgggtgttcggctgcaaatgctacccgaacttgtctgccacagctccccacaaactcgcacccaggtctgccctatgtgtattccttggctattcc

SEQ ID NO: 91424 - DNA, 1450 bp, Zea Mays
ctgactccgcctccggtcaaaggtaacaatcttcttccgcatctgggtttttctgctcagccgttgaaccaagcagtacattccagtttatcaccttactcggcaaatctggcagcggctttacccaacatgagttttcctcaatttgatggacatcatcctaaaatgtggaaagtgaagtctgagtcatattttgaggtgtttgctatacctagtgaattatgggtgaaaatagccactatgaactttgtgggttcggcagcattttggcttcaatcaatggatccggctttgcgtctcacaccttggcttgatttttgctcagccgtgtgtgctcgttttgagcgtgaccatcacaaccacctcattaggcagttttttcgcattaaacagtatactaatgttactgaatatgtggaacagtttgacagtctgatgcatcaaattttggctcatgatccatcatttagtatgtcagccatagtaaatcgttttgttgatggtcttagacaggatattaaagcagttgtgtttatccagcgcccattagacctcgatactgccgtctctcttgctcttttacaggaggagttactgtccccaagagttcagcagcagtttaagcgttctgaggaccaacgcagtagcagcaacacttcggggtttctaccaacatcattttcaactgctcaaatttctgataagttgattcgctcaccagagacaaattttcgtacaccaggggactgtcaaaaccagaataccgagacaagaaaagcctctgctctgatggcgtatagaaaagcaaagggattatgctataagtgtggtttaaaatgggggcctactcatacttgcagcacgacggtgcctttgcatttagtcgaagagttgtggcagatgtttgatatgcctcaagtggtcgaagatcatttcagtcatcctggagaagcgcatggaaatttgatggttttgtctgtgaatgctgttctgggcacagaagcaccacaatcgataaagttagcagccactatgtttgcgaaatctgtcattatgctagtagactcagggagttcatcatctttcatcagtgagcaactagcacggtcgggctcacccagagtccctttgcaacatccagtccaagtgcaagtagctaatggacaagttattcaatgcacacatcaagtagtggattgtaaagtgtatgtgggcggctattgtttcaagatggatttgaaaatattgccattaaattgttatgatgtgattttaggtatggattggctggcttctaacagtccaatgcatattgattggcaagaaaagtggctagttttttacaaggaacaaacaaaagtggtgttacaagggctaagatctgacttatgttctttggacccagtttcagtgcctcatcttgttcatttggactctttggatgaattgt

SEQ ID NO: 91425 - DNA, 645 bp, Zea Mays
tccctaacctcccgggtggaaagcctggagcaaaaagtcagggaacttttaggggaaaaggcgtcccttcaagagagcctctcaatagctgaaggcgaggagaccaatacccgtgaagcttaccgcaccctaaaaatggactatgacaagaaactgaagaagctcgcccccgcaagaaaaatccgcaagaagaccaaaagccaaggatgtcagactgagtagaaggaaggaaaccctccaaccctaccccctaccgggttaagggactcatccgacaccgaggagatgtccctggccagccttgatgaccttctcaaggaatttggggacactttagagaaggagttcgggagtaccctagataggactcgtgtgtgatgaacgtatggtagcagtgtgctgtgttgtaatggctggatgtaatgaataaagtaactagttaaaaaaaatggcatgtgcatgatagtgactcttttcccatggcagatggcttcggataaaaccacgcctaccgcctccgggattggagcaagacttcctctaggagctgaaggagaggctggcggagaaggcagtgagacccacctccctgcacctccggaactaccactagacttagcccaagttctagccaatcaaacccga

SEQ ID NO: 91426 - DNA, 492 bp, Zea Mays
aaaaaatctacagggctactatatatatctatctatactgtcaacagcacaactgaaccacttctcactgagcagtcggtcaatggcaggcatgtgctaggcaacagtagcatcttgccaggcaacaaatagttttctttgtcccgcgttgcaggcacacccacctagcttagctagctcttctgctctgcgtgaatgtatgtatgaccacaaacagccacgaccaaagaaagtaaaaagaaaagcaagaaagaggatggctggttctggttggctagctagcaggtagcagcagcccatgaggccggccagctctgcatgctccaagcattcacttcatttccatgtcaatgtggtggtacagagttactgcacaattcacttttgtttggcaatgcaatgtacagtggaggcttcttctaactgctactgtactagtctacccagcaatggcagttggcgaagtattgttgttgcgatggcaatggcgat

SEQ ID NO: 91427 - DNA, 621 bp, Zea Mays
ctattagaatgcatgtgaaggctatattgtactgcatgtacatactcaaatcgctctaaatatttattttgcgttgaccttcggactcacggcgagcgattaaatggtatagtgggtacacagatgtgtcgagcagattacattattaatcgactgagttaaaacattggctaagtattggctgcgccctggtaacacgacgcaatatttatgtcgtacgatcttggctgcgtcatttgattgctatgtcacactctcgcttaatcggaccaatcctgttgagtcggacgtcattatcgagtcacgtatttttcgtatgccctgtaggcattgtttgtctgtctgccgcgagccacaattgcgcttgttgcgcacgttgcgtggatttatcatgtaccccaattaccgagccataattgtgcatgttgcgcttattacgaaggcttgctatactgtcgtagccctgatggccacacacgcgttgacgccagatacgctagagcttgtacccgcgtggattgtggtgggttgttcaaggtcctgaagtcacattatgtgcaaccttcgtaaacaattttgttttcactttatattttgtttgattgtgttgtgtggcatcgt

SEQ ID NO: 91428 - DNA, 527 bp, Zea Mays
ctttgacttgctgctctaggctttccacctgggagtttaggtgggtgcagtgggaggagagttcatcgtagtggttgtcaagggtgtggaggtatccggccatgtagacgatggtggggtcatcttctgtggggtctcctcctgacagagcctggagtcttttcctccaggtgggggtacttttgttgctgggtggaaaatatcgaaggggggtctcagagatctctcggctgtagttttggcacagctatttaagtgtctgggaagtggtgcccaatgaaggtgacttggaagggagggtggtttgggtagtttcggctttctcccaggtatactgccatagagcacttttctattccattttcgcgatattccttccagacatattcgggcttcttgcggatccccatgcgtagtgcgcaacttcgtagaaggtgagggaatccttcctcccttgagcaataggatgtcctaataacccaggagtcttccatctggtagaagaaaagaagggtctgttaatatcg

SEQ ID NO: 91429 - DNA, 340 bp, Zea Mays
gatgaatgcttgtcgttggctaaattctcctacaacaatagttaacaagagagtatcaagatggcaccgtttgaagctcttcatggtcagcggtgcagaactccactaaactagtcagggcctggtgaatggtacttttttgggccagatctagtaaaggaggccgaagagaaagtaaaacttatccaacaacatatgaagatagcacaacatcatcacaaacgttatgcagataagagaacacgacccttgtatttccaagttggcgattttatgtatatgaaagtttcacctatggaaggagtaactcgttttggcatcaagggaaagctggcaccac

SEQ ID NO: 91430 - DNA, 450 bp, Zea Mays
tggggatggaacgatcctgtcttcgactagatcgggacggccaacgagatttgctctcctcgacgtccaggacatgtattggggagggggatctgtggaatctttttgagggcgaggagttgaagatgatgttgtttaactttcgagaggcaggccttattccgaaggctgagccgatgtagcatgtttgctgccctcgctctcgtgttgcggtagtgagtgaaaacgttgccctcccccggatcgcaatagagagggagggcaacaagatgtgatttgtattatttatgcaatgtggccggcgagccccttgttgtgtgtatgtaaactatgatgacaccgcatgctgcgcttgttgtgaggttgtcccgacttgtaatcgtgctggcgtggcacgtaaatgggatggggacctcgctttccacagcgatgttggacacttatgatgca

SEQ ID NO: 91431 - DNA, 316 bp, Zea Mays
agataatatccccaaccacaatcatccagttgtggccattgtatgctattgtggtgatttatttgggaaatcttacgcacattacagataggggtttatgcagtgaacattagacttagattaatgtagtggcatgaatactacatattgtccttcaacatgaagggttagtctcaacatccagtgagacatgcaacaacaagttgctttatggttacaattctgcaaacttattgttattactaccaaatgcatagtcaatcattaagatttagactaatatgcgcaacactattttatccataagggtccttca

SEQ ID NO: 91432 - DNA, 629 bp, Zea Mays
ctttgcacacgcgacctgatgactatgtgagatagctctcaccactgcaccaggcctgctctttatccctgaatcacttgctgtcattatatttaaattcacttgttgtggattttccacagtatagtagtgtactcatggtgacatatgattttcgggccacagaagaacaatctaatcacaggatgagtatcaacggtggataaaaatttaacgaatgcagctcagatcaattaggcagaaatgtgaccttagctgcaaacagcaagtgtcatcacgctaattttcttactaaagagcaatgtggaaagcaattgcaaggaagatctacaaagcagagaagttcttagccttctactggaagaagtggttgtgtggcacaactagggtttccggcaattggttctagctagccaagcttccagtttgggacagttgcaccaaatcaaccattgtaagatgatatggtaggtaccagttatatgcattttagctgtaacgaccaagtacagagttaaggattacagtctcttgttagctataattttatcatcttggcaatgctttctaagggcttcacctattacattttctcctcctgaaatctatttgattatggtcaataaaat

SEQ ID NO: 91433 - DNA, 611 bp, Zea Mays
catagcatgaactaccgctgctaactccagatcatgtgtgggataattttgctcatgaggtcggagtgctcttgatgcgtaggcaataactcgattgtcttgcatcaaaacacaacctagtctagtgcccgaagcatcacaatacacatcaaatgatttggtgttgtcaggctgcgctagcacgggtgctgttgtcagatgccgcctcaaggtgtgaaaggcatcttcacatttctgaccccaatcaaacttcactccctttttcaacaactcagtcattggcttagcaattctggagaagtcaggaatgaatcgtcgatagtatcttaccagtcccagaaaactccgaatctatcgaatggtggtagggggcttccaatccatcacctcttgcactttctcaggatcaactgctatcccgtcctaacaaattgtatgacccaagaatttgatctcccatagctagaaatcacatttggagaatttggcatacaggtgatgatctcgcagtcgctgaagtactatgtgcaagtgcattgtatgctcgtcttcattttttgaatataccagaatatcatcaatgaagaccaccacgaatttttccaattccg

SEQ ID NO: 91434 - DNA, 383 bp, Zea Mays
aacatgctaaacatagaatagaactgaagttccaattcgcttctggttcttgtacatcttgccggatatctagtatgtccagccccatcgctgcctgcgcaactccaattaagacactgcgtgtttggtacgtatcatcatacgagcacgcaacagaggtgtgcctacgctccatccaacccctttctccaccgctgcagaacgtacttggagggcactctttgatcttcatcatcagagtaatttctacatattagagcgcggcacaatcgagctcattcagctcatccatgttagcagaaaaagatagacctttcgatatagcacattaacggtcacagtcacagaatctttgttaggttgcctagagagagtcatgctcg

SEQ ID NO: 91435 - DNA, 1095 bp, Zea Mays
cccatgtcattgggtatgatacatttgatatctagagtaacaatatgtacttgataatactttatgatgcactggcacgcccacaaatggctacatagttaatgcacttacctaatagtggtcttgagtagcctgtcatctaagtcgtggtgatagtaccttcgtcaggttgtaatgtttcatgtcatatatttaaacgggagtcatatctaaagtgctagtgttatgggtttgtcaggaatagacctcaaatttggcatcccagtttttggggcagtaatgtccttggcggtgacaactacatttttttgtcttgtgggtggctttatacttagcttttgtaagagtccctttgttcccacatgaggccttcgatcctagggagctctaggcacaacttatcacattacttgaggccagaggccttagggatccgaggactaatagagggcactcgagaccttagaggtttgaggactagtagagagtctcgggcttctaagtgtttatcatgaataccctaagcccttaagggctctaacttttagatcattcatcatgagggccctagagtatgtggtcctacttagatcattctagtcgggggcacctgaaggcacaagacccaaggttttggaccattgcaaactatggttcttgaaagtaggggagtgtcgcgaactttagagtgcctcaggatgtcgagggccttgaggcctttgattgttctggtaggacatggtataaatatcttatttctttggagtgtcccgagatgaagttccctagagggttaggccccttggccaaaggcagagcaggttctcggggcatgaggccttaggagcgatggtcctagtagttaggtctcacaatcatttcttagttaggtctcacaatcatttctcataccaaggttcttgaatgtgtcctggcatcatccggaggttagccttcttcatgtgctagcaagatcacaatacacaagattatcttttacatccacaacccatgtgagatagttgtgtcaacctagagcgagttattcaaactcttactatcattgaaacatttgagttacttaaaaatgttgtc

SEQ ID NO: 91436 - DNA, 463 bp, Zea Mays
gatgatgcagaattcatgtcctagtgaactaattggtgcaattatattgttgttggaggtttggacagattgtggttgtgcagatctaagattggaggaaggtttatttcatgtatatatggtgttcaataatatgtttgtaaaaaatagttagctaattttgattgttccgctatgttgtcacgactacatattcacagttgtgtttaacaaagaataaatgagagcaaatgtccggtagcttggtacttaaccagaacaacaaaagtttttatagaagtaacatgcatttagaatgtaagaaaattgcaaaaaagaaggccagcaggtctcatatcaaatcctctatctcaaactcattctgtaaacagtgtcatctacaatactatgtcaccttttttatacgatccattgaagtcaaccaaaaggaacgaatacatgtttaaagacaggaatattggac

SEQ ID NO: 91437 - DNA, 313 bp, Zea Mays
gtcccgcaacaaaatacatcctaagtgtagttaggtgtagacatcttttatgttttaattagtggtggcaacccagctattgatagtttgcctctagatttcttctagtgcgaactgtaacatacgtgccacttgtgatttaagttgtgaacctaataacttctttatgcaggccaaaatttaggagatgaaggagaaggacattgtatccagagcgataaagatgggaactcacattgtcagcaaattttaaaaagacgaagttggttctgtaaaaaatcaaccatgaaactggaaacacctacattgttct

SEQ ID NO: 91438 - DNA, 426 bp, Zea Mays
cttattcccaatagatcttgtactaaacgttgttgttggcaagatctactagttatcctatatagcgtcattttacttttcccgtttaaacttcgtgttattagattgatcttacacaaccaaatgtgtatgactcaatcagtttctacattccacaccatgcggctccaacatgtgcacacaacaaatctagagtatgatacgcatttgtcaccctgtgccttacatgtcttagtcgcgttatttgctctagatggacttctttggaggtcctggtccgtgttcacgtgtgcgatcctgggctcatgatcataaatgttattatggttgctggcatgatacatacggtagatcggatttaggatgtttttatgaatggatcactgttcattttgccctggtttcggtatatgatatgggtagtcc

SEQ ID NO: 91439 - DNA, 412 bp, Zea Mays
ggaagtgaggacactccggaagcacaacctcgcgatcccagcctcggaggcaatcccggataccgcaacacgatcgactgaagaaaccaagaacgccaacctcggcctccccaatgcccacaagacagcgtccatcagctctagcctcaacgccgaataggaaagcacgttcatccggttcctataggataactaggacgtgtttgcctggtagcctacggacatgctcggtgttccctgggagctgaccgagcacaaattgaaggtctaccatcaagccaagccagtccgacagaagctgcgtcatttcactccggacaagagggaagcaatacatgccgagttaacctgacttgtagtcataggcttcattagggaagttctgcatcctgagtggctcgcaaatcttgtt

SEQ ID NO: 91440 - DNA, 929 bp, Zea Mays
gatggcgcgggcctctttttaccagtctatcagctgtccaaaccttgtttttgattgccaaccatacaaagaatttgcatcttaagagggcccaggtcttacagacacgtcgccaaggggcaaaaaagatagagccaataaaaatgcatcatatgccgatttgctacaataagtaccatgaccagagaggcgccaaatatgctggtctgcgatgtcaggttgaaaatctaccccatcagctaagttccagagctgcagatactccactaaaactggtacagacaagcctcccttatatctgacacccatttacgatctgtgagccccttcgctactattctccgctttaaagcccttttaaaatcatttggatcagggttggacagtgttcagccatagttttaccaagaagccaacgatcagtccaaaacttcacagattcaccactgcctaccacggagacaacaaccagatcaaagagtgcctttgcattacagtgcactcggacagggagtccagcccatggtcttgatgcatttgtcttctgtagccaaagccacctggcacgtaaggcccatcctagcatctccaggttgagaatacccagaccaccatactgtaaaggccgctggacagtttcccaagacacaaggcgggttacctccatttgcatcaccttgccccttccaaagaaagcctcttcttctcttatcgattgccttaaaaacccatttagggagttccagcgcaagcataagatagatcgggacagaagacaacactgccttaaccaggacaagacgaccagcctggctcagaagtttggctttccatcctgaaagtttatcaacaactttataaactagtggcaagagatcggagttagagagcttacggatcgacagaggaatccccaaataggtgcaagg

SEQ ID NO: 91441 - DNA, 665 bp, Zea Mays
atgtgcaaccccttttcaagggggctcgggtacgtaatcgagtcctcgtccctggcctcaactctcaacggaaatcaagcgggcacaagtcaatagcaagtataaggcccatgctccgagccatcccgtctacgaggggtcggctacgcctcctcgccgtacgtggacaactctagtactacagacatcccttattgaggctataaataggacagcctacgacttcagggggcagacaaacacttcacgggttatcctccaccactatatcggcacttgcctcaatcaaccccaggaacttaagatcctcccttctcccactcagcttgtactccctactacagacacttaggtgcaagtaatataagtctcacccccctctgctgaaagtagggtttcttttgcctgaaccaaaataaatacttatgtcatcttgtatgactcatctgggatagaagcaaacaatattatttcactggtcggttagaccctcaagtccaaaacacgatcccataggctcattgatccgctcttgtcaacggggccaaaggggctggctgacacaacacgtacgcatctacatcaatgaggacgagtgcatgcacggccgtacgctggcttgcgcttccgtgttccatcctcgacagagaacacaagtacacaac

SEQ ID NO: 91442 - DNA, 757 bp, Zea Mays
atggaatagaggagggcgtcgcaacatgaggcagtagggttttgtggtgccgtctcctggcaggagagcagcgcgaggctggtgaagtcaagtctgcaactcagcaatgagcaagcaggtgacggcggcggcagcagcagcatgatggtgacgagcagtgaaatggaggaggccatcagctactctagtatgtacgagtgggtagggtagtggcgattgggaccaggtcgtccctatcgattgaggtggtggtccattttatagcccatgcaaacagccgggcgctgctgcgtcggcgtgggccatccctctctcatttgatcggggacacagagcagagcagagcagagcaacgcagagcagagcagctagctagtgtcactctcatcactagtagtactttcgtacaaccagcccagcagcagcagactctcatcattatcgtaccactaccagcctagcagcagcattgtctgccggctatgctgctgctgcattcctacatgcttgagcaagttgtagctgtagggagggggaatcgcatcacaagagagctgaggtggagcgccgagacgagaggatatgtggcatctccatttcacatgttctgatttaattagtatgcgcgcggttgtaataataattaattaattcagaaattgaggggtggacctgctggatgctacctcgcgctttggccgatggactacaaaaccaggagtagtagacacaccatccgagaaagcctgcaatggcc

SEQ ID NO: 91443 - DNA, 364 bp, Zea Mays
tatgaattatattacatgccaattgtaatatacctgtagggaatcaagtcttcggccctgcagagccacgagtcaataccggattggtctgccacgaatctatatgtcatgagtgactccaccacgttcatagaacgaccctgccaaggggtagagcgaggcggacgaagataaaggggtcggacgaactagacaaaacccactcgagtgagacttgcatgcccgttagaataaccacgtcgtcagccttccgtacgccgcattaattatgccagtcggtggacgcagcgcgaacagtgtcggtcctccatccactcgtgatctatggacctaggatggagtcccactcatgacctatacgggt

SEQ ID NO: 91444 - DNA, 349 bp, Zea Mays
gcaatttattattatttttttttcaaaacagacaggataatctactatcattataactttaaaagtgccatttaaattacatttgcaatagataactaaaattgattgagtatccttgcctcaacaaactccaaaaacttaaatagacatgtcacacaacaatttccattcctctcgtaatgcctactttccgtacacgactaaacatctccagagcttgtaatgtgcagcaataaacaagtgcttaatatatttaacagaaagttaatatgaaaaacttcaatggcatttccaaagcacttgggtcggtggaatgtaacataatctaattactcctgggactgaataa

SEQ ID NO: 91445 - DNA, 630 bp, Zea Mays
cgccgtgggggtagaaaagaaagggtgcaacttctgaaaaggctactgccttaactgctccaagcgagcctgcgccgaacaggaaaaactgaaggtccttacccaccgaccgcgctatattgaaccggccatagtgcctgaatttggcggggaaacttcgtcagctgctgcaccaaaggagcctactcctatacagaaagctgaagaaccggctacaatgccgaagactgacaaaattgaagaaccgagaacggtagggacgaaaacattagaagttctaagcccttcggcaggagtggaggtgccgaaaacacaaaaaggtctagcaacgacccccaagagaaaaaggatggttaatatactagatgtgctggagacaataaaaactacaagatctactccagggaaagttgccaaagcttcgaaaacgcagattgaaaccgagacaaagctgaccgaaaccgaagctacaacgagccgggccgacgccgaagctgggctttcagagcccaccaaggaaaaatcttcagaaattggagaaaaggcagcagaggaagaagctatagaacagattttgcctgaaaaagctgccgctcctactcccgaagctttgaaagaaaatattgaata

SEQ ID NO: 91446 - DNA, 513 bp, Zea Mays
gcctcgcaccgtgtccggcctcgtcgggtctccaattctaggtacggaaacctcagccatgtccgtctcgtttagcgctatgtgtaggactaattaattggagtatggtgcgccggggcctgtgaatggcatcgtcggcggtggttctcgtcgccgccgcgcggtggggtattttggccggagggaagacgatgtgtggtggtcggtcaatcaatggatcaacggtccagatcatgtcgcattgtaggagggttctgtgtccactggatgtcaatcggacggtccaggatgaatctagagcattttaaatcagcgccgcagatcgtgaatccaaggggcctcgtgtgcgtaccggttcgggataaaatcaatctaatccacaccgttcgcgtctgatccaatggccgagatctgactgtaccccttcgcgggtacactttacaaaagaaaccttatgtttttaggatttagaacccgcagtccatggaccctattctctgagtctcggtaaac

SEQ ID NO: 91447 - DNA, 830 bp, Zea Mays
attatttcttgtccttgttggttgattctcgactcactaacaccttatgcaggatatgctatatcaactcgctgtttcacttctcgatgctggggcaagttgaaggagcagtcgtccatgcttcatgaaaagctttctcctctgcttggatctgaggttgcagtgctttgcaaacagttggctgacttagaggcctctcatgctacagaaaatgccggtaagatagccattgttgcattctcaactttattagtttcatgcttattctatgtggtgccttgtagcttctacggataaattttctaaactcgaagacactaagattcgctacgagcctgacctccgtcgggttaaaacaactcttgatggcgaccgagaggccaataatgcttcactacgacagaaatttgacatggagaagaaaaatcatgaggtaacttgttgtgaactccagctcgcctactccatttgtcgaagcgctacataatatgtcccaatctgcaggatgaaatgcataagcgagaagagaagatccaaagcttgttgagtgaggtgactcagcagaaggaacatatccaaactttgtcctccacaaagtctactctcaaaatactacgtagcttgtcagaagaccaatccaaaaagtatatggctgtgaagtccttgagaacaactgtaaggtgttcaaatttcttatgataaagccatggacaggctgaagcatgttgttcggtaaaaaacagtggtctccaatattgatgcttacagagaaattacgatagaaacaactcaaaaattagagtctaatgtggctagaggtgagggagctc

SEQ ID NO: 91448 - DNA, 520 bp, Zea Mays
tgggtgtgcacgccgaaattccagggcatcttcccacgtagcctcttcaatatcctgtcctgtccattggatcaagaactggcgatgaccttgaatgaagcgctgagccaatatgctgtaaggaaccaactgtgcagattctgaagacggataagaaacattagccggtagatctggagccacgaccggaggagtgcctttaaagggtttcaacatggagacatgaaaaacatcatgaattttggccgtggttggaagagctaggcgatatgccacctcgcccaccttgctgaccaccaaataaggaccaaaaaacttgggcgccagcttgtgatagtgtccctgtctcactgaaagttggcgatggctctgaagcttcaaccaaacccaatcacccaccgcataagtaacctcacggtgatgaagatcataacgttgtttcatccggttctgggcggtcaacaaatgatgacgagctcgatccaataaggcatcccgatccactaacctgctatcaacg

SEQ ID NO: 91449 - DNA, 669 bp, Zea Mays
gagagatggaactagaatagcagcaggatgtcatgaccctgggcagtgaagtgcggtatgggcagagagcgttgggcggagaggagctcgacatgggtgcatggatttatatgccgaaaagagggatgagaaacgacatcgacgagggagcgcagaggagagattggcatttcctagcggttgtgcttcaagcgtccgtgcgtgagagttataggagagggagaagagaaacaggcttcattatagggtcgagaggaaggccgaggggattaggaccaaagtaactcagatttagtggttaattaagtgatgcattcatctatagaaaaacggtagctctaatctctattaatggcggacgtaactgcagcaagaagaagctgtcacctgtcacgagaaagctccggtaccgtctagagctggggaacagtcacggcgaggtgtttgtgctttccactgagcagagcaagtcagcgcgggccacgaacgtgtgcgacacaggaccccggcaagcaacaggcgaagaacaatagtgttcgtgcgtggtctgtagcaggagatttaagcatgtcttggcaaaatagagctgatatgcaaattaaatgaatgagagaggaaggaaacgaaaaggagtaggggagaggccggtcgggctggcctggggccaaa

SEQ ID NO: 91450 - DNA, 1136 bp, Zea Mays
ccacaaattcacagaacttgctcgctatgcacctgatgatgtcagcacggaagccaagaagatggcccatttcttgaaggggttgagaccagaactcaagaccatcctcgccagccaagacttcctcagtttcttgcacctctcgaacaaggccatccagttggaaagagcacgagaagaagaaaaaggtcacctcaagagaaagtttcaagttcttcgagctcagcagcaggacatgcaccagtgagtttgatcttttgggttccctcccaaagggtcaaacttcagcaagccaacagggtctgctccgtcacatttcaaccagtctggtcaaagttccctccacaccccatctgttgcaagcagccaacctccaaccaatgcttgttggcattgtggagaccccagtcacttcaagaataattgtccgcagttgaagacatctgtatctgcctactccaactcggtgaatggccccaagaatgtttcaacacccgcctccaaggcaccctccaccaacagccagttaagcaagacctagtttcacggtagggctcgagtgaaccacgtcgacacccaagaagctcagcaagcccctggagtagtgctccgtgagttcctagtcgaatttacccctgctgctgtactttttgattctggagcatcccattctttcatcgccactagttttgtggaaaagcatggcatccccactgcatctttagaaatccccttgatcacccaaaccccagggtcagaccttctatgccacctcaaatgctcccaagtcagaattcttttaagtggggtagtattcttggcggacttagtcgtactaccatcccacggaattaatgtgatcctacgaatggattggttgaccaagcacaatggcatcataagctgcgcagataagactattcttctcactgaccaccaaggaaaatcagtttcatgtaaagctcagccaccaacccaagatccaatggtgttcagcctagcagcagaaagtatatctgtggtagaagaattcatggatgtgtttccggaagagttgccaggaatgcctccggaaagagaggtagaattctacattgatctcctcccaggcaccgcaccaattgcaaagagaccat

SEQ ID NO: 91451 - DNA, 685 bp, Zea Mays
gggtcgacgagcatcacgggtatgtgagatcactcaaacgagagagcagaggggacgagctaacctgtatcgcgctggccacggcgaggtgttcttgcgacgttcttcgaccgatttgggggtaatcccaaattggggagctgtggggaacgatcggagctgatagtgggtttactggatgcacaattacctagcggaacatgttgaggcttcaatttataggatgctcaagcggtggtgatcaatttgggcaagttgtgctggcggctggaggggaaaaggagttctgtgctaggaacaggtggccttcaccgtggcaatcactccggcggtcaccggacatgcaccccatggttcaccacgatgcagctaaagcttaagcacgtggcgcgcaacggtgacagatcaacagcggtgaaggttatccgatcgaccgatgagctcgggggtacggcaagcttagccgccacgagacccaactcaatccgggcgccaagatttttacctgcccgtccttatcttctaactacggtgcacaaatcacggcgatcagcgctcatcgtggcggcgagtcaccggcgacggtgaacggctggcagtcgatcttatgcagatactgtaccatggcatcccttattcagttagcctgaccgagcgatttgaaacccaatttcctcccgatttt

SEQ ID NO: 91452 - DNA, 386 bp, Zea Mays
atctcgtctggtctctgagacgtttggaaataccggtaaaggcaactagctgcatctcgggtgtttcttagctagatcgagaggcatctaaccgtgctaacgagtagacaaagtgggctaattggccagtgactgaaatgaagtggttgaattgcagatcactagcttctgcctatttagcatcatgtgaccttcctaagaaactatgctcaggttgttattagccaagctttgtaggtgcaaatatcttgcctttttcaatttgatcatatgctactaagatttagtgcattggtttaagataaatatttttcttgaattattggaatgattttcagtactattaaactacacatgtttcttatcacctagatattatgtattct

SEQ ID NO: 91453 - DNA, 337 bp, Zea Mays
tgaacaaacaatgcaggatcatgttcactagaagaaaaaccagcagctgtgatgacagagatgaatcgctcaaaccaagcacgaggagcttgtttcagcccatacaatgcgtgacggagacgacaaacatgccctgagggagtatcaacccccggaggaggatgcatataaacttcttcttgtagatcaccattgagaaaagcattcttgacatccatctgggagatagtccaagaagatgaggctgcaactacaatcaaggttcgaacaatagtcatatgcgcaacaggtgcaaaagtctcatcataatcaagtccttgagtctgttgaaaaccac

SEQ ID NO: 91454 - DNA, 496 bp, Zea Mays
caaaccatctataagatgcaaactcaaggcaattcaatactcagcaccacactggatgtagggtattacacattcacacgacttgaacctgtataagctttctgtgttctgacgtgcccccgcacgtaccctcgagcagcgatcgacgtcgtcgtcctcccaaaagcactgcatgagctaccctgtagtgcgcagtcgggaccaaacatcaacagctggcgcaccaagtagggggtgctacgtcgattcacgacagctccatagcaatcatcttcaacaccatgatcgtctttgacactggagaggttttgcactttgaatccctctctagcattgttgaccgaaagggagtcctgcaccgtgtcacggacgtaggaccggaactgccaggagccacaccatcgactcggccaagaaggagttctctctgatggccccgatcgtggatgtaggctagccccacctaaccatggcatgggccactctgatgagctcc

SEQ ID NO: 91455 - DNA, 297 bp, Zea Mays
gaaaaaagacaaccgtcgaacggacagacaagatcgacacagcggatgcatccaacggccaccaaatcgctcgtgtgtgtatacgacaaaccagagacagcatgcatgggcgacggtactggttctgtcgccatagaaaaatgccatgcaaatacaagggagtgaagggtgcgggaggacacaaggagagggggaaaataaacgggccggcctgctctgttcacgggtggaaggaagaaagtccaatgttctagaagagcagatttttgtcaaagccaaatcgatattggccacaca

SEQ ID NO: 91456 - DNA, 422 bp, Zea Mays
tccatatatctaagtccaaaatcagtggaagaaggctgtttttggagctctacatctcaggattcttgaggactttgccatgggtcagtacagcaaatctgtagagccatgtatggagaacaagtttgcttaagtaatcaaacactagtgttacacagaaatgagagatacatgggattaaatgggcgctgtcagtcggcctaacaggtgttcattcactgcatctgatcagggacagggttcagtgttgtctcgtcaactcgggcgtcctggcctgattaatctgtgaagattttttgtatgatcgttataccaaaatgaaagaccattagtccaggtacaactttgatgcagactcgcttgcatgtagtcgcataaaatttggagcaatagccgtttgaattcggcctggcaggcgtact

SEQ ID NO: 91457 - DNA, 377 bp, Zea Mays
cggcaacctcgagcatagtgttgatagcagacaagctctcccagatgtccaatgaggtctatgacgaaagagtcagcatacctccctagctgaaggacatctcaaagtctttcacctgttccgtcgagatcacttcgatgcgcaaggaagaaaaatgagacaagtaccatcataagaatatagggaccagagaaggaagagctcgtaccctgagtcaatcatcttttgatggagagggcctagcatcgggggacgctcttccatcggatgcttgcctgagtccataaggggtcacgaaggaatcgtcccaaggaaggtagaagcaaggcgcaacaaaactgctcaagtgagtgattatttataagaggacacgagaa

SEQ ID NO: 91458 - DNA, 2182 bp, Zea Mays
ccggaaacacctccttaagagccggccatgatgaatccgggtaccgaattgggaaaatttctgttttgtcatagttgatctttagtcccgaacatccctcgaacgcttttagaatctctttcagcacctccaagtctgacttgtcagctttaatgaatactcccgcgtcatccgcgtaaagggagcagcgaagcttagcccctctaggcagtacctgtcccagcagtcccacatcagcagctttctcaatcatccgatgtagcgggtccattgctaagatgaaaagaaagggggatagcgggtctccttgtctcaccccacgcctgtggatgatggcgtttgaccgctctccgttgataattattcttgaggaagaagatctcagaatatctgctacccaattgcgccatttcagggagaacccacaggctcttaacacatctaggagataagcccaatttagggtgtcgaaggctttagagatgtctagcttgacgaagagagctggattacctttcttgtgcaaattcataatcaccctttgcacgtatagaaaattgtcgtgaattgaacggttctggatgaaagcgttctgagcactggagataatttcgttcattcttggagctagcctatttgccatgatttttgttataattttcatgaagctattgatcaggctgatcggcctaaatctatcaattctgtccgcgttttcccccttaggtatgaggatgatgtttgcttcattgacccgaatcaggcttttggatctgtgctggaaaaaatcatttattgccatggagaggtcatttttgatcaactcgaaacaacttttgtagaacagcccaatgaacccgtccggcccgggggccttttcagattgaagccccattacaacattcttgatttcactgtcatcaatcaagttgtctaactcagatagctcgaaaggggtgtaccccagatggtcccaacggacagccctgcaccttctacctgtcgtgcctagcacctggctaaagtgatgctggacctcgttcatcttgtcttcctggctcgttagcagattgccatcactcattaatgatctgattaaatttttccgtcttctattattggctgtcatgtgaaagaacttagtgttagcatcgcccaaccgcatccaagtgagcctggagtgttgtcttgctcgtgccctctgtgcggaggccatatcaagaatcttggttttaagagacctcctgaaatcaatttcttcaaaggatagctgtctaatctcttgcgctttctccaggagagagaggatgatctgaatgatggccatctgcactttgaagttgccaacagtgttgcgcctccaggccaaaagagccttggctgtgcgagacatctttacatgaagtcgaaggatggcatcatcagagttcacagcagagttccatgcttggttgacaacctctttgaacccctcaatctgaggccaaaaagattcgaatctgaacccatggtatggggcgcccaaagagcggctttgcattataagagggcagtggtccgacgtcatggtgcacatggagcgaaggtcagccgaggggaatagatcgtgccattctgttgtcgctaagaatctgtcaatcttagtcatggttgggttaatttgttcatttgaccaggtgaatgctctatcggtgagctctagctcaaggaggtgtaggtgatcaatcgtgttattaaattgcctcatgagtcttctgttgattgatcctttgtttttctcccttgctctcctgatcatgttgaagtcacctagtaatacccattctggtctgaccatggcttggatgttacggagttcagaaaggaaaatcattttttcattgtccagctgaggcccgtaaacccccgtgaggtcccaaacctcctcatgtgatctagagctgatcctgactgatagagaataagctgctgaacatggcaagagggtcatgtcaaaggaatccgagtccgcagcaataaggatgccgcccgaggtgcccagagaaggcaggtgaaaaacttgattagcaagcttggtgcctacagtttcctttaataaaacattggaccaattcgagatctttgtttcttgtaggcaaacgatggaagcaccggtggacagaattgtatgtctaacacttgc

SEQ ID NO: 91459 - DNA, 475 bp, Zea Mays
tcccaactttttcagggtatgttcaaggtagtttggcgccatttttatatttggaccaattggatttgagtttttgaattaagagaacgcagctgttctttatgaagaggtcagatttcagaaatctgaatttctgaatttctcaaggatgctttacttcaagggctgttttgggaattttgcacaactcttttgattagaatttcttactaggctttgtagcttatttggtgtattacatctttgatatttggtccatattaagattttgcatttttcataatccttttactaatttcctccctcatgttccaatagcttaattgggtagtgttagggttttgaacctttttctctcttgaggtgtatgatatgtttagagtgtggcttttgagatgaaaaagacttaacttaggttttagttccttaagtttggtgtctcttgctcaattaaaatcacatgtgataatggtca

SEQ ID NO: 91460 - DNA, 572 bp, Zea Mays
tttggagctctctggtggctaatcgaaggtaggagcgggtgctctggcttcgtgattacctaacggagctgatggcacgcttaatttatagggcccgagtgcagtggctcttgaatttggaatagcgtgctggtgacccgagaggggggagagttactagtacatggttatcgtgacacttcaccatggcaagaccaccagcgatgaccggacaagctagggcgagtcactgtgacgaagtactgcgtttaggcacgtggcacccgagcggcaggcggctaactccggcgaggttatctagaccggtcgtgagataagtgggtacggcggccagggtggaacagtgtctcaagttcatcctcagcgcccgaggatcgttatccgcgttcgatcgggcgtgaattcgggtgcgagatcaccgacagtgaggggggctgaacctgtgatcttattcagtcactgtaccatggtgatcaccatcagagcgtctgacagagcaagtttcagggcccagatctcaaattttatgtgctaacttgtttatcctcctgtgacaaagttgttgatctata

SEQ ID NO: 91461 - DNA, 409 bp, Zea Mays
ccgggctcgggtgacgtttaagaatgcaaatccttgccggagataacctgcgtgggcttgtcgtgagcgcgcaacctcgtgcccggcttagggtcgccggagtcactatcgtagacttgagtttgtgaataagcaaaaagacagggatctcagtgctaatgcccgatagcttggttgggttgtgacagcgatgataaatccactaaagaagcaaaacaaattttattttgatatagagagagtattataaactatacatgtgatggttgcttcggtagagagaagctttttaaaattaaaatttttatgaactatttatggtcaacaataactcaagagaggttaaatggcttggtgattctatatatcgaaaaaaagttgttggatgaggcttctatatcgaatttcg

SEQ ID NO: 91462 - DNA, 496 bp, Zea Mays
gtataatccagcgccctatacggtcacgcttcggcatcagaaggctatctatcgcaagtgggaacaaagtgcaagcatgtttgatggccttcaacacggtgtgtacttacattagcaccagggatttggtttaagagcatattgcttacaaggtgtggtcgcttgtaaatgactaggagatgtcaaaggagactgctgatggctctagcgaaggtggtctagtttatctaagatacacctaccgctatagaagttaatttgacgagccgaatgatgattggcttgaggctgttgaggctactagcgatgagctgttgggaggttatacaaaggcagaggacgaagccctgacaactccttcggcgctcgcggcaagatgagactaaacagagttttcgatgtgatcaattttttatcctgattattgctttcctgcccgaaaacaagggtcgaaaagaaaaatggcaacttcatcctctttcaccgcgcctaagcc

SEQ ID NO: 91463 - DNA, 357 bp, Zea Mays
ctctttgcaagaacattcccgcagctgagcattgacaatgtgcttcgaatgcacatcattgttatcccttacctctgcaatgtagttgtcagctttccgtactgctaaatgacctaaagctcttgtcctgccgtgtaggatatgcagaaccgacagtaaaatctgtccttgcaacttttgtgcaatcctcctcctcctgtgaaacatctccataatttcctcccttatcctgtcagccaagtcacatacaggcagatccttccaatccttaatccaattgttgaaaacctcaacaatgttgttggttacgtagtcgcacttgatgtccgtattgaagccacttcggtaccaaagact

SEQ ID NO: 91464 - DNA, 523 bp, Zea Mays
attgtttctgtaccttcaccttaaaaaaaacaaaacaccatgtattgccaggctgatagagttgaaatgcaaatgataaggttgcggtcggatcaatagacatatacaatactttgttcatctattgccaaactggaaagtttgaacatttttatccatgtaccctgactctgaccgggagaggtgacctgttcactgattcggtcccaagtgtgcttgaaactctggcggattttgcccatcaaattgaaacagcgtattgagacggcaaaacatctgtcaaatttgaattttatcgcggagcctactgctcaaagaagcacatacaacgtcgaaaatagaaacacatagtattattgttctaaaatctgatacatggtctttggagtattattttcgttgtttttagtggtggttcattcaatattgctaggcatacttgtgtacttgctatgcattatttttgtaccttcgccttaaaaaaagacaaaacaccatgtattgacagactgataggtcaaaa

SEQ ID NO: 91465 - DNA, 345 bp, Zea Mays
tggagatggatgactagggttgcttggcagtgggtgcatttggggacttttttttgacagacggatcccacacgaaaagctggtgtctgcagtactacatttaccttcttttctggacaagttttgaacctcaggattccattctttctagaacgagtgaaatttaccacaggtcctgtaggtgtcatgtaagcccctaaaatatcaaaatgcattatttaagtcactgaagttagttcgggtctcatctagatccaaatgggtgtttactgaactggtactgatgtggtatgctgactcaatgcttagatggatctgatagatgtgacccatgtgcggcaaggc

SEQ ID NO: 91466 - DNA, 519 bp, Zea Mays
caactcctagccgatagggtagataaatgcgtgtacttctagcatatcctttaggagattggtgcttatctttctccacttcacatggcaccacctataccactttagactgttgttgtgctagccattcagtctagtgggattcagatttagaactttggaatggctatctcccctctctgacatgtcactttggatttcacagctcagtctgccgtggttgggagtgagtcgacgggagtgcctccaatgtgtttagctattactacttcctaagtggtagtctccattcctcagcctcagcaaccattgttcttcctttgttgatgatagtatttgcttcaatggttcctccagtgctagatctagtgcatgatctagtttttgcttttacctcagatacggcttcaatgtctgttctagctctagctcctccagcttcgacaaatcatggatccaactccgacgtcgacctctcggtcttcaaggtcactatccacacgtctgtcgacccgcttg

SEQ ID NO: 91467 - DNA, 638 bp, Zea Mays
ttttattgatgacatatttcccattttacagagtacattgtcgtcccggtagcttttgaaattcagctaggggtaaaacttcctgaggtgttctatattccaagagttcccgattcctgtgccgtccatctgagtgagacaatatgaccccggccgagtgacttctgctactatgaatggtccttcccataagggcgacaacttgtgccgtccctcccccgttagaattcggtggaggacgagatctcccactgagaaggatcgttgtcgcacggccttgtcgtgatagcgtctcagagtctgctggtatcgtgctgattgaattactacattcagccgttcttcttcgagtacatcaatgtcctccagcctagtagcttcggcttctgctatgctttcgaagaccaacctcggcgccccgaacttgagatcggcgggtaataatgcctctgacccatagaccatgaagaaaggagtgtttccatgtagagctcagctaggttgggttcttaggctccaaacgacgtagggcaattcccttattcactttcctacgaacttttcattcttttcgaagacccttttcctgagtgcctccagtatcatcccgttagctcgctcaacctgcccgttggccc

SEQ ID NO: 91468 - DNA, 493 bp, Zea Mays
cttttgagtcattaagattgcaagaattgtcttagattttggttagcatattagacacttttgtatatgaaaccatctcaaataaagatattattggaatcgtttagactataagaattgtcttagatgttagtgggtatactagacacttctaaatatgaaactgtcttcatatgatatttctaattagacatattatgaaaaaatgtagtaaataatgaattcaacttagtttgatgatatatctcttcatgttttttaaaacctgaaccctcctccctccacgttaacgtttggcgcgtacgacgacaccacatcgtgcttacgtgtgaaaaattatttatcatttttttgtgtcttcactttctctcctgaccacgagccctcactagagactgcccctcgacccgattcggtttggacccaacttccctccctaattcgtctgccacatggcagctcccaaaccctaacccgtgggtccgtcctcccc

SEQ ID NO: 91469 - DNA, 320 bp, Zea Mays
atgagacttatattacttgcacctaggtgcatgtagtaggagatacaagccggttgggagagggagaagttcccaagtccctgatgattgaggtgagtgccaatatcgttgtggagggtgaaaaccggtgaagtgttctcctcctcgaatgaagccctgggatcctccttttatagcctcaaggagagctcccagaagcgccacagtttgtcgtgtatgggagaggagacgtgtttgagcccctgtagccggtatggtcgtcgatgtggccttcgtacttgctattgacttgaactaggaggtggatgttcggtccctgt

SEQ ID NO: 91470 - DNA, 547 bp, Zea Mays
aagacatcaaagaaatcattcagcgccccatctagtctcgcttcggcctctaaaggccgaaggtggaaattgatggcaatgttgaagcatgtcagaaggcctttagcactgtgtgtgccttcattggcacgagggatttgattcaagagcatatagccttcagggtatggccacttgtggagagctgggatatgccgaaagagaccacgtcgattctagtaagggtggcctggtccgattgaagtataccttcagatttagggagaagtttgatgagccaaacaatgactggctgaagtgcatcgaagctaccagtgacgagctacttggggcatactccaaggccgaagataatgctttgtctgcagctttcgagggtcggggcaagaaaagattgaacagggtatttgatgctattggcttcgtataccctgattatcactacccgctacgagggcaaggaaaaaagagaaaacatgtcgcttcggtcaccccagctgagccgaagagcaaaaaggtgaaggttctgacccactggcctcgttat

SEQ ID NO: 91471 - DNA, 638 bp, Zea Mays
tctagagttccttgattatgagagatgtgctggctctggctacatgcttctgttgcttgcaacacaacttcatgatgctctacacactcagcattgtggctacttccttgcactaaatcagttgccccattcataacaaacccttgctgcaccgggctagacagaagcgactggatctattggtactcatgcatagccacctggacagaggccgtcgatatttctgtgtcttgtctccgataaaacatcgggacaactacaaccattgttatctaacacgccagctgcagttttgcttgatgttggttgtgttgctaccacataaattggtcctaccgccagctgcactccagcatcagcaccagaatctgcttttggctctgtttctgtcactgctgtcacaatgttaactctgataggttcaccagtcgtagatcattacaaccaaagtgattcagagagggatagcaggtaggaggaggaagagagacgagacttgggaaggaagaaggttctgtgtatttcttacatgcctcacgcggcagccaatccctcctgcataaacctctcggcgcccactagttaacccattccggcccgtagacgatggcattttccttcctgggccttgacgagcg

SEQ ID NO: 91472 - DNA, 310 bp, Zea Mays
cattgctattaattgtgtgagcttcagactactcctgaaggtcacgttgttgttgaagccgaagatgcccttctggctgctgatcatgatttggggcgggcgccattggtgggggtggtggtaattgagcccaagaagcttgagagtgacttgctgaagctacagaagtcgtaggctgttggttgcctatgttttctgggatgtatggagagtagcacgaagcagtatggaggacttgcttcgactgattctgtcgtgcctcggctccagcaatttccttttgcttttggatcgtgacctggcacatcct

SEQ ID NO: 91473 - DNA, 608 bp, Zea Mays
tgtccgcacaccgagctggatagaatctccgaccccttcggagataacagaggctaaagcactgcttgccgaggtatgcttgctgaaggatagaggtctgactgctgaggctgtggttgctgatttcgttttcaagaacatccagcctttaaaggacagggcctaccctgcttatttgtacagcggtgttaatgattctacccgagtcacaaacagaaaaattcccactgaagatctgatgagtcgattggacatgatcctgaggggtagagtttcaaatgttggtgctcttgtggcctattctgcatggaacctgccaccacttaagccattttctgagtttgcgtccaaccctcatgcttgtgatggtagcctgggtcttagagtgcgaccctcttctgagaacattgaggttttgatttccctactttggagtcttccagaggatgagaagcatactcattttgagatgttggctagcactgacgacgcggagatagatgatgtgcttagtttgctggctggggaatcatccgacttgacccacgccgagccaatggctatcacagctgggcaagaacttggtgaagaggtggagactcggaaag

SEQ ID NO: 91474 - DNA, 378 bp, Zea Mays
gtgattaggagagcatagatacccagtctcttattatgtaagatataagctggacaggttgaggtaagaaagattatggcaaggaaaatacttcatctgaaatgtttaagttttgatttatctcgagattcgctttgactgttatatccttccttgtcgatgttgatcttttcttcttcggtcttggtctcattgcttcggggtgcgtgtatatcatcaaacttggagaatatggttaagatagatatggatgagatagactacatgatgttggtcaaaaacttgtttgatctatggctagcccttctgctcatggttgagttggtctacacctggctattagggtataatctcttctaccaatatcactagtctgtt

SEQ ID NO: 91475 - DNA, 388 bp, Zea Mays
cctatccactagccaatatgccactagaatatataagcgaatttcttgaagttgtgaacgaatacaccaaatcagacgcgaattacaagaggtataaggtatcacgtaactcaactaggcaagacacaaaggtacccaagcaaacacaacccctagtctagtgaaatgtaagacacttacgcataatcaacaacctccaagaagaaacaacatgatctatttaaaaccaagtcaaacctagtacaactctttagaagcatctcgacactacaacatcgagcaatcatcacacaaaggtagaggaggatatggttttcatgacggtcacaaaggttatgaaaaaggaagaggccaatgtgtagcatattattttgtatataatgaaaat

SEQ ID NO: 91476 - DNA, 438 bp, Zea Mays
cggaaaccaaaggcaacaacaacatccattgaactaaatggatacattgtttagagataatattgataacaacatcatgatcctcggaggaggggtacgaggctgagcagaaatgagggatttaggtagatcaatatccgacacttgagaacgggttagagcagttaacaaaataacggggcagaatcaataggggatcctgagattcggatgatgaaaccaacatgattcacaagaaaaagggttgccagatccaggtgaaaggagatgtagtcgcatgagatcgattaggatgagcactagaaaggttatgaagattcgggacaggatctatagaaagaaacatgaccttgatagggtttgcgcaactagataccaaacgatgtttttttggcacaacaagtgcgcaaggagacttcggttggtctagcggttaag

SEQ ID NO: 91477 - DNA, 411 bp, Zea Mays
cccgttagaaatccgatactatggacggcttcccatcggcacagatagcccttttgtctctctactagtggccgagtttgtaggcatcacgaccgagtctacggacccacctatcatggtcttgttcgctaaattagaattggtactcttggtatatatttgtaacacattgatcacacgtataatcatgattggtaggcctcgtgtggtaataaaagcccattatgtgaggcagttgtgttagaagaaacgcattcatgatccttgcagatatgaggcagtagtgcatgtgtgatcccatttggtcaggcatagccgggtagtaatggtaatagtattcgtcctcccttgtttatttttcgcttcatgctctgtactaacctctgagctagtatcatcattcatcaacgc

SEQ ID NO: 91478 - DNA, 475 bp, Zea Mays
aaaaggttcaatgaatcatacttaacttaaaagaggcacaagctcgacaaaagagttatgcacacaaacgctgccaacccttgtactttcaagtcaaagattatgtgtacctgaaagtatcaccaatgaagggtgtgactcatttttagtgtaaagggaaagcttgcaccatgctacattggtctgtttcttattcttgaaagatgtagaccagtggcgtactgactccaactacccgaaacattgtctgcagtgcacaatgtgttccatgtatcccaattgaagaagtgtcttcgggttcctgatcgaaccattgatgtggtggatgttaccttggaactagacttaacatatttagaacatcccatttgagtcctggatcaaaaggatagggtcacccggaggagagttctcaaattctataagatacaatggaaccaacatacggaagatgaagctacatgggaaacccaag

SEQ ID NO: 91479 - DNA, 633 bp, Zea Mays
gccagcttgggttagggaagtactgtgcccaggcatcgattcgagtttcccagtgattgcgccgctgggcatgcgtgcgccgtcgttttggaccaccaaggttgggggagatgtgttggggtcgtgtgtccgtggatcgacggtggtgatcgagcggtcgtagtgttttggccgaaccaagaaatagtcattgattctcgatccatggggtaggattgaaggctggatatcgcttcaccctgatggattatgaccaaggatcctcgtgtggacggacccgatgcaatcttgtgctaatgaaattggaaccgaagattcccaatcgtgcggtcatcatctcctactggttcgggcttgtgccagatctaatctgggtcgtagcttttaaatccaacgactctcgttcatccataccccttcggcctgaacgtttgctgatgatcccctcgactttattataataaaacccactatccctcgatggttggagattcctacatcgaagtccctgtgaccttatatacacacccccctaggagctaaattttaatataaaagctatattaaatgacctaaatcctattctatccataactttcacattttaactccgatttgatccgttcaaattgc

SEQ ID NO: 91480 - DNA, 576 bp, Zea Mays
ggaaacgctagccgcatcgtgtttgggctcagggcactcgccggttcgtggggtcgccggtgcttctgccgtgggggtgtggcggcgccacctgtgctgaccgggaaggaagaagggtccctcaccctcgatccaaggatggatggatatcgttgatcctgggcataccgtttctagaccgttgatccagcgataaacgcttacgattagatcctgagtatccctcgcttgagtcgatctggttcattgatatcaggatgagcggatgctgttagatcgcgcgttaataaaaccccgaccgtggatctcggatcctacggtggacagaacgtaccgattcgtgttatagtcgatctaatttgggcccttggttcttgatcaagcggctcgagatcgcccgtaccccttcgccgcgtccgagttataaaataacccctgggatctccacaaattaacccgtagtcccaagcagttgaaagaaccttacactgaggccctggaatttttagatagcaccctgcagttctttgtattattgcgcgcagtccagataacaaataaaatcatagaaattca

SEQ ID NO: 91481 - DNA, 450 bp, Zea Mays
taactattggaaaaattattgggagaaaacagttgtagaacttcggtcttcaaatgagaaatgttaagaaaaatccatagagtgtgtgcaacaaataaaatctagcttcgccaatgttggcgcattctctagcgaggacaacttcgtaaggggcgatcctgaaggcccaattgattggatcagcaacgaagttgaagccttttagaaattttgagtggtcgcggggatgtctgcgccttctcaggtgccaggggaatcgtggctattttggagaaactaggctgtgaccacgtgaaagctttggcctaaaccaaagctaccttatctattggagatacaaaagacccctcggctgaagcaagcttagttggcaggaaattcttcactgacatctgggaaaatggcggccgagagatggcgcacgagataataaaaaagagtgaaaaagat

SEQ ID NO: 91482 - DNA, 460 bp, Zea Mays
aataaaagtaagattttgtctttttcaagaccttcgtttcttaattcgatcacctctgagcgaagattgttcagagccatcgtatagccttcatcttcaatatctttctgtgccctaagcgcattgctaagaattaagccctgcaagagggggacagaattgagaacagcacaaaaaatatttcattttcaaatacaaaattagcttttatacctttatgctattgtatgctaggctgtcagcaagttcgtccttcgataaaatcgaaagaccgtcttccagcttcgggaatccgatgcttttacctatctcccggtaaacggatatttctttgttatccggaagacagtacaaaaagtcttcttcgccactcccattaaacactagcgccccttcggatatttcaatttttgggcatagtgctacgcttctaacatctcttcttgggatagtacctttc

SEQ ID NO: 91483 - DNA, 947 bp, Zea Mays
ttatatgcacaactaaaacaccaacgtgaatgcacatattttacatttatttactcactatttgctttgctcaaataagtatttgtatgcatgaaatttaataagcatggaattcacatagttatataacccaataggagtaatttatatagaatacctcactatcctatttattgtagtttaagtatatagccaacattttatatttactatttattaaattttagggaagatagtctcaattcataactttgttataatacgttttaaaaattttaaatctttatggaatttacttaattcgccaagatacgattttggagtgttacatgggaaatccatcatcaagcaaggataaattgaatcaatgaaggggaaatactttcatgatgtgtctatagttagggctggggtagaggacatcgttccgctgccagaaagcgatgaagtggtagtcttcaggagcttcatgaaagctgggctttgtttcccgctccataagatgctagttgatgttttgaagacttctgaaatataccttcatcaaattacccccgaggctcttattaaagtgggggtttttatctaggccatgaggagccaaggactggaaccagatgcaagatgcttttgcaatattcatgagttgtcttatgagacgaaggcgactggaaaggaacggtaccacaataattttagttgctacaacttcatgcctcgatctgaggtgaattaccatgtgcccatgtttcagaagaggttgctaggctcttggatgtaggagtggttttacgtgaaaaatgacatgagtcaaagggaggatgtgaaagggattattcaacgccctatatggtctcgcttcggcattaggaggccagccactgcacttgggaatgatgtgcaagcatgccaggcggctgtcaacacagtgtgcacctacattggca

SEQ ID NO: 91484 - DNA, 611 bp, Zea Mays
tggtaatgcgatttcaccgagaatatgtcgttccttgttagattccagtgaaacatgtctggttcattctgtagggtaagattagcaatgagagagaataaagcattccaggctgcttggggcctacaagatccctgcgccatgataagtttggtggagaccgtacctcagcgatggatatatatattttggtctagctatgttgtacaaaattgggtactgggtcctcaatgttgagaagcctagccagacgtcctcctagaaacatacttgtgagccgtgctttaccttgaaagagaaaaaatggagaaagtatcgcttcaccttcataagactgtaccaaaaaaatgcaagttgccctatctccattctacttgggataacggggtcaaactaaggtatttgtttcgtagaagttgttgccagatcccatccgaagtcaacagcttgaaaagccacttacttaggagagaaatgttctttgtgcccggatcgtgaatacctaaaccctctgtattttagcttgaatgagtacgttccacctagcaagacgatatttttcttgtgctcgcccccttgccaaaaagcgagaatggaagtaatccaacttt

SEQ ID NO: 91485 - DNA, 374 bp, Zea Mays
agagttcaacaaaggagacctcgtactcgtccagaccacccggacagaatcacgaggcaagctggagccgaaatgggagggtccattcatcgtcaagtcgaaggcatcccccagcgcgtacaggctagtaacgccttccggcgaagacttagagcactcctggaacattgacaatctccgcaaattttttgtttaaccatcagggcccacgcgtccttgtaatccagcaaacaatgttattccagcccgcactcttttcctcctgagggtgaggtttttaacgaggcggagccatgtaatataccagcaaaagcccccgcaaaaacaaaaactcagacgcaacgtgtcgaaaaagaccgtttcgacggtcttcg

SEQ ID NO: 91486 - DNA, 684 bp, Zea Mays
aaaccagcccgaaccggcccatgaacagggaaacacgccagcggtgtccgttttgcacagaggaccctgactgtttcagtaactaattaagaatcatgcgcactatttacatgtgtctctgacacttacaccgaggcccctccctttttgtttcttcgcaaggttaggtccccgaccatggacggcggagcagtggctccggtgaggttgtaccggccggaaaaacacaacgactaggcccctccgttgctcaacacctaattccaccctcggcgacactaatcccttaactaattgccaagttctagcacaaaatctctctgtccacagtgatggcgcaaactgaggacaacccgaggtgttcccggcgatctaacgtggtctagttcaattggctggactgataagcatccatagcacacaagggtgctgaaacgagggcaaggagggtatgaacgaacctgtagacgtctggccacggtgagctctctcacggcgccgttctgaccgatttgggggaaatgaaaaattgaggggctctggtggatgatctgagacaagagctggtgcgttggatgagtaaatacctagtggaactcacgggggcagcgatttatagagttctacggcggtggcgtccaatttgaagaaatcgcgctggtggccgagagagaggggtgagtc

SEQ ID NO: 91487 - DNA, 673 bp, Zea Mays
ttggacagcgcatatattgaaagaccggtaggagatgcaatagagacccgattctcgatttcttgtggaggatttctctattaggaataaaaaacggggaagtttctttctccacatgaatataaaccaaggttttaaatagccggctctatttagccaactatagactttcaggaggtctgaagatgtactatttagcgctaatcaaaattagccctactagaactacgaatgggtttgggcttcctgtcgctgccccgttggggcgccgcggtggcgtctcccgtccggtgatctggcggtggtgatggtggcttcctccctccccctttccctcgtcggtttctaggttcaggtcctctcgctcctcgcgcttctctgccccctggtcttcttgtttcctcaagcatggaccttgctcttctggattttcggccggggttggccttcgaggattctctcaggcttagtttggcctcttcggtttgtcctgcttgccccagtcttctgtcatccttctggttggtggtttcttttggcagatgcattttcaagttgaactcggattctgttggccatcttctccaggctgccctgggagggttcgcggcaggctttgaggtgctccatctctctgatcgggttttccggttttcgatttcttcaaaggctg

SEQ ID NO: 91488 - DNA, 325 bp, Zea Mays
ttgtcacagtcgtgctccgctctcctcccaaattcagagccaccgcttcgagctgctataaattgatgccccggcctgcttcgccaagttattacgaactcagaacactagctctcgcctccgattagtcactgtagctcgcgaatttcaaacttcccccaattctgttttctgcaccgccgtgagcacccctccgtcgacccactgtcatgtcccttcaaccgccttcctagctgccgttcttgagctctggtacgtcgctaaagcttaccgtgcccttaatttggatgttgttgtactatatcgtcaggaacacgatggaaaa

SEQ ID NO: 91489 - DNA, 1107 bp, Zea Mays
gtcgtcgtggtgtagtcgtccgttgaggcggtcgtgaacaccacagttctggcggttatcgaagaggtggtcccgaaccacgaggctttctcctttgttggctcgggatggaccaaggcctccctctcttggtgagagggcccctctcgttgttccgaggcgggttcccgaagtcgagaggcatagctctcagcctgctggaccatagcacactctagaagtcccttgatctcaccgtggattcggcttcccttggtggtggatggctccggcttggttcgaagcaagattgttgctgcaacgaggttctggctagccctatgaaaggccagaggggcttcaacctcggcatctgccatgatgcgccgatggacatcgtgagccttggcgcgtgctcccttgtcaagggctctacctgtgacttcctgctcaagaacttgccaaagctgttgtagtcgctgttgttcttcctcgagcttggtgtgcagctcgctagctactcgaggtggactatgtgactcctcgtgggggtctgagccacaccggtgtgcaggggtggtgccagggtgttgtcctcccaaggcatgtcgagatggttcccttcgccatgctcctcgtgccccacgtgaaagcactctcaagtcgggtcgtaaccctcctcgtcagagttgtagtcgttggagccgtcgaagaggaggccgtcgcatgcgaacaagaactgtagcatggcctcagggtcacgaagtctagagaagtccaggccagggcccagaccatcttcctcctcggagtcaaggcactctgagcggaaggggagatcaacatacatgctggtgaaggcgcttgtgtcaaagcttgcttgaaagggatggggttgaacaccgatggttctcttcttgcaaatgatggagccgacatctcctagcttggtgaagctagcgcctcccgacccgcaagtgggggtgccagcaaagatgtcgtgactcgacccatggcatggggagccaggaaaagccgacactccccacactataggaggagtcagtagagttagtgcaggggtgacgtgtgttgatgcagatgctccaggcataaggctaatgctcg

SEQ ID NO: 91490 - DNA, 392 bp, Zea Mays
cttcactggggttaggattagaaatgagaaataacgaaatcgaagtgcggaagagagttcttcttattatgagttgctttgttaatgcgtataacttcgggggctaactcaaaaggattgtaagcattagaacatattgaaatactcctcaacactatgtggtggattttgcactgtccaaccacccaaatggtaccgctgacctcgataaggtgctagaaatccattggcgtttgtataacccgcggcaacaagataataacaacctaaaaggatattttcaagttaatatccacacttaaaacactacaccatcaaaccaaatggaagttattgaaataaaactcgccttgagggacacacaatccgtttggcctcgagatagcatcacg

SEQ ID NO: 91491 - DNA, 404 bp, Zea Mays
aaaaacactaagcctaacaatggcattgggtgtcaattgatgaaggtctacctcaaagttctttaaaacttctcatatcatgtcatttaaggggaaccaaagtcccgctctgaagaagcttttgaaaacgacaacttcgtcctctcttggctccggaactatttcctccctagaaaacgggacaagcttgctctcagcctccccgaaatagccaagttttctcttcataaccatgtcatcctctgttacagtagatttcctaaattcaaagtggctaggctttgttaggctcagaatactgttatcttcttcactttcattgtcactctcgcctccagctacaatctgttcagcttcggcattggaggcaccttcagtagtaacttcctctgacacaaccagac

SEQ ID NO: 91492 - DNA, 362 bp, Zea Mays
aaggcgaaaactggagtttatgaagatgtccctattactccaaggggccaaaggcccaaaatcggtaacgttcacacttcgccatgtacttggaaggaaactagccaataaagaagttatggaactctgaaactatgctaaaaggatggggtacttttctgagtctatggtgtttggtggcacaaaggacattgcttcagaatgcatcctaagcactaccaaaattgaagctatgcaaaccattatgaatagcattgagatgccgaagctagagcactagatgaccagtttaagcaaacaagacctcaccaagtgcttgccttacacaaatatcattgttgttatgtcatccttcatatttg

SEQ ID NO: 91493 - DNA, 483 bp, Zea Mays
cttcagttcccgctaaatgacatgataggggaggttctaaagaactttgaaatataccttcatcagctgacccccgatgccatggttagacttagtgtgtacatatgggctcttcgaagccatggaatggatgcgaatgccggagctgtctgtcgggtgcacgaacttcactaccagacgaaggctagagcagatggccttcacaggaactttggctgctacaattttgcgtatcggaaggatatgaaggccctgattattggctatcgtaccaagtggccgactggatgaactaatgaatggttctacatgaaagcggatgagaaaacgagggagaagctaatgagcacggttatgagtccattagagttaaacttcggcatgacttgacccttatgcaatatgcaattggggttaccctgccagctggctgaagtagaatttagagtggtggccgagcacatcagcactagagacttagtg

SEQ ID NO: 91494 - DNA, 802 bp, Zea Mays
ttgtaatctttatggtttgtctactttgtgtaaagctagaaacgacccacacacccaccctccgccttgtaagagaaaataggaaataaagttgtgacgtgtttccttttccattacttatctaggagccttaaatcttgggacgagattcttttatggggcgaaggatataacacctctggtgttacgagaactaaaactttggcatgacatcatatgcattggcattacattatgtatgatatatctaaactgcattcactaggctaaaatttcaaaacaaaacatgtgatgtgatgtttgtgagatgatgtgatctggtaagaagatcattaactctaggatggaatgcctctctccaaggactagagacatgtggctttgtgagatgagcactaagtagtgaccttaataagttggtagaactgttcaagaaatattagcttagagagattaagtacttaatgtaccctaggacacccaaaaccctaatttggggcccaaaaccctaaggagtgaaaatatcgcccccgtagatgagtacgtgcgctggccatcgtacccacttgcttcacgatcggccgtgatgccattgctggtgtctgccgcccctcatagtcatgccacgtgcttgagggtgttcccacgtcacagtaggtcgtaatggacaaccaattactacccgagacctaactccattgaccgtcacggtagatgaactctggtgactcatctcttcactatagtgagctcatctccatccaaaattcgtagcacccatggctagtctctataaattgag

SEQ ID NO: 91495 - DNA, 477 bp, Zea Mays
cttcaatgaggaggagacaaaggacacaacatcggagctacatcaatcgagatagtgaagtcacacacgccaggttgatgcaagactacatcaatgacccatatgtctaccctctactctactttcggcgaagataccatgtgggaacaacgcttcatcaagtgggaacgatgcttcatcaagttcaattgcaccaaagaggagtgcatcgtcgttctggagcaatctagtgtcgagctcgagaagtggcttcccttggtggacacggccttggacgacgtcaagttgaaattacgtaagatgaacaagcagtgggatcatgcaatgctggagttggcgggctccgatcagggtctcctctgcaagtcggatgtttcatctgatcatcagatccaattcctcccgttgacggcccgagtgggcaccatggtaatctttgtcatcgagatcaggggtttgggtctcacgaccttcatc

SEQ ID NO: 91496 - DNA, 293 bp, Zea Mays
ggggtaagctgctttataatttgtattccaccacctccaccaccaccctgagagatagttgtagggttcacattgtttgttgccttttgtctctgttttgtgctaacaatgacaggaccaaagaatcaaatggacaaggacaaggggcctaaacttaatgacgacgagtgtgtctctcagatggaattgaaggagatgatgcgcgcgatgactgaagcttttaaaaaataccaggactctgcctcgacatcctatgagcagcttgatcgacgagttgctgaacttgttacacg

SEQ ID NO: 91497 - DNA, 349 bp, Zea Mays
gtcggcgtggagctgcgcgcggatatggtcgtggttctggccacgaccacgtctggaggcgaatcgaagatggagctgtacaaaatcaaagaggtggtcgcaatattgaggaggcggatttgggagaggagggtgataccttgaatcaaggtaacccatctccctgggaaggtcaagctaatagatctgaagaaaagaatgaagatagttggaaaggaaatccccatcctatgggagaagatggccccaaagattctcacgtgaaaaaagaggtaacccgcaattttaatctggatagatctggctgtgctttctgtcactttaagaaccatcttactaaggattgtcg

SEQ ID NO: 91498 - DNA, 359 bp, Zea Mays
atttcctccccaccacgacccatttctgcatcccgccgtgcacactgacaaacggggccacgagctagccttccctttcactcagactcatgactatcgccgccatgtgggaccgctccatcagccactcattttatctccatgcagttcatcccgtgtcgacaggaggggccctccggtcagcctcatcctcctgtgtgccagcgataggacccgtccactcattcctctttcatcgatgccttatgggccccgcttgccagggttatccccttccttaagccgactaacttggccataaacaacaacttgacataattttctctactcctaaaagattctcttctaacttaatttgc

SEQ ID NO: 91499 - DNA, 386 bp, Zea Mays
caggaccaaagaatcaaatggacaaggacaaggggcctaagattaacgacgatgagtgtgtctctcaactggaattgaaggatatgatgcgcgtgatgactgaagcttttaaaaaataccaggactctgtggagacatcctatgagcagcttgatcgacgagttgctgatcttgttacatgcatggatgtactggaggctcgtcccccaccaccaactccagccccagctcactctcctgaggacaatgacgacgatgacgatgatgtttatgtaccgctgcgacaacgcctcatgcgtaatcgacaaggtatgggaggtaatggtagacgttgtcatcataatcctgaactagaccatgatctatttgctaagattaagttctct

SEQ ID NO: 91500 - DNA, 304 bp, Zea Mays
ctgcccctatcagatctagctaacaacagggttggagcagaggatgtcgatggtggaggagacaaggccgatcggcacgatctatggagagcgctggttcggtggcgcaatctatgaggcaatagtggtccgacgttgaagaagaaacttgtgtcacatgcgttggacctagatacctcactatgctagaaaatggaaaaagagcttgtggtaccttgctacctctctatgtgggaaagggaaaaaataacaacgtgagtgttaaaaattggcgtcaactacatttacggagcgtttggatccc

SEQ ID NO: 91501 - DNA, 733 bp, Zea Mays
ctactatgtatctcgttaggacatcaagatgaaaatgtgatcctcaagaataccttgcactattgtatttttgatacatataacatcaatacagtacaaataacaccaattgcaccttgtaattgttggccttaaccattggccacccatagttttctgagatcattatactccgtatgagtatctaatgtagatactaggcttatggccatacttataacatccacttgtccaattgcaaagtttgaggactttttagtaaattgacaaccatttcccctcctataaatagtgccctaaggcttagagctacaaagtggcccttaaatgactcttgctatgtcagtctctttttattttaacatccttctctccgtccttctctttataaatctaaccctctaatgtctcacttttttacgttaacctcctaccataaccttatgttaacctcctatcctctctttataaatctaaccctctaaccctttaagagtctttataaacctaaccctataacctttcttttttacccctccatctaagaagactacccctttctttttttttctttataacaattccaactcaactttataaacctaaccatctaacatttattttttacccctccctctaaaaagactattcctttctctttaagttacgactcaaattttaatgttgattttcaatggtccaaaaacatctaagaattatgttatcatatttt

SEQ ID NO: 91502 - DNA, 618 bp, Zea Mays
agcaaaaaatataatgcatatataaaacatgctaagggattgtgtttgaagtataggtaatttatacatcaaagagattcagtgagcttgccattgctttaaccggtgaaaggatgagagcttgcggaactggtttctagcttcaccatctggcgtagactcatagaatcggccttcacggggcgacacaaatgctatgataactacacgacacaaacaagcaaacacacaaaccagcgagtatatcaacaagtatccattataatggttaagaatggtggtgaatggtttaatatagttttgagtagagtttgtttcaatagagtgaagaagcttatccaaaaggtatattgaaggtgaaccaacactagaagtgtagtcggtagagcggagtaactaaatttgctggggtttgccttggctcagggtgttgagggtgtggggagggagaggatatctctctaggtgtatttatagttgggtgcatatggctttgtacagtagaggtcatggttatgagaatagtggttagtggctatgaatacaacccaaccaatcccttcaattgcacccaagcattctattcattcacattcaatacaagtgcagggactccac

SEQ ID NO: 91503 - DNA, 430 bp, Zea Mays
tgagtattagagccttgccagcacattgcaatatcttacactcactcatcccgacttggcgtatgttgtccagtaggtctgtctctttatgcatgatccccgtgagccccatctcgtgttgatcaagcgtttcatttggtatgtcaagggcacgttgtcctatgaccttcacatcggcactggcccgcttcagttcttgactacttacacacatgcagactgggctggcggtccggattcccggcgttctacctccggttactatgtctatcttggtgataatctcgtcttttggtcctcaaaatgccagacgattgtctctcgctccagtgccgagctagagtaccatgttgtttcccatgttatcgccgagtgctactagttacaacaaccgctacaagaacttcacatctccgttccttcggcgcag

SEQ ID NO: 91504 - DNA, 680 bp, Zea Mays
cccatcttctctagcttttgtttgataatgaagctcatgtactcggcagaagccttcgacaaacggttctaccccctggcttcggagggcccatatgtagacgctaagactaacgatggcgttaggagttagctgatgaagataaatcccaaacttcttcaaaacatcagcaatcatctcattcaaaggaaatctcaatcctgccttgaagaagcttttgaagactaccacctcatccttttccggcttcggagtaatttcttctccgccaaagcgaattagttcctttttggcctcactgaaatagcctaactttaccaacttaggcatatcatcttcagtaacggtggacctcccaaactccaggtggctgggtttagatggcacgacactataatcatcttcagattcatcttcctcagcaccaacttgctcagcttcagcggcaccttcgtcaaaaacatcctccggcactttcagccccgactgtttcatcactttggagatcggagcggtttcagcagtttcggcttcttctccgtcacgtgtaaccctagcagtggaacgtacccttgccatttggtgaagaagttgttgacttttttaaaaattttcgaagcatttggtgaaggccttgttcttaattcgaagcatttgagaacaagttgccaacatctttt

SEQ ID NO: 91505 - DNA, 305 bp, Zea Mays
tctgaaggctatatgctcttggattaaatctcttgtaccaataaaaaagcagacagtaccaaatgccttttggcatgcttcgatggcttcatctatctcaaccttcggccttcggaggccgaagcgggaccaaatggggcacataataaactccttgacatcctccctcgctactaagtcgttcttcacataaaaccattcctccatccaatttcttggccatcttttccgaaatgttggcactaggtagcttgagttgggacgggcgataaatccttaacaaccgaagttgttgtgatactgtt

SEQ ID NO: 91506 - DNA, 399 bp, Zea Mays
ctcgatttttcacacttgttgtgctagcccggctgcacccttaggcgacttctgcacggatagtcttcgcggaagacttcgatttttcgcacttgttgtgctagcccggctgcacccttaggcgacttctgcacggatagtctttgcggaagacttcgatttttcgcacttgttgtgctagcccggctgcacccttaggtgacttctgcacggatagtctttgcggaagacttcgatttttcgcacttgttgtgctaatccggctgcacccttaggcgacttttgcgcggatagtcttcgcgaaagacttcgatttttcgcacttgttgtgctagtccggctgcacccttaggcgacttttgcgcggagtagtcgcacgcgagggtagctagcgctggg

SEQ ID NO: 91507 - DNA, 581 bp, Zea Mays
tcgcgcgatataatctgagtcgtccagatctaatccaatggccgaaatcagcccataccccttcgccgcggccattttctaaaagagccactggaacctttataaatcaacccgcggcccttccacctttaagattcataacaagcgggtcctgtaatctttcacttcagaccctgttttctttactaattatacccgtagttcattttaattcataatgaatgaataaaaccctggaaactgatttttggaataaaaataattcctagaactttgaaaattcataacttgctcattttaagtccgtttcaacccattccagttgcgttagcttcataataatattaactgcacagtaatattatcattggtaccatatcacttacttttataattagacattgttcaaacctatgtttaatagattaatctccttaatcaaagatggtttatctatgattatgatctaactaaaataggatctctactcaaagtataatgtagattagatttatttatttaatatctttattgcatgatttatataatcaacataaagatctagatctaattggttaatc

SEQ ID NO: 91508 - DNA, 680 bp, Zea Mays
cagtctgtgctatggtactttagaccctcctcgacgccctcacgacggagtcgctccagccaaagctcacgtcgcggccctgttcagaccgcccttcacagatgggtcacgacgctctctagcagtttcactccagcagcaaagtatctctatcagatcataagacggacactactgccccggatgggttatagagaggccaccaccgacattcagctctggctacttggtgccttgatctcacattcaaagtttgatgtggttgatttccttatctgtgagatcgaggacacattgttggatggtcttcgtgctcgtcgacagctgccatatgcgcactatctctgctacatcttcgcgcagctaatccggctgcattagttctagggcaccctcaaggcctcacgcctccagtttggatcctatcgtccaacccctgaggacccaatgcctataccagatccagtgctagacactcaggctgaggatacggtgttccaccagtttgagacccagggcacagctatccctgatgatgatgttgatgatgattttgggatcccaccttcgcctcctgtgcctccatgctcacatgatcacgaggctgggagtccagtgctgcccctactacccctcctgctgttgaccctgctctagctacgatacttcagtctcttaca

SEQ ID NO: 91509 - DNA, 512 bp, Zea Mays
gggaaagtgacattggataccttaaagaacaactcccacaatttttcgaatggaagcttgcccggggtcaggaacataaaggcaatctttgggttccttgatatgaaaggaggcgtggagagtatctgtctgaaaacaacacgtgcagcagtctctgcatcagtaagttcccgcgtaggttccgagggaaaccagtccctgacagggtaggtgtaatcctggggagggtagagataagcccacagcacagtaatggcgacaaatactacgacaactgatatccatatgcgtcttcttggacttgctcttgtgcgaggaactgcagtacccttcatgtcgctgaagcccagttttcacacctgataccaccacttcattccctttggctactcacattgatgtgcctcgccttcattgctttcctcttgactaaagcaaatgctaccctactggagcttccagcaacgtgaaaattggaaaaacaattgccttctgcttctataagtgcttct

SEQ ID NO: 91510 - DNA, 424 bp, Zea Mays
ggctgaagtgcttgtccgcggtgactcatgttttatttcctgcggggtcatggcctccgatccatatagcaggcggaagggagtgaacccagtcgctcggcactcggtcgtgttcagcgcccagactgcttcaggtagcaggtcggcccatttgcccttcttgtcgtcgagaagcattttcttgatagcagtgaaaatcttgtcgttggcacgctccacgacgccgttggattgtgggtgatatactgaggagaaggctagcttggtgccaatggagaagcagaaatccctgaagtcctggctgtcaaactgtttgccattgtcgactatgagctcagacgggactccgaatcggcagataatgttttgccagaaaaatttctgggcagtcttcgatgttattgtggatactgcccttgcctcg

SEQ ID NO: 91511 - DNA, 542 bp, Zea Mays
aaaattaatagaagtgtattttgaaagattgtgttatgttaaattgtgccttatagaaaagaatgaaagaagtatcattttataaggctaaagttgcataccaatcatgatatggtatcataaaaacttttaagtgggatcatcatgtatacaacttgatgctaccatagatatgttcttaaaagtgttcaggaagtttttatgatacctagtcacgttaaagttacgtactcaatttaaaaacatgttatatgcattaaaaggtcggcagctaacatattaattgaaccatgaactttgatgatctaaaatatgttatatgccaacacactttgcatatcaagtgtgcacgttatgctaatttgattaaaactaatatagctgtgaggggggtttataaaacgtactacacatagcctcactcatgtgcattgggaacaaacactacatcagtacatctaactatcacatgggtctggatcaaaagacggaagacaggaccaacccaggggccaaattatgttatgtttaagaatgcaaac

SEQ ID NO: 91512 - DNA, 433 bp, Zea Mays
tgaaaatggggattaactcccttgttttgcttggtgcttggacctgatgcaaacaccgaaaccagtgtgtcgtggaggcaggttggagaagagcgaaggttgtgggagatggcaggagacctagcagctaacctccctcccggctaatttctgtttaatttttttctaaggcagttcaggggggtttaaaacctcagtggcatggtttgtaagggcttcggtccaaaacttttttcttcttaatatgcaactctcctgcatatttgaggaaaagagaacaacacacaacaaaccttaatcttttgaatcatacacagagttcaactgaaacaaatgtaaacacatccggaagaccggaagtatcttaaagtaaaaagaaaataagcacccactgtgttaacaaacatgattcattgacttttggatgacatgc

SEQ ID NO: 91513 - DNA, 422 bp, Zea Mays
atttgcctagacaaaaataaccctatgtacataaagcctatccacttcgctactgcaaaatggaccaactcctaggttttggatccaaaggctacacaatgcacacgaagttgcttcaccttgacaaacccgtcgttgtgacgccacgtgccaccaccagttcctatatggaaccatcattgtcgagtttttaggccaaactcgatcgaaaacctgtcgtacatagtgtaggatggtttttcaatgttcaaccacgaaacccccatgagtatagggaacacaacctgctcgactacgtaggatggtttttcgatgttcaaccacgaaacacgtgtcccaccagtccttgactgcgccagcaacatggcctgctccgccacgtccacacgcaagtgtgtgtcctaggtgtccgccaatgtggc

SEQ ID NO: 91514 - DNA, 501 bp, Zea Mays
ccggagctccttagtccaccagacgtcatcgccggagatcaccctctcttctcacaagggatggagcaccctgtgaacacagtgagctctccaaaattgtaagaatgttaatcctatcctcatcaatttgagttgaattaggaatcgtaacccttaactctgtcagttttggttgattttgatctggtttataggaacttgtacacagtagatatcaaagttgaaggtttcttatcagttcactcatatggtaagaaaaggtacacaaaaaggtttaataggaattggatcatagatagtgggagtatcacgatggatttcctggttgcaaccttaaggtctgtgataagtttgggcagaggtcaaaatatttttttctaggtttatgacaagaggtatggtgaggatgttgaactaaattcagagtcttagcttattgatgtcattgaaatgtacaaaccagagaaacgatttatgcttcttgcttctgtgtttgagatg

SEQ ID NO: 91515 - DNA, 324 bp, Zea Mays
tgtatgtgttccttcgttttgagcattgtcttgcgaacgggaaggtttaggtagcaaatatatataacaccctacattagattgatgaatgtaaatataaagaaattacgtgtttagacatatatcggtatctctccctttccttttggttctggtgagagttctaaactcgtggtccctagttcacctctatttaccgtaccttttgtgaacctaagtacccctcgtctaagagattctatccaaaacggagagatcgagatcgatctttctctatgctgatctattcctttattttagaggtcaagaaagggcagagtaata

SEQ ID NO: 91516 - DNA, 564 bp, Zea Mays
ctgacacggcgtgtggtggctaatcgtgattgtcgatagccttgaggcaacccgttacatcctcgatcgtcaatttggggagtccaacatagtctccattgctaaggcgacctgcatatatttcttcgggacgcggacgaacttctctatggattccttctcatcgatgttgtcattgccgtatcacgtcatctgatgcatcaggctggagagacagagaacaaagtcgttgacgtcctcgctcggtcagaacgccaggcaatcccactcctaacacaacttttcttggtggctctgcgggcgcggttgctacttataagtgccacgtctggcatcctaggtgttcttggtagtctccttgcccgtgaggacagacatcatctctgacgggatagcaacaaggagggcctccatcgcctgccgatcctcgtggaagttgtcgtcaccgtactgcaccgcatcccacatccgtcaagcatgcaacttcaccttcataaccaagcttcgctcatagttggcattggtgagcatgggccatctacctgccgaactcctttacgaggt

SEQ ID NO: 91517 - DNA, 498 bp, Zea Mays
gccctccctgctccaccattctattacgaatccaacccaccctcagttagctcctctcgtgtaccgtagctcccaatcaccgaaattccttgaacacggtcactgccaccgccgagttgagccccaccatggccttctcaggttcgttcatatcgctctagtctccatttttgtacatctttggtctctagatactcatggtcttgaccaattgaacgctaccacagtatagttctgggacgtcgtgttgtcgctcgagaacaccgccatggacacccctcacgttgatcgatacttctgcgctttcttcatccgaattcccgcaagcagcttaatccttgtgagacactgatgctctccccgctcttcaattgaatgctactgaactgggtgcgctggtatggctttaccggagccctggctccaccagcgttgcgagcacacaagaattagggacaggtcaatcaaattagtctcaataatgtgctcggacagtct

SEQ ID NO: 91518 - DNA, 376 bp, Zea Mays
gttgaatcgtattgaggtcaaaataccaaagttgtagttcaccttttaagctttctagaaagtcctagtttgatatttttggattaatatttgaagagttatgattgaaatgagtgactgctgtgttgctgtccaaaaattctgctagtgcctatttgattgttagttcaccattttggctaaaaatggttggttagcactaaattaatatagaattgccatgactaagcttgaaataacatatgtgtcatgtttttatacgtttctttctctagttaattgtgatgtagtattgtgttgcgtaaatatccaaaatgtttgtcgtctttttagtggtgttaatgttgtgcgctcgacgatatgtagttagttaatg

SEQ ID NO: 91519 - DNA, 764 bp, Zea Mays
tggctgcccacatttatagcacaacccctgagctttacggaatgcatacactgatgataaacggtcgcttgttgcagtccccttgttggcctctgatgttctgaattcggtagtcttcgtagaagttgtcgccgccttgggtggaggaggtagaggcatagggccacgagcataagatttgctcgcgacagtagaatccagcttcttatagtccttggtccgggaaccatcgacgatctcctcctgcaactgagcaagaacgtaggcagtatccaaatcttttggccgttgaatcataacagtggatttaatatcaaaacgaaggccatctagaaatcgcatggtgtaatacagtgggtctgacatttcctggtaactattgagctgatcgaccaaatgagcaaaacgttccacatattcccccaccgacccttgctgccggatatgaaataattgacgcactaggctagcatgctgatctttcccaaatctctcacggatcaagttcccaaactctagccaagacaaactagcaagcttatgctcaactgaatttaaccaacgtgcagccgccccagcgaagtgcatggttgcaactttaacccacacacaagggtgcacagcgtacatgtcaaagtagtcttcacaatgtttttgccagagtttggggttttgaccatcgaacccaggaaaattgactttaggtaaatggcccaagtagggagagaactgggatccatgtgcatgactaccgaatgcatcag

SEQ ID NO: 91520 - DNA, 879 bp, Zea Mays
atttttctacaattttctagaaattctctaatcctggtagaaaaattaaaagagaaagggtcaaccgtattggggtcatttcagcccaagtcggcctgcagaagggagaatatacgcgcgcccgtgcccgcgttgtcaattttgcgtagaagaccttggagatttgaataacttgaaaaggggtcgtggcactattcctgcgtttcacctacaactacaaaacccccctggatttctattccttcacaacgtcaggtccacgacgcagcacgacggcagaccgagctccggcgaacctgtaccggccaagacacgcaatggccggtgctctaacttggctgatacctaattcaacatctaacaaacgtttcccctcaatcaattgcatgattcgagctcccggcctctctgctcacggtgaccgcacgatcaacggataacacgaagtgttcccggcgattcaatgggttctagcttaatcggttgggtcgagaagcatcaggggctcataagagtactgaaacaagagagcagaggacatgatcagacctgaagcatagtggccatggtgagagtctttcacggcggcggaaaaccgatttgggggaagtgagcaattcggaggctctggtgaacaattgaaggcaagtgctggtgctttggatgggtaattaccctatggagctcatggcatgctcaatttatagagtccatgagcggtgttgtccaattcgaagggattgcgctggcggccgagaagggggggtgagtcacggcggtgatctaccgtggcaatcgcagggcaattgagctacgacagttactggatggtcactacggctcatgatgacgcgataaacgtcctaaggcgtggtgccc

SEQ ID NO: 91521 - DNA, 438 bp, Zea Mays
gtcgaatcctgagctgatgataacctaacctcagatctatctttgagaacacactggctcctctcagctggtcgaatagatcttctattttgggaaaggggtacttgttcttgattgtgacttcattcagagctcgataatcgatacacatccttttggtgccatctttcttctccacgaattggacaggggcggcccaaggcgaggtgcttggccggatgtaacctttctctgatagttcatcaatctgcttcttgagttcaactaactctggtccagatactctgtaggctcttttagaaatgggggcggtgctaggaagaagtctatggcaaactcaacttttcgctcaggtgtcatgccaggtaaatcttccgggaacacatttggaaattctgacacaaccttaataatcttgagtgaatctggctccttgct

SEQ ID NO: 91522 - DNA, 408 bp, Zea Mays
ctgaagtcatagaggattcacccccatctcccaaaccatacaattcaacgtgctcgtgaactgattcaggggcataaactccttcctcgccgcctcctctctcttgcccacatccatctcacatcctccgtgtagtcatccgccaggcaaaagatcgaccttgttgcgcaccaccttcgccgcctcttcgtccccgatgaccactcgctcccgccccctttcgaaccccaatccctagcattacatcaagaaccctccgtcaccgaacccaacagatagtgtgagtcggttccgcgccggtcgcgcgtgaaaaaactcatcgtcacgtcatccctctccacttcttgtgttcatacacctcaaattcgggctcccaacgtctcggagaagaggagcatcatgatgggc

SEQ ID NO: 91523 - DNA, 351 bp, Zea Mays
ggataaaccgctgcaggacatgactgagtgtaacaacgggctctaaggtggcctaggtgtgcctacagtaccctgacagaggatgaaggcatcaaccatggcgtccttcgactgatgggaacccaagaggacaatgaactagacgacaatgcctgacctttattcgcttgacacttaggctcttgtaacagggttggtctctgacattggcctataaacgaagggaaaggcacacgattccgtggacgagcaatcacacatacacatcactagcacaagtcaaagaacaaagcacttataaccgcacacatattcacacactagagacttgggagctcaatccctctctcg

SEQ ID NO: 91524 - DNA, 335 bp, Zea Mays
tctaaatatacttccatacaaattttccaatatggaaaatcgtcaccatcaaaaacaggaggaggtccatccccaccggacatcgttactctagcggttaagctaatctaagagcaacaaggctctgatactaattgaaaggatcatgatgcccaagaggggggtgaattgggcttttctaaaaatcaacactaattaaaccctaagcaagagcccaacttcacccccaacaactagcactaagagaataatactagaaatacaacaatgctaagacaatacttcaaatacctgctaaatgaatacacaatgtaaaatgcttgaattaagtgctg

SEQ ID NO: 91525 - DNA, 388 bp, Zea Mays
cgccctgcctgcttcccctacatcgaccactgctccgcctgtccttgcagcgaccgcatcctttgtgacttggcatcatcgtctcggccaccccgggcgtgatgtgatgtccaagctctctagtagtacctctgtttctggttgtaggggatcttttgagcacctctgtcatgcttgtcagttaggtcgccatgttaggctcacgttccccctcctcctcctctagggtagcaggcacttttgatctaatacactgtgatgtatggacatcccctgtaatcagcatttctggctataagtattactatttgtgtacttttcccttacatcagaagttggacacctttcccaccctgtctcacttcttcgcttgggtctccactcagtt

SEQ ID NO: 91526 - DNA, 402 bp, Zea Mays
gatttattaagtcccctatgcaaacaatgactagagacttaactaaacattacagtggccaaatggaaagtctaattgaaactttgaaattctttgtttcatctatgacacttacttatgatatttggtctggtagggacaaagaggattgcattagtattgttgctcattatgtgaattatgattgaggtttggaaaaaaaggctacttggtttaaggcctattgaagacgcacatactggtttcaatattgctaaacatgttgcatggtagtagatgattatgacataacaaataattttttgctatcaccctggacaatgcttcgtcaaacataattactctctccttaaacctattttctctaattaccttgactttgcatctattgatcatgttaat

SEQ ID NO: 91527 - DNA, 598 bp, Zea Mays
ctccggactcagttggtgattatagacccatctccctccttaacacgagtgttaaagtactgacaaaaatcttagccaatcgtttgcaactggtgatcacaaagctagtccatcagaatcaatatagttttatcaaggatagatcgatccaggattgcttagcctgggcttttgaatacatttatctttgccacaaatccagaaaggaaatggtcattttaaagcttgattttgagaaggcatttgacaaattagaacatgcagctcttatggagattttgaggcacaaggggttcggtgataaatggatccactgggtttctatgattcttggttctggttcttcagaagttcttttgaatggagtccctgggaaagatttcactgcagacgcggagtcagacaaggagaccctttgtcccccacttctttttgttcttgcagctgatcttctgcagtctattgtcaacaaggcttgcgattgtggcattcttcgtcttcccttaccaaacaattgtggtccggatttccctatcatccaatatgctgacgatactattctcataatggaagcttgccctagacaacttttcttttt

SEQ ID NO: 91528 - DNA, 397 bp, Zea Mays
attggctggatgctatagaggcaacaagtgataaactacttggagcgtactcgagggcagaagacgaagctatgacagctgccttcgtcgctcgtggcaaaaagaggtcgaatagagtgtttgatgttattgtgttcgtttacccagactactgctatcccgtccaaaagcaagggagaaaaaggaaagtcgctgcttcgacatctactggtgcgtcgaagacaaagaaaatcaaggttttgacacgtaaaccgaagcgcattaagacgaccgatgtgccgaagttaattgaaagggcggaaacaaccccctagccagagagactgttcctctatgcctattgaagccattgcagacccgaccagagagccgaaatcagaaaaggtagcagaaagga

SEQ ID NO: 91529 - DNA, 709 bp, Zea Mays
gggctgtattaagtcttcattggctaaaagatggaaggtaatacttagttccaatacagagtacatcagtaaataaaacaatttggtacaaaatttgcttaatttgtctttgttctctataggcactgatctcatttaggttgtttttctgcttagttaaatgcaggtcattgttgaaaactgaaatgcagttggaatatattgcaaaatggatttatttgtgttatgatgttgcaatagatgtgtcatgctgttcctcttagcttgctaaagcatcttctcggtctagataactagtttttcttgatgctcctcaatgtattataaccttttgagtttgcattgtttatacatgtttttaaacatccttttgcatgctctggactttattggataggaacttaaaattcttccaaggttgttgacctaactcacagaccacaagatcactaattgttgtccgtggacaaaatataatgtgattacatagagttcactgtttgtattttctccttcgtgtgaattctggaatctaggtgaatcatcatctaacatatattcctatgtggatcttttatctcatgcaagcatctgataacctagttagcttgttttattgttcgatgcagtaggacatctttgtatttgttagtgtattgtgtctgtattcccaatgtaatgggccttagcctagccatgtacttatctg

SEQ ID NO: 91530 - DNA, 534 bp, Zea Mays
gtgagagctacatgattgactcttcgatagtggtctttcttctgctgttttgtgtcgatctcgaagctggatcctccggtaatcatgtgaatgacccctcgaaagggttaatcggtgaagtcctcttgtttcggtgctggtgctgctggtggcggtggtaacggttgatttggatgatgtggtggtggtgcaggcgatagagctaggatctcttggtgttgctagtatgtgttgtggttttgctggtgaggatggtaatgttcattgtagaattggtgctggttgtattgctggggatggtaggtgtgggcgataactctttggttgtcagtcggttggtttctggccatttgatcctttgtggctttggtttcagggcagtccctggttgggtgtgtcaagacttcgccatggaaaagataatagagccttcgctgttgtgggcctcagtctctgcccctgcttctggttgtgttatcgacacggcgggctgcggagggtatttgtgacgacgagcggtgtccccagtctgct

SEQ ID NO: 91531 - DNA, 748 bp, Zea Mays
gtggtgatgtctgtgtctgctacagctgctaagggcaaccgataggtgagctcattaagctttcacaacattattttaaggcagtttacatcctggcgaggatgcttcgtgatttcggcggactagcaagggtcctcttccgtgaggtgagtccctgcccttttcttttcttgtgctgttcttagatgcttgtgtgcccatgttccggtgcctatccattaacctgatgttctgtattatttgctttgttgtttcgtgttttccagtttagttgctatgaggcttgtgtgcggctatagaatattctagatggaaatagcagcggtgtgattggaagaacagacatttggcttgcacgattatcaaatgccactatagaatatttgtaggtcgagataatacagatgtgaccggtaaaacaggcaggcatttaacttgcaagatcatatgatggcttaggaattcatgtgctgcactgctgcatttgttgatggcatagtcgaagctttaagctggacctgctggcctgcctcatgcttgtgtgggcatggctcagcctggtgtctgccctttgagctcatgacgattgtctaatttctattgtttggcaacagaacaagtttggtggcctcccaggccaaggtgtctggttcctgtttcatgctggcccttctggttcggtaacctttgtctttctggctcctaccctgttcttatgcagtcctgcttgtgcttctgtgtaaccttc

SEQ ID NO: 91532 - DNA, 437 bp, Zea Mays
tcgtaaatccgtcttgaatgaatacccctggactgtccattcagcagaaggaaacatttgtgtacaaggaactcgactaccgtctgcaaccttcaccgagaccggagataataaacgagatgcacccttgagatgagcagcagctgaatcactaacaaaagagtgtgtgctgcctgagtctatcagaatagagatggattggccctgacagacgccttgtaaccttactgtgtaaggagcagaggttccagaagttgctgacagggaaatagccataaattcttcaggacgtgttgtattatcagcctctgaaactgcacgctctgcatctggttcatggaacaaatcccacatttcttccaatgcatgcaactggattgttgaagagcatcggtggccatgagaccatttttcagcacacttgtcacagagtccac

SEQ ID NO: 91533 - DNA, 525 bp, Zea Mays
gtttagcatcttgaggtagagtagaaattagttaagtcttatgcaagttgtcgatctgtggacaatgttatgttcatgttcatgtctgaaccaatgtttctaatggtgttgtggcttttgtcgtccaactttgcaagactacttcttttgcctagaataaaataagttgtattgctcacatgatgtatgagttattgttttatttgtactatgttcttccttatgttttccttaagtctatgctcgtcatataattaagtttatattgaattgtttcccaattccatcatgggagattcaccatagaacatgcaacaaccaaatcatacatcatctgggccaaatgcaagccaggggatcgaaggaaccatatggccatgacaatttgctcaacctcctaactttgatacacatcttggtgtaccatagcacactatgaattcctagatggctcctcctccttggcctcctaccaattagttccccacacctaatttgccataagtagatgcaaaatcaaatccc

SEQ ID NO: 91534 - DNA, 474 bp, Zea Mays
cagggccagaaatgcttgttgttgatcatccaaccatacaaaagcctgtcctttcttcagcaattttgtcaagggttgactgataatgccaaaattttggacgaattttctgtaatacccagctagacccaggaaactgcgaatatctttcacatttttgggtgtaggccatgatttgatcactgctaccttgtccgtgtctattgcaaccccttctctgctgaccgcgtaacccaaatagtgcagtttgttttgggcaaaagcacactttgacaattttaccttgaactggtttttgtttaatatggagaacactgccttcacatgagccatgtggtcttcccaagtttgactgtaaattaaaatgtcatctatgaagaccactacacattttcgaaggaggggagctaggatagagttcatggtgagttgaaaagtggctggaccccagtgacaccatacagcataactctg

SEQ ID NO: 91535 - DNA, 284 bp, Zea Mays
cgatgttatatttgcaataatatattttattcttacgtgtgtgtatatatatacacatgtgcaaggtagttacaaatatagttcgagtttttggggatttttcttcaaaaaattggtaaaaatatagcatttgcggttgaaatctatagctatcactctatatcgatttatagaggtgactgtttttactagacgttcatgttaatcctcttttattttatctaatagaggtgcactacagtaaaagaggaaacgttcgacggccacattatgtccgatggccc

SEQ ID NO: 91536 - DNA, 666 bp, Zea Mays
aatgtcacggagaaatgactaagcaactgacttgtgaaggtaacaggtataagtgctgcaacagtgaagtatcacagggtcgtaagaatgtttgttttgtttatggcatgctgttatgtggggacattaataccagaggagaaccaagaagcagcagaacgggttagagattagttagatcagttcaagtttattagaatggatagaatcagtttgaatacagtttattagattggatagaataagtctgttaggatatgcagtcgagttattagataagtgttagcacttagatctcctatttggagaatattcggttggccttaggcctatatattcaagattattgttagcaagaaaaggcaagcactgaaatcaatctattatcctctaccctagcttacctagtctccctcctgctagtcaccattgatcatttgatcgatggcgtccttccggcgatcaccactatctgcgcagtgaggggcctgcgcctccgccctacctcttccacctcaacaaccgtaacacatgcaatctttagaagctacgtgggatatgatattgaacatacttgtctgcatctcactctggcagcatggaattgtatctttttgcaataagaagcccaaaggagctgcaattcattgtttaggagtgattata

SEQ ID NO: 91537 - DNA, 499 bp, Zea Mays
atgctgaagtgcataactgaaaccgaaggcatacaaatcctccgcaaagtccacatctgaacttgcggctcccactcaggacccagggccctcgctgccaaggtgatttgccaggtattttactgtcccgcaataatttgtactgccaatcgagtcacgaggtcatgcgaagcatgccaaaagttctcctctcgctcaggcagcccttcgcaattcaccaagctcatcgcccatacatggccacttcaatgctgggggctggacatcgttggaccactgcctacggctcaagggaacctcaaattcaccttcgtcaccgtcgaatatttcacaaagtggatcgaggccagagcagtatccacaataacatcgaagaccgctcaaaaattcttctagcaaaacattgtctgctgcttcaaagtcccatccgaactcacaatcgacaacgtcaaacagttcgacagtcaagacttcagggatttctgcttctccatcggca

SEQ ID NO: 91538 - DNA, 722 bp, Zea Mays
gtgcagaagacttggcccagaaataaaaaaaaagaagctgtgtgttggtgctgtcctatatgcatgtcccaatcccatctccatgtaatggtcttcttcccttcccatccatcgtccgtgagctccgagcgtgagggcgagaggcgtcgctagctggctctcacggccggcaaatctgcgatcaactgcaggtgtgtacttgcctgcaactcatggagattcagcatgcatcgcacagtttgcttgtttattcttctctaaaaattggtcgtcatgggcctggtcaactcgtcctgcagactctgctctagcactctgcaggctctgaaactctgcgtctcatggccaagattagttcaccgtatcgatcactgctgacctttcgaccttgaatgcagacgctagctgtcgtgcaagtaagtaggttgacttgccagaggttcaggttctggctctccagtcgagcctaacctttctgtttacttgattctgtagtgtgtgcgtgtatctccaataaatcctaaacttcgcgtgaacttcgactccgccctgatggaatattaggtactcagcagctatcgcgttctctatctcatttttatttgaaactttataaatctactactttatatatgacctgctacgaacagttttacaatcatcggcggaccaaattcaaccgaggtagtcacatctctcatgagtcatcctccaaccattcc

SEQ ID NO: 91539 - DNA, 1281 bp, Zea Mays
atcagaaacaatctaaacgataccgcatgatgatgacgtcacgatcccgttccctcgcgctgccaggtgtaacggctgcctctatataggaggaggaagactggaagaggacaggcagtaggtcccacgacccttccagggaagagagtgttcgtgacgcgggcggcccccaaatccgcataacaatctctgttgcccccccgccaaaatcctcagatccccttgctgcagtgcagatctctctataatccgcgctcgtggcgacctctcctccagcttccgttcctgaaatccatctctagtttcgccatttgggttttttctcgagggtttcgctcctcactcatctgatttaacgaagggagctgggtcacacccacaggccgcggcttctgaaattcgatggccgtggctgcagcgcgcctgacgctcccagatcgattcgacgaggtttacatagcctctgcccggtgaaaagatgggctcgtgggttatacgcgcctcgcacatgcacgagctgaatttcttctcgccttttcgatcatgacgtctttcgtttttttgacgtatatgattttccctggtgctagcgccgagcgcaactgtggttgagatccaatgctcctcgttactccgtccacctttacctatggaccagtttgcatgtagttgcagtctttttctaatgtcgataatctgatgttgtggctagttctcctcgagtggcaatataatattctccggatgcacatgatttggatcatccgctgtggagtttagggttttgttcaggttttacaggctctgctttctggtatctagcagtgtttgtttctttcgttctgaatctcgcttttcgttctgaatcatctctcgtttcgggacatcctgagtcatctaattttttccttttgaataacgtctcctactaagacgggtatacccttttcaagcattggatttatcagttattattacccatgtctctcctttttcttttcaagaatatatctcttacttattatttatatacatcatgataagcctcagcactaagagacaatgttcatatttgtgtgtataaatagggaagtcaatggatcaggatccaaatgttttttcacaatatggttaattaattttagtttaaaaataaataaaaatatacatttaaataattttagtttaaaaatcatatgaatagagtttaatcctaatctaatttgatctttaaattttatagtctaaaatctaaaccacattaccacctctatgtacggt

SEQ ID NO: 91540 - DNA, 613 bp, Zea Mays
cgagtgaccaaaccttgtaagcattatgctcctgtaccaaatctctggtaccgatgtaagtacacacagtgttgaaagccatcaaacacgcttgcacttcgtttccacttgtaattgatggccttctgatgccgaagcgtgaccgtatgggacgctggataatacccttcacatcttccctctcactcagatcattcttcacatagaaccactgtttcatccaagtgtccgaccacttcttttggaatgtcggcacgggatacctcacatcaaagcggtgcacaaagctgtagcacccgaagttgttgtgatactgtttcttcccagttgcttttgtctggtaggataattcatgaatgttgcagaaacatttggcatctggctccagcccttggctcctcatggcccaagtaaaagcccccactttaattaaagcttcgggagtaagctgatgaaggtatatctcaaatgtctttaacacttcaaccagcatctcgtgcaagggaaaacaaaacccagccttcataaaactcttaaaaaccattacttcgtctgtttcaggaagaggaacgatactctcttccccagccctcacaatggatatatcatggaa

SEQ ID NO: 91541 - DNA, 742 bp, Zea Mays
gtaaactgtgtttcttaatggatccatccaaaattcttatttggaatgtgcgaggtctcaattctcgtgctcatcaagattctgttagagaattagcgctgtccgttaaggctgagttggtatgtttgcaggaaactaagatgcaatttattgctagaagcaccttaatttctgctttgggtgctgaattttctgaatatgtcttcttgccttcgattggagccagtggaggaattctggtggcctggaaaaatcacttgagattcacaggtgcgagcagagttgataatcacagtgtctccattcagttccataagcaggaagggggtacctggtggctaacctgtgtatatggtccccaaggggatgaagagaagatctcttttctgcaggagttaagaaatgtaagagagggctgcaatggaccttgggttgttgctggggatttcaacttaatttacaaagcctctgacaagaacaacaacaatttcagcagagctatgatggggaggtttaggcgctttatcaatgatctcgcccttaaagaaattcctctccatggttggcgttttacttggtcaaatcaacaactggagcccgttctggtcaggttgcacagagtcctatgctcagttgtctgggagtttcttttccctgatgtgctgctgcagagttctgcttcccaagactctgatcattgcccattaattctgggtcttcgagataataaatcagggagtcg

SEQ ID NO: 91542 - DNA, 287 bp, Zea Mays
tccaaacatcacccaaactagcccgcgcgcagcacccaaactagccaggccgcccactgtcccaactcccaaccaagcaccaggcgctcctagggctaggaaccctagccgccgcagcgccgtcgatagccggtcaaggctccaacgtccttggctccgatggttgatgcttcctccgctctcgtcctcgttcgacactccgactgaccgccggtgtggatcgtgctgtgctaatgcctcctctccttcattcatctgccatggtccttgaccagctagaagttccc

SEQ ID NO: 91543 - DNA, 446 bp, Zea Mays
gttcgacctccgatgtccaatattagctccagggagatggatacgcctcaaatactgcattcacatgtaagtccaattgttgtatttgattcttgattgattaaattgttatgatcataatctgtggtacaaacaacattgtcaatgaattgcagcaaaaaacattgatctgaatatagtgccaacagtagggatgactttcaaggatattgatgatgcatataaattttataaaaggtatgcatatgaagttggatttccattgaagaaatacagggacaagacattcagtaagtggataaattgttcacgtgaaggtaaaagtgcaccaaaaccaaatgatacacctaggatgaggaataggaattctggccgtacgcaatgtaaggctggaatcaaattaaaaaatatatgatgatgaaaaagaaaatgtggtagctgcaaag

SEQ ID NO: 91544 - DNA, 294 bp, Zea Mays
gggggaactccggccatggcggcaccatggttgtccatgcgccgccgtcctaggttgggcggagagagaaggtaagggagggatcacggcgaccgtagattcgccagtgaacgatcgtgattaagtgtagcgtaccctttcgctccatttcaatctagccatagaacgtcgattagacgacaccagaagacttcagttattagccattcatctcggatcgagcgggtccgactcggtcgcggacatttttaaatccgcgccctcgatccccaatcgaacgaccatagaatcgcg

SEQ ID NO: 91545 - DNA, 490 bp, Zea Mays
cacaaattctatcataaatagtttctagggaaatatctatttcactagtgtcaaatgtcaaaaccgtatgattttcatatggaattgctgcatccctcaatcaggatgaaccgatgaactagagacgggacgggactttaatgggcctgtttatttcttctacttctaggcatgaaacacttgttttttagtccgctttcgtgagaatagtttctataaaaatctctcaaatcaacgtgaatgtagaattcgtcaagttgtcgctatggaagaatcggtctattcctaaaccatgcagacttctttatcttcctcctcaagaaaggcctgtaatatctagattcttgtgtgttgggtacttgatttcaatcctctgaagtcattgagaaccaatacaacacaagttaaatatgtaaactttcgtccttgttttaacacttcttcaaagtgttatcatgaaggacgaagatcttttcaaaggaggtgcgac

SEQ ID NO: 91546 - DNA, 518 bp, Zea Mays
ttagccttgaatgacgtgatttattttcttttgattgagacattgattttgcttcatcttgtgtctctttgatatttttatttatttttggacacatttttatatttgtcctgctctttttctatctatttcatagaacatgtcctcaggtcttagcgggttgtgaccaccagatcgtccatccctctttcctttgtaacatgtttcatttctatcaaatgaactattatatgatgacttctcttttggaagttgttttcattagttttgttatcattgtcgatacgatttatttgattaaaggaagagggagctcttcactctaaaccagttaatctgggtcgagtgttactatgtttgattgagtctcgagtgcttgtttcttcaagtctttacctatgggttgagtctagtttgcaaatttacagcatgacttcatatagtttagaaactatttttggtggttctctagcgaagtgtgattcacattgcccctttctaagcttcttaattgccac

SEQ ID NO: 91547 - DNA, 455 bp, Zea Mays
cgtgagtgattgatattcagttttacctatatcttgttcttgcttgtttcttcgattgctcgcagaaatagaacttcgtgttcaggttgattttgccagcagcatggtcaataaccatttggagttgattctgcgattgttaaggcgccacgacctgtccgtttgtagtcagatcgcgagagtcacctcctccaccaatcgaaattatccacctcactgaaaggtcgggcactccagctgtatcaagtggtatcaaatttttaggttgctcggtgagttttatcccttagtttgagagttattcattgtcccaatgtccatcagaaaagctacaaaaaatttaggctagaaccttgtcctagaaccatttggccttgcacttttctttcagtaatcttgtgttgttgaatttgtgtgcatttgcatcaagtgttgttagttgcctcgtagtttcg

SEQ ID NO: 91548 - DNA, 360 bp, Zea Mays
caataagtttggaaggaaaaagagacaactacaaagggaggacactcacatgaaagagaaggacatcaagaacaacaacacctacttggacaacgagatcttcaaaacaatcaatggtgtggttgtaagcattctaaatctttttcattgtgagaatatcaggcttaagttgtttattgtaaattttataagccttgatcaagatgcttctccctatttgtctttaaaaatgagtgcatctattcaattcatttcaaataccttgatgcatatctttagggggagcctatttctatatcttgattattttgagactaacactttattttagtaatctcatatggtatcaagtatgagaat

SEQ ID NO: 91549 - DNA, 509 bp, Zea Mays
gacaatctttgctccggcacgatcagggatgcaccctagaatttcttcgtcaacaccaccaaagagcacgtatccaggcttgtagccgccagcaatagcgaattctttcagctcagagatatcttcttcggagagttcctagccacccaagtgacgtaggtccaactcttgttctccgaagaaactccttctaattctttcatctttaagggaaaagctctaccagcgtcactttagccatttccctctcaggatccacatcagctataatcttgtcaatctccgacattatggttccaagagggccttcgctattttcagcttcagcggtcgtttaatgagctttggcatcgatggggcagcaatttttctgtcgagaccgggggtggggtcttatggatagccctcatcacagccatcatgcgacgtttcttctgaccaccctcatttcccctagtcgccgaagtagtcttcttctcctcttccgcacctttttcaacccctttttc

SEQ ID NO: 91550 - DNA, 583 bp, Zea Mays
ctttgagtccttttggaccaagattgaaggctttcatgagactgtccagacaacatggagctccgttgaggctgacagttccccttttctaacccttgagaagaaattaaatgtgacaactaaaagattgcagggatggagtgagaagcagatgggtcatgttagatcctagttagctttggcaaaggaattgttacatatgcttgagatggcataggatgttagagccctcaccctggctgaagtctggctcaagaataagcttaagaaacagcccctgctgctagcttctttcaaacacactggcaagagtgagatcaaggatcacatggcttaaagaaggagatgctaactccaagttcttccacatgcatgcaaggcatcgcaaaaggaagaatctggtggctaaattggttggagaccatatcctaaccaaccatacgaaaaaagcaacaatggtggatcatttctataccagcctcattgggcagtgtggggacaaagaaaggacaattgatctggaggctcttggtctaccaagacatgatctgtttgcacttgattctccttttttctgcacttg

SEQ ID NO: 91551 - DNA, 630 bp, Zea Mays
tatctcacttagtcactttcacctaggccccatgtcttaccttttcattttttccttttgtcctcctcccttcttcctcccatgcatatgaacgaacatgacccctctaggtgcgcccacacccgagcgcaactacgaaggaggacacacattgtttgttgtcggtggctccagtgtgtccattgctatgaagtgatgtgcaaaggtgcacgcatgcatgggtagctcccatatggccccaaggaagcacacgactggcagcatgcggctcccgcacagtcgtggctctaacacaagggttggtagcggccatgagcctcagctagcgggcgtgatagtggccaagctcatgacatccatggaaccacatgcattgagaggtcacaatgaggaggaaaagggggaataaagaaataaaacgttaattttgtgtcatgagttgtaatggtgggtaatttttcctagctccgccaactcaagtttggacgatcaccacttgagatgctccaccgatttggttaatctggtgctagatccatggatttggtggagcagatccaccaatggagttagtggagttacatatgttgggtaaattttttaatccaaatctagtttagatgaatctag

SEQ ID NO: 91552 - DNA, 844 bp, Zea Mays
gtcatttgccacctcatcctccgcattgctaatgatgtttggggtatggggggtgatactcacaagttgccagcatcggcgtgcgtagttacaccttaggaacaagtggctaacaatttcttctctttgcaagatacaatttttataggtgtatgattccaattcgatactccttctgagcagtgatctagtatttagcatgtcctttaaaagtagccaaaagaagaccttgtgctttggttggcatttcgatttccatagccagcgatatatcggatagaccgtttcatggccaatcatgtgcttataggctttctgcgacgagtactgctgcgatccccacatgtactaccaacggtctagagtatttgtgatctggtgtttctattgggcctccccaagcagcataagttgttgaaatgcttccgcggacatgaggatgtggaatatctctacggggtgtcctagagtttttgcctggaacatggttatatgtttatttactacaaacaacattagtttagggtacgtttgtgcatgcacctggctatcccatctatcaattcatagctgaatggattgcccgtcctccacatcgacttaggcaatctccttgaaagtgttgagtgtttttaggatacccttcaaccagaacgacccaacccttttggaaaacggcagcatctcatccttataatggttgtcctagacaatattcacccacaggatatccatcctgttaaacgttttgtgaaggtttttcatgaggagcgcttcattttgctttggcaggtcaagcagacccattcctccctgctgctttggcctacacgctagggcccac

SEQ ID NO: 91553 - DNA, 701 bp, Zea Mays
gcaaggcgcctgcgtcgccttgtttcatacgaacgggcaacacgtgcatacggagcatcagccatgggcacaccgcgacatgtaccacgtgacacacacacctagcacttgtagaacatgaatagcgcgcacgtgaactgtaatagagaggcccccacataaaaaaacatgtaccatacacctttcaaacaaatgtaaggaaactgaatcaatggttaattgtatcatatacatactaaaacatatagcaaacttaggcaaacaattagccacatgcgcataaaattcacgaagcaagaacatgtaaaaacgccaagtaacaaaccctagaaaatacgcgagaatacaattcagaatttatttacaaaatatttagatcgtaccaaaaactacaaaactctaagcaggctgggcaataggcagcgaacctaaatcagaggctaccacccagcacctaactgcacataagcataaaaaaactgaagttcctgaaatatccgagtagcaagccaaggaaatgtgatcaacatgtggataatggagttcacttaatttaaaatagttatgtgaaggtacccaaaagaagccatacatgggatttgagttcaatacacttcacagttttgactccaccatttcaaggaaaacacaataatgcaccggaacgatagaagcacaacaccaacacaccgtatgtgcag

SEQ ID NO: 91554 - DNA, 277 bp, Zea Mays
gttctagctagcaggagtcaagctgcacatgagttcagctttccacccccaatctgatggacaatcggaagtggtaaatcgaattatcaccatgtatcttcggtgcctggcaggggatagaccaagagagtggctttaatggcttccatgggccgaattctgctacaacacttccttccaaactgctctccgatgctctccatttaaggtggtatatggccgagaacctcctgctcttctgccctatcatccaggaacatcacaggtggctgctgtt

SEQ ID NO: 91555 - DNA, 467 bp, Zea Mays
gctgtatggacggcgggttgaatccctaattaccagggggctcatatgtgaaaagaaccagcgaagaggtatgcgcggatgacgaccgtccgatcaaaaatggacagccacgattagatgcacggtggatataaccctgattcccgagtcaccgtcggatccgagatcgacgcgaggaggtcgtcgacccaagatagcgtgtgggccatttgattgggatctacgacccagatcttattaacgcgaaccggtatcctgattctaatctgagccgtacattcacaaatcagtggccaggtcgcaccctcctcttcccggttgaacgccggcgacaaccagtgaagccacggtggcgcgccatggctgggagaccccccgatggtatatgatgcgccattaaccgatacgctaggtgccaaataaagctaggacgacggcggatccagggagggggttggtactcacaa

SEQ ID NO: 91556 - DNA, 297 bp, Zea Mays
tggaatagttgttgatcctaacaaagtgcaagaggtgatgaactggaagccaccaacgactgttcgtcagattcggagttttctgggattagctggttattgccgaagatttattccagatttctctcgaattgcgaagcctataactgagttgctgaagaaagaagccaaatttgtttggagtcagaagtgcgaagatgccttccatgcattaaggcagcatctgaccacagcaccagtattggcgcaacccgacaacagcaagccttttgatgtatattgcgacgcctctggcac

SEQ ID NO: 91557 - DNA, 476 bp, Zea Mays
tggtgatatcctcatcagcatttcttctagcttttgccttgtgaatgactagaccactaacaatgggagcatctgggggaggaggattagtcacattgtccttgccaccttcatcatcgcttgagggctcctatgcttgagaatttggagccatacgcgagcgactagttggggtgtgagcagttcgcccacaagtgctctaggaccccgaggccccaacatgcccccataatctgccgagggccccttcctcgcttagacctagaccgagcaggggtctcctcatgaatctcctggaagtcatcgtcagagttgaactcaacgaccgaaggattccgacgatgaatcaccttgaactcaaaagagaaacacaagatataagatgtaatgattttcaaggaattacaaaacacatgagaagaaggaagggtgaacttgtgcatgtatggtccaatcgttcatgtgaattgttcgac

SEQ ID NO: 91558 - DNA, 319 bp, Zea Mays
gagcatattccaagtccgaagataatgcactatctgcgaccttcgggagccgaaaatagaaaagattaaatagggtttttgatgctatagtatttgtgtaccctgactatcgctacccgccacgggggcagaaaagaaagggtgcaacctctggaaaggttgccgcttcagctgctccaagcgagcctgcgccgaagagtaaaaaattgaaagtcctcacccaccggccctgctatattgaaccggccatagtgcctgagtttagaggggaaccttcttcagctactgaagcgaaaggacctgctcctcctgcacagaa

SEQ ID NO: 91559 - DNA, 324 bp, Zea Mays
ccaagagcctacctcaacatatcgctacacatcaacaccaagatgttccaactcaatgtcttgctcatggaccttggtgtcaatgttgacttcatcctttgcatgccatggttggtggttcttggcaacatcatgtggaactttgtgaccctagagatgtagctccaattgagtggacataatgtgacctcactagtgtctctagccactgagcaccatcaaacgtgcttgcttttctcaccatgatgcaacatgagcatggcaatctgactgcatcaacccaacatcattaacaatatcaacacacatgtcatcatcttcgac

SEQ ID NO: 91560 - DNA, 904 bp, Zea Mays
tcacggtgccgttacaccgtttcctccgtcagccagccacctctcccacgtttcatgtttctaaaaccgtagtcgcgcattcaacggagacaaaccagcgccgatttgaaaaaaaccccagccgcgcagattttcctttcgtcggaggcgactccccaggcgatttccgcgcctccaaaccagcgcagcgccaatccaccgccgctccaatccagcgcccttccattccagcttacatccttcaatctcccatcattggagcccgattcaagaagttccaggtaatccaacattgaaatacaccgagtttgccgtcgattttttgaagcctatcggtcgactgaagtggatttgattgtaacccttattctccagctaaatgtgtgatttgtatccgtttagacatcactataatcgggtcattgcatcgtgcattgcatctcttttttgtttaggagccccgatattatggcatgtgtatttattctatattcccactatcgcccgacattcatagatttagacaaaggctgtgaattaggtatttactgatgagttagcatagagtactcttatacaacccaagtaacacatatatgctttttgtatgtaatatatatgcatatcttcagtactgtttatgcacattcacctgagtcatttgtttacacatttgttttattatatatgcatatagtcagtactctttatgcacatttactttaatgatttgttttcacatctattttattatcaaatatgcttatttgtatttgatatatatgcatatcctcagtactgtttatgcacattcacttgagtcatttgtttacacatttgttttattatacatgcatatagtcagtattctttatgcacatttactctaatgatttgttttcac

SEQ ID NO: 91561 - DNA, 1011 bp, Zea Mays
aaattcaagatctaatgagcgtttcccctcactcaatttcatgaacggctacccaattggttctggccacggtgacagagcggataatcaaaggaacaacatgttcccagtgatccatggcggtctagttcaatcagaggggtcgaggagcttgaggagaacttaaggacgctagaacaaacgaccagagagcttgaactaacctggagtaagctggtcgcggcgagggtgtctctgcagtggcggaaacaggtttgggggaagcaagaaattcgcggtctctggtgaacgatttgaggcaatagctggtgcgttggcttcgtgataacatggcgcaacagacccgaccatcaatttatagtatcgctaagcagtggccggggatttggatgaagacgcgcagcggtcggaggaagaggaggtcactggcgcacgggattagtggatgtacccgtggcaaccttaccggcaaccgctggataggccagcacgagtcacggcggcgtggttaaagtgctgaggcatatggcatcagaccgtgagatgtctaacattggcgaggggtgattcaaggtgatcgggattgagcggacatggtggccggaccaaaagtgcccaagactcatctgggggaaagaagatctttttacccatgagcgttatccgagcgccggtgagcacgaatctcccaggagaaacccggatcccagcacgagctcaccagcgatgggtgcactgcacctacgatcttcttcagaccactattcattctaaatctcccttcgaagttgcttgacaacccatgtttgagccacaattactccctgctctaggcagtaacacacctacctttctttgacaaagttgtactccaatatatggtctccaaccttgtcatagtgacccaagtcttaacttcactggattagtcacaacttgactccaaagttgatccaatgtcactgatcatccaattttcagactgttttagtctgacagcccatctttggg
